United States Patent Application Publication US 2019/0348154 A1 - sequence listing, part 124

SEQ ID NO: 467956 - DNA, 1068 bp, Shigella boydii
atgaaaaaaaactatctgacacttatactgccgtcattattgtccggctgtgccggaatttccggcggcaataacgtggcaccatcagatacgcctgctctggtttttgttgacggacaaatcagtgagagtgctggcgtcctggcacttacgcaacaacgactttctccacctaaaataactccgcccccgagagtcagcgtgccagagacagtaaaaacagcacagccagtaagcgaatcccgaccgttaccttcaccaacaataagtcagaatttctcccggttaatcattacaggcaagcctggtagcacccctgtaacactatcgccgacggcccgtaaccggaccgtcagtcagtggataaaaacattactaccggaaggatggaaattcagacaagagaatgcagccacgcccaaactgaataccaaactggtttcatggtctgccaatgatcagtggacccgttctctgaaccggttgctggaagaacaacacctctggggccatctggactgggataataaaacgttgaccgtcacaacatcggctgctgcaccggcacaggacacggcaaccactatctcgccagcagccatggtaaccacatccacttccccggagtcttcaacgacagcaaatagccagaacaaaccacgaaacccattcaggggaaacagcgtatctccgtctacgcccgcagcaatcccgactccgaccggctctacagtcaagtctatcccactcatgaccgggacacctgtcaaaccggtatctcagggtaaagagtggcgtgcgccggcaggcactacattaagggaaaacattattaagtgggcagaagaaacaaaatgcgaaagcatggcatcaacgcactggatggtcatatggccactttctgtaaccgattaccgtcttgatgcgcctttgatgttccggggatcatttgaatcagccatggagcaggtatttgagttatatcggactgcgcaaaaacctttatacgcacaggcttctcgcatgcagtgcatcattacagtttctgatacaagggatggtcgctaa

SEQ ID NO: 467957 - DNA, 594 bp, Shigella boydii; identical to SEQ ID NO: 84336

SEQ ID NO: 467958 - DNA, 375 bp, Shigella boydii
atgccacagcaacatcccggacgactgcaaatactggtcgtcgacgcacactgcaaacgcaggctgttttcaacgaaaacaccgacagaccccgatgagcttgcccgacgtttctgcacgccggataactgtctcgtggtggtactacgcgacaaccgctttctgttccgactggagcgtgctcccggcagccactgccgctggcacaagggcagcagctcccgccatcagcatctacaggactggctatttaaaagtaaaaacaactgcaaatcatttgaaactaacaccaatttactggataaaaatggtaagcctgtggaaataatggtgtgtgatgatcaggaactgcatttttttgttccaaagaattaa

SEQ ID NO: 467959 - DNA, 684 bp, Shigella boydii
atgaccacgacagaacatcccgtgcgccagttgctctggtgtgcactgaatgccctgaaaacggcacaggaaaaccacaatataaccagtgaaaccggattacggcattacctgcttgaatggctttctggtgccagcagacatcctgagttccgtagtctccctggcgaaatcatggcgttaaaagcattgaccgaaaaagatcgcaatattcccatcatcggaacgctgaatacgctctttctcagctctgccactgtcggggaatgtccgttgtttcgttttcgggctgcactgggtaaattacagaaagcaggctggcgcacatatgtctgcccatggcctgagagggtgttcaatgaatccattgaacgggcctgttccgggaaacgtcatctgctacaactaagtcgcaccgaagagtgttttctaccgacaggcgatatgagggcaccagttacgttgcagctgatcactccactacaccgcaaaactatgcagcttctggaaacggcagagttaatattctccgacgaaggatttcaggtggtgagaggatacgaacatcaattcgggatcgaacgcagagaaaccctctttcacaccctatttatcgggctgcccagcttgccagaagatgtctggggtgcaacacaggagcagacgactatcacattacactga

SEQ ID NO: 467960 - DNA, 534 bp, Shigella boydii; identical to SEQ ID NO: 8468

SEQ ID NO: 467961 - DNA, 288 bp, Shigella boydii
atgtcacctcaaatgatacagaaactcccggccatcactctgttggaaggcatgtttcccgagctatcaacaaaccagcttaaagtctgcgttttttacgcaatgggtgttccttacgacgccattgcccagaactgtcggctttctcccgaaacggtacgaacctacctaaagcgaagcctgaagaatttaaatctggaaggatatgatgcacttcgctctgctgtgctgatgcgaactttcgttttcatgattagcaatacagctaaagaaaacgaaaaaatgtga

SEQ ID NO: 467962 - DNA, 495 bp, Shigella boydii
atgtgtgattcagaagcggagaagattttattcatcctgaataaacatgaacgggcatacagacgcctgatccccgtatatatttttttagctatagtattatggattttacctattctcctgattatatacctgtatttctgtatagttgacaatgagtttctcagaatcggtttctgtattgcatggacagcatactactttctttcgcttttcaagtattttgtaaaatacttctttcctctcgatcgtgaagatttgcttaacctgatggatctcgccaaagattctcctgatgcgaaacaggagcttcttgagcgtcttttgtccggaaaaagaatgaccgggcgggatgaaatggatatcaagcgcattctaaaaacaaaggaagcacttgataacatcaggaattttattgataaacagcagttaacgaataatgatactccgaagaaaagcacggtcccaaatgaagataaaaaaggcataagatga

SEQ ID NO: 467963 - DNA, 1053 bp, Shigella boydii; identical to SEQ ID NO: 12945

SEQ ID NO: 467964 - DNA, 591 bp, Shigella boydii
atgactcagagccgccgaccgtcgccactgcagcggagagtgctgattgtgctggctgcccttgatgaaaaacggccgggacccgtgctgacgcgggacatagaacgggtgctggagcgaagcggggaagccccggtctacgggccaaacctgcgcgcctcctgccgtcgtctggaggatgccggctggctgcgtaccctgcgcgctccgaacctgcagctggcagtggagctgacggacgccggccgggccgtggcacagcctctgctgctggcagaacaggaccgcctccgggcagaacagcgtgcggcagaagtcgtcgtactgccgctggtcccggcagcaggtctgcccgcagacggcacttctgccactgatctggcggtggagctgaacggcataacgtatcaggcctgccgtggggattttgtggtgcgtctcgacggcagcacctgtctgcagttatggaataaagaaggcagggtggtacgcctggagggcgatccgctggaagtggcgcagtggctgcaggcctgtcatgacgcaggaatagaggttcgcgtacagataaatgaaagtagcgtcccgtaa

SEQ ID NO: 467965 - DNA, 255 bp, Shigella boydii
atggatgaagaaagggtgttttcactcagctatgagcaactaacccgaatagcggaaaaaaatatccgtgaatgtgggctggacaaccagagcgccaggtgtatcagtgaattgaaggcctcagctctgctgtggttgtggtatgaactggccattcatggtgcgccacagaacaatcacgcacaggcccgggaacgcatcgataccgattatcagcgcctcaaaaaactcatctggtcggagggtgacagttaa

SEQ ID NO: 467966 - DNA, 414 bp, Shigella boydii
atgttttttattgagaatgaaggtcaggctgtcgccggaacggattactggcagtctgtacaggcgcaggccggatatgtctacctcagctggaatgccggcgcagccaggctgcttgtcccggatgcggcaaaacatttactcagggagatgcggggggctgagtacgtcatcatcagtaagggagcactgcatggccgcgatgcgctggaactggtatttgaagacggcagcgatgcgccgtttgtgatccacatgctgagtgagcagtgcgatcgcctgctccccgaaaacaaccagggagggggttttgttgtcaccgtctggacgcgtggcggtaaccagctccgttatccgggaaagtaccgtgttgtggaaaacctgcccgacgtttccccgtggagtgaacactga

SEQ ID NO: 467967 - DNA, 780 bp, Shigella boydii
atgcagcacctgccggcaccgatccaccatgcccgggatgccgctcagcttcctgttgccatcgattatccggcagcgctggcactccgccagatgtcgatggttcatgatgaactgccaaaatacctgctggcccctgaagtgagcgccctgctccattacgtgccggatctgcgccgcaaaatgctgctggccacactgtggaacaccggtgcgcgcattaatgaagcactggcgctgacgcggggggatttttcgctcacgcctccgtatccgtttgtgcagctggccactctgaagcagcggacagaaaaagccgccaggacggcaggaaggatgcccgccggtcagcagactcaccggctggttccgctctccgacgcctggtacgtcagccagctgcagacgatggtggccacactgaaaatccccatggaacggcgtaataaacgaacaggcaggacagagaaagcgcggatctgggaagtgacggacagaacggtcaggacctggattggggaggcggttgccgccgctgccgctgatggtgtgacgttctctgtcccggttacgccacatacgttccgccattcctatgcgatgcatatgctgtatgccggtataccgctgaaggtcctgcagagtctgatggggcataagtccatcagctcaacggaggtctacacgaaggtgtttgcgctggatgtggctgcacggcaccgggtgcagttttcgatgcctgagtccgatgcggtgtctatgctcaaaagaattccataa

SEQ ID NO: 467968 - DNA, 645 bp, Shigella boydii
atgcctgttattgctaatacgcatcccaaaggtggtgtgggtaagacaacttcatccgtaaacattgttggtgaaatgaagtctgatacagttgatctggatactcataccgggctttctatcattctggggctgagacctgaaggaaaagaaatttccgtgaaagtacccaaaacagtggatgagttaatcgaaattatgactccctacaagaacagcgataagacgttacttattgactgtgggggatttgactcagatcttacccgtactgcgattgcctttgcagactgcgttattgtcccttcaaaagactccctgactgaacgtattggtctgatgcattttgatggagtactggacgaaatcagctctatcatggggaccgatataactgctcacctgtatctctgtaaagttaatcctaacaagaagaaattccctaagcttgatgcaatcctgccatcgttcaaacatctgaagctgatgaagagccgcatttctgctcgtgcagaatttgaggatgtcattgagactgggatgggaatcactgagtctgttcatgggcgctattcggcaggaggtaaggaagttattgccctgatcgaagaaatcaatcatctgattgaaaataacaaacagtaa

SEQ ID NO: 467969 - DNA, 309 bp, Shigella boydii; identical to SEQ ID NO: 8541

SEQ ID NO: 467970 - DNA, 981 bp, Shigella boydii
atgaaaatctttattgatgatggttctaccaacattaaacttgcctggttggaggatggtgacgtgaaaacgttaatcagccctaacagctttaaaccggaatggtcttttagtttactggatgatgctgctccggctaattacgagatcgacggcgagaagttttcatttgatccattaagtgctgatgctgtcgtaacgactgaaacacgctatcagtacagtgatgtgaatgttgtggccattcagcatgcgctacagcagaccggcctgaaagcgcagcctgttgatgtcatcgtcacattgccgatctctgaataccttgacgccaacaatcagaaaaataagcaaaacattgaaagaaagaaaaaaaatgtgatgcgtgaagtacgggtgcaggggagtgatgcatttgttattcgcagtgtttccgttcttcctgaaagtattcccgctggtttcagtgttcttgcggggcttgaggatgatgaatcccttttgatcgtagatctcggtggtacaactcttgatgtgtcgcatgttcgtagcaaaatgacagggattacaaaaacctggtgtgatccgaatatcggcgtgtccctgattacatccggggttaaggaacagatggctgtacatgctaatacaagagtgagctcataccaggctgacaatatcattgtgcaccgtaatgaacctgactacctttcccgtcgcatttataatgctgaacagcgtgagtctatcattaatgttatcaatgaacggcagaagttgcttattaaacgagttaatgatgtcatcagccgtttcaccgactatacacatgtaatgtgtgttggtggtggggctgaaattgtggccgaggctgtgaagaacctgactaaggttcctgatgagcgcttttatctgagctcatccccgcagtttgatttagtcatgggaatgataaaaatgaaaggtggtgtgactaatgagtga

SEQ ID NO: 467971 - DNA, 417 bp, Shigella boydii; identical to SEQ ID NO: 8543

SEQ ID NO: 467972 - DNA, 222 bp, Shigella boydii
atgaactatgcaggacacgaaaaactgcgcgccgaagtggcggaggtggccaatgccatgtgcgacctgcgtacagccatgaatgagatggagcagcggtacagctttaatgccgacaccctgccggaacgtctggtgcgtcagacgctgtttcgcgcaaaccgcctcctgatggaggcatataccgaaattctggaactggatgcgtgctttaaagattga

SEQ ID NO: 467973 - DNA, 435 bp, Shigella boydii; identical to SEQ ID NO: 21500

SEQ ID NO: 467974 - DNA, 324 bp, Shigella boydii; identical to SEQ ID NO: 464561

SEQ ID NO: 467975 - DNA, 378 bp, Shigella boydii; identical to SEQ ID NO: 464587

SEQ ID NO: 467976 - DNA, 348 bp, Shigella boydii; identical to SEQ ID NO: 464590

SEQ ID NO: 467977 - DNA, 1233 bp, Shigella boydii; identical to SEQ ID NO: 464596

SEQ ID NO: 467978 - DNA, 825 bp, Shigella boydii; identical to SEQ ID NO: 464595

SEQ ID NO: 467979 - DNA, 630 bp, Shigella boydii; identical to SEQ ID NO: 464125

SEQ ID NO: 467980 - DNA, 819 bp, Shigella boydii
atgaaacgacatctgaacaccagctacaggctggtatggaatcacattacgggcacccttgtggtggcttccgaactggcgcgctcacggggaaaacgcaccggtgtggcggttgcgctgtctcttgctgctgtcacgtcagtcccggtactggctgctgacacggtcgtacaggcgggagaaaccgtgagcggcggaacactgacaaatcatgacaaccagattgtcttcggtacggccaacggaatgaccatcagtaccgggctggagtatgggccggataacgaggccaataccggcggccaatggatacaaaatggcggtaccgccaacaacactactgtcaccggtggtggtcttcagagagtgaatgccggaggaagcgtttcagacacggttatcagtgccggaggcggacagagccttcaggggcaggcagtgaacaccactctgaacggcggtgagcagtgggtacatgaaggcgggattgcaacgggtactgtcattaatgagaagggctggcaggccgtcaaatccggcgcagtggcaaccgacacggttgtgaataccggcgcggaagggggaccagatgcagaaaatggtgataccgggcagtttgttcgcggaaatgccgtacgtaccaccatcaataaaaatggtcgtcagattgtggctgctgaaggaacagcaaataccactgtggtttatgccggcggcgaccagacggtacacgggcatgcgctggataccacgctgaatgggggggtaccagtatgtgcacaacggcggtacggcgtctggcactgttgtaaacagtga

SEQ ID NO: 467981 - DNA, 159 bp, Shigella boydii; identical to SEQ ID NO: 34400

SEQ ID NO: 467982 - DNA, 549 bp, Shigella boydii
atgcatacctccgagttgctgaaacacatttatgacatcaacttgtcatatttactacttgcacagcgtttgattgttcaggacaaagcgtccgctatgtttcgtctcggcataaatgaagaaatggcgacaacgttagcggcactgactcttccgcaaatggttaagctggcagaaaccaatcaactggtttgtcacttccgttttgacagccaccagacgattactcagttgacgcaagattcccgcgttaacgatctccagcaaattcataccggcatcatgctctcaacacgcttgctgaatgatgttaatcagcctgaagaagcgctgcaaaagggcctgatcatgagtgaaaaaagcattgttcaggaagcgcgggatattcagctggcaatggaattgatcaccctgggcgctcgtttgcagatgctggaaagcgaaacacagttaagtcgcggacgcctgataaaactttataaagaactgcgcggaagcccaccgccgaaaggcatgctgccattctcaaccgactggtttatgacctag

SEQ ID NO: 467983 - DNA, 996 bp, Shigella boydii; identical to SEQ ID NO: 466416

SEQ ID NO: 467984 - DNA, 1902 bp, Shigella boydii
atgctgcctgatgaacttgagaaaagattagatggaattgaggatgcctcaaaaaaagggtatccagtacgtaatctatacaaaattgcgtgtgagcccggactgtggctgcaagcctacgtgaatatacgggccaatgcaggtgcactgactcaaggagtatcaacagataccattgatggcttctctatcgaaagagcagagaagctggcaaaaacattgcggagtagagaatacgtagcgaaacctgtacgcagagttcagatcccgaaaaaggacggaaaaaccagaccgctggggattccaggtggagacgataaactggcgcaagaagtagcaagaattattctggaaagagtttatgaaccagtattttctgaacactctcatggattcagaccaaaacgttcgtgtgaaactgcgctcagatctattcgtccagtctggaacggagttaaatggattgtggatgttgatatcaaaggtttctttgacaatatcccccacaaactattgctgaatacactggaagagaaaattaaggataagaatttcctgaaattaatcgaacagtggctgaaggcaggatatgtggacaattggaaataccatcgctcatattctggcacgccacaaggcgggataatttctcccttactggcaaatatatacctcgacaaactggaccgttttgtagagcagaacttaattcctgcatatacaagcggtacaaaacgaagagcgaacccagatatgaacaggctggcccataagattcataaactacgaaagaaagtagacggtatggcaactgattctgaatcagaaaaagaagccataaagaaggaaattgaacgactgcttgaagaaaaacgctctataccatctcaggttatgaacgatccaaacttcaggcgtatgtactatgttcgatatgctgatgacttcgtaatcggtgtcatcggctcgaagaaagatgctgaacatatatcaagacaggtcagaaactttattactacttcactgggattggaagttaatgaagcaaagaccagaatccgccatatatcagaaggagttaattttttaggctatgaaatcagacaggcagatgcaaagaaattgctgaagcagaaaatgcaagggcggcacactctccggagatccactacaggaattgtgcagctcttcgttcctgacaatatagccgctaaattttgtcaccaaaagaaatatggctgttatgagaatgtgaaggctgtacatcgttcaagtctacaaaatctcagtgaagctgaaattgttctgactttcaacgcggaaatgcgcggattggcgaactattacagtctggcgctggacatgaaatataaattatcaaaattatatttcatatggcaaataagtcttttcaagaccctggcgaataaacggcgtagttcagtgaataaagtcgccaaatcgctacggcaaaataatggagatctggctattaccgttcaggccaaaaatgggtcccgaaagattgaggttttcaaactcaaacatgtcaatcgcaaccgaacaacgattgtcgatacggaaccgagaaccgcacatatcacaacccgcacaacagagatcatgcgtcgattaggggcaaggatctgcgagtattgtgcgaagactgggcgctgcgaagtacatcatgtcagaaagctaaaagacctgaagaaaggtcgtaaggccggatataaacccagcctgtggcaactaatgatgatcgcacgccgccggaaaacgatgattttgtgcgcaagttgccacgacaagttacatagcggaaaactacccgatttgagacaggaaaagggaagaatactcctgcaaccacctgtctcaagcggggattctgctaaatga

SEQ ID NO: 467985 - DNA, 342 bp, Shigella boydii
ttgagcagtcatgaactgaacgggcgattaagcgaactcttaagtcatattcctcttgaggtgatggcaacctgtgatcgtattatctctttagcgcaggagcgcttgggaaaattacaggacagtatttatatctcgctaactgaccattgccagtttgcgattaaacgctttcagcaaaacgtgttgctgcccaacccgttgctgtgggatatccagcggctttacccgaaagagttccagccaggggaagaagcgttaaccattattgataaacggttgggcgtgcagttaccgaaagatgaagtgggctttggtaatgctgccaacttactgatttag

SEQ ID NO: 467986 - DNA, 1050 bp, Shigella boydii; identical to SEQ ID NO: 467806

SEQ ID NO: 467987 - DNA, 441 bp, Shigella boydii
atgaaaaaaatcagcttaccgaaaattggtatccgcccggttattgacggtcgtcgcatgggtgttcgtgagtcgcttgaagaacaaacaatgaatatggcgaaagctacggccgcactgctgaccgagaaactgcgccatgcctgcggagctgccgtcgagtgtgtcatttccgatacctgtatcgcgggtatggctgaagccgctgcttgcgaagaaaaattcagcagccagaatgtaggcctcaccattacggtaacgccttgctggtgctatggcagtgaaaccatcgacatggatccaacccgcccgaaagccatttggggctttaacggcactgaacgtcccggcgctgtttacctggcagcggctctggcagctcacagccagaaaggcatcccggcattctccatttacggtcatgacgttcaggatgcctga

SEQ ID NO: 467988 - DNA, 291 bp, Shigella boydii; identical to SEQ ID NO: 464666

SEQ ID NO: 467989 - DNA, 453 bp, Shigella boydii; identical to SEQ ID NO: 464256

SEQ ID NO: 467990 - DNA, 363 bp, Shigella boydii; identical to SEQ ID NO: 464682

SEQ ID NO: 467991 - DNA, 822 bp, Shigella boydii; identical to SEQ ID NO: 464328

SEQ ID NO: 467992 - DNA, 276 bp, Shigella boydii; identical to SEQ ID NO: 458859

SEQ ID NO: 467993 - DNA, 129 bp, Shigella boydii; identical to SEQ ID NO: 466432

SEQ ID NO: 467994 - DNA, 435 bp, Shigella boydii
atgaggaaggtttacagttacattcgcttttcgtcaacgaaacaagcttttggtgatagtcatcgaagacagagtaaggccatacaggattggttagccagccatccagaccacatcctagacgaatctcttagttttgaagatttaggtcgttcagcctttcacggtgaccatctaaaagaaggtggagcgctcagggcttttcttgaagctgttaagcaaggtctgataccgccagattctgtcttgctggtggaatcgttagaccgtgtaagccgtcagtcaatcagccatgcacaggaaactatcagggctattcttgagcaaggtattacagttgtcactctaagcgacggtgaaatgaagtggtcaacaaaaactggccaccgagttagagtttttccagtatcgattttccgattcgtttgggggtaa

SEQ ID NO: 467995 - DNA, 225 bp, Shigella boydii; identical to SEQ ID NO: 133446

SEQ ID NO: 467996 - DNA, 933 bp, Shigella boydii
atgccgcagcttaaaggtgtgattaaaacgcccacgggagaaccgctggacggcgcaaccattacactaacctccatacacaaccgtgcagggattctgaaaagtgttttcagccatgtcaccacacagaacggggaatatgacttccccgttctgccgggtgtgtacagcgttcgcctgacacaaagcacacggcgcctttcagaaatcggtgtcatccgcgtttatgaagattcaacggacggttcgctgaatgattttctgggcgcaactaatattgacctgcgtccggaatccctgaagaaattcgaagagctggcgcaacaggcgcagcagagtgccgggagcgcagccggaaacgcacggcagacggcgcaggatgtgacggcagccgcaacggcccgtgatgatgcacaacgttttgcggagaaagcccgacaggatgcaaccgtcacagctgagaacagaaaggccactgcggaagatgtgacaagcacaggagcaaatgcagccgcagccggacagagcgcacaggatgccgcaggttatgcccgcgcagcagaacaggccaaaaatgacattgatgctgcgctgaccggcactctgaaaatggctaaccatctgtcagaaatcgcagcagcaggcgaaaaggcacaacagaagtcccgggataatctggggctgaaaagtgcggccacgatggaagcacagagcgacatttacgaccggacaaaaggccgtctggcgatacccggcgcattcggctttgggtgtgcttttctgcctgaagatgttatccgttttgacactaagagtgatttcctggcctgggtaaggaatgcgctgccaggtgaatattccgttgctggcccctacgacatcatcatacccgacacacggtttgaaggggatgctcagcatccggtggactga

SEQ ID NO: 467997 - DNA, 1038 bp, Shigella boydii; identical to SEQ ID NO: 464708

SEQ ID NO: 467998 - DNA, 411 bp, Shigella boydii
gtggcagaagagaaacatcagcgcggtgaactggaaaagccccactaccagctggtggatacgtatacgtcactgaaccggcagtatgtggagctgcagagtgaatataagcatctgcggcggtattttggtgtgacggcgcaggtgccgtacacggatgtgtggacacataaaccggtgcagttctatcccgggaaacatccgtgcgaaaaaccggcagaaatgctgcagcagataatcagcgcaagcagtcgtccgggtgacctggttgcagatttttttatggactcaggttcaacggtaaaagcggcactggcgctcgggcgtcgtgcgattggcgttgagctggagaccggacgttttgagcagacggttcgggaagtacaggatttagtcagccagaacggatga

SEQ ID NO: 467999 - DNA, 1959 bp, Shigella boydii
atgagttttaacgcaaaggatataacccagggcggtcagattacgtccatgcgtatccgcatgttcagccagatcgccaatattatgctttactgcctgtttatttttttctggatactcgttggtctggttttatgggtaaaaataagctggcagacgtttgtgaatggctgtatttactggtggtgtaccacgctggaaggcatgcgggatttaatcaagtctcagccggtatatgagattcagtattacggcaaaaccttccggatgaacgctgctcaggtactgcatgataaatatatgatctggtgcggtgagcagttatggtctgcattcgttctggccacagttgtggcactggttatttgcctgattaccttctttgttgtctcctggattctggggcatcagggtaaacaacagagcgaaaatgaagtcacaggtggtcgtcaactgacagacaatccgaaagacgttgcccggatgctgaaaaaagacggcagggactccgatatccggattggcgatctgccgattatccgggattccgaaatccagaacttctgtctgcacggcacggtcggggccggtaagtcggaggttatccgtcgtctggccaactacgcccgtcagcgtggtgatatggtggtgatttatgaccgttcaggggaatttgttaaaagttactatgatccctccatcgataagatcctgaatccgctggatgcacgctgtgccgcctgggatttgtggaaggagtgcctgacacagccggattttgataataccgcaaatactctgatcccgatgggcacaaaagaggacccgttctggcagggttcaggacgtaccatttttgcggaagcggcgtatctgatgcgtaatgaccccaaccgcagctacagcaaactggtggacacactgctttccatcaaaattgaaaaactgcgtacctacctgcgtaattcaccggcggccaacctggtggaagagaaaatcgagaaaacggccatatccatccgtgctgtgctgaccaactatgtgaaagccatccgttacctgcaggggattgagcataacggtgagcccttcaccatccgtgactggatgcgtggtgtccgggaggatcagaaaaacggctggctgtttatctcgtcgaatgccgacactcatgcctccctgaagccggtgatctccatgtggctgtccattgccattcgtggtctgctggcaatgggagaaaaccgtaatcgtcgtgtgtggttcttctgtgatgagttacccacattatacaaactgccggacctggtggagatcctgccggaagcccgtaagttcggtggctgttatgtgtttggtatccagtcctatgcccagctggaagatatctacggtgagaaagcggctgccacgctgtttgacgtcatgaacacccgtgcctttttccgttctcccagccataagattgcggagttcgctgccggtgaaattggtgagaaagagcacctgaaagccagcgaacagtattcctacggtgctgatccggtacgtgacggggtatcgaccggtaaggatatggagcgccagacgctggtcagttattccgacattcagtccctgccggatctgacctgctatgtcaccctgcccggaccgtatccggcagtcaaactctcactgaaatatcaggaacgaccgaaggtcgctccggagtttattccgcgtgacatcaacccggaaatggagaaccgtctgagtgccgtacttgccgcaagggaagcagaaggtcgtcagatggccagcctcttcgaaccggatgtcccggaggttgtttccggagaagacgtgactcaggctgaacagccgcaacagccgcaacagccggtgtctcctgtcatcaacgataagaagtcagattcaggtgtgaatgttccggcagggggtagactggccccctga

SEQ ID NO: 468000 - DNA, 330 bp, Shigella boydii; identical to SEQ ID NO: 466934

SEQ ID NO: 468001 - DNA, 525 bp, Shigella boydii; identical to SEQ ID NO: 465688

SEQ ID NO: 468002 - DNA, 225 bp, Shigella boydii; identical to SEQ ID NO: 133446

SEQ ID NO: 468003 - DNA, 189 bp, Shigella boydii; identical to SEQ ID NO: 463227

SEQ ID NO: 468004 - DNA, 210 bp, Shigella boydii
ttgcgcctcaaactggtctggctttgctggcttgatttaatgaccggaaacagccttgaagactggaaagagaacctgaaacggaaatcagaaaaagagctggaggaatggatcatcaaccgtcagaggcagagcgcagcactgacggatctgatggatcagtacgtgctcctggcataccgcacaacggttgacgatagccgcaactga

SEQ ID NO: 468005 - DNA, 189 bp, Shigella boydii; identical to SEQ ID NO: 463227

SEQ ID NO: 468006 - DNA, 225 bp, Shigella boydii; identical to SEQ ID NO: 133446

SEQ ID NO: 468007 - DNA, 363 bp, Shigella boydii
atggggacactgggcgctctgtctgtggatatgacgcaggctaattccacacttcccgatgacagtcagcatgacggacaatcggtgcgttttctctataacaaatcgctcaatgagtcaggcacgaatattcagttagtgggttaccgttattcgaccagcggatattttaatttcgctgatacaacatacagtcgaatgaatggctacaacatcgaaacacaggatggagttattcaggttaagccgaaattcaccgactattacaacctcgcttataacaaacgcgggaaattacagctcaccgttactcagcaactcgggcgcacatcaacactgtatttgagtggtagccatcggtaa

SEQ ID NO: 468008 - DNA, 507 bp, Shigella boydii; identical to SEQ ID NO: 464754

SEQ ID NO: 468009 - DNA, 255 bp, Shigella boydii; identical to SEQ ID NO: 464791

SEQ ID NO: 468010 - DNA, 225 bp, Shigella boydii; identical to SEQ ID NO: 133446

SEQ ID NO: 468011 - DNA, 225 bp, Shigella boydii; identical to SEQ ID NO: 133446

SEQ ID NO: 468012 - DNA, 267 bp, Shigella boydii
atggcgacgctggggcgtcttatgagcttgctgtcaccctttgacgtggtgatatggatgacggatggctggccactgtatgaatcccgcctgaagggaaagctgcacgtaatcagcaagcgatatacgcagcgaattgagcggcataacctgaatctgaggcagcacctggcacggctgggacggaagtcactgtcgttctcaaaatcggtggagctgcatgacaaggtcatcgggcattatctgaacataaaacactatcagtaa

SEQ ID NO: 468013 - DNA, 582 bp, Shigella boydii
atggctgatatctttaatgttagcttgttggatgttttacctcctaacttagctagcgatcccaacgtgatagctatgtcgaaagctatcgatgatgaactacaagcaattaacaatttaatatataagacagaaatatatagcgttgttgataacctggattcagttgtcctcgatcatttagcttggcaatggaatgctgatacatggagggatagttggcctgtatcgttaaagcgttctgttttcaaatcaataatacgaacaaagcgaataaagggtacaagggcagcggttgaagatgtagtaaatagcttggggggagaggtaaacataatagaatggtttgaaacatcaccacctggcgaaccatatacagcctcaattgttgcttcgattaactcttttgatggtgccgttccttcgaaagagatgttggaagatacgttaagaagtatcaagagcgcaaagtcggcaagaacattatttacattttcgcaagcagccaatgtttctggtggtgtcggtattgttggtgcttgtcagcctgtgtcttatatacgattaattggcgagtgttaa

SEQ ID NO: 468014 - DNA, 1125 bp, Shigella boydii
atgacgttgccgcgtggtggtttgccagatattactttcgcagattctaacccgactgatataacaactcgttcaatcagggcttttgagagtataacaggtgaaacattagcacctgctgatccacgtagattattcatcttatcattgtgtgagattattatacagcaaagaaaagctatcgatttttctgcaaaacaaaaccttcttacatatggtgaaggtgaatatctcgaccatataggctatctgacggatacgcctaggctggaagctcaatctgccttgactacatttgagtttaatctgtcaacaaaattatcggggatatatacaatacctgctggcactcaagtttcaactggaaatggtgttattttccaaacagatattttgttggaaatacctgctgggaaaacagttggtacagtctcaggatatgctgttatacctggtttatctgggaatggctttttaccagggcaaataaatgagttggtgactccgttgccgtatgtttccagcgtaaggaatgtaacaacatctaattctggtgctgatacggagtcagatgataattatgctgaaagaataaaactgtcgccggaaaaactgtctacagcagggccggaggattcttataaatattggacaagaacagccaatcagaatataaaagatgtgaatgtatatacaccatcgcccggaattgtagaaatccgttctttgttagagaacggagatataccttctgatgaactattagagcagataaatagcgttctctctgcaactaatattcgaccattcacagataaagttcttgttaagaaaccagagagcattgaatacgatataataattaaatactggattaactcatcggacaaaaacagaacaactttaattcaaagtgaggttgagaaagctattgatgagtataaacaatggcaacgttcggttatgggaagagatataaatccagatgaaattattcaacgtttaaaaaatgctggggctaaaagattagaaatatcaagtcctgtttttactgtggttggagagacacaggtcgccagagagagaaatataaattgccagtatgcggggttagaggatggctga

SEQ ID NO: 468015 - DNA, 321 bp, Shigella boydii
atgaataatacgtttaccatattatcaccttcttactcgattgattggtcgcccaaaacagttgtagaagaagttttgcaaaatgtctctactattattaacactcagattggcactgtaccatatgccagaaaattaggagttaattcaagtcttgttgatagccccagtccaatttttattgctacagcaacacgagaaataattcaaaaaattagtgagtttgagcctagagcgattatccattctgttacttttgaaagaacggacgtttctgatggttttattaggccaaaacttgtgataggagttagagaatga

SEQ ID NO: 468016 - DNA, 468 bp, Shigella boydii
atgattgtgggtatgcttggtacaatgccttttgttgcctcatcaatagtagtgaatacgttcaacaattttaaaaggacgtcaaagcgtcgtgtagcgcgccatgatgttattgggcttaaacctgttctggaggatataggtccagatctggatgaagttagttttaatatgcggttggatacaacacttggcattgttccattggctgcgctttcattacttaggacgatgcaatcaattcaggaagtaaatcctgttgtaattggtattcagtattttggtaattttataattacagatatagaggaatcatggacttatttcggtccaactgggaatccgcgagtgattatcgtcggcattaaattacaggaagtcggacagacctctctgaaagaagcattagttgatattgctggcaatatagagtcaaaaactagaagtgcgttaggtaaattattatga

SEQ ID NO: 468017 - DNA, 621 bp, Shigella boydii
atgaatgatttagaaacattattacgtcagactataagagttggcgttgtttctgatattgatgatggtgatgttacagcaagagttactttcgatgatcaggataacgtcacttcggcaaagttatcagttattgtgaaaaatacagataagaatgctgattactggatgccagatattggtgagcaagttttgtgtatctttcatcccgcagggccgcaacaaggttttattcttggtagtttttatgatgaaacacagaagccgccatctaatactgttaataaacgcgtaattagatttaataacggaactcgtattgagatagacagagaatctaatttactccttgttgatgctgtcggagatgtaaccgttaaggctacaggaaccgtaactattgatgctccagaaaccatcattaccggaaatgctacagttgaaggattactaaccttcaaaggtggaatgaaaggatcttctgctggaggtgttgcagctacaatttctgggaatgttaaggttgttggtggtgatatagatgttgatgggattaaatctaaaggccaccatcacacagctcagggggaatacgctccgacaacggaggctcaggcatga

SEQ ID NO: 468018 - DNA, 1002 bp, Shigella boydii
gtgttacgtaaaacgctttttgatgttgtatatcagaatgtaaatattaccgctcatatgtcacctgatgttttgtcaatgtcttatacagataatgaagatggtcaggtcgatgatatttctattatattaaaaaatgatgatgggaaatggtctggagactggacacctaaaaagggtgattttattgatttgagctttaagcctataaatcaaatcgtccttgagtgtgggaaattccaggtggatggcataacttgctctggaccaccttctgttgttgaggtgactgctgtttctgttcctgtttcatcaggcattagacgtgatttaaaaagtaatgcatgggaaaaaacaactcttaaagatatagcgacttctatagctaaattagctaaccttgaactgttgtttcttattgatggtgatagtaatccatattatgcgcgtgaagatcaaatggaggaaagcgatttaaaatttctccatcgactttgccaggatgaaggggtgtcgttaaaggtcactgatagccaattaataatatttgctcaagagatgtttgagcaaaaagatcctatcgctacgcttacgttaggtattgatgagataatcagatatagctttagcacacaatctacagatttgtataaaagttgcacgtgcaaatatcgcgtacctaaaaaaagaaagtcgctttcgtatacttgggtagatccatccgtagaagaaggggcgaatcttaagataagaaaactggtagctaatttagatgaagcaaaacgtaaggcaaaggctgctttgcggcttaaaaatagatatcaaaataccggatctttagttttggttggagacaccagattggtagctggtgtaactataaatctggacggattcggttcattttctggaaaatatcttatatcgaaagctgtgcattcaattggggctagtggttataccacctcgattgatgtccgaagagtaattaatgggtattaa

SEQ ID NO: 468019 - DNA, 2793 bp, Shigella boydii
atggccagcaataagaactttaagctggcttttgaaattggcggcaaagttgccgcctctctccccaaaagttttactacagctaatcaggctgttgctaaattaaatgccgagcttgctggattaacgaaagaacatggggaaattcaaaagctacaatctgtaaaagtaaaggttggacagactgccctcgaatatcataaagctgccgctcgcgttgaagagttacagaagcaaataaaaaacacggccaatccaaccagagcgatgcttcgtgactttgagaaggcaaaaacacattcatcgaatttacgagcatcactacgttctcagcgtgaagaactggccgctttaaagtctgcctatcagggagctgatacatctgccagagctttggcctcaagagagaaagagcttaaagccagcattgatcgtaatcgtgaggctcaggcccgtagcgttgagcaggttaaccgctacagaacggctttggctttagccagagcaaatgttcagcaagtgaaaaaacagcaggaggaacttaaccgggcattagaaaaacaacgtattgataaaattaacagctataaaaatgcgttggctgaagcacggaaaaatgttcttgcagtaaaacgtgctcaggaggagttaaaccgcgcgttggaaaggcagcgtgaattgaagcgagagcatcttggtgaggcaaagagtcaacttgtaaggacaggattacaaactggtgctgtagcggctggtgcatttgctgctgctaataatgcagcaaattttaatcgtgaaaacaaaatgattggtcttacggcagatatgaagccggaggaagttcaggcgatggggcaagcgatgcttgttaccggggcggctaccaaccagtttgcatctgatattcaggccgctcagggttttcttgtcgctgctgggcaggattataaagaggctcaggcgaatctactaactattgggcgaacagctacagctactggctctgatatcctcgatgtctcgaaagcatcatttacattaagtgactcattgaagattgatccatctcaaatgaagtctgcaatggggattctggttcaggcagggaaagagggaaactttgaatttaaagatatggccaaaaatcttcctgtgcttggtgctcagttccaggcattaaaaatgggaggtaaagaagccgccgcgacgatgggggcagctttgcagatagctcgcaaaggtgctgcaacttcggatgaggctgctaataatatgaacaactttttggcgaaaatactttcccctgaaacactaaaaaaagcaaagaaaaatttcggtgtagatttatataaaattgtcacagcagcgcagaaaaaagggaagaatccattcgaagctgcaatgcattctgtcatgaaaatgactaagaacggagatcagaagttacttggtgagctatttggcgatatgcaggttcagaactttgttcgtccgatgattcaaaactggaaggaataccagagaatcaaagcaacatctcttggagctggaagtgctgttattgaccgcgattttgccaacataacgaaagataatgcggagcgattgaaacaattacgtattcaggctagcaatgcatcattaagttttggtcaggccttgcaacctgctttaaatgccgcgcttagtgttttggttccgctgattacaaaaatcagtgaatttgtagctaacaaccccaattttgtttctcagattgtgatggcggcaggtgcgtttctaaccatgaaaagtgtggttatagcgtgtagggtagctatgctggctttatctgtagcgacaaagctaacccctttcgggtggattcagatggccatatcagccattgtggcgttaggtatattgttgtatcagaattgggataaaataaaagaatgtgcatcaaaagtttggcctgctattaaggattacactgttaagtcttttgagactataaaaaactttatcttaaactttgatctcaatggatggattatatctatgtttggtaaagcatgggattatctttccaacataaactggagttcggcaggagtaagaatttacagtacattaattagtgcttttaaatggatgtctccgcttccgttcttaattaaagcatttaaacttacaacaaattacctttctggcattaactggagcgaaacaggaaagaaaatcatagatacactggtgtctgtttttatgcgtttttcgccagttggactatttataagagcattccaatctgtaacggcttatttatctggaataaactggagtgagtcaggtgcaaaaataattgagacgttaatcactgggataaaatcaaaagcaaatgctttaattaatgaagtgaaaggcgttttttcttctgtacgtgagtatttaccgttctctgacgcgaaaaaaggtccattctcacagctaacaaagtcaggtggtgcaataatgactactctggcatcaggtgttagcaggaataacagcttacagaatgcaatagcaaccaagttcgggcaatcaaatttatcacctcacgggatatctgccgccgggacttctggacctcgccagaacgttaacgctgtgactggtggaataacctattcacctgtaatcaatcttccggctggttcaccaaaggaaactgaggcggcagctaaaagagcattagatgcgggatattctgattttgagaagaaattgagtgctcatatgttccaacaacggagattaagttttggatga

SEQ ID NO: 468020 - DNA, 282 bp, Shigella boydii
atggaaaccgttaaattaagtaaagaatatcgttttgaagactttgagccggtgactgaactcaaccttgatttagacaacctaaaaggcagtgatattttagaggtatcggacttactgcaatctcaagggcatgtttcagttcaaacatcacttgataataaagtccatgcagccttggctgctcgctgtattggtcgtccaatagagtatctgaatggattaccagcgaaagactttgttaaagtttgtcaaaaggtacagaattttttgctctcgtag

SEQ ID NO: 468021 - DNA, 522 bp, Shigella boydii
ttgagcaatcaaattcctgagagacttattaactttacagtatacggtgagggaaaccgtattatcggtgttgctgacgcaaagctgccatcaattgagatgatgacagaaactgttagtggtgcaggtatcgctggagagcttgagagcggaacgctggggcatttcaaaccaatgactgtctctcttaaatggcgaactctgacctctgctggtacaaaattatttctatcctcatcgcatcaggtagattttcgcggtagccagcaggtttatgatgcaggaacaggaaaatataaaacggttcctattcgggcttcaatgaagctaaatcctaaaaaactggatttaggttcgctacaggtggcaaaggctactgattcagagaatgaatttgaagttctctatatcaaattatttattgatgggaaagaagtcctggaaattgataagttgaactttatttgtatctttgatggtgaagatatattaaaaagcgttcgtgatgatttaggtttataa

SEQ ID NO: 468022 - DNA, 1464 bp, Shigella boydii
atgggatatcgccacggtatttatatatctgaactggctacatctataactcctccagtgcaagttagtgctgggttgattgtcgcatttggtacggctcctgttaatcagttagaagatccagcctcagcggtaaataaacctatcattgcttatacatacgcagaggccgtatctaaaataggatatagcacaaacttcgagaaatatactttaagcgaagtaattaaagtcgcatttggaatatatggtgttgcgccagttgtatttatcaatgtgcttgatccagcaaaacataagaaagacgttactgatgagttagtaaaactttctggcgggaaaggtacgctctctaacgatggtgtcttatataaatctgttgttgtgaaaaaagcagatggtgattcgcctgggttaacgcttgataccgattatgtgctggcgctggatgataatggctatacggtcattacagctattagcggaggaaaaattaccgaaaaagacgctactcttaaggttagttatacgcatcttgatcccggtgccgtaactaaaaatgacattatcggtggtgtggattccaacactaaagccaatacagggcttgagttactgtcagatgtgtatccccgcttcaagttagttcctggacaagtgattgcacctggatttagttctgatagtgaagttggtcagctaatggcggctaaagccgcgctgattagtgaattgttcaaagctgaagctataacggatgcgccgaccgataaatctactatcagtgattactcggctgttcctgaatggaaacagaacaataatcacatggccgctaaccagacagtgtgctggccgatggtgaaacttggtgacaatatttaccatcactcaacccatttagcggccgcaacatgcttgctggatagtcagtatggtgatattccatcacgttctccgtcaaatataaaactacagatggacggtgctgtacgtaaagatggcagtgaagtatggcttaacattagtcaggcaaactacttaaatggacaggggattgtaacaagccttaattttgatggttggaaatcatggggaaaccgtaatgctatttatccaacatctacagaccccaaagacgcatttcgtgtttgccgacgtatgtttaactgggtgggtaatacgttaattctttcgcattggtcaaaaatagacaatcctgcaaaccgtcgattaattgaatcgattgttacaagtgcgaatatttggcttaacggcctcacaggtaatcaggatattgcaggtggtgttgttacctttgatcagtctgaaaacacgattacgtcattaatggacgggattgttaaattccatgtaaaaatgacaccattctcacctgccagagatattgagttcgtcatggaatataatcctgattatctgctgaacttgttttctgaataa

SEQ ID NO: 468023 - DNA, 291 bp, Shigella boydii
atggctaataagaaaagtagtaaagaagatatagaaaagaaggaagatgttgctcaaacatttgtatatataggaccaacaatccctcaactctcaattttgaagcataaactatttaagaatggcttatctccagagtgtaaaaaattaatatcacatattcctggtgcaaagtgtttgtttgtggcaaccagtgattttgcagatgcagagaaaagactttctgataaaaccagtgtcgagtatgtaatgtactctagagtttcttcttctatcatggagattaaataa

SEQ ID NO: 468024 - DNA, 486 bp, Shigella boydii
ttgattaatcttttgatagatgcaataaaaaatcggttggaacatgaggttttccatgatttattagtgcagggacctccttatgatgaaacagacagcgatattaaattgtttgttccaacaatatttaaagggtacttgcctcctaaatcacaaccatctccagataaaccgccagaatttcctcatgtgattatcaggcccacggaaggaggaatgcagcctgaaacggatgaagttaaggttaagtttcttctaggtggtttttgtgaggaccatactggatatgaatgggtaatggctcttcttgaaaggatgatgtttcattttcaggagaagcctttacttgaagagaaatttctctttcagggcgatatcagatggcgaatgtttgatgatcaaccgtatccatattggataacggaagcaactggaacgtggatagtattaaagcctcagaatattcagtctcaggagtttatctaa

SEQ ID NO: 468025 - DNA, 345 bp, Shigella boydii
atgaactccttcaaagaggttatagcgcaagatatttctgcaatattcctcaatgaaaaagagtttgccgatacatataacatagacggcaaggatatccttgccgttattgatacagaccttattcatgagcggaataaacgctcatatgctgagtttgcagagggaataaatcaggggcaaataatattatttgtttcaagaaaagattttcctgttctccctgtcaaagaccagtcaatgaaaatcaacggtaaaaattatattgttgatgaagtatcagataatgttggtgtattggaaataactctcactgttaatactaacagaggaatgccgatttga

SEQ ID NO: 468026 - DNA, 393 bp, Shigella boydii
atggccagactgattaaaaacattgatacgataagccacggctcgctaaaagcgggccgtttgcttaatgggctaatggataactccagaattgccgaactgattgcgtcaggacatgctattgccaccgaagaggatggtgatttggcatcggctgggggctatgatgctgctaagttagcttttgagcatggatacgcatctgctgttaatgatgctgtggacgcggggttgattacgcgaacggaggcgggtagctgtgtattcgaggttgagtttgaggatgatggcggcaatgaggaaacggttgctgatgattcatctgaatctgtagctacttctgataccagtaatgcgaaaaaatcaacgcaaaaaaaaggtaataagaagtaa

SEQ ID NO: 468027 - DNA, 1044 bp, Shigella boydii
atgccgaatattgatatttttgaacgacgtacaatgcttgagcctgttattcagaatttcaaggctcgtcgttttcttcttcgtactttttttcctggtgttcagacctttaatacaaagaaagttgatctggattttgttcgcggtggccgtactatggctccgtttgttggtaaaggttttggctcaaaaaccgttgagcgacgcggctttgtaacgagaactctggagccaccacttgttgcacctgatttggtaacaacagcagagctgcttttaaacaggcttccgggtgagaatatttacaacgcaaaatcgccagcagaacgagccgccgagcaattaggtaaagatttgcttgagcttgatgaaatggttaaccgccgtgaagaatggatgtgtgcacaagtcttgtttacggggcaggttgatattgttggtgaaggagtggatgacacagtttatttttggcctgaagaggaaggagataaaccatatcttgaactgacaggtgatgatttatggagtgcagcaaactcagatccgttagtcaatgttcgcaactggaaacgtcgggtatcactaacttcaggttttacacctcgtgttgccgtaatgggcgcaaaagttgttgatgccttcgttaaaaatgaagcagtaactaaatatcttgataatcgccgaaaagagcttgggtatattgagcctaaggagttagaagaaggcgtaactcattatggcaatcttgaaggtgtcgatttttatggttacgacgaacttattcgcaatgataaaacaggaaaaccagaaccattagtaccggaagataagatcctctttggctctcctggtcgaggaacgatgctgtatggtgctgtagagcttgtagatgacgccgaaaagactctaacgattgttgagtcaccacgagttccagacacctgggtaactcgtaagccggctggccgttatgttgccatgaagtcatctccactgcctaatcctggtgtggctgatgcctatctggtggctaaggtggtttaa

SEQ ID NO: 468028 - DNA, 384 bp, Shigella boydii
atgcgagagtctttttcatttgaaccagataatctgattatttctggtggtatgccagcaattccaacaagtattaaacttgccagcggtaaagtaaaacgaggtgagttacttgcttttgtcagtattgatcagacaacaaatgttgtcactgtggctccgataaatctctctggagagggagtggcaaaagaaccgtattgtattgctcaacacagtattgatgcgactgattcagcgcaagtaggaacagcatggttgaccggaatgttcaatgcacgtgcggttatccttcctgaatcagcaaaggttgccgatgtatatctggcttgccggaaggttggaatattccttaataccgcacaacaaaatccatctgcataa

SEQ ID NO: 468029 - DNA, 1065 bp, Shigella boydii
atgcctaattggtgggaaataaaaaatagcacgggtgaagatgactctccggctgaacttttaatttacgggtatattggtgaatttgatgaggtttcttcttctgacatagttaataaattaaaggatatttcatcaaatactatcagcgtaaaaattaatagttatggtggttctgtttttactgctcaagctattctttcatcattaaagcgtcataaggcgaatattacggtttatatcgacgggattgctgcatcggctgcaaccattattgcaatggcgggtgataaaattattatcccatctaatgctatgatgatgatccataatccatggacatttgctgctggcgatgcggatgaattgcgtgatattgctgagatgatggataagatacgaaatagtattttatctgcatataaggagaaaacagggctttctgaggataaattaattgaactaatggatcaggaaacatggctaaatgcagaagaggctgtagagcttggatttgctgacgaagttgaaaaacctatgcgcttatccgcttctataaaggaagggatgctttcgcttaatggaataacttttgaagcatcaaggttttcaaaattacctgattcactcgcaaagttgccgcaaaataaaaatgagttatctactgaatcaaatgaacaaaatgaggacgatattgtgactcttgatgaattaaaaaacaaatatccagaattatacaatcaggtttttaatgctggtaaagacgagggcgttaaatcagaacgcgagcgcattgaaacaatcgagaatagcgtgattcctggtcatgacgacctggttaagaatgcaaaattcaaaacaggagtttctgcggctgaccttgctttggaaattatgaatgcagagcgagcgcgtaacaaaaactttcttaatcaacggcaagaagacgcaagtgaggtgaatgattcagttgatgttaatcaaccagaaaacaacggcaacaaacaggctgaagcagtaaaaaatgttattgggtcagtatttaaaaaccgcgataaaaattaa

SEQ ID NO: 468030 - DNA, 1575 bp, Shigella boydii
atgaatattcttgatcgagttattgcaccgttttcacctcagagggcattaaatcgagctttggcaagaaaacggttagaagcacttgaaggtattaataaccttggatattcacgtcatggtgcaagcactcataaaaaatcattaaggggttggtttagtaaagctggttctcctgatgaggatattgttaaaaatatagataaattgcgtgagcgttctcgtgatctcttcatgggaaacccgctatcggttggcgcaataaaaactatcaggacaaacgttgttggttccggtttaaaactaaatgcgaacattgatgccgatttcttggggatgacgcaggaagaagcgcgagcatgggaaaaacatgttgagcgtgagtttagattatgggctgattctccaaattgtgatgcatcaagaatgtgtacttttggacaattgcaatcattggttcaaatatctgcgttaacatctggcgatatatttgctgcgctaccagttattaagcgtaagggtgttatatatgatttgtgcgtctatttaattgaaggtgatcgtgtttgcaatccagaggatcgttttataccaaatctttacggtggcgtagaggttggtgaatttagcgagcctgtggcgtactgggttgcaaaacatcacccagccgggacttctggttttgtaacccgcaagtgggaacgtattcccgcatatgggagtaaaacaggaagaagaaatattctgcatgtcatgcaggattttgaaaggcctgggcaacgccgtggcgttcctgtccttgctcctgtaattgaagcattgaagcagttaggacgatacaccgatgctgaattggttgctgcggttgtgtcagggatgtttactgtctttattaaaacagacgctcctgatggaccagtcggtgaatcgggtatccctcagtacgagcagatcgataaccatgatgataacacccaagaaatggggaatggctccatagtaagtttgggtgaaggtgagtcgatagatacagcaaatcccgggcgaccaaatacggcatttgatggttttgttgtcgccatatgccgtcaaattggggctgctttagaactcccttacgaactcttggtaaagcattttacagcaagttatagcgcaagcagggccgcattacttgaagcctggaaaatgttccgtatgcgacgtgactggatggttcagtcattttgccaaccgatctatgaggaatggttggccgaagccgttgctaaaggtcgtgttattgcccctggttttttttatgggcctgaatatcgctctgcatggagtggcgctcaatggtatggcccatcacaaggccaattagatccccttaaagaagtcaaagctgcaaaactgcgtgttgaggaaacattctctacccgtgaaaaggaagcggctgaaatgtcaggtcttaactgggaagaaaccgcacaaatctgtggcagagaagagaatgctcgccgtgagttggggcttattacacctcctgtttctgaggtaaatgaacaaaatatggagactgatgatgcctaa

SEQ ID NO: 468031 - DNA, 240 bp, Shigella boydii; identical to SEQ ID NO: 16739

SEQ ID NO: 468032 - DNA, 1857 bp, Shigella boydii
atgggcgaaacagtatggagcaccgcttttttccgtgcgcttcgccctaaatcacggctaactgtttccgaatgggctgataagtatcgtcatgtagcgccgggaacgtctccagagccagggccgtggcgtacaagccgagtgccatatttgcgtgaaccaatggatgttattggtgacgctgatacagaaacagtagtgatgcaatgtagctcgcaaattggtaaatccgaattacagctaaatgttatgggttactttgcagatcaggagccatctcctcagttgatgatttatccaacggtagaggcggctgaggctttttcaaaggagcgtattgatccgacgttcaaatattcccctggtttgaaacacaagctgcatgaaggaaaagaggggcgcggtgcagccaaaaagtccagcacgactatacgtatgaagcattacgctggtggatatatagcacttgttggtgctaattccccagcaggtcttgcatccaggccaattcgaatactgttagctgatgagattgatcgttacggtgtgacgcaggagggcgacccactaaaactaggtattcagcgtactaccaactttcataatcgtaagaaagtttttgtttctactcctgtttttgaggaaacgagcaaaatccacaagtggtttaagctctccgatcagcgttactaccatgttccttgcccatgttgtggcaccatgcaggtgatgaaatggtcgcaagtcagatgggataagagcgattcaggtgaggcgttaccggaaacggccagatatgagtgctgtgagtgcggcgggattatgcgcggatctggtaaaccagacgttgattggttggcaaagggggtatggatagctgaacatactggagttaaaggtattgttggttttcatattaacagtctttactccccgtgggttgcattgtcagagctggttgaagaatttacggaagcaaccagaaaccgcgataaaaatggattaatggagtttattaaccttaagctgggtgagccatggaaagaggatgctaaagacgatatcgatcctgaatacttgttgcaacgcagaataaggtttgaagagtttttaccagatgatgttttattgttaagtgctggtgttgacgtacaggacacgtatttagtttgtgaattggtcggttggggaaaaggtaaggagtcatgggggatagaatataaaatattcccaggtgatcccgcacaagatgttgtctggaaacaacttgatgaatacttactccgtagctggtcattccgtgacggtcgaaaattacagatttcttctgtttgtattgactctggtgggcattttacgacagaggtatatcgcttcactaagctgagagaatcaaggcgaatatactctatcagggggcgtggtggggtaggtttaccatttataggaaagccaagtaataataaccgtgtgggtgctatgttgtttaatttgggggttgatgatggtaaagggaccatcatggcaagaattaaactacatgatcctggtcctggttatatgcatttcccattagattctgacagaggatatgataccgaatactttaaaggattattatcagagaaaaaaatatttgaatataaaaatgggcagacaaaagaaaagtgggtgaaagtctacgagcgtaacgagcctcttgattgccgtaactatgcaactgccgcgatggaaattctgaaccctaattttaactggcttgccgaacaggaaatgcgaggtaatgtgtatgtgcagaactcgtcaggtatacgtagaagacgccgtagagttataagtaaaggcgtaaacatatag

SEQ ID NO: 468033 - DNA, 552 bp, Shigella boydii
atggccatcgtcagtaagtcagagtttgcccgccggaaaggtatttctccggcaatggttacgaagctctgtcgttccggtcgcattccagtgctgaaaagcggcaagctggattttgataaagccagtgcggcttatgaagcgagccgacaggttggtcgtgaggtatctgctgaaaatggaaaaagagggcatgggatatcttcggaacaaccagagttacccgctgatgatgtcggattagctggtggtacttccggtgttgcggtgcaattcaacaaggctaagaccgcagaaaaaatttatcaggcaaagctgaaacgccttgaatttgaagaaaaggaaggctctctcatcgctaaagatacggtcagggatgatgcatttctggcagctaatgaattgcgtagccgcttatttagtattgctccaagagcagctccccgttgtgaaggcaaaacagccagggagatcgaacgcattattgaagacgagattaattttgcgcttcaggcgctccaggaatcccgatttattaagcaggaagaataa

SEQ ID NO: 468034 - DNA, 591 bp, Shigella boydii
atggctctaaaaatcgaatatttaccagtcggtaagctgctcagatatgccaaaaattcacggactcattcagatgagcaagttgaacagttggtgaacagtatccgtgagttcggtttcactaatcctgtgctgatcgatgaaaagaatgaactgattgcggggcatggtcggcttgcagcagccgaaattctggaaatggataaagttccggcgattcggttgagtaacctttctgaaaaacagaagaaggcttacaggattgcagataacaagctggccttaaatgctggttgggatatgcagcttctggccgaagaagtcaaagagttaatggatgatgattttgatattgatctgcttgggtttaatgatgcagagcttgacgaaatgttaagcgatgaacagccgcaggaagaagacgataattcttcccctgttgttcaaattaagtacctggctattgataaagaacgtattcccgcgacggatatggaaattgcattgttgctggatgtttatcgtcagtaccacgatgcgcatgaaacgcatgagggatttgttcagtatcttgctaatggttgcaagtaa

SEQ ID NO: 468035 - DNA, 720 bp, Shigella boydii
gtggctgacagaattgagataaagatggatttttcttctcaggatattcaacgacaactccagcgccttgaagaacgcgaattgccgttcgcaatggcgcttgcggcaaccagaacggcaaaggcttctcaggctgcgattaagaatgaaattaatcgggtatttgacaggcccacgccgtggattcagaactctacttacgttttggccgcaaagaagagtgatcctacagccattgtgtatgctcgtgaatggggaggaacgccagcccctgtaacgttgactccgcaaatcgaaggtggccaacgacagtacaaacgctcagaaggggcgctaagggctggtggatatttgcctaacggctggcagcttgctcctggtcccggcgcaaagctggacaaatacgggaatatttcgcgggggcaattacagcaggtcttatctggcctaagagttcagcgagatgcgcatcaaaatcgccgtcagggcaagcctacggagttttttgttgttcgacctggtacaagtaacccgcttcaaccaggcgtctggcagcgcgttgggcggcgtcctacgttgatccttacgtttatccagcaacctaactattcgcagcgtcttgattggcatggcgtggcgctgcgtgctggtgagaatgcgtttgctgatgaagtcacaaaggctattgatgacattctttctaagacgttctctcgttaa

SEQ ID NO: 468036 - DNA, 1374 bp, Shigella boydii
atgcttcacctcaattacgacataacgcacctacgcggcgcggaatataacccgcgttttatcggtgaggatgatcttgcgaggctagcggaaagcgtcagggagctggggcttgtgaagccattgatagtgcgcggcgatttgctggtggcgggacaccaaaggacgaaggcgctacgtaagttgggaataacgcgtgctgcggtgtatgtgttgccctgtgaaacgacggtatacgatgaagtacggtttaaccaactgcataacggaacggattttgatagcggagatgagcgttgcagggtgtccggtctggaagataagcatggttttgttcaggtatcggcaagccagatctcaggcaatatgcgcgcgaaaatggcatatgttcgaaagaacatagcggaactggttatcaagtatggtccgtggggtggttgtgttgctactcagtctggcgaggttattcactgtgctcagtatgcattagcagcgaagatgacgcgcacaccgctaacggtgtttgtgatccctgatgttgagaaggaaaaataccaaagttatctgaataaaacttatggtgtatttgagtattctcatctggagaaaacaacatacatccagacgtatgcgcagcttatgcggttgcgtaatggtggcagcctgaaatcaaacctgtatgagtcgttgatcctcccgatcattgccaagacgccaagaggaattgattttggttcggggcagggagactacgcgcgaatgctcagggcaaagggatataacctgcatgatctcgagcttttccgccgtaagggcgctggaaacactctggataggaccgcaacaaaccggatgattgatacgctggtggacgacttaaaaacgcgagggcgttacgactacgtgatttgcgatagcgttttgaactcggtcgatagtgtcgaggctgaatggtccgttctgacggttctgaaaggcctgtgtaaagctggtgggtcaatattcttttctggtcgtagccgtggagagctggaaacagtcctgaagcaaacacaagcggcgagttccaaaagccggctttattttattgatcataacggttttaccgcgttgtaccggaaggggcactggttttaccagaagttccactctgatgatgaagtgaagcagttgtgtcgtgtacatggtttcaggattaagcggtcaatattcaactgtaagagctggtatttgcacgttattaacgatgattctcttcgctgggagagtctggagaaagctgttcgttttgagtttgagttgccgttgcctggtggttcaacaatcggacgatctgatgatgtgctgacggctttccggccgttgattaagtag

SEQ ID NO: 468037 - DNA, 624 bp, Shigella boydii
atgacaaaacatcttaatgtggtttctttaccactttctgtgttgattggttatgaaaagaacgctcgcacacactccgtggagcaggtagatcagattgttgccagcatacaggagtacggatggactaatccgatcctgatagacgagaacaacgttgtaattgctggtcatggtcgaattgctgcggccactcagttggggatggatgaggttccctgcattgttctggaagggctaacggagaatcagaagaaggcatatcgtctggccgacaaccgtattccgctgaatgctggttgggatgaagagttgttaagcgcggagcttgcagatcttgcggccgatgattttgctctggactcaattggttttactcagcgcgaactggataacttattgagtgcggcggtctacgatgacacagagggtatggatatcccatttgagaaggatgaggccaaatcaggcgtaaaagttcagtacctgtcatttggaggtcataaaatcccggcaacggatgaggaagcggatcgttttgactgcgcggtgtctcgttatgttgatgataatggcagctatatcggatttgtatccgcattgctggctggggaggtgtgctga

SEQ ID NO: 468038 - DNA, 399 bp, Shigella boydii
atggaaaagaaagaagataaaccgattgccattggtgcagagtctgttccgtttaagtttgaattatcccaactggtaacaatgcgtatcagtgaagagtggggagaagttcaagcccgtgctcagtatgcaaatggcgaaaaccagtatttgattcactatcaggcggctgatggtcgtgctaccacagagtggttcggtgaatcgatgttgattgcgatggaagatgatcgttatccaggctgccctgtttttgcctgtgttgatttgccagaaggcgcggtacttgaagacgacaaagaagaatgctcgtctgatggcgaacttgtcattaccggaatcgttgatggtaagccggaatactctcgtattgaggtaaataacggccgctccgtttga

SEQ ID NO: 468039 - DNA, 153 bp, Shigella boydii
atgaatggtcttggcatttttctgatggttgtggctgtgtgtttttgtatctcgctggtggttattgctggtgtcctgtggcgcatcttagtggcgcagagagcttttcggcttaagcgggagcaaatgcgccttgatttctatcgaaagtaa

SEQ ID NO: 468040 - DNA, 300 bp, Shigella boydii
atgccttcgacaagcaccaaaaaagaaatggcggttagtgatgtgctttacgcgctttcgactatatgtgacggagcaatgatgaggatgaaagtcctccgtgaagcatacggaaaaagtcacgatgaggcagctaaagaatgcctgaatgagattgtggacttcattgataaccatcgttcagttatatcgcgtcaaccgacagagtcgtccatcacgattagcgcaccggttatcaatatatcagtaactgcggcgtgtaaatcagcagcggaagatgatcgtgcttatgccgagtga

SEQ ID NO: 468041 - DNA, 198 bp, Shigella boydii
atgcgtatttccttcaaacgtgcgactgagcagcaacgcaaagagttcctggctgatgatgtagcggccgtttatgacctcatgaaagaggttgtggaatcagggaactacacggcggcaaagatgcttaaactgcaattcttgctgggcgacctgaaatacaaatccgaagttgtcgccggacgacgcgagcattaa

SEQ ID NO: 468042 - DNA, 297 bp, Shigella boydii
atgaaagtacaagaccgtgaagtagtaaaaaacctcctgcaatacctgacctcaaaaaacctgacgggcagcgttgagttccgtgaagcgttaaaacatttcaacgtcactacggtttatcgttgggaaaacaaacattctgaaagaccgtatgtggtggatgtttttgcgcctgatattgagtgcggttttgagcgtcattcgttcaaggagaaacattctgctgatttttttgtgaggttgtatgtgcggcaggagatgatgagtgatgcgtatttccttcaaacgtgcgactga

SEQ ID NO: 468043 - DNA, 588 bp, Shigella boydii
atggaggcaattgcattgtttaatctgatttatgcagatcccccctgggaatacaaagataagtgtaaggatgggaatcgtggagctggttttaagtatccaacgatgaaagctgaggatattgctcgtattcctgtctggcagcttgctaatcctgaatcgtgtttgttggccatgtggtgggttccgactcagccagaagaagcgttgctggtggtgaaagcatggggattcaggcttatgaccatgaagggcttcacatggaacaaatgtggtagccgacaaccagataagctggtgatggggatggggcatatgactcgtgcaaacagtgaagattgcttgtttgcggtaaaaggcaaattgccgacccgccttgatgcggggatcattcagtcgtttacatcgcctcgtctggagcattctcggaagcctgatgtggttcgtgacaagctggtaaggctgttaggtgatgttcctcgtattgagctgtttgctcgcggtgatttacctgatggttggcatggctggggcaaccagtgcaatggaggtatccagttgcatgatgctctctggcaagtggcatag

SEQ ID NO: 468044 - DNA, 279 bp, Shigella boydii
atgactggtttgaaagccgttttgtcatttatcggcaccgttatattggttgcattcggtgcgtttggttttggtcgtatgaaggggcgagaaaaggccgaagatgaagctgaaaagcagcgcattaatgagaatgcagccgccgtaaaagccactgcggagcggcgtatagaagtgacaaaagaggtggggaatgtacagcagagtgttaaccatatggctgatgacgatgttgatcgcgagctgcgggagtcgtggaagcgtcccggtggtggttga

SEQ ID NO: 468045 - DNA, 543 bp, Shigella boydii; identical to SEQ ID NO: 31400

SEQ ID NO: 468046 - DNA, 297 bp, Shigella boydii; identical to SEQ ID NO: 16724

SEQ ID NO: 468047 - DNA, 396 bp, Shigella boydii; identical to SEQ ID NO: 39027

SEQ ID NO: 468048 - DNA, 141 bp, Shigella boydii
atgaagcacatacaaccgaaaacatggcagaaactggactctatgggagttaagttggagaagattactcaacttaagcagtggcatatcggcgaatattatggaagtcctggtcgggatgttcggttggtcaaaagttaa

SEQ ID NO: 468049 - DNA, 357 bp, Shigella boydii
atgaccactattaccaaagaacgtattgaattgttcattaaaaatccgcttgaaaacgggcttacccgtggtgaacaaatggaactggcacggattgctctggcatcgctggaagcagaaccggtggcatatcagtatcgccagtgggatgcagaatatgatgaatggggagaatgggaagattgcggggaatgtgctttcgaatggtttgttgaggaagagaaatgtcagggggcaggtgttcagacccgtaagctatatgccgcgccgccagtttcggtaactccgggtggttggataagctgtagtgagaatccatgcgcttacgagcagtattcagatattcagagcgggtaa

SEQ ID NO: 468050 - DNA, 210 bp, Shigella boydii
atggctattgccgcaagttacaccatgcatctctattgtgactgccgtcagtgcacggaaggtgtatatccagtgccagacttcggtgagtatataggtacgtcatgggctggctgtgcaaaagaggcgcgcaaggatggctggcgaataagcaaagacaaaacacgtacttttgcgcccgggcataaagttttgaggattaacacatga

SEQ ID NO: 468051 - DNA, 567 bp, Shigella boydii
atgagcaacatcgacacactggcgctacgtgaggcagcagaagaagaaattatgctgcgaactgcaagcgacacgtcagataactggcaggatttagcaactccagaggctatgctggcactactggatgaacgggaaagaaatcagcaatacatcaaacgccgcgaccaggagaacgaggatattgcgctaacggtagggaagctgctaatcgaaaacggtcggcttgttgccgatacgctacgccacttagctgataacgaaatcgactctgattattttgctatcacctcaacgaatgagaacggtactgaaattgatcatgagatggctattaccgattacgcactgcaagctgccggaactgtagacgaattggttgcggcgttggaatccgcagagaagcgcattgcagaactggaagcacgggaaatatcgctcccagaacgtagcagcatgcttcatcgaacagattttcacgaggattaccaaacggtaatggcatacaaagtttctgaagtcatcgctgcaatccgcgctgctggtattcgcatcaaaggagaatga

SEQ ID NO: 468052 - DNA, 234 bp, Shigella boydii
atgagcatccgaactgaacatggatttggtccttcaacagtcgaagtcgaatggcttgatgattgccctaagtgccagcacggcaaagccaaggtaacaggatggtcggtaaccaaagattctttgtgggcgggtgatgaggccgtctgttccaaatgcggtcacaaaggtgaaatcgatgctgatggagagaatgcctgggtggaatgggacgaaatcgaggaggcacaatga

SEQ ID NO: 468053 - DNA, 660 bp, Shigella boydii
gtgagcgaaattaattaccaggcactgcgtgaggcggcacagaacgcgaaaaatttaggtgggattaagaattacaagcgaggcgagcaagctgttgccgaatttgagtccttgataacgccacatattgtgctggcgcttctggatgaaattaagcggctggaggacacaaatattgatgctatgtgtcgaattgcagagcttgagactaatctcgcggcgctggtggcggagaatgcggggcttaaggccggggctatgtatttctcatatggctctgaatttagtttcgagtgtcacaaaactgctgaggaggctatcgctgctgctgaggctgcaattgacgactatagaggcgatgcttgcgatggatggagcgaagaggtcgaaagcatttgctggggggtaattattcagcaggcaaccaaggtcggtgaacgcaagaagaggaaatgcgacagagtatcaccatggattgaaagagtttgtgattatgagcttcgacctaatgtcgaaaccccagccaccgatgctttcctggatgaagtacgggcgcagggcgtggagatgatgcgcgaacatccatcaatcaaactttgctctttgacgcacatatgtgacgagttagccgcccagattcgcaaaggagttcagttatga

SEQ ID NO: 468054 - DNA, 627 bp, Shigella boydii
atgaaagaacgtggtgttgtttttaatgacgatatggttagggccatcctcgaaggaaggaagacgcagactcgccgacctgtaaaaaatgtcagggccgataactgcctggttatccgtaaaccgacaaagaaacgcaatggtgtctatacccacgttatggatgcacctgaacatggtttatgcccgttcggtaacgttggtgatcgcatatgggtacgtgaaacattcaacgctttttggctggataacgatgtcattcaggaaatcaaagatggtgtctctctggcttctgaactgtgtgattacaaggctgattactcagatagtagcaagccagctgagggttggaccccatcaattcacatgccacgttgggccagccgtattctgttggaaataaccgacgtgcgtgtggaacggctacatgacatgagcgaggcagatgctaaagcggaaggtgcatctccggcgacgtacaagattacaccgccggaagcggtttatcgcgttggctttggtgatatctggcgcggtatttacgggcaagagaactggctatctaacccgtgggtatgggtaattgagtttaagcgtattcaggaggcaaccagtgagcgaaattaa

SEQ ID NO: 468055 - DNA, 192 bp, Shigella boydii
gtgagcaagaaaaatgccggatgggtcaggccaatgaaggcgaataaacatcattattttaatgaaggtgaagtaaccagcatttgcggccgttggatgtattttggtgattaccgtgagccagacacttttgagagtcctgatgattgcgtgtcttgtcgccggaaattgaacaaggtggcttctaaatga

SEQ ID NO: 468056 - DNA, 366 bp, Shigella boydii
atgagcatcaaaacccataccggaataatcattaccaatgatggtgagaaaagagtgaagttgcgcgaaacgccgacaacctggtgtgttggtccgaaagaaacatatcgcaaggaagatggccgtcgttgtggggcaccactttcccgccgtcgcctccttttgagcacgataaaacctatcgggcaggttgagcaaccaacgactccggtaacgaagatttcagacaagagtctggcaaacctgatcgccgatgcggacaaggtgctggagcggaacacccccgttgcagatgaggaatggtggcaggatttccgagccgcaatgctagagcttcaggaacgtcgtcgggaggagttgaagtga

SEQ ID NO: 468057 - DNA, 282 bp, Shigella boydii
atgaaacgcaaaattattaacccccaagatgtgattaatttcctgaccgatcacccatgttcaaaagtggacgtaatcgcggaacacattggtgtgtcgcagaactctatgcgttgcagactgagaagcatggttgccgaaggacagataacaaccaggaaaataaatggttgcctgtactactccgctaaaccggaattgccatttggcatgaatcctaactccatgttgtttaacaccttattagccaaagttaagccgttgagaggggctgtggcatga

SEQ ID NO: 468058 - DNA, 1068 bp, Shigella boydii
atgaataaacaagtaattatttctgactggatcaacaaccctaacagcctgttgagcactgatactggctatagattacgtcatgttaatggccgtatggtcaaaagcgatgagcacgaaacctttttcgttgttgaagacgatggacgtctttatgaggatggtcactcttatgaatcccaaacaggttgtatccctgcagagttggtagacgtaacagaaaagctgcgcaaagcatggcttgaacagcagcagcgcggagatgattacgtaaatacctatcaggaacgccagaacgcgcgtcttgcccgatatattgctcgtgcagaaaaagccagaaaagaaggtgcggtggcgcataagcgagcgcatgaactgttggatgtgatcccgttaggccagccgattttagttgaccattatagcgcgaaaggccatcgccgccgtttgtctaaagctgatgcgttattcagaaaatcgtttgttgagtgtgaaagcagagcatcgtactacgaaagcaaagccgcaggtgtcggccgtaatggagtttcgtctgatgatcctgatgcgctatttaagttgcttcgtaagctgcaaggctgcatgaagtcacacatcaaaatgaaggccgcaaataaggctattcgcaaatacaaaaaagaccaattacagcagctttccgcattaattgaccttgagtttactgaaagcgaagccaaagggttactcgccggagatttctgtgggcacattggcttcccttcatactcactgagtaacaataatgccgaaatcaaacgactacagagccgtattaaggagcttgaatcggtcaagtctgtaacaggagcacagcgcgaagaatacgacggcttttctatggagatagatccagaggataaccgtatcctgttttatttccctggcaaaccagaggcaaacattcgttcgctgcttaaatcacgcgcctttaagtggagtccaacccgtaatgcatgggttcgcaagattactccaaacgccctggctgatgcccgatatctgaaagaatcgctattgaaagcctga

SEQ ID NO: 468059 - DNA, 378 bp, Shigella boydii
gtgagacgcgatctggatagcttgtttgagctatgggcgctgtgggtgcgcaatggctgcaacgcccgtagcggtttcgcgtcgatgttagaaatgatgatggttacgcgttgccagtttaccggagggggcggcgcaccaaatgactcactggaaaccagtatcgagggagcggtgacggccctcacggtagttgatgagactgcggcgctggttgtccgaattgaatacggggcgtgggagattcggggcctcgacataaatgcaccgcatattgataaagcccacgccctttctcttagtctcagacagtatcgccggaagctggcaaaagccagggcgtatgttgtcgactacttgaaaaagagaagagaatga

SEQ ID NO: 468060 - DNA, 333 bp, Shigella boydii
atgagatataccggctttcgcaaaccagcgaccagaaaaagcaaatacggcaataaaaaaacggttgtcgatgatatcgcttttgatagcaaaaaagaggctgattactactgcgaactgaagctactgagaaaagctggccgcgttgtgacgtttcttatgcaggtgccttttcatctgccaggtggtgtcgtttataaacttgatttcatggtgttttatgacgatgggacgattgattgtgtcgacactaaaggtgtgcgaacagacgtctacatcatgaagaaaaagcaggtagaggcgctttatcccgtcacgatacgggagatctga

SEQ ID NO: 468061 - DNA, 405 bp, Shigella boydii
atgaacggacgtacaccaacgaagaaagagaaactttatatacaagcggtgctcactcacgtgggttgcatagcttgcattattgatggccgtgaaattgataatccagagctgtggacggagctgcatcacgatcctgattacggcagcgttgatgagaattgccacttccatagctttgggttgtgcgcaccacatcatcgcggtgttgtgcctggtggtgggcgtgtgcctccgcatattgccgttcgtcaccctcccctgagtaattgtgctcgctttgttgagcgttatggcaccgatgaatttttgtgtgcgcagacgtgggagctgttgccgcagtcagttaaagacgaaattgggtttgatcttagtcttggtgaagtaccaggggataccaaatga

SEQ ID NO: 468062 - DNA, 234 bp, Shigella boydii
atgagtggttatgttcgcggtgctgcgatgcattgccagaatccccaattctggcgctttctgaccagtaaaacagggaagaacatttcaaacagttctgaggcctctgtgattctgcgtgagttttgcgggatctcatcccgtaaagagctggcaaagaactacgcggccagaagcatgtatgtccagttaattaacgagttcaacctctttatcaatggtaaggggcgttga

SEQ ID NO: 468063 - DNA, 516 bp, Shigella boydii
atgatgattctggccttctttggtgataatcaccagattcaatcgcaggtggtgcactaccttgatcaaacgattaaaggatttgttatcgatcatattgataacgatagtaaacgtctatctgtagagcagaaaattggacgtgtgcagcgactggttgccagccgtaacagacgtgacaccgtaacagtcgtcacggggataacggaggtcatggagtaccagatgttgctgcatcgtggagctgttttctgcgttcttcctggcattctgccagcaattcttgctcgtggttttgtccctattgatgagtcgtttttatatgtaactccaagccgttcccttctggattcggaggcgaagcgtcgcatttatatgctgccggacgaggcattttctgaatgttaccgccgtgaaatgaggttgggtaaacgagatgtgtctgtttctcgtgatggcaggtttttaagcagccgcacggtgaaaagcacctggaatgacgggggccatcaatga

SEQ ID NO: 468064 - DNA, 495 bp, Shigella boydii
atgacctttcaggagtgggttgatgaaaatggaggccaaattggtgttgccagaaagtttggctttacgtcatcactgattggtgcctggtatcgcttcgagagattccctcgtgcggataacctgacgctgctggtggcgtattcggaaggccggattaatgtccagcaatgggcggcagattttgccgaacgtcagcgccagcgtagcgatggcacatcggttcggcagaacaagatcaaagggaatctccctgttaactgcttatcaaggctgaaagcggttttctctgagctggggatacctgcggagcgttgcaatctacgcggtccgcgattcattgctcgctggaaacactcacacgtaaccgtttcagaggttcgtgatgcgattgccgtgctggagtttaagaataaagattccagcgatatcgagctgattcataaggagattagcaacgcccggcgttcagcacttgggaggcttgaggaatga

SEQ ID NO: 468065 - DNA, 663 bp, Shigella boydii
atgaaaagcaacgacgagaacatcaagaaagaaataggtctgcgcattcagactctacggaaacaatccggcatgactgccggagatctccagcaagtcactggaataggcttaagcaccttgcagaactatgaggccggattaagacaaccatctatacctgccatcaagaaaatcgcgcacgccctgaaagcatcagcgccttatatcgcgtgcttaacagataacccgttcccaccccagaatactaacgctcctgttattcctgggcttgtagctataaaaaatgacatagcatcgcacgccggagaaaagccagtgctggcgatagaacaggagattctacgaagcaagaacatcaacccatcgtctctgtctgttctccagagcaacgatgagctaaagctaatgtcaccaacaatatcccctggctcccaagtcctgattaatacagacgatacagagattcatgaggggatctatgcccttgaagacagaaatggcctggttgttttgaggcactgtagagtcataccgggtgacaatgctgttatgctgtcaaccgaaagggatgctgaaatgaacactaagcatctgaataacgaggaatttaagcgttataaagttcttggccgcgtagttagtgttgtcaactggttatga

SEQ ID NO: 468066 - DNA, 375 bp, Shigella boydii
atggaattacatacagccaataaaaacgaaactctgatcactgctggaatcgaaatccaagcgttgaacatagcgattgagtgtatgttatgccaactcattgataatgagaaagatatcgactggatagaatctatccttcatctggcatcagaacaaaaagtctgcctcaaaacggccttacaatacgatgtgccagcgatatcgaagctgtgccagccattgatggcatataacagggctattatttctgtatgcctcatgattctcgatgaaaacacccctcttagcgaccgctcagaagctgctctaaccctctcacgtaaacagcgacagctagcaaatcaactgatatcaacgatagctgacctctga

SEQ ID NO: 468067 - DNA, 654 bp, Shigella boydii
atgactatatctgtaggtattttcaacggaaaaggcggcgtaaccaaatcaaccattgctcgtgctttagcagttgcttatgcaaaggctggctggaatgtatgcctgatcgatatggatgtgcttaacggaacggtaacgcgttgggtacaacgcagaatggccaacaatatcgaacctgcaatcgcggcgcagccgtgcggcacgccatcacaagtccagaaaatcatcgaatcagaagtatacgacctggttatcgttgatggcggtgcctacgcatctgaatcagtaccgaagctctctgaatttctggatatggttattttgccaaccagattctctaccgatgacctggaaaccaccgttaacacagctcacggcatcgttaaaaagggtgtaccaatcaagaaaatttgcatggtgttttccggcgcggctgaaaacgaagctgactatattgaagcccaagagtacctggctaatacgccatactttgttgtcgataagtacattccccacaagccagctctgagcaaagctcaggataaaggcttaagcctcattgagtgctcatacgttgcgccacgcaaaaaagcagacgacgttattcaggggattatcaaccagcttgaggctctgactactgccgcgtaa

SEQ ID NO: 468068 - DNA, 249 bp, Shigella boydii
atggccgcaccatcaaaaccaccaaagaagaacagcaaaggcgtaccgccatcgatcgaacaaccgcaggttttcgacccgactgaaacgccagccagaaccaaatcaggtggggcacaaatggcgtttaacgtcgaccctgaatttaaacgcgagtacaaaacgttcgccagctcaatggatatgtcattgaaagaagtgctaacaaaatcttttgagttactcaaggctcaatacaaccagaagtaa

SEQ ID NO: 468069 - DNA, 192 bp, Shigella boydii
atgacaaacctaccccatgactattacgtcaacctcgtaaagatccttctcaagaaagcctcatacgccgataaattccgcctggctgaaatcatcgagcgcgaagctatgcgcatcgccagcaacgataacgctgtttctgtcgcaaaaatctccctcgtaaccaaagtagttatgggaggtgcaaaatga

SEQ ID NO: 468070 - DNA, 1143 bp, Shigella boydii
atgaaaacgcttccgaccgttaacaccctacagcctatcctgcataaccagctccccgttatcaccacggagctgcttgccaaactatatggctgtagcgtcgaatgtcttcacagaaatcaccaccgtaataagtcccggtttacagaaggaaaacatttcatagttgtaaaaggtacagatctccaaagtttgaaaatctctttaagagattttcaaaccatcgcgaataacgttagaaagctcatcctctggaccgaacgcggggctgcacgtcacgctaaaatgctcgaaaccgatcaggcatgggatgtattcgaacggctggaagactgctacttcaaccagaacgcgcaaacggccgcgaccgtaaccgtctcaccaaacaatgctcgtgaggttgtcgatacgctcaacgctaaaccaatgtattacgttaaggtgtgcaacaacgagccactcacaacctcagccgatgttgcccaagcattcagcaccacaaacaattccatcgttatggccatcgatgcgttacgcattcctcgcacggctgcggcgcgtcacttctttaaagaacaacgaccgctggaaggaagcgaccgcgaaataacaatctatcgcatgacaaaagacggatttaccttgctcatggaaagtatcgacggtccaggcgtgaaggatatcaagctggcctacattgaagcctttaacgctatcagcagcgtgttaaaggcagaatacgagcgaatgctatacaaccgactgtatcaggaaacaaagattatccgaacggcaacagaacatcatcggctattaacggaaccaaactaccgcaagacactaatcaaagagtttgacaaggcgacggagaaaactaaagcggcactaaatctaccaacaatgactaaagatgatgtgatatcagccttacttcttgatctgctcagaaacgccagagcacttatcagttttgacgaaaacctgaatcctcagctcaagctactaccaccgacaggcaaagtaatcgaccaggctgatcacaacagcatactcagcgttctggatgcaaacctgccagccaggacactacaggatctgataaaaacatgtgctgataagctggcacagaaaagcagaccataa

SEQ ID NO: 468071 - DNA, 516 bp, Shigella boydii
gtgctgataagctggcacagaaaagcagaccataactacaaggggctacggccccttactcttttctctcttatcaacaccagagactttctgaaaatcctttcgaatagcgtcagcgtcacgcgccaagcccatactggaacgtgtcgccatatgacgaaaatgatcaactgccggaaacaaagaaataatggacccaatagcttgcagcaaactcgcttttctacgcatcataattccaccataaccgataaccacccttcagacacaaccccccctccccccatacagggtgccctttaccggagttccggccccttctcaaaagcatcaaaaaaagctcgagatcgagtaccggaactcatgccaccagatagctccacatcgtttccaatgcttcgccgccgtgtgcgccctgtgacccacaatcatgccattggtcgtctgatataccttcttctgctcattgagcacaggcgagttgtcgcactcctgcctttctcagactcgacttag

SEQ ID NO: 468072 - DNA, 273 bp, Shigella boydii
atgacgggttatgaattgaaattatggcgtcgtgggatgaactggacgcaggagcgagccgccgaagaatttgggatatcgttggctacatataagcgatatgagaagggggagccgccgagggtcattgagatggccattcgcgttctgtcatttgacgatatggttaaggatctttcacgccttgataaagacgcgattctgttaaggctgcaaacccttgtatgggaaaaggttaaagtgtcgtcagaattggaacaagggatcaaatga

SEQ ID NO: 468073 - DNA, 381 bp, Shigella boydii
atgagcatgattaaaatccgcaaaaacgctttccttaaaattcaaactatcctggctggttctgttggcgtgatttgccgttcttcttcaagccgcatcgatgacggttacgatgatgagtaccgtgtgtcctcgtgcgatgaggctttaacctggctgaaggagaatcaggaacgtgcccaggtatatctggaaacagagaacggcaatcagatgctgcgtattagcggtcgttatggatttgaaactacattcatggcctattttaatcaggcttactttgacaaggagctggcctggtacactgatcgcatgagcaaaagcgagccagccccgattacaccgccgaacaataaatcatttttattcctcgttaagtaa

SEQ ID NO: 468074 - DNA, 300 bp, Shigella boydii
atgagaacattagatgaggtgattgccagccgttcaccggaaagccaggcgcgaattaaagaaatggcagatgagatgattcttgaggtcggcttgcagatgatgcgtgaagaactccagttatcacaaaagcaggttgctgaggcgatgggtataagccagccagcagtaacaaagctggagcagcgcggaaatgatttaaagctggcgacattaaagcgttacgttgaagctatgggaggcaaattaagcctggatgttgagcttcccacaggaaaacgaatagcgtttaacatctga

SEQ ID NO: 468075 - DNA, 348 bp, Shigella boydii
atgtggacggtactttttagccagcgatttgacggctggctaaatgagcaagaagacgctcttcaggaaaaggttttggctgatttgaaaaagctacaggtttacggacctgagttacccaggccatatgccgataccgtaaaaggttctcggtacaaaaatatgaaagagcttcgcgttcagttttctggccgtccgataagagccttttatgcgttcgatccgattcgccgggctatcgttctttgtgcaggagacaaaagtaacgataagcggttttataaaaaactggtgcgtatagctgaggatgagtttgcagcacatctgaacacactggagagcaagtaa

SEQ ID NO: 468076 - DNA, 264 bp, Shigella boydii; identical to SEQ ID NO: 16696

SEQ ID NO: 468077 - DNA, 288 bp, Shigella boydii; identical to SEQ ID NO: 19998

SEQ ID NO: 468078 - DNA, 981 bp, Shigella boydii
atggaaacaaaaagcccgcagataaatctgcgggcttcttgcgacatccacggaaaaccaacaacaacaatccatgggcgcctcgacaactcccattatacgttggttttccgtggacgcaagagcgaacatatggatagaccaatgccgtctctacgttccgcttacgtttgtaatttgtcgccggagttccagcctccaaagcaccatacgcacaagctgccgctggtgttatctgatgctttacagcgcattaatggtcgtgatcttacgtgtgaggttgcgttctacgttaatcaaccgtcagggcggaagcgccggataaacgagcatcgtcgtcgggcgattaatgctgtgatcgctgcgattttgcaccatgtaaacatcatttctaagcgggttctggctagtgctgaggcgttggctgatttttgcggcctgtctaccgtatccgaagctgggaacaagtctataacgcgctgtacaagggcgttgtcgcaactgaaagcgttaggttttattgattatgaacgtcgctgggatcgggtgaataaacagtattggccagcgaaaatagagattcgtgatcaactgctggaaaccgttggtattactgaacaagcatggagacgtgcggttagccagaaacttaattacttcaatgcgaagaatagcgaacggcttaaaaaagcgataacggaggctgattataagcgtattgttattcaggagcagatggagaatgtatggcgccagaggaagacggccagagagataaaggcaaaacagaaagcagcggagagagctgcgcgtcttgtccgggaaaagggagaggccgaacttcgtcatcaaatcactagagaggttagccaggaatttgctgatggcatgtatccaggtgctgaccttgcatatttacgatccctcgttgagcagcgttataacaggctaagaaagacctggaaatcactccaacattaa

SEQ ID NO: 468079 - DNA, 555 bp, Shigella boydii
atgcaatatggttatgcgagggtgtcaacttttgaccagaatttggaattacaactggaggcgctcaggagtttaggatgtgaccggatttttgaagataaaatatccggtgctaaatcaaaacgaccaggacttgataagctacttaaggtgttacggccgggcgatacggttattgtctggaagctggaccgaatggggcgttccctgattcatcttgttgatttacttaaccattttttatcaaacaacattgagtttatttcgattacggaagggataaaaattagcacttcaattggccgctttgcctacacgatgctgagtgcagtcgcagagatggagcgggaaaatatgattgaaagaacgcgtgcaggattggcggtggcaagggctaacggcaggataggaggacgccgctcaaagctggcaccagagcaatgggaacagatcggaagacttattgcgaatggtgtttcacgtaagcggatagcgattatcttcgatgttaccttatccacgctttaccgcaggtttccggctgggaatcattga

SEQ ID NO: 468080 - DNA, 621 bp, Shigella boydii
atgccggtactactgttaattgcaaaacggtttgcaaatatatcccctgtaacatcaagaccatgccccatgcttatccgaccagttctgagattaagcgtaaaggggcgtagtggccctatatcaccattttctccctcattctctcgtgtcgggatgatatgcaggcattcttcagaacgacgaaaaatagcaccaaaagatgaattaaatatccttagtgcattgactgtcgatatttttacttcactgctgaaaagggctttaacaaggacagacaaagcatcccatttaagattcatcaggtcttttgttgtggtgcttcgtttgcttctccatttgaaatattcattgccgttgtcgcctgtttcaaaccacatgtatgaatcagtatcgctgtcggcatcatttttaaatccaatcttcgcccagtcagtatttcgaatccaggcaaggattgagtcgttttcaaaagtaagcccaccggacaaggtatcgccattcttttgcacggcgttcctggccctgtttaccgtttcctgtaaaccgaggtttttgcgaattgcctctgtgtcgtctgaacgatattttttcccgcttttagcaacaatcgcggtttag

SEQ ID NO: 468081 - DNA, 543 bp, Shigella boydii
gtgaaagaaagcaatcagcgatggtgctctgacgggttcgagttctgctgtgataacggagagagactgcgtgtcacgttcgcgctggactgctgtgatcgtgaggctctgcactgggcggtgactaccggcggcttcaacagtgaaacagtacaggacgtcatgctgggagcggtggaacgccgcttcggcaacgatcttccgtcgtctccagtggagtggctgacggataatggttcatgctaccgggctaatgaaacacgccagttcgcccggatgttgggacttgaaccgaagaacacggcggtgcggagtccggagagtaacggaatagcagagagcttcgtgaaaacgataaagcgtgactacatcagtatcatgcccaaaccagacgggttaacggcagcaaagaaccttgcagaggcgttcgagcattataacgaatggcatccgcatagtgcgctgggttatcgctcgccacgggaatatctgcggcagcgggcttgtaatgggttaagtgataacagatgtctggaaatatag

SEQ ID NO: 468082 - DNA, 870 bp, Shigella boydii; identical to SEQ ID NO: 462147

SEQ ID NO: 468083 - DNA, 564 bp, Shigella boydii
gtgccattcgacaccctgaatgagtcaatcacctgcgacgtttgcgtggttggcggcggctataccgggctctcctccgcgctgcatctggcggaagcgggctttgacgtagtggttctcgaagcctcacgcatcggctttggcgcaagcgggcgcaatggcgggcagcttgtgaactcctacaaccgcgacatcgacgtgatcgaaaaaagctacggcatggacaccgcccctatgctcggcagcatgatgttcgaaggtggtgagatcatccgcgaacgtatcaaacgttatcagattgactgcgactaccgccccggcagcctgtttgtggcgatgaatgataaacagctcgccacacttgaagagcagaaagagaactgggaacgctacggcaataaacagctggaattgctggacgccaacgccattcgccgtgaagtagccagcgatcgctataccggtgcgctgctggatcacagcggtgggcatattcacccactaaacctcgccattggcgaagcggacgcaacggcgggcgcgtgtatgaactttctgccgtga

SEQ ID NO: 468084 - DNA, 399 bp, Shigella boydii
atgacggatgttattcttgatgtttcgcatattgcgaagacatttggtcatgttcaagcattaaaagatattaccctctctttacgtaaagggcgggtgcatactttattaggcgagaatggtgccggtaaatcgacattaatgaaaatactggccggtgtttatccgccaacccagggaacgataacactacgtggtgaaactatcaccattaataatccgcagcattcacgccagttaggaattgcgattatttttcaggaattgagcctgagtaataatatgaccgtggcggaaaatatttatgccaataatgaaccgcgacgttttggcattattaacgataaaaaatgctcgcagattgccagaatctcctcgcggaacggggcataccactag

SEQ ID NO: 468085 - DNA, 837 bp, Shigella boydii
atgaacagtttaacggcaaataaccgtttgtcgcaacagctggtggtcagcgtcgctgaacacctgttgttacggcatgaatgcagattaccaaatcacctggctgtaagtaaccacagagaactttacctgactgtggggggcgagttgtgcaggaacttaaccgctggtttcgtgacggaagaggactttatgttcatgttattcgttgggagccagaaacacagcgcgttatctatcttcgcaaagactacccgcatgagtgctttagtcctttgtggaaattcaggcgtgattttgttgagtgtgaaggaccaccagcacattgattctgccattccgggacgttacactgttcaggcaccttataaagcgggtgtcgggattggcgtcctggaattcaatatagagcataaccgcgctcatgcggttttttcgtatcatgagcattgctacgtccaaattatggtggggcgtgcaggggcatcgcaagatgcgccgggttctatgttgaccggttacgccaaccctgtacgtctcaccacctctgtgattggcgtcccatgtggtgagttctttgaattcaacataggggctgtcaccatgactactctcccaaccctcgctcgtctgaatgatgaagacttacataaactcagttatgtaacaactgcactacgtgctctgcgcaaggtaactctttcggatccgcaggcgcatcaggttctggtagaaacacttcttaacttgcaggctgaacgtattcgtttggcggataaggctaattttcatattcaccgtctcctgaatatcagcggagggcatcgtcatgcttaa

SEQ ID NO: 468086 - DNA, 825 bp, Shigella boydii; identical to SEQ ID NO: 463880

SEQ ID NO: 468087 - DNA, 282 bp, Shigella boydii; identical to SEQ ID NO: 463486

SEQ ID NO: 468088 - DNA, 543 bp, Shigella boydii; identical to SEQ ID NO: 464540

SEQ ID NO: 468089 - DNA, 549 bp, Shigella boydii; identical to SEQ ID NO: 7953

SEQ ID NO: 468090 - DNA, 288 bp, Shigella boydii; identical to SEQ ID NO: 462736

SEQ ID NO: 468091 - DNA, 342 bp, Shigella boydii; identical to SEQ ID NO: 463534

SEQ ID NO: 468092 - DNA, 288 bp, Shigella boydii; identical to SEQ ID NO: 462397

SEQ ID NO: 468093 - DNA, 720 bp, Shigella boydii
atgtcaaagttaaaaaatgaaccattagtaagggtatcagaagaagacggaatagaaataaggaagatccaatatccagataatacgatagaaagaatttataagcagaaaggtgtaatattaccacgaatacctttaaaaggccgctttgtagaacaatatgtggccttacagttgcttgataaagatcttcggaatgttattggttgggagaatataataaaaaacatttgtaataacattaataaagaacaacactttatttatccggatttagaaaagaatctaatattaaagtctttatttatatcaaaagttgttacttacggtaagtgttttacagaggcgaaagggcgtcgattcacattgcagagaaagcatgtgccagaaaaatacagagatttacatgattctattatgaatgttagacataactttgctgcccataaaggtgaattcgaatatgatcaatgtggcttggttttaatattgccggggaccaagaagaaaaggtactatcatattttttcagagctcaatcaaataaattacggtaataatgaggaagatgatgaacgtttttttatgttatatgattcactgcgtgaagtcattaaagaaaaacaagataaattaattgataaaatatacgctgaaaagattcatactcaaacaatggagtattggttgagccgagcaggaaaagaaacagagatttaa

SEQ ID NO: 468094 - DNA, 177 bp, Shigella boydii; identical to SEQ ID NO: 463175

SEQ ID NO: 468095 - DNA, 240 bp, Shigella boydii
atgattactggcgacttaaaaagtaaaatcgacggactatgggaagatttctgggtgggtggtatcaccaacccgctgaccgtaatcgaacagatcacctatctgatgtattcccggatgctggatacccaggaacaacgcgacgaaaagcgtaaacaaatcgcgggtattgattttaaaccgcgttttgcgccagaacagcaggagttccgtttcagtcactatagcaaccttggctag

SEQ ID NO: 468096 - DNA, 294 bp, Shigella boydii; identical to SEQ ID NO: 25632

SEQ ID NO: 468097 - DNA, 294 bp, Shigella boydii; identical to SEQ ID NO: 25632

SEQ ID NO: 468098 - DNA, 162 bp, Shigella boydii
atgaaccgccccgggtttcctggagagtgttttatctgtgaactcaggctgccagatcatcgtttccgatggaagcataataagctttttctgcttctgccggagggatgtggcccagcctttccagcaatcgtcgattattataccagtccacccacgtga

SEQ ID NO: 468099 - DNA, 291 bp, Shigella boydii; identical to SEQ ID NO: 463519

SEQ ID NO: 468100 - DNA, 543 bp, Shigella boydii; identical to SEQ ID NO: 467618

SEQ ID NO: 468101 - DNA, 342 bp, Shigella boydii
atggcgctcaggagccagcgcccacctgccgggctaatccaccactctgatcgaggttcacagtactgcgcatacgattaccgggtcatacaggagcagtttggtctgaaaacatcaatgtcgcgtaaaggtaactgttacgacaacgctccgatggaaagcttctggggaacgctgaaaaatgagagcctgagccactatcgttttaataaccgggatgaagccatctcagtaatacgggaatacattgagattttctacaatcgtcagcgtcgtcactctcgtctggggaatatctccccggcagccttcagggaaaaatatcatcagatggctgcttaa

SEQ ID NO: 468102 - DNA, 342 bp, Shigella boydii
atggcgctcaggagccagcgcccacctgccgggctaatccaccactctgatcgaggttcacagtactgcgcatacgattaccgggtcatacaggagcagtctggtctgaaaacatcaatgtcgcgtaaaggtcactgttacgacaacgctccgatggaaagcttctggggaacgctgaaaaatgagagcctgagccactatcgttttaataaccgggatgaagccatctcagtaatacgggaatacattgagattttctacaatcgtcagcgtcgtcactctcgtctggggaatatctccccggcagccttcagggaaaaatatcatcagatagctgcttaa

SEQ ID NO: 468103 - DNA, 342 bp, Shigella boydii; identical to SEQ ID NO: 463176

SEQ ID NO: 468104 - DNA, 1278 bp, Shigella boydii; identical to SEQ ID NO: 463252

SEQ ID NO: 468105 - DNA, 1455 bp, Shigella boydii; identical to SEQ ID NO: 463559

SEQ ID NO: 468106 - DNA, 969 bp, Shigella boydii
ttgcaggaaacggtaaatcaggcttctggcgcattacagaaaaaccagaacggcgcagatattccaggaaaagataccttcacaaaaaatattggtgcatgtcgcgcttttcacggtgctattagtacaggggcagggaactggacaacggcacaattgattgaatggctggattctcaaggggcattcaatcacccatactggatgtgcaaatgttcatggtcatacggcaataataaaattattaccgatactggctgtggaactattcatcttgcaggttgcgttattgaggttatgggtaataaaggagccatgaccatccgtgtaaccaccccgagcacttccagcggtggcggaactactaatgcacaatttacttatataaaccacggtggagattatgcgccaggctggcggcgtgactacagtaccaaaaatcagcagcctgcatttgctttagggcaaacaggaagtactgtcggaaatgataaagctgttggctggaactggaatagcggggtctataacgcaaatattagtggagcatcgacattaatcctccacttcaatatgaatacggggagcagccctgctgtacagttccgcgtgaattacaggaacggtggtattttttatcgttcagcgcgtgatggttacggattcgaagctgactggtcagaattttacaccacaacacgtaagccatcagcaggagatgttggtgcatataccaaagcggaagcggactcccgttatgtacgtgatatccgacttggtggcgcatcatcatacaaaccagcaaataatggcacaacatggacacatcaggctccatctggttgcgcatataccggaataattgttcaggatacaggctcaaactctgccgataatattggtggtgtttattacagaccaattcaaaaaaatattaatggcacatggtataacgtatcgagtatttga

SEQ ID NO: 468107 - DNA, 534 bp, Shigella boydii
atgatgcatttaaaaaacataaagccaggcaatccaaaaaccgaagaacaatatcttttaactaaaaactcaggcgtcgtctggttatggaccgaagatggtaagaactggtatgaggaacaaaagaactttcaggacgacaccataaagattgcatatgatgaaaataatgttatatgcgacgtgcaaaaggatgtgactgcaatttgcccggagggaaaaagtgtcgttgaggttcctgatattacagcaaatcgccgggctgatatttcgggtaaatggatgttcaaagatggcgtagtgataaagcgaacttataccgaggaagaacagaggcagcaggcagagaatgaaaaacaaagcctgttgcaacttgtcagggataaaacccagctatgggactcacagctacggctgggtatcatttcagacgagaataaacaaaaattaaccgagtggatgctctttgcgcagaaagtcgaatccacagacacctccagcctaccagtaacatttcccgaacaacctgaatga

SEQ ID NO: 468108 - DNA, 528 bp, Shigella boydii
atgcagcatttaaaaaatattaagtcaggaaatccaaaaacaaaagagcaatatcagctaacaaagaattttgatgttatctggttatatacagaagacggtaaaaactggtatgaggaagtaaataactttcaggaagacaccataaagattgtttacgacgaaaataatattattgttgccataaccaaagatgcctcaacgcttaatcccgaaggctttagtgtcgttgagattccagatataacagtcaatcgtcgtgccgatgattcagggaagtggatgtttaaggacggagctgtggttaagcggatttatacagcagacgaacagcaacaacaggccgaatcacaaaaggccgcattgctttccgaagctgaatcagtcatccagccactggaacgcgctgccaggctgaatatggcaacagacgaggagcgcacacgactggaagcatgggaacgctacagtgttctggtcagccgtgtggatacggcaaatcctgaatggccacaaaagcctgaataa

SEQ ID NO: 468109 - DNA, 543 bp, Shigella boydii; identical to SEQ ID NO: 467618

SEQ ID NO: 468110 - DNA, 840 bp, Shigella boydii; identical to SEQ ID NO: 462680

SEQ ID NO: 468111 - DNA, 822 bp, Shigella boydii
ttgtttaaagcaaatcatgttccggtattaatgtatcatcatgtcagccattgcccaggactggttacactttctcccgagacattccggaaacaaatgaaatggttggctgaaaacaactggaaaacactgtcatcagatgaactggagtttttttatcggggcggaaaacttccccgtaaaagcgttatgttgacatttgatgatggataccttgacaactggtttcaggtatatcctttattaaacgagtttaatctcaaggcacatatttttttaattaccagttttattggaaatggtccggttcgtcactctcctggaaaggaatattctcatcgcgattgcgaacatcaaatagcaaccgggaatgctgataatgttatgcttcgctggtctgaagtgaacgaaatgttgcaatctggtctggtcgaatttcatgttcatacacatactcatacacgttgggataaaaagctcacttcacgagaagaacagtgtaaacatcttcggcaggacttattgagcgggagagaatatttaaaaaaaatgacaggaaaatgcagtaaacatttgtgttggccggaaggttattataacaaggattatattcagatcgctgaagaacttggattccattatttatatacaacagaaagaagaatgaatgctcctgctaaaggaactacacggataggaagaataagcaccaaggaacgggaaaattgcgtatggctgaaaagacgacttttttattatacaacaccgtttttttcatcgttgctggcccttcataaggggccaagattaccggatgactaa

SEQ ID NO: 468112 - DNA, 213 bp, Shigella boydii
atgtcaaatacacagaaaattattaacactgaaaaatataacgagtgggtgaaaaaattctctgaacagatttttaaaattactggcgacgagaatgtggcaaaaaatgaattagaaccgtggacacctgaaggaaacgcaccaaattattgctggtgggaggttgatccggttgatgctgcaaatgaagccatgagttaccacaacgattaa

SEQ ID NO: 468113 - DNA, 294 bp, Shigella boydii; identical to SEQ ID NO: 466223

SEQ ID NO: 468114 - DNA, 261 bp, Shigella boydii; identical to SEQ ID NO: 467161

SEQ ID NO: 468115 - DNA, 594 bp, Shigella boydii; identical to SEQ ID NO: 463274

SEQ ID NO: 468116 - DNA, 294 bp, Shigella boydii; identical to SEQ ID NO: 25632

SEQ ID NO: 468117 - DNA, 600 bp, Shigella boydii; identical to SEQ ID NO: 462692

SEQ ID NO: 468118 - DNA, 267 bp, Shigella boydii; identical to SEQ ID NO: 463267

SEQ ID NO: 468119 - DNA, 192 bp, Shigella boydii
atgacaaacttaccccatgactattacgtcaacctcgtaaagatccttctcaagaaagcctcatacgccgataaattccgcctggctgaaataatcgagcgcgaagctatgcgcatcgccagcaacgataacgctgtttctgacgcaaaaatctccctcgtaaccaaagtagttatgggaggtgcaaaatga

SEQ ID NO: 468120 - DNA, 225 bp, Shigella boydii
atgtggtttagtctgttaaaatcccgccgtattgacatgaatgcgccattggtggacactttccgagccgtagcaaaatctacggtcgggattagcctcctgaataacacgatggcgcataccgcgttagcggtttttttatgcgtagagcactgttacgcccaaattatggtgggtcgtacaggggcggagaaatccgcgccggttcgtcattgtgtccggtaa

SEQ ID NO: 468121 - DNA, 717 bp, Shigella boydii
atgtattacgttaaggtgtgcaacaacgagccactcacaacctcagccgatgtagcccaggcattcagcaccacaaacaattccatcgttatggccatcgatgcgttacgcattcctcgtacagctgcggcacgtcatttctttaaagagcaacgaccgctggaaggaagcgaccgcgaaataacaatctatcgcatgacaaaagacggatttaccttgctcatggaaagtatcgacggtccaggcgtgaaggatatcaagctggcctacattgaagcctttaacgctatcagcagcgtgttaaaggcagaatacgagcgaatgctatacaaccgactgtatcaggaaacaaagattatccgaacggcaacagaacatcatcggctattaacggaaccaaactaccgcaagacactaatcaaagagtttgacaaggcgacggagaaaactaaagcggcactaaatctaccaacaatgactaaagatgatgtgatatcagccttacttcttgatctgctcagaaacgccagagcacttatcagttttgacgaaaacctgaatcctcagctcaagctactaccaccgacaggcaaagtagtcgaccaggctgatcacaacagcatactcagcgttctggatgcaaacctgccagccaggacactacaggatctgataaaaacatgtgctgataagctggcacagaaaagcagaccataa

SEQ ID NO: 468122 - DNA, 342 bp, Shigella boydii; identical to SEQ ID NO: 460954

SEQ ID NO: 468123 - DNA, 276 bp, Shigella boydii
atggttctggaaagtcagggcgaatatgactcacaatgggcgacaatttgttccattgctccaaagattggctgtacgccggagactctgcgtgtctgggttcgccagcatgagcgggataccgggggcggtgatggagggctcaccaccgctgaacgtcagcgtctgaaagagctggaacgtgaaaatcgtgaactgcgccgcagtaacgatatccttcgccaggcttccgcttattttgcgaaggcggagttcgaccgcctctggaaaaaatga

SEQ ID NO: 468124 - DNA, 168 bp, Shigella boydii
atggttctggaaagtcagggcgaatatgactcacaatgggcgacaatttgttccattgctccaaagattggctgtatactggagactctgcgtgtctgggtacgccagcatgagcgggataccggaggcggtgaggtgggctcaccaccgctgaacgtcagcgtctga

SEQ ID NO: 468125 - DNA, 663 bp, Shigella boydii
atggacttcctggagcatctgcttcatgaagaaaaactggcacgtcatcaacgtaaacaggcgatgtatacccgaatggcagccttcccggcggtgaaaacgttcgaagagtatgacttcacattcgccaccggagcaccgcagaagcaactccagtcgttacgctcactcagcttcatagaacgtaatgaaaatatcgtattactggggccatcaggtgtggggaaaacccatctggcaatcgcgatgggctatgaagcagtccgtgcaggtatccaagttcgcttcacaacagcagcagatctgttacttcagttatctacggcacaacgtcagggccgttataaaacgacgcttcagcgtggagtaatggccccccgcctgctcatcattgatgaaataggctatctgccgttcagtcagaaagaagcaaaactgttcttccaggtcatcgctaaacgttatgaaaagagcgcaatgatcctgacatccaatctaccgttcgggcagtgggatcaaacgttcgccggtgatgcagcactgacctcagcgatgctgggccgtatcttacaccactcacatgtcgttcaaatcaaaggagaaagctatcgactcagacagaaacgaaaggccggggttatagcagaagctaatcctgagtaa

SEQ ID NO: 468126 - DNA, 300 bp, Shigella boydii
atgagcagaaaaacccaacgttactctaaagagttcaaagccgaagctgtcagaacggttcttgaaaatcaactttcgatcagtgaaggcgcttcccgattatctcttcctgaaggcactttaggacaatgggttaccgccgccagaaaagggctcggtactcctggttcccgcacggtggctgaactggaatctgaaattctgcaactgcgtaaggcgttaaatgaagctcgccttgagcgagatatattaaaaaaagcaacgtattttgcacaggagtcgctgaaaaatacgcgttaa

SEQ ID NO: 468127 - DNA, 123 bp, Shigella boydii; identical to SEQ ID NO: 463321

SEQ ID NO: 468128 - DNA, 294 bp, Shigella boydii; identical to SEQ ID NO: 25632

SEQ ID NO: 468129 - DNA, 543 bp, Shigella boydii; identical to SEQ ID NO: 464540

SEQ ID NO: 468130 - DNA, 543 bp, Shigella boydii; identical to SEQ ID NO: 467618

SEQ ID NO: 468131 - DNA, 543 bp, Shigella boydii; identical to SEQ ID NO: 464540

SEQ ID NO: 468132 - DNA, 288 bp, Shigella boydii; identical to SEQ ID NO: 462736

SEQ ID NO: 468133 - DNA, 288 bp, Shigella boydii; identical to SEQ ID NO: 462736

SEQ ID NO: 468134 - DNA, 276 bp, Shigella boydii
atggttctggaaagtcagggcgaatatgactcacagtgggcggcaatttgttccattgccccaaagattggctgtacaccggagactctgcgtgtctgggtacgccagcatgagcgggataccggaggcggtgatggcgggctcaccaccgctgaacgtcagcgtctgaaagagctggaacgtgaaaatcgtgaactgcgccgcagtaacgatatccttcgccaggcttccgcttattttgcgaaggcggagttcgaccgcctctggaaaaagtga

SEQ ID NO: 468135 - DNA, 378 bp, Shigella boydii; identical to SEQ ID NO: 462723

SEQ ID NO: 468136 - DNA, 435 bp, Shigella boydii
ttgtccgcgaaccagattgaaggcgatctcgttaaaacagtgggcaaacctttcccacgggactcccgggcaccggagaggtggccatcagggaccattaccgtcagggtttatgacgatcagccgtttgatcggcaaattgttattcccgcggtggcgtttcgcggtgctaaacatgagcggaagaataacaatatttattcgtcatgcagcctgatagtgaagaaaaacggtgctgaaatttataaccgaacgaccctggataatacgctgatatatacgggtgttattgatatgcctgccggtcacggtcacatgacgctggagttttctgtatcggcatggctggtaaatggctggtatcccacagcaagtatcagcgatttgctggttgttgtgatgaagaaagccactgcaggcatcacgattagctga

SEQ ID NO: 468137 - DNA, 294 bp, Shigella boydii; identical to SEQ ID NO: 463325

SEQ ID NO: 468138 - DNA, 123 bp, Shigella boydii; identical to SEQ ID NO: 463327

SEQ ID NO: 468139 - DNA, 189 bp, Shigella boydii; identical to SEQ ID NO: 462626

SEQ ID NO: 468140 - DNA, 180 bp, Shigella boydii
atgctgcagcagataatcagcgcaagcagtcgtccgggtgacctggttgcagatttttttatgggctcaggttcaacggtaaaagcggcactggcgcttgggcgtcgtgcgattggcgttgaactggagaccggacgttttgagcagacagtcagggaagttcaggatttaatcgtttga

SEQ ID NO: 468141 - DNA, 171 bp, Shigella boydii
gtgaccgagccaaatcaggtgtggtgcggtgatgtgacctgtatctggacgggtaagcgctgggcgtacctcgccgttgttctcgacctgttcgcaataaaaccagtgggctgggccatgtcgttctcgccggacagcaggctcaccatgaaagcgctggaaatggggtaa

SEQ ID NO: 468142 - DNA, 843 bp, Shigella boydii
atggagaatactaattattataagttagctatcttaattgtactttatggaaaagaagtagaacagtgtgaaacatttactcatatagatagagttctaaaaaaaaataggatgtcaaaggatgatattattctgtgtctttggaataatggcccaagagaaatcgcatttaatctgactacagattactataccttaaaagtttgtcaaacaataaataatgaatcattaagttatatatataatttatttattaatgaggtggagtcagaaaaatatattttactagatcatgattccatattgaaatatgattatgttttggaatgtcttaattctacatctgattgtatcattcctaatataatagtaggaaacaatattcaaagtcctaaaacatatagcattcaatcgtttaacaagggaaatacagtgcttgctattgggagtggaatttgtatatctaaaaaattatgtgagaaacttcgacaagtatttggtgatgtttttgattctaggttttatttttatggtgttgattcaactttttttctacggctgaataaaattggggaaagtgagtttataaaaatcagtgagtgcgttgtattgcattcattgtctagactagaaaatgaagctataaaagtaaagcaatttagaattaaagaaagaagttatgatcaaggattaacattaagatattatttctgtaaatttacgttttttactgtcgcaaaaaaacttcttgcgaagttgatttttaataaaagtgatataagtttaatatattttgcaaaagcatattttagcggtaagcattataagagcggtaaatcatga

SEQ ID NO: 468143 - DNA, 150 bp, Shigella boydii
atgggtaatatccgtctccagcgcattacccgcatcagagataagcggcacaccagaataaggatgccggccaccaaacaagacgtgaaaaatcagcaacgcaaggccaaaattatcgtgattttctgtgcgttcaaagccgacaaatga

SEQ ID NO: 468144 - DNA, 132 bp, Shigella boydii; identical to SEQ ID NO: 463454

SEQ ID NO: 468145 - DNA, 543 bp, Shigella boydii
gtgaaagaaagcaatcagcgatggtgctctgacgggttcgagttctgctgtgataacggagagagactgcgtgtcacgttcgcgctggactgctgtgatcgtgaggcactgcactgggcggtgactaccggcggcttcaacagtgaaacagtacaggacgtcatgctgggtgcggtggaacgccgcttcggcaacgatcttccgtcgtctccagtggagtggctgacggataatggttcatgctaccgggctaatgaaacacgccagttcgcccggatgttgggacttgaaccgaagaacacggcggtgcggagtccggagagtaacggaatagcagagagcttcgtgaaaacgataaagcgtgactacatcagtatcatgcccaaaccagacgggttaacggcagcaaagaaccttgcagaggcgttcgagcattataacgaatggcatccgcatagtgcgctgggttatcgctcgccacgggaatatctgcggcagcgggcttgtaatgggttaagtgataacagatgtctggaaatatag

SEQ ID NO: 468146 - DNA, 297 bp, Shigella boydii; identical to SEQ ID NO: 463086

SEQ ID NO: 468147 - DNA, 210 bp, Shigella boydii; identical to SEQ ID NO: 463045

SEQ ID NO: 468148 - DNA, 543 bp, Shigella boydii; identical to SEQ ID NO: 464540

SEQ ID NO: 468149 - DNA, 837 bp, Shigella boydii
gtgcaaaaaaatggcgataccttgtccggtgggcttacttttgaaaatgactcaatccttgcctggattcgaaatactgactgggcgaagattggatttaaaaatgatgccgatggtgacactgattcatacatgtggtttgaaacaggcgacaacggcaatgaatatttcaaatggagaagccgccagagcaccacaacaaaagacctgatgacgctgaaatgggatgcactaaatattcttgttaatgctgtcattaatggcagtcttggagttggttcgacgaatgcgttaggtggtagctctattgttcttggtgataatgacaccggatttaaacagaatggagacggtattctggatgtttatgctaatagtcagcgtgtattccgctttcagaatggagtggctattgcttttaaaaatattcaggccggggatggtaaaaaattcacgctatccagctccaacaactccacaaagaatgcaacgtttaatttatggggtgcttcaacccgtccagtagttgcagagttaggcaatgaggcaggatggcatttctatagccagcgaaatacagataactcggtaatattttctgttaacggtcagatacagcccagcaactgggggaattttgattcacgctatgtaaaagatgttcgcctgggtacgcgtgttgttcaattgatggcgcgtggtggtcgttatgaaaaagccggacacgcaattaccggattaagaatcattggtgaagtagatggcgatgatgaagccatcttcagaccaatacaaaaatacatcaatggcacatggtataacgtcgcacaggtgtaa

SEQ ID NO: 468150 - DNA, 1449 bp, Shigella boydii; identical to SEQ ID NO: 463497

SEQ ID NO: 468151 - DNA, 228 bp, Shigella boydii
atggcggaaaaaatccgtaaaggcgttgaactgcaaccattcacctggcaacaaaaaacgctttatctcatggtaagtattggcgtcggtagtggtcgcgcatcgtaccgaacgctgaccgatgattttaataaattgatggtcgaagccgatacgtgtctgtatcgctcgaagaaagatgggcgcaaccgtaccagcactatgcgttacggtgaggaagttgtctga

SEQ ID NO: 468152 - DNA, 927 bp, Shigella boydii; identical to SEQ ID NO: 467061

SEQ ID NO: 468153 - DNA, 543 bp, Shigella boydii; identical to SEQ ID NO: 467618

SEQ ID NO: 468154 - DNA, 147 bp, Shigella boydii
atgaaaaaaaagatagggggatctatgattctcgttcttgctgttttgtgtctgactgcttgccaagctaactatgtaagggatgttcagggaggaacaattgctccatcatcatcttcgaaactaatcggggtggcggttcagtga

SEQ ID NO: 468155 - DNA, 264 bp, Shigella boydii
atgaacaagatggcaataatcgatttggcgaaattatttttagcttcgaaaattacagcaattgagttttcagagcgaatttgtgttgaacggagaagattgtatggtgttaaggatttgtctccgaatatattaaattgtggggaagagttgtttatggctgctgagcgatttgagcctgatgcagatagggctgattatgaaattgatgataatggacttaaggttgaggtccgatctatcttggaaaaatttaaattataa

SEQ ID NO: 468156 - DNA, 2094 bp, Shigella boydii
atgagtgattacgaaggtagtggtccgacagaaggtattgattatgggcactcgatggtcgtgtggccgtcaacaggactgatttcgggtggtgatgtgaaaccaggaggctcatcaggtatcgctccatccatgcctccgggatggggggattacagcccacagggtatcgcacttgtacaaagtgttctttttccgggaattattcgccggattattctggataaggaacttgaagagggagactggtcgggatggtctgtcagtgtgcatagcccttggggaaacgagaaagtttccgctgcacgaacagttcttgagaatggtttacgtggtggtttgccagaaccgtctcgcccggctgctgtttcttttgcccgtctggagcctgcttccggaaatgagcaaaaaattattcgtcttatggttacacagcaactggaacaggtaacggatattccggccagccagttaccagcagcgggtaataatgtaccggtgaaatatcgtctgatggaccttatgcagaacggtacgcaatatatggctattatcggaggtattccgatgacagtgccggtagttgatgccgttccagttccggaccggagtcgtccgggaacaaatattaaagatgtttacagtgcccctgtatcaccagatctaccggacctggtattaagtgtgggtcagatgaatactccggttctgtctaatcccgaaattcaggaagaaggagttattgctgagacaggtaattatgttgaggctggttatacgatgtccagtaataatcatgatgtcattgttcgttttcctgaaggcagtggtgtttctccgttatatatttcaactgtagagattctggacagtaatggtctgagtcagcgtcaggaagccgaaaataaagcaaaggatgatttcagagtcaagaaagaagaagcggtagcccgggctgaagctgaaaaagcaaaagccgagttatttagtaaagcaggtgtgaaccagcctcctgtatatacacaggaaatgatggaaagggctaattcagtaatgaatgagcagggagctcttgttctgaataacactgccagttctgtacaactggcgatgaccggaactggtgtctggactgctgctggtgatattgcaggcaacataagcaagtttttcagtaatgctctggagaaagtaaccatacccgaagtgagtcccctgcttatgcggatttctcttggtgctctgtggtttcattcagaagaagctggagcaggaagtgatatcgtgccggggcgaaatctggaggcgatgttttcgctgagtgctcagatgttggctggacagggcgtggtcattgaacctggtgcgacgagtgtaaatctgcctgttcgtggacaattgataaacagtaacgggcaattagctctggatttactgaaaacagggaatgaaagtatcccggctgcggttcctgttcttaatgctgtccgtgatacagcaacaggactggataaaatcacgttaccagcagtagtaggcgcaccttcccggacgattctggttaatccggtaccacaaccttcggtgccaacagatacaggtaatcatcaacccgttccggttacaccagtgcatacaggaacggaagtaaaaccggtcgaaatgccagtaacgacgattactcctgtttctgatgttggtggactacgagattttatttactggcgtcctgatgctgctgggactggtgttgaagctgtttatgtgatgcttaatgatcctctggattcagggcgattttcgcgtaaacaacttgataaaaaatataaacatgctggtgattttggtattagtgatacaaaaaagaatcgtgaaactcttactaaattcagggatgctattgaggagcatttatcggataaggatacagtagagaaaggaacataccgaagagaaaaaggttcaaaagtttattttaatcctaatacgatgaatgtggttataattaagtcaaatggtgagttcttatctgggtggaaaataaatccagatgcggataatggtcgaatttatttagagacaggtgaactatga

SEQ ID NO: 468157 - DNA, 246 bp, Shigella boydii; identical to SEQ ID NO: 37739

SEQ ID NO: 468158 - DNA, 291 bp, Shigella boydii; identical to SEQ ID NO: 463519

SEQ ID NO: 468159 - DNA, 225 bp, Shigella boydii; identical to SEQ ID NO: 467141

SEQ ID NO: 468160 - DNA, 225 bp, Shigella boydii
atgtcgcgtaaaggtcactgttacgacaacgctccgatggaaagcttctggggaacgctgaaaaatgagagcctgagccactatcgttttaataaccgggatgaagccatctcagtaatacgggaatacattgagattttctacaatcgtcagcgtcgtcactctcatctggggaatatctccccggcagccttcagggaaaaatatcatcagatggctgcttaa

SEQ ID NO: 468161 - DNA, 543 bp, Shigella boydii; identical to SEQ ID NO: 464540

SEQ ID NO: 468162 - DNA, 414 bp, Shigella boydii; identical to SEQ ID NO: 463211

SEQ ID NO: 468163 - DNA, 342 bp, Shigella boydii; identical to SEQ ID NO: 460954

SEQ ID NO: 468164 - DNA, 261 bp, Shigella boydii; identical to SEQ ID NO: 463924

SEQ ID NO: 468165 - DNA, 213 bp, Shigella boydii; identical to SEQ ID NO: 463936

SEQ ID NO: 468166 - DNA, 486 bp, Shigella boydii
atgctcggtagccagacgtttgtcgtgttgtgtgcctgcgcaatattacgctggcagctggggacgcgttggcgttatggattgaccagccgatatgtctggcaacgtctgttctggcttggtttggtgacgccgatcggcatcaaatgcagcatgtatcttgtggggagcttctttgatttcccgctaaagatatccacctttttcggcgatgcggatgccattttcacggtcgttgatttgctaagccttttcaccgctgtgctgatttacaacatgcttttctactatctcactcgcatgattgtaagtccccactttgcgcagatattgtggcgcagggatatcgcgccgtcgttgggcaaagagaaacgcgcatttaccttaagctggctggcagcgttaagcgtgcttctacttctgttgtgcacaccttatgaaaacgactttattgccggttacctggtacccgttttcttcatctga

SEQ ID NO: 468167 - DNA, 543 bp, Shigella boydii; identical to SEQ ID NO: 464540

SEQ ID NO: 468168 - DNA, 543 bp, Shigella boydii
gtgaaagaaagcaatcagcgatggtgctctgacgggttcgagttctgctgtgataacggagagagactgcgtgtcacgttcgcgctggactgctgtgatcgtgaggcactgcactgggcggtgactaccggcggcttcaacagtgaaacagtacaggacgtcatgctgggagcggtggaacgccgcttcggcaacgatcttccgtcgtctccagtggagtggctgacggataatggttcatgctaccgggctaatgaaacacgccagttcgcccggatgttgggacttgaaccgaagaacacggcggtgcggagtccggagagtaacagaatagcagagagcttcgtgaaaacgataaagcgtgactacatcagtatcatgcccaaaccagacgggttaacggcagcaaagaaccttgcagaggcgttcgagcattataacgaatggcatccgcatagtgcgctgggttatcgctcgccacgggaatatctgcggcagcgggcttgtaatgggttaagtgataacagatgtctggaaatatag

SEQ ID NO: 468169 - DNA, 1455 bp, Shigella boydii
atgaaaatacctgaagcagtaaatcatattaatgttcagaataatattgatcttgttgatggaaaaacgaatccgaataaagcaacaaaagcattacaaaaaaatatattacgcgtaacaaactcatcttcttctggcataagtgaaaaacatttagatcactgtgctaatactgtgaaaaactttttaaggaagtctatagcagcgcaaagttatagcaaaatgttttctcaagggaccagtttcaaatcactaaatctttctattgaagcgccatctggagcacggtcatcatttcggtcacttgagcatctcgataaggtgtccagacactatatctctgagataatacaaaaagctcatcctctttcttcagacgaacgtcacttactttctattattattaattctaattttaacttcagacatcaaagtaactctaatctgtcaaataatattcttaatattaaatcctttgataaaattcagtctgaaaatatacaaacacataagaatacatactctgaggatattaaagaaatctctaaccacgattttgttttttttggggttgaaatttccaatcatcaagaaaaactcccgctaaataaaacacatcatactgtagattttggcgccaatgcgtatatcattgatcatgactctccatatggatatatgacattaaccgatcactttgataatgctattccacctgttttttaccatgagcaccaatcatttttcttagataactttaaagaggttgtggatgaagttagcaggtatgtgcatggtaatcaggggaaaactgatgttccaatatttaacactaaagatatgaggcttggaattgggttgcatcttattgattttataagaaagagtaaagatcaaggattcagagagttttgttataacaaaaatattgatcctgttagtctggatagaattataaactttgtgtttcagcttgagtatcatataccaagaatgctaagtacagataacttcaaaaaaataaaactcagagacatatctttggaggatgcgattaaagcatctaattatgaagagattaacaataaagtgactgataaaaaaatggctcatcaggcccttgcttattctttaggcaataaaaaagctgatatagcactttatttactatctaaatttaattttacaaaacaagatgtcgcagagatggagaaaatgaacaacaatagatattgtaatctgtatgatgttgaatacttacttagtaaagatggtgccaactataaagtgctagaatattttatcaataatggattggttgatgtaaacaaaaaatttcaaaaagcaaatagtggggacactatgcttgacaatgcaatgaaaagcaaaaatccaaaaatgattgattttttattaaaaaatggagcaatattaggcaaacgatttgagatatga

SEQ ID NO: 468170 - DNA, 1230 bp, Shigella boydii
gtggtaaaaaaaatagttaatcaatttatttaccagtttgggaattatattctaccctttcttataattcctttcttaatcaataaactctctattgcggtctataaagattttgttgttattcaatcattagtattattttttgctgttttaattaattatgggctggatctgtttggtgttagatatattagtaataatgtaaagcatctaagaaaatgtaagagttttctttatatttccatattgtcacggctctgtatttttatattttgctcattctttttgcttgtgtcgttgatggcattgactaaacccgacctcctttattggttgctatgttttttttggatgctaagctttgtatttcaatcaaattggtatttgcaaggatgtggtgattttaagttaattacgttctatggcttacttcctaagcttattgtttatcccttcgtttttattttggtcaataatgataatgatgcttgggtttatctatttttatgtgcaatagcaaattatgcatcaaacatactaatgatgatacatattaggaggaagttgaatgtagtagcttttaaacgtactaatttgctcagaaatgtatggatatttttagttaaagggtggtatatattcctatctcaagctagtgtgacattgatttcttatgccaatattttctttctacctttggtgttggaacctaaaagtttcgttgtcttttcaactgctgaaagaatcgtgaaggtgttatcgattacaacaacgcctattctaaacgttatttttccacatatttcatcattaattgaaaataataaacaaagagtatttataatgatttctcgaatatcattatttagtttaattgtttttctgttatgttacacgttgtatgtttttataggctattatctcatacagcttatttttccaacaatatcacaagaattatactctgtattattattgttgttatttaatgtattcttcgtattccaaaacaatctctttggtacacaaattggattgaattatgggaaagacaaaagcttcactaaaattattgcaatcaatggtattttaaatattatagccatgcctgtatttagtaaactgtatcacctgcatggcacaatattaacatccttatgcatacaattatcaattttgatatgtatgtatatgttggctaaaaaatgtggttataaatttaaggtctaa

SEQ ID NO: 468171 - DNA, 573 bp, Shigella boydii
atgccaaatggtgtttatcttgaaaaccaaaatcatgaatgttttatagatggaactccaaataaggtatatcaattaggatttgttggcttcgttactgataaattagatattgattttttaaataaattatcaaaaaaattcagtatcatcatttggggaaaattttttgatgattctatacgtgataagctgaatgaaaatataaaaatagcgggggcatttaaatactctgatcttccttcaataatgaaatcttttaaagtcggattattgccatatctgccagaaaaatcgcatgatgaatcaccattgaaaatgtatgagtactttaaatatggcattccatgtttatcatctatgaattttgaaattaagagtcgatggtttgttaattatctagaatactcaaaaagagatttgttatatgagaaaataaatgaattaattgtctcaaataattcggaaagcattaaagccagcatacaaaaagaatggttatttgaaataaaagttaataaaattatcgaagatattattcgaaggaaagaatgtggtaaaaaaaatagttaa

SEQ ID NO: 468172 - DNA, 210 bp, Shigella boydii; identical to SEQ ID NO: 463042

SEQ ID NO: 468173 - DNA, 1338 bp, Shigella boydii
gtggaaaccgaatattcgctggcatttattcttgcggtgctgatttcctttagcgtttgcctgctctatatggtgcgcatttatcatcgcagtgaatggcttaatcgccgctggcatttgcaggcgctgaccgatccgttaacgctcctgcccaacttccgtgcgttggaacaagcgccggagcaagaggcgggcaagagtttttgctgcctgcgcattgataatcttgagtttatgagtcgtcattacggcttaatgatgcgcgttcactgtatccgctcaatttgccgtacgctgctgccgttgatgcaggaaaacgaaaagttgtatcaattgccgggtagtgaactgctgttagtgctgagcgggccggaaacggaagggcgactccagcatatggttaacatcctgaatagtcggcaaattcactggaacaataccgggctggatatgggctatggtgctgcctgggggcgttttgatggaaatcaggaaaccctgcaacccttgttggggcagttaagctggctggcggagcaatcctgcgcacatcatcatgtgctggcgctggatagcagagaggagatggtttccgggcagaccactaaacaggtgctattgctgaataccattcgcacggcgttagatcagggtgatttgctgctctacgcccagccaattcgcaacaaagagggtgaaggttatgatgagatcctcgcgcgactgaaatatgacggcggcattatgaccccggataagtttctgccccttattgctcagtttaaccttagcgcgcgttttgatttgcaagtgctggaatccttgttgaagtggctggcaacacacccttgcgacaaaaaaggaccgcgcttttcagtcaatttaatgccgctcacgctgctgcaaaagaatattgccgggcggattattcgtctgtttaagcgttatcacatctccccgcaggcggtcattcttgagatcaccgaggagcaggcgttttctaacgcagaaagcagcatgtacaacatcgagcagctgcataagtttggtttccggattgcgattgatgactttggcaccggctatgccaactacgaacggttaaagcgtttgcaggctgatatcatcaaaattgatggcgtctttgtgaaagatattgtcacgaacacgctggatgcgatgattgtgagatcaattaccgatctggcgaaagcgaagtcattgagtgtggtcgcggagtttgtcgagacgcaacagcagcaggcgctattgcataagctcggggtgcaatatctgcaagggtatttgattggtcgcccgcagccattagctgattaa

SEQ ID NO: 468174 - DNA, 543 bp, Shigella boydii; identical to SEQ ID NO: 467618

SEQ ID NO: 468175 - DNA, 279 bp, Shigella boydii; identical to SEQ ID NO: 463585

SEQ ID NO: 468176 - DNA, 927 bp, Shigella boydii; identical to SEQ ID NO: 463968

SEQ ID NO: 468177 - DNA, 543 bp, Shigella boydii; identical to SEQ ID NO: 462677

SEQ ID NO: 468178 - DNA, 342 bp, Shigella boydii; identical to SEQ ID NO: 462701

SEQ ID NO: 468179 - DNA, 225 bp, Shigella boydii; identical to SEQ ID NO: 462726

SEQ ID NO: 468180 - DNA, 996 bp, Shigella boydii; identical to SEQ ID NO: 463286

SEQ ID NO: 468181 - DNA, 588 bp, Shigella boydii
ttggagtcattacctacttttgtccttgcaaccgaacaatcaacctatttcgagatccctgccgaagactcctggctttttatcgctgacggatctgataaagaacttgattcctgtgccctttcaccaactataaacgaccactttgcctttcatcctattgtcgatcccttatcgcggcggataatcgcttttgaagccattgtgcaaaaaaatgaagatagcccatcagccatagcggttgggcagcgtaaagacggggaaatctacacagcggatctcaaaagtaaggcgcttgcattcacgatggcacacgcacttgagctcggtgataaaatgatttcaatcaatctattacctatgaccctggttaacgaacctgacgcagtctcttttttacttaatgaaataaaggccaatgctctggtgaaccgccccgggtttcctggagagtgttttatctgtgaactcaggctgccagatcatcgtttccgatggaagcataataagctttttctgcttctgccggagggatgtggcccagcctttccagcaatcgtcgattattataccagtccacccacgtga

SEQ ID NO: 468182 - DNA, 342 bp, Shigella boydii; identical to SEQ ID NO: 463304

SEQ ID NO: 468183 - DNA, 288 bp, Shigella boydii
gtgcagatgagccgcctggaacattatgccggtcaggatgaaattggcctgcgttacaacagccaccggacaaaacgagaagaaaaccttgtgatgagtggcgacgagtttatggaaaggttctcctggcatgtggcggataaggggttccggatggtgatacggggtcctgagtccggtgaagcggcgattactggaagatgtggtgtacgccataacggagacagtgagaaaaacggcgaggcaaatcacaaggagagggatgtatcagcagtgactgaaggttga

SEQ ID NO: 468184 - DNA, 543 bp, Shigella boydii
gtgaaagaaagcaatcagcgatggtgctctgacgggttcgagttctgctgtgataacggagagagactgcgtgtcacgttcgcgctggactgctgtgatcgtgaggcactgcactgggcggtgactaccggcggcttcaacagtgaaacagtacaggacgtcatgctgggagcggtggaacgccgcttcggcaacgatcttccgtcgtctccagtggagtggctgacggataatggttcatgctaccgggctaatgaaacacgccagttcgcccggatgttgggacttgaaccgaagaacacggcggtgcggagtccggagagtaacggaatagcagagagcttcgtgaaaacgataaagcgtgactacatcagtatcatgcccaaaccagacgggttaacggcagcaaagaaccttgcagaggcgttcgagcattataacgaatggcatccgcatagtgcgctgggttatcgctcaccacgggaatatctgcggcagcgggcttgtaatgggttaagtgataacagatgtctggaaatatag

SEQ ID NO: 468185 - DNA, 351 bp, Shigella boydii; identical to SEQ ID NO: 462764

SEQ ID NO: 468186 - DNA, 249 bp, Shigella boydii; identical to SEQ ID NO: 463591

SEQ ID NO: 468187 - DNA, 543 bp, Shigella boydii; identical to SEQ ID NO: 464540

SEQ ID NO: 468188 - DNA, 543 bp, Shigella boydii; identical to SEQ ID NO: 464540

SEQ ID NO: 468189 - DNA, 303 bp, Shigella boydii; identical to SEQ ID NO: 459543

SEQ ID NO: 468190 - DNA, 210 bp, Shigella boydii; identical to SEQ ID NO: 463042

SEQ ID NO: 468191 - DNA, 219 bp, Shigella boydii
atgattaacgtacaaaacgtcagtaaaaccttcatcctgcatcagcaaaacggcgtacgcctgcccgtcttacaacgtgcctcgctcaccgtcaacgcaggcgaatgcgtggtgctccacggtcactccggcagcggcaaatcaaccctgctgcgctcgctgtacgccaactatctacccgacgaaggtcaaatccagatcaaacacggtgacgagtag

SEQ ID NO: 468192 - DNA, 825 bp, Shigella boydii; identical to SEQ ID NO: 463880

SEQ ID NO: 468193 - DNA, 282 bp, Shigella boydii; identical to SEQ ID NO: 463486

SEQ ID NO: 468194 - DNA, 720 bp, Shigella boydii
gtgcgtaacctaacgtcactgcgccagccgtcgattcgcgatgtctcgtttgatctgcataaaggggagatcctcggtattgccgggctggtgggggcgaaacgtaccgatattgttgagacgttatttggtattcgcgagaaatcggctggcaccattacgttgcacggcaaacagatcaataaccataatgccaacgaagccataaaccacggatttgcactggtaactgaggagcgccgctcaacgggaatttatgcctatctggatattggttttaactcgttaatttccaatattcgcaactacaaaaataaagttggtttactggataaatcgcggatgaaaagcgatacccagtgggtgattgattcgatgcgggtaaaaacaccggggcatcggacgcaaattggttcgctctcaggtggtaatcagcaaaaggtgattattgggcgctggctactaacgcaaccagaaatattaatgctcgatgaaccgacgcgcggtattgatgtcggggcgaagtttgagatctatcagttaattgccgaactggcgaagaaaggcaaagggattattattatctcctctgaaatgcctgagttgttagggataacagaccgtattctggtcatgagcaatggtctcgtttccggaattgtcgacacaaaaacaacaacgcaaaacgaaattctgcgtcttgcgtctttgcacctttaa

SEQ ID NO: 468195 - DNA, 585 bp, Shigella boydii; identical to SEQ ID NO: 463101

SEQ ID NO: 468196 - DNA, 588 bp, Shigella boydii; identical to SEQ ID NO: 463925

SEQ ID NO: 468197 - DNA, 348 bp, Shigella boydii
atgagtagttggcttgcgatgctgcaagatgccgcagagatgtttgtgtttctcgccgtcgagctttcgttgctgtttatagtgattagtgccggtgtcagcctgataagacaaaaggtgccagaccataaaatccagcagatgatgggggccagaaaagggagaggctatctcctggctgctctgttgggagccgttaccccgttctgtagttgctcgacaatacccattgttacgtggattgttgtgaagtggtcaacaaaaactggccaccgagttagagtttttccagtatcgattttccgattcgtttggggggaacccaccgttatattcgtgcggtcttag

SEQ ID NO: 468198 - DNA, 783 bp, Shigella boydii
ttgcgcggccggcgcggcgcgcagttccagcacctccagcaaggccggcgtgtaacggcgcagggtggcgaagttctcgccgaccaggtgcaggtggtcgaagccttccggccgggccagcagctcggcctcgctgacgctctcggtgaactcgtcccagggaatcaccgcctcgatggcggcataggggtcgctgccgctttccttcgcttccagcagcgcctggccgatcctggagtacaggcgcaccttgtcgttgatcgccttgccctgcttctggaactgctgctgatgcttgtgcttcgcgccgctgaacagcttgaccaggatgcggtcatgcagatcgaccagctcatcgatcacggtcgcggtgctctccagcaccacggcggccagggtcgcgtagcggcgctgcggctcgaacttaccgaggtctttgggcgtcatctgcccaccctcgcgggccagcttgagcaggcggttctggtggatgtgccggcccaggccttcgggcaagtccaccaactgaaatgtcttcagccgctcgatgtgttccagcatgtgccgagagttgggtttcagcggtgcctggcgcagccaggtcaaccaggtgatgctgctgccggccttgagcttcaacagctcgtccagcttggcccgatgcgagtccgtgagtggttcgaccagggcgcggtagacccgccgattggctcgcgcaatggcttccgagcaggcccggtcaatcacgctcagcgccggcaggatgcgtcgtttctgccgtag

SEQ ID NO: 468199 - DNA, 1056 bp, Shigella boydii
ttgcaggtaggtgcgcagttcctgggcatgctcgcgacgggtcacgtcgcgctcgccgtactttgcccagctcgccggctcggcctggacttgcttcgccacccacaggatgaccggctcgggcagctcgctgtcggttcccagcgcgtaaccggggtagcgcagcaggcagagctgcacggcgaagccgaggcggttggcgtcgccgcgtcgctggcggatcagcgacaggtcggagtcgttgaaggtgtagtagcggatcaggtcatcctggctttccggcagcgcaagcagggtgtcccgctccgtggccgagaggatcaagcgacgcggcatgtgtcagtcgtccgtgcggaggtactggtagagggtttcccggctgatgttgaactcgcgggcaagctgcgccttgggctcgccggccgtcgctcgctgccgcagggtagcagcctgctcatcggacagggctttcttgcggccccggtacgcgccacgctgcttggccaaggcgatgccctcacgctgccgctcgcggatcagggcgcgctcgaactcagcgaaggcccccatcaccgacagcatcaggttggccatcggcgagtcctcgccagtgaacaccaggccctccttcaggaactcgatgcgcacgccgcgctgagtcagcttctgtaccaagcgacgcaggtcatcgaggttgcgggccagccgatccatgctgtgcaccaccactgtatcgccttcgcggacgaagctcagcagcgcttcgagctgggggcgctgggtgtccttgcccgatgccttgtcggtgaacaccttgctcacctgggtttgttccagctggcgttccgggttctggtcaaagctgctgacccggacgtagccgatgcggtgcccctgcacgatgtctccttggttgaaggcggcttaagtgcactttctgttccgttgtgcctcaaagcccatttctgtcaggctgaaatctataaccttcgcgggcatgtgtcaaaaaatgggaaagcagactctattctgacgaagcggcgcggccctgcctga

SEQ ID NO: 468200 - DNA, 507 bp, Shigella boydii
atgaataatgacaataccgattacgtgagtaatgaatcagggatgctttcgcgattatttaaactacctcagcatgggaccaccgtccgcacagaattgattgcggggatgaccacttttttaaccatggtgtacatcgtttttgtgaacccgcaaatcctcggcgcggcacaaatggacccgaaagtggtgtttgttaccacctgtttgattgccggtatcggcagtattgcgatggggatatttgctaacttacccgtggcgctggctccggcaatggggctgaacgccttctttgccttcgtggtcgtgggggcgatgggcatctcctggcagaccgggatgggcgcaatattctggggcgcagttggactatttttgctcacgctgtttcgtatccggtactggatgatctccaacattcccggtaatgactccaacttactgatagtgttttatgttcagataatgcccgatgaccttgtcatgcagctccaccgattttga

SEQ ID NO: 468201 - DNA, 282 bp, Shigella boydii
atgacgaaagaattgacgggtaaagccctgtttatggcgctcaggagccagcgcccacctgccgggctaatccaccacaccgatcgaggttcacagtactgcgcatacgattaccgggtcatacaggagcagtctggtctgaaaacatcaatgtcgcgtaaaggtaactgttacgacaacgctccgatggaaatcttctggggaacgctgaaaaatgaaagcctgagccactatcgttttaagagccgggatatttcgtcagcatacgggaaaactgattga

SEQ ID NO: 468202 - DNA, 351 bp, Shigella boydii; identical to SEQ ID NO: 467400

SEQ ID NO: 468203 - DNA, 177 bp, Shigella boydii; identical to SEQ ID NO: 463175

SEQ ID NO: 468204 - DNA, 1131 bp, Shigella boydii; identical to SEQ ID NO: 462493

SEQ ID NO: 468205 - DNA, 216 bp, Shigella boydii; identical to SEQ ID NO: 467445

SEQ ID NO: 468206 - DNA, 291 bp, Shigella boydii; identical to SEQ ID NO: 463519

SEQ ID NO: 468207 - DNA, 846 bp, Shigella boydii; identical to SEQ ID NO: 463917

SEQ ID NO: 468208 - DNA, 123 bp, Shigella boydii; identical to SEQ ID NO: 463918

SEQ ID NO: 468209 - DNA, 543 bp, Shigella boydii
gtgaaagaaagcaatcagcgatggtgctctgacgggttcgagttctgctgtgataacggagagagactgcgtgtcacgttcgcgctggactgctgtgatcgtgaggcactgcactgggcggtgactaccggcggcttcaacagtgaaacagtacaggacgtcatgctgggagcagtggaacgccgcttcggcaacgatcttccgtcgtctccagtggagtggctgacggataatggttcatgctaccgggctaatgaaacacgccagttcgcccggatgttgggacttgaaccgaagaacacggcggtgcggagtccggagagtaacggaatagcagagagcttcgtgaaaacgataaagcgtgactacatcagtatcatgcccaaaccagacgggttaacggcagcaaagaaccttgcagaggcgttcgaacattataacgaatggcatccgcatagtgcgctgggttatcgctcgccacgggaatatctgcggcagcgggcttgtaatgggttaagtgataacagatgtctggaaatatag

SEQ ID NO: 468210 - DNA, 927 bp, Shigella boydii; identical to SEQ ID NO: 467061

SEQ ID NO: 468211 - DNA, 414 bp, Shigella boydii; identical to SEQ ID NO: 463211

SEQ ID NO: 468212 - DNA, 543 bp, Shigella boydii; identical to SEQ ID NO: 464540

SEQ ID NO: 468213 - DNA, 288 bp, Shigella boydii; identical to SEQ ID NO: 463938

SEQ ID NO: 468214 - DNA, 360 bp, Shigella boydii
atggcgctcaggagccagcgcccacttgccgggctaatccaccactctgatcgaggttcacagtactgcgcatacgattaccgggtcatacaggagcagtctggtctgaaaacatcaatgtcgcgtaaaggtaactgttacgacaacgctccgatggaaagcttctggggaacgctgaaaaatgagagcctgagccactatcgttttaataaccgggatgaagccatctcagtaatacgggaatacattgagattttctacaatcgtcagcgtcgtcactctcgtctggggaatatctccccggcagccttcagggaaaaatatcatcagatgactgctcaaaaaaagaacaaatggtag

SEQ ID NO: 468215 - DNA, 543 bp, Shigella boydii; identical to SEQ ID NO: 464540

SEQ ID NO: 468216 - DNA, 543 bp, Shigella boydii; identical to SEQ ID NO: 464540

SEQ ID NO: 468217 - DNA, 543 bp, Shigella boydii; identical to SEQ ID NO: 467618

SEQ ID NO: 468218 - DNA, 189 bp, Shigella boydii; identical to SEQ ID NO: 467093

SEQ ID NO: 468219 - DNA, 528 bp, Shigella boydii
gtgatattgtatttcccattatcatatttattcatttcaagattgaaaacatggcatgaaaaaattagctggtttattatatatccagggtttctattgctgtgttgttttttgtataatggtagttttgtatctttgcttctgtcatttatgatgaccatgtccatttatgaaataggctacttagacaatgactatagaacaataaatacagaaaaagcaccaacaataagaggtggagagctgcgtgatacaattaaaagtaaattatcaagtataattttcattagagttgtttatttttttgtatcattcgcgttattaatttatcaaagtgatatcattgctcatcactatactgttatctattttgtattatgtatagggtttttaattatctccttttatttgcataatacaatccgggataagagaaatataatcacttatttttctttggtgtcatgtcgttacattattcctgtctcttatacacatctgacgctgccgacgaatagagaggtgtag

SEQ ID NO: 468220 - DNA, 543 bp, Shigella boydii; identical to SEQ ID NO: 463215

SEQ ID NO: 468221 - DNA, 294 bp, Shigella boydii; identical to SEQ ID NO: 25632

SEQ ID NO: 468222 - DNA, 543 bp, Shigella boydii; identical to SEQ ID NO: 467063

SEQ ID NO: 468223 - DNA, 543 bp, Shigella boydii; identical to SEQ ID NO: 462677

SEQ ID NO: 468224 - DNA, 633 bp, Shigella boydii
atggaagggtttttttttgtccgaaatcaaaatataaaattcagtgataatgtgaactatcattatcgctttaacattaatagttgtgcaaaatttcttgctttttgggactatttcagtggtgctctagtagagcatagccatgctgaaaaatgtattcatttctatcatgagaatgatcttcgggatagttgtaataccgaatcgatgcttgataagttaatgttaagattcatcttttcatctgaccagaatgtaagtaatgcactggctatgatacgaatgactgagtcatatcatttggttctttatcttctgagaactattgagaaagaaaaggaggtaagaataaagagtctgacagagcattatggtgtgtcggaggcttattttagatctttatgtagaaaagctttaggggcaaaagtcaaagaacaactgaacacttggcggttagtaaatggtttattagatgtatttttgcacaatcaaacaatcacttctgctgccatgaataatgggtatgcatcaacatcccatttttcaaatgagataaaaacacgactaggcttttctgcaagagaattatcgaatattacttttttagtgaaaaaaataaatgaaaaaatttaa

SEQ ID NO: 468225 - DNA, 294 bp, Shigella boydii; identical to SEQ ID NO: 25632

SEQ ID NO: 468226 - DNA, 447 bp, Shigella boydii; identical to SEQ ID NO: 462775

SEQ ID NO: 468227 - DNA, 543 bp, Shigella boydii; identical to SEQ ID NO: 464540

SEQ ID NO: 468228 - DNA, 543 bp, Shigella boydii; identical to SEQ ID NO: 463215

SEQ ID NO: 468229 - DNA, 366 bp, Shigella boydii; identical to SEQ ID NO: 461917

SEQ ID NO: 468230 - DNA, 180 bp, Shigella boydii; identical to SEQ ID NO: 461173

SEQ ID NO: 468231 - DNA, 543 bp, Shigella boydii; identical to SEQ ID NO: 464540

SEQ ID NO: 468232 - DNA, 234 bp, Shigella boydii
gtgtgccacttcaggcgtaagcaataccaggaaggaagtcttactgctgtggccgccggagaacaggttgttcctgcctctgaacttgctgccgccatgaagcagattaaagaactccagcgcctgctcggcaagaaaacgatggaaaatgaactcctcaaagaagccgttgaatatggacgggcaaaaaagtggatagcgcacgcgcccttattgcccggggatggggagtaa

SEQ ID NO: 468233 - DNA, 543 bp, Shigella boydii; identical to SEQ ID NO: 468145

SEQ ID NO: 468234 - DNA, 294 bp, Shigella boydii; identical to SEQ ID NO: 460208

SEQ ID NO: 468235 - DNA, 294 bp, Shigella boydii; identical to SEQ ID NO: 25632

SEQ ID NO: 468236 - DNA, 189 bp, Shigella boydii; identical to SEQ ID NO: 463227

SEQ ID NO: 468237 - DNA, 870 bp, Shigella boydii; identical to SEQ ID NO: 462147

SEQ ID NO: 468238 - DNA, 231 bp, Shigella boydii; identical to SEQ ID NO: 8950

SEQ ID NO: 468239 - DNA, 585 bp, Shigella boydii; identical to SEQ ID NO: 463101

SEQ ID NO: 468240 - DNA, 249 bp, Shigella boydii
atgagcagaaaaaaccaacgttactctaaagagttcaaagccgaagctgtcagaacggttcttgaaaatcaactttcgatcagtgaaggcgcttcccgattatcccttcctgaaggcactttaggacaatgggttaccgccgccagaaaagggctcggtactcctggttcccgcacggtggctgaactggaatctgaaattctgcaactgcgtaaggcgttgaaccgccccgggaatcctggagactaa

SEQ ID NO: 468241 - DNA, 261 bp, Shigella boydii; identical to SEQ ID NO: 463150

SEQ ID NO: 468242 - DNA, 264 bp, Shigella boydii
atgagcactgataataagcaatcattgcccgcgattaccctcgcggcgattggagttgtctacggcgatattggtaccagcccgttatatacacttcgtgaatgtttgtccggccagtttggttttggcgttgaacgcgatgccgtgtttggctttttatcgctgatcttctggctgctaatctttgtggtttccattaaatatctcaccttcgtgatgcgggcaggatgcgggcagataacgccggtgagggggggatcctga

SEQ ID NO: 468243 - DNA, 183 bp, Shigella boydii
atgacgatggataataaagaaacgactcatgtcacaggcagcaaactggatatttcggtcaactggcaaggggcggcaaaagcgtattccttcgatgaagtgattgttgacagtaatggcaagaaactggacatgcgctttggcggtaatttaacggcagcagaagagaagaaaacgggttga

SEQ ID NO: 468244 - DNA, 366 bp, Shigella boydii
atgaccacccgctacgggcgcggtccggtgatgttgttttcgacgggggttatgctgtttggtttactgatgaccttattcagctcgctgtggctgatctttgccggaatgttactcttctcagcaggattcttcgcagcccactcagttgccagcagctggatcggcccccgcgcaaaacgcgctaaaggccaggcctcctcgctgtatctgttcagttactatctggggtcgagtattgccgggacgctgggtgatgttttctggtataactatggctggaacggcgtcggcgcatttattgctctgatgctggtcattgctctgctggtcgggacgcgtttgcatcgtcgtctgcacgcctga

SEQ ID NO: 468245 - DNA, 1155 bp, Shigella boydii
atggaagcgcgggaagcaaccgctacgggtgaatcatgcatgcgcgtcgatgccattgctaaggtcaccgggcgggcacgatatactgacgattatgttatggcgggcatgtgttatgcgaaatatgtacgtagccctatcgcacatggttatgccgtaagtattaatgatgaacaagccagaagtttgccgggcgtactggcgatttttacctgggaagatgtgcctgatattccattcgctacagctgggcatgcctggacacttgacgaaaacaagcgcgataccgccgatcgcgcactgctaactcgccatgttcgtcatcatggtgacgccattgccatcgtcgtggcccgcgatgaactcacggcagaaaaagcggcgcaattggtcagcattgagtggcaagaattacccgttatcaccacgccagaagcggcgctggcagaagacgctgcaccaatccataacggtggcaatttactgaaacaaagcacgatgtcgacgggtaatgtccaacaaacaatcgatgccgccgactaccaggtacaggggcactatcagacccccgttattcaacattgtcacatggaaagcgtaacatcgctggcgtggatggaggatgactcgcgaattaccatcgtttccagcacccagatcccgcacattgttcgccgcgtggttggtcaggcgctggatattccctggtcatgcgtacgagtcatcaaaccatttgtcggtggcggttttggtaataaacaggatgtactggaagagccaatggcggcattcctgaccagcaagcttggcggcattccggtgaaagtttcccttagccgtgaagagtgtttcctcgcaacccgtacccgccacgcttttaccattgacgggcaaatgggcgtgaaccgcgacggaacattgaaaggttatagtctggatgttctgtctaacaccggcgcttatgcatctcacgggcactccatcgcttctgcggggggaataaagtcgcttacctttatcctcgttgtgcctacgcttacagttcaaagacctgctataccaacctcccctcggctggtgcgatgcgtggttatggcgcgccacaagtcgtatttgccgttgagtctatgcttgatgacgccgcgacagcgttag

SEQ ID NO: 468246 - DNA, 411 bp, Shigella boydii
atgattgatgtcttagggccggagaaacgcagacggcgtaccacacaggaaaagatcgcaattgttcagcagagctttgaaccggggatgacggtctccctcgttgcccggcaacatggtgtagcagccagccagttatttctctggcgtaagcaataccaggaaggaagtcttactgctgtggccgccggagaacaggttgttcctgcctctgaacttgctgccgccatgaagcagattaaagaactcctgaaccgccccgggtttcctggagagtgttttatctgtgaactcaggctgccagatcatcgtttccgatggaagcataataagctttttctgcttctgccggagggatgtggcccagcctttccagcaatcgtcgattattataccagtccacccacgtga

SEQ ID NO: 468247 - DNA, 1014 bp, Shigella boydii
atgaaaattggaactgtggcaggcactaacgacagtacaacgacaatcgcaacaaatgatatggtgcaagagcatgttaccaacttcactaaagaactgtttgggtatattgcaaatggtataggtgatgatatatcaagtattgccaggacaatgctcggtgaggttgtggaaaaaatagatgattggcaaatagaacggttccaacaatctattcaagatgacaaaatttcatttaccatacaaacggatcattcagaaaaatatagtatgctatcgggcatgcgtgctcatattctacgtagggataataattatcagtttattgtgacaattaatagtaaaaattacggttgctctcttgataatactgatgttaattggtgcagtgttgtttatttacttaataatatgacagtaaatgataatgctaatgatgttgcagttactgagtcgtacaaacccatctggaactggaaaatatcgcaatacaatgtatttgatattaaattcgaaacaattataaacccccagttcgctgacagaatctatttctccaattgttcacctgttgatcccacaagtaccaggccgacctattttggggataccgatggttcagttggtgcagttttgtacgcgctttttgctacgggatatttgggaatcatgactgaaggagaaaatttcctttgccagttgcttactatagaagatgaagttctcaacgtattgctaagggaaaactttaatgagcaacttgacactaatattaatacaataatcagtaacctgaacagaagagataatgttttagaaagtcttcagccttatttagttattaataaagacgcagtcacgccatgtacgtttctgggcgaccaaaccggcgatcgatttagtaatatctgtggcgatcaatttatcatcgatttgttaaaacgcataatgagtatcaatgaaaatgttcatgtattagctggaaatcatgaaacgaattgcaatggtaactag

SEQ ID NO: 468248 - DNA, 279 bp, Shigella boydii
  misc_feature (263)..(272): n is a, c, g, or t
atgctcgaacatattgttgtatttgatgtatgtggcactctttatttgtcgaatacaacttttgattatgttgtatttgtacataggaaacaaaaaaaatataccaagttaattaaatgcttattattacgctccttatttggaaagttgctacataaattgcgtatatgttccttacgaaaacattttttgaagacattagaaggatatgaaaagtctactttggaagagttggcgaatttgttttatgatgaatttctcannnnnnnnnngatataa

SEQ ID NO: 468249 - DNA, 189 bp, Shigella boydii; identical to SEQ ID NO: 462047

SEQ ID NO: 468250 - DNA, 288 bp, Shigella boydii; identical to SEQ ID NO: 462736

SEQ ID NO: 468251 - DNA, 420 bp, Shigella boydii
atggaacagaaagcattatctgcagaaccccgcagatcatttccaaatgagtttaaacttcaaatggttaaactggcttcacaaccaggagcctctgttgcccgtattgcccgggaacacgatatcaatgataacctgctgttcaaatggctcaggctctggcagaacgaagggcgcatatcgcggcgtcttccggtaacaacctcttctgacactggcgttgaattattacctgtggagataacgccggatgagccgaaagaacctgtggctgctcttactccgtctttatctactcagactacagttagtgccagctcctgcaaggtggagttccgtcacggtaacatgacgctggaaaatccttcaccagagctgctcacagtgttgatccgtgaactgaccgggaggggacgatga

SEQ ID NO: 468252 - DNA, 522 bp, Shigella boydii
gtgaccgagccaaatcaggtgtggtgcggtgatgtgacctgtatctggacgggtaagcgctgggcgtacctcgccgttgttctcgacctgttcgcaagaaaaccagtgggctgggccatgtcgttctcgccggacagcaggctcaccatgaaagcgctggaaatggcatgggaaacccgtggtaagcccggcggggtgatgttccacagcgatcagggcagtcattatacgagcaggcagttccggcagttattgtggcgataccagatcagacagagtatgagccggcgcggaaactgctgggataacagcccaatggaacgcttcttcaggagtctgaagaacgaatggatgccggtggtgggttacgtaagcttcagcgaggcagctcacgccataacggactatatcgttggatattacagcgcactaagaccgcacgaatataacggtgggttccccccaaacgaatcggaaaatcgatactggaaaaactctaactcggtggccagtttttgttga

SEQ ID NO: 468253 - DNA, 288 bp, Shigella boydii; identical to SEQ ID NO: 462736

SEQ ID NO: 468254 - DNA, 273 bp, Shigella boydii
atggtacatgaccgcatagcggaagaactcgaggcgaaaggcttttaccggagggcggcggcgcgatggggtgaagtcatgctgctggtggagacagacaaggaacggcatcaggttacgatgcgacggctggaatgttccaggaaggcacagaagccaccggagccgccggataacttcggagacctgagaaaggcagtagatcgcacttatgctgaaatgggtatagatggtgtaagcgatgaaatatggcgtaattacccagacagctaa

SEQ ID NO: 468255 - DNA, 303 bp, Shigella boydii; identical to SEQ ID NO: 463187

SEQ ID NO: 468256 - DNA, 204 bp, Shigella boydii
gtgctggatgcactggagcaggcgttatgggcccgtcgaccgtccggcacggtccatcacagtgataaaggttctcagtatgtatcgctggcctacacacagcgacttaaggaagccggattactggcatcaacaggaagtacaggcgactcgtatgacaacgcgatggcggagagcatcaatggtctttacaatacaccgtaa

SEQ ID NO: 468257 - DNA, 204 bp, Shigella boydii; identical to SEQ ID NO: 461672

SEQ ID NO: 468258 - DNA, 222 bp, Shigella boydii
gtgctggattcccagtgctgcggtattgcgggtacttacggtttcaaaaaagagaactaccccacctcacaagccatcggcgcaccactgttccgccagatagaagaaagcggcgcagatctggtggtcaccgactgcgaaacctgtaaatggcagattgagatgtccacaagtcttcgctgcgaacatccgattacgctactggcccaggcgctggcttaa

SEQ ID NO: 468259 - DNA, 693 bp, Shigella boydii; identical to SEQ ID NO: 465816

SEQ ID NO: 468260 - DNA, 921 bp, Shigella boydii; identical to SEQ ID NO: 467183

SEQ ID NO: 468261 - DNA, 681 bp, Shigella boydii; identical to SEQ ID NO: 465663

SEQ ID NO: 468262 - DNA, 645 bp, Shigella boydii; identical to SEQ ID NO: 464889

SEQ ID NO: 468263 - DNA, 192 bp, Shigella boydii; identical to SEQ ID NO: 464451

SEQ ID NO: 468264 - DNA, 234 bp, Shigella boydii; identical to SEQ ID NO: 461402

SEQ ID NO: 468265 - DNA, 609 bp, Shigella boydii
atggcttacggtgaagggcttccgcttccggattcatacgatgcgccccatccgcgcattaagcaactggcccgtcgtaacacagtgactcccggtggtgaagtatgcgtatttaacgacatcattcctgctgaccattgtctgcatgatgttcaggatatgagtacgattaaccatccccgggctgacctgagcaaagggcagtacggctgtgtcggacagggcttacatattgccaaaaaactgcttccgtatatccctaataacgcggggatcctgctggtaccatgctgtcgtggtggttcggcattcacccagggcacggaggggacattcagcgagtccacgggggccagtcaggattcggctcgctggggagtgggtaagccgttatatcaggatctgcttttccgcacgaaggcagcattgcagaaaaacccgaaaaacgttttgctggcgatatgctggatgcagggggaattcgatatgacgaatgccagttacgcccagcagccagcagcatttcttgcaatggtacagcagttccgtgctgaccttgccgggctggcggcgcagtgtcacggtggaagtccggcaacagtcccctag

SEQ ID NO: 468266 - DNA, 582 bp, Shigella boydii; identical to SEQ ID NO: 464941

SEQ ID NO: 468267 - DNA, 480 bp, Shigella boydii; identical to SEQ ID NO: 463183

SEQ ID NO: 468268 - DNA, 435 bp, Shigella boydii; identical to SEQ ID NO: 467193

SEQ ID NO: 468269 - DNA, 960 bp, Shigella boydii; identical to SEQ ID NO: 467729

SEQ ID NO: 468270 - DNA, 180 bp, Shigella boydii; identical to SEQ ID NO: 465305

SEQ ID NO: 468271 - DNA, 693 bp, Shigella boydii
gtgctgctgctgcagagtcatcaaaaagcgcggcagctaccagcgccagtgccgcgaaaacgtcagaaacgaatgccgcagcatcacaaaaatcggcagccacttctgcatccacagcgaccacgaaggcgtcagaagctgccacctcggcacggggtgcggcggcttcaaaagaggcagcgaaatcttcagaaacgaatgcatcatcaagtgccagtagtgcagcttcctcggcaacggtggcaggaaattccgcgaaggcggcaaaaacgtccgagacgaacgctaagtcttctgaaacagcagcgggacagagcgcctcagctgcggcaggctcaaaaacagcggctgcgtcgtctgccagtgccgcgtcaacaagtgccgggcaggcctcagccagtgctagcgccgccggaaaatcggcagaaagcgccgcatcatccgcttcaacagccacaacgaaggctggcaaagccactgagcaagccactgcagcagcgaggtctgcttctgcagcaaaaacctctgaaacaaatgcaaagacttcagcagacaatgctgcttcctctaaggcggctgccgcatcgtcagccagttcagcggcgtcatcggcatcatctgcgtctgcttcaaaagatgaggcgaccagacaagcgtcagcagcgaaaggtagtgccacgacagcaacaatga

SEQ ID NO: 468272 - DNA, 255 bp, Shigella boydii; identical to SEQ ID NO: 464791

SEQ ID NO: 468273 - DNA, 480 bp, Shigella boydii; identical to SEQ ID NO: 463183

SEQ ID NO: 468274 - DNA, 375 bp, Shigella boydii
atgaaagcgctggaaatggcatgggaaacccgtggtaagcccggtggggtgatgttccacagcgatcagggcagtcattatacgagcaggcagttccggcagttattgtggcgataccagatcagacagagtatgagccggcgcggaaactgctgggataacagcccaatggaacgcttcttcaggagtctgaagaacgaatggatgccggtggtgggttacgtaagcttcagcgaggcagctcacgccataacggactatatcgttggatattacagcgcactaagaccgcacgaatataacggtgggttacccccaaacgaatcggaaaatcgatactggaaaaactctaactcggtggccagtttttgttga

SEQ ID NO: 468275 - DNA, 639 bp, Shigella boydii
atgatacctctcaggaagggagcgcaatatgaagagctcagaaaactgggtaaaggcgatcatctggtgaagctgaaaaccagcccgcaggcacgaaaaaagtggccgggactgggaaatgaagtgacagcccgcctgctgaccgtgacgcgcaaaggaaaagtctgccatctgctgacgtcgatgacggacgccatgcgcttccccggaggagaaatggcggatctgtacagtcatcgctgggaaatcgaactgggatacagggagataaaacagacgatgcaactgagcaggctgacgctgagaagtaaaaagccggagcttgtggagcaagagctgtggggtgtcttactggcttataatctggtgagatatcagatgattaaaatggcggaacatctgaaaggttactggccgaatcaactgagtttctcagaatcatgcggaatggtgatgagaatgctgatgacattgcagggcgcttcaccgggacgtataccggagctgatgcgcgatcttgcaagtatgggacaacttgtgaaattaccgacgagaaggggaagggccttcccgagagtggtaaaggagaggccctggaaataccccacagccccgaaaaagagccagtcagttgcttaa

SEQ ID NO: 468276 - DNA, 879 bp, Shigella boydii; identical to SEQ ID NO: 463044

SEQ ID NO: 468277 - DNA, 309 bp, Shigella boydii; identical to SEQ ID NO: 463480

SEQ ID NO: 468278 - DNA, 1050 bp, Shigella boydii; identical to SEQ ID NO: 463097

SEQ ID NO: 468279 - DNA, 588 bp, Shigella boydii; identical to SEQ ID NO: 463925

SEQ ID NO: 468280 - DNA, 372 bp, Shigella boydii
atgtgtcagtggttctggacaagactgaaacaaaaacaggatgaaaaacatccagtacataacccagtgacccggtggttcataccatcttcaacgaaagaatattatcttgcctctcttgtcgcctttgctttatggaaagaagcgcctgataccattgaactgttcagaacacgaataaatcatgcctggcatcagaaaaaacaaaaggacaaatatcggagtgatggtaaaaaggccattaatatacatataagaagcaatgtgaaagaaatgcttgatgagctcagaactgtttacggtctgagaacaggagagttttttgaaatgctgattacagagaaatatcttgaacacaagcgaaggaagtaa

SEQ ID NO: 468281 - DNA, 831 bp, Shigella boydii; identical to SEQ ID NO: 462438

SEQ ID NO: 468282 - DNA, 1260 bp, Shigella boydii
atgtttacatcagtggcgcaagccaatgctgcggttatcgaacaaattcgtcgtgctcgtccacactggctggatgtgcaaccggctttttcacttatcagcgaactaaacgagggcaaaacactgcttcacgccgggccgccaatgcgctggcaggagatgaccggacccatgaaaggggcgtgcgtgggcggatgtctgttcgaaggctgggcgaaagatgaagcgcaggcactggcgatgctggagcagggggaagtgaacttcattccttgtcaccatgtgaatgccgtcgggccaatgggcggcattacttctgccagtatgccgatgctggtggtcgagaacgtgaccgacggcaaccgggcgtactgcaacctcaacgaaggtatcggcaaagtgatgcgttttggcgcttacggcgaagatgtcctgactcgccatcgctggatgcgcgatgtgttaatgccagtattaagcgcggcgctggggcgcatggagcacggtatcgatctcacggcgatgatggcgcagggcattacgatgggcgatgagttccatcaacgcaatattgcttcctcagcactgttaatgcgtacgctggccccacaaattgctcgcctcgatcatgataaacagcacattgcggaagtgatcgatttcctcagcgtgaccgatcagttcttcctcaacctcgcgatggcctactgcaaggcggcgatggatgctggcgcgatgatccgcgcaggcagcatcgttacggctatgacccgcaacggcaatatgttcgggattcgggtaagcgggctgggtgaacgctggtttactgcgcctgtaaacactccgcaaggtctgtttttcaccggcttctcgcaggagcaggcgaacccggatatgggcgatagcgcgattaccgaaacctttggtatcggaggtgcggcaatgatcgcagcgcctggcgtaacgcgctttgtcggtgcgggtggcatggaagcggccagggcggtatctgaagagatggcggaaatttaccttgaacgcaatatgcagttgcagatcccaggctgggattttcagggcgcgtgcctggggctggatattcgtcgcgtggtagaaaccggcattacgccactcatcaataccggtatcgcccataaagaggcggggatcgggcagattggcgcaggcaccgtgcgggcaccgctggcgtgctttgaacaggcgctggaagcactggctgaaagcatggggattggttga

SEQ ID NO: 468283 - DNA, 324 bp, Shigella boydii; identical to SEQ ID NO: 462444

SEQ ID NO: 468284 - DNA, 177 bp, Shigella boydii; identical to SEQ ID NO: 463175

SEQ ID NO: 468285 - DNA, 291 bp, Shigella boydii; identical to SEQ ID NO: 463519

SEQ ID NO: 468286 - DNA, 576 bp, Shigella boydii
gtggagctgagccgtgccacactgggtcgctggaccggtgccgttgctgaactgctggagccgctgtatgacgtcctgcgccagtatgtgctgatgcccggtaaagttcatgcggatgatatccccgttccggtccaggagccgggcagtggtaaaacaagaactgcccggctgtgggtctatgtccgtgatgaccgtaacgccggttcggaaatgcctccggcggtctggttcgcgtactcaccggaccggaaaggtatccatccacagaatcatctggccggttacagcggagtgcttcaggccgatgcttacggtggttaccgggcgttgtacgaatccggcagaataacggaagccctgctgcgtatcggtgaactgtatgccatcgaggcagaagtccggggatgttcagcagaacagcgtctggcggcaagaaaagccagagccgcgccactgatgcagtcactgtatgactggatacagcaacagatgaaaattcattcgctgaaaatggaatgtctccacggagaacactattatccatcgggaaatagtgcgggcaacagtgtttag

SEQ ID NO: 468287 - DNA, 135 bp, Shigella boydii
atgaacagtttaacaacacactaccgtcgctcgcaactgattgtgaagtggcacactgaatttggccacctgaacagaggtgatatgctcacctcagaacaacacaggtgctccaatgaaaaaaagaaattttag

SEQ ID NO: 468288 - DNA, 639 bp, Shigella boydii; identical to SEQ ID NO: 467165

SEQ ID NO: 468289 - DNA, 288 bp, Shigella boydii; identical to SEQ ID NO: 463938

SEQ ID NO: 468290 - DNA, 249 bp, Shigella boydii; identical to SEQ ID NO: 463241

SEQ ID NO: 468291 - DNA, 303 bp, Shigella boydii; identical to SEQ ID NO: 459543

SEQ ID NO: 468292 - DNA, 1185 bp, Shigella boydii; identical to SEQ ID NO: 463259

SEQ ID NO: 468293 - DNA, 288 bp, Shigella boydii; identical to SEQ ID NO: 462736

SEQ ID NO: 468294 - DNA, 471 bp, Shigella boydii
atgttgtttttaaataaaattgacgactcttcaggagcattcgaagcgttaaaatatggattgatgaactatagcttggcaaacatttttgcattagattcggttttgcaaggtaaagcagtagttatagattgtaatggagatgctacatgtggattagctaattttatatcatataaagagtataagacaaatgtttttacaatattttattcgctaacaaaatattctgattttttgtactcattaattttcttttttgtcataggtttctttcattcatctttgtacaatgtagcaaaaaaaaataagaaaacgatatcagttgtcatttgctctattttgtacttccccttgttatttcaattttttgaccaattatatatgttgatgttctatatttatgcaattgcaatgctttatgtgatatgtttttgctcaagattaactctaactttgaagggagtttaa

SEQ ID NO: 468295 - DNA, 639 bp, Shigella boydii
atgatacctctcagaaagggagcgcaatatgaagagctcagaaaactgggtaaaggcgatcatctggtgaagctgaaaaccagcccgcaggcacgaaaaaagtggccgggactgggaaatgaagtgacagcccgcctgctgaccgtgacgcgcaaaggaaaagtctgccacctgctgacgtcgatgacggacgccatgcgcttccccggaggagaaatggcggatctgtacagtcatcgctgggaaattgaactgggatacagggagataaaacagacgatgcaactgagcaggctgacgctgagaagtaaaaagccggagcttgtggagcaagagctgtggggtgtcttactggcttataatctggtgagatatcagatgattaaaatggcggaacatctgaaaggttactggccgaatcaactgagtttctcagaatcatgcggaatggtgatgagaatgctgatgacattgcagggcgcttcaccgggacgtataccggagctgatgcgcgatcttgcaagtatgggacaacttgtgaaattaccgacgagaaggggaagggccttcccgagagtggtaaaggagaggccctggaaataccccacagccccgaaaaagagccagtcagttgcttaa

SEQ ID NO: 468296 - DNA, 495 bp, Shigella boydii; identical to SEQ ID NO: 462705

SEQ ID NO: 468297 - DNA, 285 bp, Shigella boydii; identical to SEQ ID NO: 460874

SEQ ID NO: 468298 - DNA, 480 bp, Shigella boydii
atgatacctctcagaaagggagcgcaatatgaagagctcagaaaactgggtaaaggcgatcatctggtgaagctgaaaaccagcccgcaggcacgaaaaaagtggccgggactgggaaatgaagtgacagcccgcctgctgaccgtgacgcgcaaaggaaaagtctgccatctgctgacgtcgatgacggacgccatgcgcttccccggaggagaaatggcggatctgtacagtcatcgctgggaaattgaactgggatacagggagataaaacagacgatgcaactgagcaggctgacgctgagaagtaaaaagccggagcttgtggagcaagagctgtggggtgtcttactggcttataatctggtgagatatcagatgattaaaatggcggaacatctgaaaggttactggccgaatcaactgagtttctcagaatcatgcggaatggtgggtaatgctgccaacttactgatttag

SEQ ID NO: 468299 - DNA, 225 bp, Shigella boydii; identical to SEQ ID NO: 463592

SEQ ID NO: 468300 - DNA, 495 bp, Shigella boydii
atgatacctctcagaaagggagcgcaatatgaagagctcagaaaactgggtaaaggcgatcatctggtgaagctgaaaaccagcccgcaggcacgaaaaaagtggccgggactgggaaatgaagtgacagcccgcctgctgaccgtgacgcgcaaaggaaaagtctgccatctgctgacgtcgatgacggacgccatgcgcttccccggaggagaaatggcggatctgtacagtcatcgctgggaaatcgaactgggatacagggagataaaacagacgatgcaactgagcaggctgacgctgagaagtaaaaagccggagcttgtggagcaagagctgtggggtgtcttactggcttataatctggtgagatatcagatgattaaaatggcggaacatctgaaaggttactggccaaatcaactgagtttctcagaatcatgcggaatggtgatgagaatgctgatgacattgcagggcgctgaggtagcctga

SEQ ID NO: 468301 - DNA, 459 bp, Shigella boydii
atgatacctctcagaaagggagcgcaatatgaagagctcagaaaactgggtaaaggcgatcatctggtgaagctgaaaaccagcccgcaggcacgaaaaaagtggccgggactgggaaatgaagtgacagcccgcctgctgaccgtgacgcgcaaaggaaaagtctgccatctgctgacgtcgatgacggacgccatgcgcttccccggaggagaaatggcggatctgtacagtcatcgctgggaaatcgaactgggatacagggagataaaacagacgatgcaactgagcaggctgacgctgagaagtaaaaagccggagcttgtggagcaagagctgtggggtgtcttactggcttataatctggtgagatatcagatgattaaaatggcggaacatctgaaaggttactggccgaatcaactgagtttctcagaatcatgcggaatggtgatgtga

SEQ ID NO: 468302 - DNA, 204 bp, Shigella boydii; identical to SEQ ID NO: 461672

SEQ ID NO: 468303 - DNA, 180 bp, Shigella boydii; identical to SEQ ID NO: 461689

SEQ ID NO: 468304 - DNA, 507 bp, Shigella boydii; identical to SEQ ID NO: 233783

SEQ ID NO: 468305 - DNA, 276 bp, Shigella boydii; identical to SEQ ID NO: 5935

SEQ ID NO: 468306 - DNA, 645 bp, Shigella boydii
atgattactgtagttggtgggaacaaaggtggttcagggaaaactaccattgcatcaaacctggctattgctctcgcaaataaaggaagggaagtctgcctgttaaacggagatctacaacgaacagccgcaaaacatcatgcagaacgagaagctgcaggactgttaccagcaataacccttgttgagaaatttgataacctgacacaaacactacaggctctgaatgaaaagttcgatgatgtaatagtggatgtcgcaggaagaaactcaaaggaattcataacgagtggagttgtcgcacatcaaataattgcgccactacagtgttctcaaccagatctggatactcttacagaactagaacaacagatagacgcaatgcgtaaccttaacccggaacttaaggtttattgtttacaaagtatggcaacaaccaatccggttttgaggggaaatgagagaaaagaattccttgaatatcttgaagaattcccaacaattcaagtcctggattcagttatttgtttcagaaaagtctatcgcgattgcatgagcaacggcaccggtgtagtagaaacgaacaatacagcagccagagcagaaattgaacatttaatgaatgaggtatttggcccatggtga

SEQ ID NO: 468307 - DNA, 972 bp, Shigella boydii
atgaacgtatactgcgatgatggttcaacaacaatcaagttggcatggaatgacaatgggaaaatctgtaagtcgttgtcgcaaaactcatttcgtcatggatggaaggttgacgggttagggattcgccagacatttaactatgaactggatggtaaaaaatacacgtatgatgaagttagcaaccaatctattcttacgactcatattgagtatcaatatacggatgttaacctgttagctgtgcatcacgctttactgaatagtggattagcgcctcagcctgtatcattgactgtgactttacctatcagtgagttctacacgaaagagtgtcaaaaaaatgaactcaacattcagcgtaaaattgagaatttaatgaggccgattcgtcttaataaaggcgatgttttcaccattgaacacgttgatgtgatgcctgaatcattgccagctgtgttttctcgtctggtcatggataaagttggtcagttcgaaaaatcgctggtagttgatattggcggcactacgcttgatgttggtgttatcgttggtcaatttgactctgtaagtgccattcatggtaattctggcattggtgtgtcttcagttacgaaagctgcaatgagtgcattgcgcatggcatccagtgataccagtttcctcgttgcagatgaattgattaaacgtcgtaatgatccggattttgttcggcaggttataaatgacgaaacaaaaactgatctggtccttaataccattgagggggctattgccagtctgggggagcaagtagtcaatgagctcggtgattttcatcatgtgaatcgtgtttatgttgtcggtggtggggccccgttgatctatggttcgataaaaacggcatggcaccatcttgggcaaaaagtagtgatgatggagtcgccacagacagcactggttgaagctatcgcggctttcaaagaggagtaa

SEQ ID NO: 468308 - DNA, 393 bp, Shigella boydii
gtggacgatgaacggaaaaggaaaaaattcacactttatctgcatccggaaaaagctgcagactttcaaactttggaagcgatagagtccgttccgcgttctgagcgtggtgagctgttccggaatgcatttatttctggaatggcgttacaccaacttgatcctcgcctgcctgtattgctgactgccattttgagcgaggagttttcagcagatcaggttgtaaccttactcagtcagacgactggatggaagccttctcaggccgatatcagagctgtgttgactgaactcggtgctttgcaatctgctgaaaaaatgcctccttctgctactgattcggtgcaggaggcaatgaatgatgtgcgccttaaaatgcaaaaattattctga

SEQ ID NO: 468309 - DNA, 213 bp, Shigella boydii
atgcctgtctgcccgcgccgggaaaaaacgcgcgccggtggcgctgaaaggggccgcgctcacgcgccgcccctttcattacgcggacgttctgatgggggcttctgtttcttcatgcctgtcatttgtctgttactgatgttgttgttcctgctactgctactgctactgctactgctactgctactgttcttctttttcttcctgctctga

SEQ ID NO: 468310 - DNA, 288 bp, Shigella boydii
atgagtacccgaaatatccacgttaacaccgcgtcgtacacgcttcttgttgccgggaagaaaaaaaacaccggggaagagtgggacgtcctggaattcagcagcctgagtgagctgaaaaaatatcgcaaaagccacccggaaaagatggccttcagttatagctacgcgctcagtcagggtgtggataagcagttccgccatatcaacattgcggaagccgatcacttcaaacagttcctgcgtcagattaagcgtgccggcctcgatatccgggcgatctgctga

SEQ ID NO: 468311 - DNA, 384 bp, Shigella boydii; identical to SEQ ID NO: 15231

SEQ ID NO: 468312 - DNA, 678 bp, Shigella boydii
atgagagaaaggccacttaacagtcaatctgtaaataaatacattcttaacgttcaaaatatctacaggaattctcctgttcctgtttgtgtccgtaacaaaaaaaggaaaatcctttatgccaatggggcctttattgaactcttttccaaagaagataaacccttctctggtgaaagttatgtacgtctgcaggttgaaatttttctttcatcacttgagcttgaatgccagtctcttgggcatggttccgcattttgtcgtcgttttaattttcatggagaaatctatcaaataaggatggaaaatgtttcattttataatgaagaatctgttgttctatggcaaattaatatatttcctgactatccattctttcgtgtggaaaaagaaaattattatcatcgtgatagctatgtacagtctgttatatcgaatatgacagcaaaatcattggttgttttttgtttctatgcattagggtataaacatataaatatagctaaagaattaaaaatcacagaagtggcttctaaaaaaaggattaaaaagattaatgcggatatcaataaaagattgggttccttcgatttgttcaggaataaatgtattaagacaggtgtaatgtacgaaatattaaacgttttgagtgaatatatgggtgttaaaaaaatgtaa

SEQ ID NO: 468313 - DNA, 228 bp, Shigella boydii; identical to SEQ ID NO: 8295

SEQ ID NO: 468314 - DNA, 363 bp, Shigella boydii
atggacgcctttttaagtgttcagggtgcttctgcgcccgtcaaaaagaaatcgtttttttctaaattcactcgtctgaatatgcttcgcctggctcgcgctgtgatccctgctgctgttctgatgatgttcttcccgcaactggcaatggcagcacagggccaggacctgatggcaagcggtaacaccacggttaaggcgaccttcggtaaggactccagtgttgttaaatgggttgttctggctgaagttctggtcggtgcggtcatgtacatgatgaccaaaaacgtcaagttcctggccggttttgccatcatctctgtatttattgctgtgggtatggccgtcgttggcctgaaataa

SEQ ID NO: 468315 - DNA, 360 bp, Shigella boydii; identical to SEQ ID NO: 383140

SEQ ID NO: 468316 - DNA, 306 bp, Shigella boydii; identical to SEQ ID NO: 14020

SEQ ID NO: 468317 - DNA, 1851 bp, Shigella boydii; identical to SEQ ID NO: 21737

SEQ ID NO: 468318 - DNA, 258 bp, Shigella boydii
atgaaagtcatattcacttctaatcgtcttgttgattttcttatccggcttttgattacagcgattgtcatttctccggtaattatctggtcgtgggatacggtaaaagaaaccacggcagacgggatgcttgccgctgctttcgttatcctttactccggtgtgctcctgtttattctgtatttttgtttttctgccctgactggcctgcagaaagatgatgaaagaaaaaatgatgaaaggaatgaagatgaataa

SEQ ID NO: 468319 - DNA, 339 bp, Shigella boydii
atgagtgaagattatttgaaaatgtttacaggtgttgttctgttaatatttgtcattattgccggttatttcttttctgagcgtaatgacaggaaaatgtttctcctgagttcactggttttccttgttattaatatcgcgtgtttatatgtgcttaccgccagtctctggtttctgtgtggtgcaattatgaatcagggcgcagcaatggttgttccaatggttattggttcattaccgaacgttacgagcttcgacaggttcagaagaatatttatctgtattatgttgtcatcggcatggtccggagtgatgtggttttttataaggggcttatga

SEQ ID NO: 468320 - DNA, 492 bp, Shigella boydii
atgagatgtctagcccatattgctctggtaacggtgatacagtttatcgcctgctatctggttggttgggggaaggccgaaacagtttttatgctgttcttcatagtgctatggcagggactgtttatatggttgttctctcaaatacgaaaaaaacggaatgtgtcggatgagtttaaattcagtaaaggcgtttggtatataacgatgccagtatcttccttactctctccgttattaagcctgatggtttttatcattggtacactatacgaattaaggcgagttagtggttgcataagcataaaaaaatggggtcaaaatcaactcaaaaaccaatatgatgggagtgaaaagttagacttcgggggcattgaacagcccccaacgacctactataacccttcaaccggatatcctatgcatggaggctttgactcagcgggaaatacttttgggactcgttggcaggattattatgacaggcaataa

SEQ ID NO: 468321 - DNA, 174 bp, Shigella boydii; identical to SEQ ID NO: 459318

SEQ ID NO: 468322 - DNA, 867 bp, Shigella boydii; identical to SEQ ID NO: 463340

SEQ ID NO: 468323 - DNA, 645 bp, Shigella boydii; identical to SEQ ID NO: 464492

SEQ ID NO: 468324 - DNA, 783 bp, Shigella boydii; identical to SEQ ID NO: 462840

SEQ ID NO: 468325 - DNA, 1095 bp, Shigella boydii
atgtccggcagtgcttttgccgttacgcaccacgccttcagtagcggagcaggaaggacatctgatggaaatggaagccatgcaagcaccttaaaatcaccatcatacactaaatcagtaagttggcagcattaccccacagtcgaagtatttattaccgtaacccgcgatgaaaagcttatcgcgggcggtggaattgccggaaatattattaaatgcgttgctatcagtgaatccgttcgcggtgaaggactggcgctgacattagccactgaactgataaacctcgcctatgagcggcacagcacgcatctgtttatttataccaaaaccgaatacgaggcgctgttccgccagtgcggtttttccacgctgaccagcgtacccggcgtgatggtgctgatggaaaacagcgccacgcgactgaaacgctatgccgaatcgctgaaaaaatttcgtcatccagggaacaagattggctgcattgtgatgaacgccaatccctttacgaatggtcaccgttatctgattcaacaagctgcggcacagtgcgactggttgcatctgtttttagtcaaagaagattcttcacgcttcccctatgaagaccggctggatctggtgttaaaaggcaccgccgatattccacgcctgactgtgcatcgcggctccgaatacatcatctcccgcgctacgttcccttgctacttcattaaagaacagagcgtcattaaccattgttacaccgaaattgatctgaagattttccgtcagtacctcgctcccgcactgggtgtaactcaccgctttgtcggtactgaacccttttgtcgcgttaccgcccagtacaaccaggatatgcgctactggctgaaaacgccgactatctccgcaccgcccatcgaactggttgaaattgagcggctgcgttaccaggagatgccgatatccgcttcccgggtacgtcaactgctggcgaaaaacgatctcacggctatcgcgccgctggtccctgcagtcacgctgcattatttgcagaacctgcttgagcactcccgccaggacgcggcagctcgtcaaaagccccccgcatga

SEQ ID NO: 468326 - DNA, 363 bp, Shigella boydii
ttggagtcattaccgggccaaatcgataaatcgctcgatgaagcctcactcagcctgcgcgccggttccctgcgtaccattacgcacatcctgctgccgctgctgcgcccggcgatcctctcggcgctgatttacagctttgtgcgcgccattaccaccgtcagcgccattgtgttcctcgtcacgccggatacccgcgtagcgacggcttacatcctcaaccgcgtggaagatggcgaataccgtgtagcgattgcctacggttccattctgatcgtggtgatgctggcgattattttcatctttgactggctgatcggtgaatcacgtacctcccgttcaaaagccaaaaaccaggcgtaa

SEQ ID NO: 468327 - DNA, 1047 bp, Shigella boydii
atgactcagaaaaatttcgttgaactgcgcaacgtcactaaacgatttggcagtaatacggtaatcgacaatatcaacctcaccatcccgcaggggcaaatggtgacgctgctcggcccgtccggctgcggcaaaaccactattttgcgcctggttgccgggctggaaaaaccgagcgaagggcaaattttcattgatggcgaagacgtcacccatcgctctattcagcagcgcgatatctgtatggtgtttcagtcctatgccctgttcccgcatatgtcgctgggagagaatgtcggttatggcctgaaaatgctcggcgtaccgcgcgcagagctgaaagcccgcgtcaaagaggcgttggcgatggtggatctggaaggattcgaagaccgctttgtcgatcagatctccggcgggcagcagcagcgcgtggcgctggcccgcgcgctgatcctcaagccgaaagtgctgctgtttgatgagccgttgagtaacctcgacgccaacctgcgtcgcagcatgcgcgacaagatccgcgagttgcaaaagcagtttgatatcacctcgctgtacgtcacccacgatcagagcgaagcctttgcggtttctgatactgtgctggtgatgaacaagggacacatcatgcagatcggctcaccgcaggatctttaccgccagcccgcctcccgctttatggcgagctttatgggcgatgccaacctgttcccggcaaccttcagcgacggatacgttgatatctacggctatcatctgccgcgcccgctgcactttggtacacagggtgaagggatggtcggtgtgcgcccggaagcgatcacgctcagcgatcgcggcgaagagagccagcgctgcgtgatccgccatgtcgcctatatggggccgcagtatgaagtgacggtggaatggcacgggcaggagatattattgcaggtcaacgctacgcgtctgcaaccggacgtcggcgagcagtattatcttgaaatccatccgtacggcatgtttgttctggcggatgcggcataa

SEQ ID NO: 468328 - DNA, 933 bp, Shigella boydii; identical to SEQ ID NO: 8340

SEQ ID NO: 468329 - DNA, 1428 bp, Shigella boydii
atgtccatacgtttagaaggttatatgcaagcaacacaacaaaatgcgccactgaagcgcacaatgaaaacgcgtcacctgattatgctttccttgggcggcgtgattggcacaggattattcttcaataccgggtacatcatttccaccactggagcggcgggaacgctgctggcctatctgattggtgcgctggtggtctggctggttatgcagtgtctgggcgagctgtcggtcgcgatgccggagaccggagcgtttcacgtttatgccgcgcgctatcttggcccggctaccgggtataccgtggcctggctttactggctgacctggaccgtggcgctgggttcgagctttaccgccgctggattctgtatgcagtactggtttccacaggtgccggtatgggtctggtgcgtggtgttctgcgcgattatttttggtctgaatgttatctccacgcgcttttttgccgaaggggagttctggttctcgctggtcaaagtggtcactatcatcgcctttatcatcctcggtggggcggcgattttcggctttattccgatgcaggatggctcgcccgcgccggggctgagtaatatcacggcagaaggctggttcccgcacggtggcttaccgattttgatgactatggtggcagtgaactttgctttttcgggtaccgagcttatcggcattgccgccggtgaaacggaaaacccgcgcaaagttatcccggtagcgattcgtactaccatcgcgcgactgattattttctttatcggcaccgtgtttgtgctggcagcgctgatcccgatgcagcaggcgggcgtggagaaaagcccgtttgtgctggtatttgagaaagtagggatcccgtacgccgctgatatttttaacttcgtgatcctgacggctattctttctgcagcgaactccgggttatatgcctccgggcgcatgctgtggtcgttgtcgaatgaacgtacgctaccggcctgttttgcgcgagtaacgaaaaacggcgtgccactgacggcgctgtcggtcagtatgctcggtggtgtgctggcgctgttttccagcgtggtggccccggacacggtatttgttgcgctgtcggcaatctccgggtttgcggtggtagcggtgtggctgagtatctgcgcctcgcattttgtttttcgtcgccgtcatctgcaacaaggtaaggcattgagtgaattacattatcgcgcgccgtggtatccgctggtgccagtattaggttttgtgctgtgcctggtggcctgtgttgggctggcattcgatccagcgcagagaattgcgttgtggtgcgggttaccgtttgttgcgttgtgctatggtgcttatttccttactcaaccccgaaacgcaaaacaggagccagaacatgtcgcagaataa

SEQ ID NO: 468330 - DNA, 360 bp, Shigella boydii
gtgaaagccgtaattactccctttgtacaaaaagagcttggcgtcgccacattcaaagtggatcaggaagtcagaaagctggtggaggctggccgtaaatttattatggagccggtgccgcgtgagttaatcgagcacatggacgacggcctcgttgtttccgagcaaactatggcaacaaatgaggcgttgcagccgttttttaacagcgatgaactgtttcgccgtattggtggaattgactcgctggtagcgtggttgcgcaggaaagaggggcaggtcaggctgggccatgtcgttctcgccggacagcaggcttaccatgaaagcactggaaatggcatgggaaacccgtggtaa

SEQ ID NO: 468331 - DNA, 180 bp, Shigella boydii; identical to SEQ ID NO: 8314

SEQ ID NO: 468332 - DNA, 381 bp, Shigella boydii
atgaggcatatatcaccggaagaacttattgcgcttcatgatgcgaatataaaccgctacggcggcctgccgggaatgtctgatccgggtagggcagaggccattatcgggagagttcaggccagagttgcttacgaagagatcaccgaccttttcgaagtctccgccacctacctggtggctacagcgagagggcatatattcaatgatgccaataagcgtaccgcgctaaacagtgcgctgttatttctacgccgtaacggggtgcaggtatttgattcacctgaactggcagaccttaccgtaggggctgcgaccggagagatatctgtatcttctgtcgccgacacgttacgtagattgtatggttctgcggagtag

SEQ ID NO: 468333 - DNA, 222 bp, Shigella boydii; identical to SEQ ID NO: 8316

SEQ ID NO: 468334 - DNA, 1557 bp, Shigella boydii
atgacaagtattcaacaacgtgcagagcttcatcgtcaaatctggcaaattgctaacgatgtcaggggttcggtcgatggatgggattttaagcaatacgttctgggcgcacttttctaccgttttatcagcgaaaatttttccagttatattgaagccggtgatgacagtatctgttatgcgaaactggatgacagcgtaattactgatgacattaaagacgatgccatcaaaaccaaaggctacttcatctacccaagccagcttttctgcaacgtagctgcgaaagcaaataccaatgacagattgaatgcagatttaaacagtatcttcgttgctatcgaaagttctgcttacggttatccttcagaagctgacatcaaaggtttgtttgctgatttcgataccaccagtaaccgcctgggtaacaccgttaaagataaaaatgcccgcctggctgcggttctgaaaggggttgaagggttaaaacttggtgacttcaacgaacatcagattgacctgttcggtgatgcctatgagttcctgatttctaactatgcggcaaatgccggtaagtcaggcggtgagttctttacaccgcagcacgtctctaagctgattgcacaactggcaatgcatggccagacccacgttaacaaaatctacgacccggccgcaggttccggttcgctgttgttgcaggctaaaaagcagtttgataaccatatcattgaagaaggctttttcggacaagaaatcaaccatacgacctataacctggcacgtatgaacatgtttttgcacaacatcaactacgacaagtttgatatcaagctgggcaatacgctgactgagccgcacttcagagatgaaaaaccgtttgatgccatcgtttcgaacccgccgtattcggtgaaatggattggcagcgatgacccgacgctgattaacgatgagcgttttgccccggctggcgttctggcccccaaatccaaagctgactttgcgtttgtattacatgcgctgaactatctttctgccaaaggtcgtgctgcgattgtttgcttcccgggtattttttaccgtggcggtgcggagcagaaaatccgtcagtatctggtcgacaataactatgtcgaaaccgtgatttcactggcaccgaacctgttctttggcaccaccattgccgtcaatattctggtgctgtctaaacataaaacggataccaaagttcagtttattgatgccagcgaattgttcaaaaaagagactaacaacaatatcctgaccgatgcccatatcgaacagattatgcaggtatttgccagcaaggaagatgttgctcatctggcaaaatctgtcgcgtttgagaccgttgtagctaatgactataacctgtcggtgagcagctatgtggaagcgaaagatactcgcgaaattatcgatatcgctgagttgaatgcagagctgaaaaccacggtcagcaaaatcgaccaattgcgcaaagatattgatgcgattgtggctgaaattgaaggctgcgaggtacagaaatga

SEQ ID NO: 468335 - DNA, 1245 bp, Shigella boydii
atgagcgagttgagttatctggaaaaattgctggatggagttaaggttgagtggaaaacactagagaaagtgcttaaacgaactaaaggcacaaaaataaccgctgggcagatgaaagctcttcacaaagataatgcgccgcttaaaatttttgcagggggaaaaacagtagcctttgttgactttaaagatattccagagaaagatattaatagagagccatcgatcattgttaaatccagaggtattatcgaattcgagtattacgataaaccattctctcacaaaaatgagatgtggtcatatcactcaaataatgatgcgataagcataaagtatatttattacttcctaaaaataaatgaaggatatttccagaaaattgggggtaaaatgcaaatgccacaaattgcaactcctgatacagataagtttgaagttccaatcccctgcccggataatccggaaaaatccctagccatccagtctgaaatcgttcggattctggataagtttactgcacttaccgctgagcttaccgctgagcttaacatgcgtaaaaaacagtacaactactatcgcgaccagttgttgagttttaaagatggtgaggttgagtggaagactttgggggaaattggtgagtttattcgtggaaaacgttttactaaagcagattatgtagaagatggtggtatcagtgtaatccattatggtgagatatatacacgatatggtgtttacacaactcattcgttatcacaggttagagctgatatggcagcgtcattacgctatgccaaacatggagatgtcgtgataactgacgtgggggagactgtagaagacgttggtaaagcagtggcatggcttggggatgacgatatcgctattcatgatcactgttatgcttttcgacattctttgaatccaaaatttatttcctattacatgcaaaccgattcgtttatttctgaaaaagcaaagtatgtagccagaacaaaagttaatacactactcattaatggtttttcaaaaattatgattccggttccatatcctaaagatcacgaaaaatcacttaaggaacaagctcgcattgtcgaaatactcgacaaattcgacacactgactaactccatcaccgaaggtcttccgcgtgaaatcgagttgcgccagaaacaatacgaatactaccgtgatttactgttcagtttcccaaaacctgaaactgtcagtaattaa

SEQ ID NO: 468336 - DNA, 3117 bp, Shigella boydii
atgactcatcagacacacaccattgctgaatccaataactttatcgtccttgataagtacatcaaagctgagccaacaggcgacagctaccagagcgaatcggacctggaacgagaactgattcaggacctgcggaatcagggctatgaatttatatccgtaaaatcacagtcggcgatgctggccaatgttcgggaacagcttcagaacctcaatggtgtggtgtttaatgacagcgagtggcggcgtttcacggagcagtatctggataacccgagcgatggcattctggataagacccgtaaaatccatatcgactatatttgcgactttatttttgatgacgagcgtcttgagaacatctatttgatagataaaaagaatctcatgcgcaataaggtgcagattatccagcagtttgaacagacgggttctcatgctaaccgttatgacgtcacgatcctggttaatggtttaccgctggtgcaaatcgaactaaaaaaacgcggggtggcgattcgtgaggctttcaaccagatacatcgttacagtaaagagagttttaacagcgaaaattccctgtttaagtatctgcaactgtttgtcatttctaacggcaccgatacccgttattttgccaacacgacaaagcgcgataaaaacagttttgacttcaccatgaattgggcaaaatcagacaacacgctgattaaagacctcaaagactttaccgctacctttttccagaaacatactctgctgaatgttctggtgaactacagcgtttttgacagtagtcagacgctactggtgatgcgaccgtaccagattgccgccactgagcgtatcttatggaaaatcaacagctcctataaagcgaaaaactggtctacccccgaaagtggtggctttatctggcacactaccggttctggtaaaaccctgaccagctttaaagccgcgcgtctggcaacagaactggactttattgataaagtcttctttgtggtcgacaggaaagacctcgattaccagaccatgaaggaatatcagcgtttttcgccagacagtgtcaatggatcggaaaataccgcaggtcttaaacgaaatctggataaggatgataacaaaattatcgtcaccactattcagaaactcaataacctgatgaaagcagaaagcgacctgcctgtatacaatcagcaagtggtgtttatatttgatgaatgccaccgcagccagtttggagaagcgcagaaaaacctgaagaagaaattcaaacgctattatcagtttggttttaccggtacccctattttcccggaaaacgccttaggctcagaaacaaccgccagcgtatttggtcgtgaattgcattcatatgttattaccgatgcgattcgagatgaaaaagtgcttaaattcaaggtggactacaacgatgtgcggccacagtttaagtctttagagacagaaaccgacgagaaaaaactgagtgcggctgaaaatcagcaggcgtttcttcatcccatgcgtatacaggaaattacgcaatatattctgaataatttccgccagaaaactcaccgtaccttccctggctcaaaaggttttaatgctatgttggcagtgagcagcgtggatgccgcgaaagcctattatgcgacgtttaaacggttacaagaagaagccgctaataaatcggctacctataaaccgctgcgtattgcgacaatcttctcctttgccgccaatgaagaacaaaatgccattggtgagatttccgatgaaacttttgataccagcgcaatggacagcagtgctaaagagtttctggacgctgcaattcgtgaatataacagccattttaaaactaactttagcaccgacagtaacggttttcagaactactatcgtgatttagcccagcgggttaaaaatcaggatatcgatctgctaattgtcgtggggatgttcttaaccggcttcgatgctccaacattgaacacgctattcgtcgataaaaacttacgttttcacggcctgatgcaggcattttcccgcaccaaccgcatttatgacgccactaaaaccttcggtaatatcgtcactttccgggatctggaacgctcaactattgatgccataacgctgtttggtgacaaaaacaccaaaaatgtagtgttagaaaagagttatgcagagtatatggaaggctttactgatgctgctactggtgaagctaagcgcggctttatggcagtagttgcagaactggaacaacggttccctgaccctgccagtattgaaagtgaaaaagagaagaaagacttcgtaaaactgtttggtgaatacctgcgtaccgagaacatcctgcaaaactatgatgaatttgccacgctgaaagccctgcaacaaatcgatcttagcgatcctgttgcagtagaaaaattcaaagcagaacattatgtggatgatgaaaagctcgctgaattgcaaacaattcgtctccctgctgatcgcaagattcaggattatcgttctgcctataacgatattcgcgactggcagcgccgtgagaaagaagctgagaaaaaagagaaatcaaccactgactgggatgacgtggtttttgaggtcgatttgctgaagtctcaggaaataaacctggattatatccttggactgattttcgaacataacagacaaaataaaggcaagggcgaaatgatcgaagaggtcaaacgcttaattcgttcaagcctggggaaccgggcgaaagagggcctggtggtcgattttattcagcaaacgaacctggatgatttaccagacaaagccagcatcattgacgcgttctttacctttgctcaacacgaacagctacgtgaagcagaagcgttgattaaagaagaaaatctcaatgaagaggcggcgaaacgctatattcgcacgtctttaaaacgcgaatacgccaccgaaaatggcacagaattaaacgagacattaccaaaacttagtccgttaaacccgcaatataaaacgaaaaaacaggcagttttccagaaaatcgtctcgtttattgagaagtttaaaggcgtaggcggaaaaatatag

SEQ ID NO: 468337 - DNA, 894 bp, Shigella boydii; identical to SEQ ID NO: 8345

SEQ ID NO: 468338 - DNA, 996 bp, Shigella boydii; identical to SEQ ID NO: 8344

SEQ ID NO: 468339 - DNA, 2139 bp, Shigella boydii
atggacattgaaatacgccactgcaataacatcgtacgagcacatatcaccctcactgccgataaactgaatattaagtttgcgccaaatggtactggaaaaagtacgctgtcacgggccataagctgtgcggcgcgggacgacattcagggactacaggcactgatgcccttccggctgcgcggagaaaaccccgatagcaccgggcccattgtcatcggtgctgacgggattggggacgtgatgtgcttcaacgaggagtacgtcagtcagtttacgttccaaccggacgagctcatcagtgacagctttaatattcttatccgcaatcaagcccatgcggaaagagagcgtgaaatagaagaaatgacgcaaaagatccgggctgttttcacggatcacactgagctgaactctctgatagaccatctacaggaactcagtaatgctttcaaatcaaccagttccgggatttcacgttcttcaaccggcatgagaggtctgtcaggcggaaataaaatacaccacattccggctggtcttgagaactatcaaccctacatccgcagtgaacgccgcgtggaatggattgactggcagacaaagggactcgagttttcgcccctttcggatggctgctgtccgttctgtaccggtgatatcacgggaaaggaagcacaaattcgccaagtcagagaggaatacgataaatccaccattaaaaacctgaccgctatcatcagactggtggaaaacctcggtaattacctgacggagagcgccagagaacgccttctggccattactatgcttcagaacggtccggaagccgaacatatcgagtacctagtggcgttgaaacgccagaccgatacgctgacagagaaactcactgcgctgagaggcctgaatgttttcagcctgcaggaacagcagaacgttcgggaggtgctcactgccaggttgattgacctgcagttcttccctgatctgcaatccgaactcatgcaggggatcaccgacagactgaacgcggcccttatggacctgataaaccttgccggaccgctgcagggaaaaattaaccggcaccgggacagcatgatccggctgatcgcacagcacaaaacaaacatcaataatttcctcacttatgcaggctataaatacagggtggatatagccggcgagggagagcagagaaaactcaggctacgacacatagattttgacgggtacgtcagcggcggtagccagcatctcagctatggagaacggaacgcctttgcgattgtgttattcatgtatgaatgcctgtcaaaaaacccgggactgattatccttgatgatcccatatcttcttttgataaaaacaagaagtttgccattcttgaaatgctgttcagacgtgcaagtggtgaatgcctgaagaaccggactgtacttatgctgacgcatgacgtggagcctgtgattgacacgctgaagtcagtcagaaggttgttcagtaatcaggtgaccgcctcctgcctgcgcctgtctgctggagtcatagaagaattacctgttaacgacggcgatatcatgacattcatgcagatctgcaaatccatcaccgcgtcagcagactgtgaggagatcattaagctcatctatcttcgtcgctactttgaaatcgttgacgaacgtggtgatgcttatcagcttctatccaatctattccatcgacgcgtcgccccgctggattatcgcgagcctgccgctgcgggctcgggctatcccaaaatggctcctgagaaaattcagcaggccttgcgggatatccgggagtatgtggacagttttgattacccgcgacttcaggctctcgtcagcagcccagatgaaataaaaaacctgtaccgtcgctgtcgtaacggctatgaaaaactgcaggtattccgtttactggaactggatcaggaccatccggtaatacgaaaattcgttaacgaaacgtaccacattgaaaatgagttcatctgtcaactagatccgtccagattcgatctcatcccggagtacgtgattatggaatgtgacaagctcatcgccctgccaccggcagcaaaccagagttcggttgcccgtatcgcttga

SEQ ID NO: 468340 - DNA, 402 bp, Shigella boydii
atgcttgatacctgtatctgctcgttcatcatgcgtgaacagccagaagccgtcctgaagcgtctggagcaggcggtgctacgcggccaccgtatagtggtctcggccatcacctactctgaaatgcgcttcggggctaccggcccaaaggcctcaccacgtcacgtccaactggtcgatgaattctgcgcccgcctcgatgccatcctgccctgggatcgcgccgcagtagacgccaccacgaagattaaagtggcactgcggctggccgggacgccgatcggcccgaacgacacggcgattgccgggcacgccatcgccgccggggcgatactggtaacgaataatacaagagaatttgagcgagtgcctgacctggtgctggaagactgggtgaagtaa

SEQ ID NO: 468341 - DNA, 231 bp, Shigella boydii
atgagaaccgtatcgatatttaaaaatggcaacaaccgcgccatccgtctgcctcgtgatctggattttgagggggtgagcgagctcgagatcgtccgggaaggggacagcatcatcctgcgccccgtccggccaacctggggatcattcctagagtacgaaaaagccgatccagattttatggcggagcgcgaggatgttgtcagcgacgaagggcgatttaacctgtga

SEQ ID NO: 468342 - DNA, 3120 bp, Shigella boydii
atgtttggaaaacttctgaaaagtgtctcatggcaggtgagagctgaactccgacggagcctgaagtcgaaccgggattacaaaaaacttcgctggaacccggtggagagaatacttgtttcctgctccacccattacgtccgggctatgctggttctatggtccgcagccttcggggctgttggcgtggtcgaatattttcgccctgtattgctacctttcgctgtgcagcattttaagggcattaccaagctttcagattggatgtctaatttactgggtagccagttgactataatcggtattgtatttccgctggttgtggggcttataagtgttttatttcaaaagaaatcagcaaggatccatattcagtccgcgtatcaacttcattccggatatatgtttgcgggcctgagtggtctttcactggctgcatttgtcgtgctgggcggtatgacgttatctataggtgacggatatcttaatacttcttttgccgtaacagcttttgtgtggatgcttttcaatattattctgtctatctggttcttcgtctccagtctgaatgtcctggatgagagcaaacgcgatcgactaatgaataagttttttttatctcagatagtggatgactacattcaaaaagcatatattcaggcgtggctgcgttacccggggggtcatgtaggtcaaaattacctcggtaatattaaaatactgccttactcaatttctgagaaagacgatatgcttcatgttaaatctaatatcagtaaaggtgatgttgttactgatatttatataaggccttttttattcctactgagaaggctagaggcggtagatgggcaggatgcggaaattatcattctgccctcctttggtgttcgttctggtgaactgactttattgtcatcgagaaatgtcaagcctgtttcaggattgtggcggtggttattgcgtcgttgtattgtaacagggcgccctgagaacaaaagggatctggatgatattacttttgatttctttggtgaggcttacgatgcgcttaacgataaaaatattagcgtcttcagaacagggattgaacgattaacagatacctatacctctatcaaaagaagttacaattacgaggtcgataaaaattatctggatgaagtaaaagaatcaggttttagccatactttcagcgattcattccattatgaattgagaaagttttttcgtgaatccgtaaaatcaacggaatattcaggcgaatatttccgtgaatcgatgctcattccattgcgtgtgtacagaaaaacacagagcacgtgttttaccgatttcagacagtttttactctcgcttttcagggtgtggcatgtgttaaacgagtggaaagcgggactggggggccccctctcggccagccaggagctgactcaccaggcccttatccgcgggtatatcggactgtgggaaggctggagtatgaccacgatcactggcaaacccgggagtgaagattctactggccgcctgatgtatcatctgcataataccgccaggcttcttattccgtcagtggttgccgataatgcctcttccgtgcgatatgctcacgacgttctctgcctctggtttaatcagagccggtttacacgttactgggaggaagagtaccgctggcacagtttcttcctgactccggattatctgtccctgaaggagacagaaccgcagtggaatatgttactcaggggcagcaagtataaaaaagatgccgctttgtccattatgtttgcaaatgccttatccgatttgcggttgttaatggcagggtatcttattgctcattttgaatcgcaaaaaaatatagacttagccgatcttgtgaatcatctcattatgtctgaattatatgaagatagagatacacatgacacgctgacgcctgcattcagacgttctgtcgatatcattgacatgatactgagaattgagcactgcaatctgcatacgaatacaagctggtacagcgggttatcagaaaccattgaggttatgaactcatataatgaaaggccttacattcccgggcgtatgtatacaggggaatatgaagatttagggagtctctacgggtcgtttgccttgctggctataaagctcgcaaggcctgcggagcaggttacacagcgtgttaatgaagccctggctggaggggtgttttcctattccagtaaagacagaataatttctattcttaaacgactgaaacgagacccttcagttccctatgaaggttatatcatttcagaagcggattatgcaacgaatgtggtgttttttaatgatgttctggataaatacatagatgtattcagtcgtagtaaaacggcagatatcgttgctgctgaagtagaccaggctcgactgagaaacactgatgctcgtcttacaaatgaacttcctggggcattgtctgaagatgttctgcttaaatacttcacgtttactcaaaattcagaatgtgatcgcaactggctggcgatatatattcctgttggtgtttccaaagagtatgttgccagagagcttaatcagactgactacggagatttcccttcggtatcagaagtgaacagaaatattctccgcagactgcattatgtactgtggcagtcacaggctaaattaacgattgaggtcaataacctcgaaacgctgttaatggaagtcgcgcaacggtccgctgatcagaataactacattctggtgatctatggttcccgcttcagcgaggaactgagggaactggtctatcagccggaaaggcatgacgcgtttagcatacatgttgatgtatcggccaggggtagccgctctctgcccttcaggatcaataactgtcttatttaccttgtcctcaattccgaacaggagttttcgcttatggtcagtgctgaatcctttggtgaactcaggctgttcaggtatccggatggaacccttttcaataccttctaccgcagcagcgacgatccacttgaaggtgtgatgaaaacgctctgggaaatagagatggaaatcactgatactccagtggcgcggtttgaacatcgctga

SEQ ID NO: 468343 - DNA, 1134 bp, Shigella boydii; identical to SEQ ID NO: 10279

SEQ ID NO: 468344 - DNA, 285 bp, Shigella boydii; identical to SEQ ID NO: 10278

SEQ ID NO: 468345 - DNA, 198 bp, Shigella boydii; identical to SEQ ID NO: 10277

SEQ ID NO: 468346 - DNA, 813 bp, Shigella boydii
gtgctggatgttcatcccagtggtttttacgcctggcttcagcagccgcattcacaacgccatcaggcagacctgagactgacaggacagattaaacagttctggctggaatcgggatgcgtctatggttatcgcaaaatccatctggatctgcgtgacagcgggcaacagtgcggagtaaacagagtctggagactgatgaaacgtgtcggaataaaggctcaggtcggataccgaagcccgcgggcacgtaaaggcgaggccagtatcgtgtcacccaacaggctccagcgacagttcaatccggatgctcctgatgagcgttgggtaacggacataacctacatcaggacccacgaaggctggctgtatcttgccgttgttgttgatctgttctcacgcaaaattatcggctggtccatgcaatcccggatgacaaaggacattgtcctgaacgcactgctgatggctgtatggcggcgtaatcccgaaaaacaggtgctggttcattcggatcagggcagtcagtacacaagccatgagtggcagtcgttcctgaaatcacacggcctggagggtagcatgagccgtcgcggtaactgccatgataatgcggttgcagaaagttttttccagttgttgaaacgtgaacggataaagaaaaagatctacggaacgcgggaagaagcccgcagcgatatttttgattacatcgaaatgttttataacagtaagcgtcggcatggttccagcgatcagatgtcaccgacagaatatgaaaaccagtattatcaacggctcggaagtgtctag

SEQ ID NO: 468347 - DNA, 282 bp, Shigella boydii; identical to SEQ ID NO: 268414

SEQ ID NO: 468348 - DNA, 267 bp, Shigella boydii; identical to SEQ ID NO: 464426

SEQ ID NO: 468349 - DNA, 279 bp, Shigella boydii
atgaataaactcattgaactcagacgcgccaaaatgttggcgctctctttactgcttatcgccgctgctacctttgtcgttacgctgtttttgccgcccaatttttgggtgagcggcgtgaaggcgattgctgaagcggcgatggtcggcgcgctggcggactggtttgcggtggtggcgctgtttcgccgcgtgccgattccgatcatttctcgtcatacggcgattatcccgcgtaataaagaccggattggcgaaaatctcggtcagttcgtgtag

SEQ ID NO: 468350 - DNA, 231 bp, Shigella boydii
gtgacgcgcaggccgctggcgtggggtgaagccgatatcactgcgatcaaacgtctttccgatatgggcttcaaagtcaccgtcaccggtggcctggtgctggaagatctgccgctgttcaaaggcattccaattcatgtgtttatcgccggtcgcagcatccgtgatgccgcttctccggttgaagccgcgcgtcagttcaaacgttccatcgccgaactgtggggctaa

SEQ ID NO: 468351 - DNA, 753 bp, Shigella boydii
atgatcgcaactaaaacgcctgccattgataaagctgcccgaatatttcattttattgccgggaaaggctctgccacctacagtgaaattcaccagaatgtcggattgcctcaaagcaccacctcggccctgcttgccagcctgaccacgcatgcctttctgagacaaaaaaatggccggtattatctggggctaatcttttacgagcttggtaataaagccattcaggattttgattttcgtgaactggctgaagagtcactcgtttttctccgtgaccggacccgtcttgcctgccatctgggcgttctggatggttccaccggcatctatctggcgaaaaaagaaagccagaatgcgattatcgttcgcagctggacgggaaaacgactttccctgcacagttcctcccttgggaaagtgttgttggcctggcttccggaagaccacattgatgctcttttacccacagaacaccttcctgcgtttactgcccggacaattacaacacgtaaagcgttgaaagctgagctggaggtggtccgcctgcagggatgggcgtttgataatcaggaagatgtcgacgatgtcacctgtattgccgcgccggtatttaacagtgatcaggccgttgttgccgcaataagtatttccggggttcgttttcagatgcctgaggaaaaaatacctgagtatgcgaacgcggtgatgaaagccgctggcatgatgtctgaaaagttatgcggtatatga

SEQ ID NO: 468352 - DNA, 924 bp, Shigella boydii; identical to SEQ ID NO: 7625

SEQ ID NO: 468353 - DNA, 381 bp, Shigella boydii; identical to SEQ ID NO: 7626

SEQ ID NO: 468354 - DNA, 891 bp, Shigella boydii; identical to SEQ ID NO: 7627

SEQ ID NO: 468355 - DNA, 183 bp, Shigella boydii; identical to SEQ ID NO: 392330

SEQ ID NO: 468356 - DNA, 228 bp, Shigella boydii
atgaagccgttcccggtaccggcctttacccttatcggcgacgactgcagcatctccggctcggcgatcggtaacccatccgaactgcgcacgctgaggaagttcgccggacgcagcaaagtggctccgaccaccgagctgttcccgatgtcgcaaattaacgaagcgttgaaacacgttcgcgaaggcaaagcccgctaccgcgcggtgctgaaagccgacttatga

SEQ ID NO: 468357 - DNA, 867 bp, Shigella boydii; identical to SEQ ID NO: 7629

SEQ ID NO: 468358 - DNA, 888 bp, Shigella boydii; identical to SEQ ID NO: 7630

SEQ ID NO: 468359 - DNA, 825 bp, Shigella boydii; identical to SEQ ID NO: 7631

SEQ ID NO: 468360 - DNA, 1074 bp, Shigella boydii; identical to SEQ ID NO: 7632

SEQ ID NO: 468361 - DNA, 1311 bp, Shigella boydii; identical to SEQ ID NO: 7633

SEQ ID NO: 468362 - DNA, 294 bp, Shigella boydii; identical to SEQ ID NO: 7634

SEQ ID NO: 468363 - DNA, 174 bp, Shigella boydii; identical to SEQ ID NO: 7635

SEQ ID NO: 468364 - DNA, 555 bp, Shigella boydii; identical to SEQ ID NO: 383170

SEQ ID NO: 468365 - DNA, 486 bp, Shigella boydii; identical to SEQ ID NO: 5988

SEQ ID NO: 468366 - DNA, 486 bp, Shigella boydii; identical to SEQ ID NO: 383168

SEQ ID NO: 468367 - DNA, 696 bp, Shigella boydii; identical to SEQ ID NO: 5990

SEQ ID NO: 468368 - DNA, 1131 bp, Shigella boydii; identical to SEQ ID NO: 383166

SEQ ID NO: 468369 - DNA, 1284 bp, Shigella boydii; identical to SEQ ID NO: 5992

SEQ ID NO: 468370 - DNA, 1380 bp, Shigella boydii; identical to SEQ ID NO: 5993

SEQ ID NO: 468371 - DNA, 528 bp, Shigella boydii; identical to SEQ ID NO: 5994

SEQ ID NO: 468372 - DNA, 1941 bp, Shigella boydii; identical to SEQ ID NO: 5995

SEQ ID NO: 468373 - DNA, 762 bp, Shigella boydii; identical to SEQ ID NO: 5996

SEQ ID NO: 468374 - DNA, 507 bp, Shigella boydii; identical to SEQ ID NO: 5997

SEQ ID NO: 468375 - DNA, 159 bp, Shigella boydii; identical to SEQ ID NO: 5998

SEQ ID NO: 468376 - DNA, 351 bp, Shigella boydii; identical to SEQ ID NO: 10325

SEQ ID NO: 468377 - DNA, 276 bp, Shigella boydii; identical to SEQ ID NO: 10326

SEQ ID NO: 468378 - DNA, 423 bp, Shigella boydii; identical to SEQ ID NO: 10327

SEQ ID NO: 468379 - DNA, 576 bp, Shigella boydii; identical to SEQ ID NO: 10333

SEQ ID NO: 468380 - DNA, 1227 bp, Shigella boydii
atggtacgaggacggccgctgaatctggcggcaaactgccttgaccgccatctgcaagaaaacggcgatcgtaccgccatcatctgggaaggcgacgacggcagccagagcaaacatatcagctataaagagctgcaccgcgacgtctgccgcttcgccaataccctgctcgagctgggcattaaaaaaggtgatgtggtggcgatttatatgccgatggtgccggaagccgcggttgcgatgctggcctgcgcccgcattggcgcggtgcattcggtgattttcggcggcttctcgccggaagccgttgccgggcgcattattgattccaactcacgactggtgatcacttccgacgaaggtgtgcgtgccgggcgcagtattccgctgaagaaaaacgttgatgacgcgctgaaaaacccgaacgtcaccagcgtagagcatgtggtggtactgaagcgtactggcgggaaaattgactggcaggaagggcgcgacctgtggtggcacgacctggttgagcaagcgagcgatcagcaccaggcggaagagatgaacgccgaagatccgctgtttattctctacacctccggttctaccggtaagccaaaaggtgtgctgcatactaccggcggttatctggtgtacgcggcgctgacctttaaatatgtctttgattatcatccgggtgatatctactggtgcaccgccgatgtgggctgggtgaccggacacagttacttgctgtacggcccgctggcctgcggtgcgaccacgctgatgtttgaaggcgtacccaactggccgacgcctgcccgtatggcgcaggtggtggacaagcatcaggtcaatattctctataccgcacccacggcgatccgcgcgctgatggcggaaggcgataaagcgatcgagggtaccgaccgttcgtcgctgcgcattctcggttccgtgggcgagccaattaacccggaagcgtgggagtggtactggaaaaaaatcggcaacgagaaatgtccggtggtcgatacctggtggcagaccgaaactggcggtttcatgatcacgccactgcctggcgctaccgaaggcagcctggtgatcaccgactcctggccgggtcaggcgcgtacgctgtttggcgatcacgaacgttttgaacagacctacttctccatagactggccccctgaatctccagacaaccagtatcacttaaataagtga

SEQ ID NO: 468381 - DNA, 618 bp, Shigella boydii
atgactatcgaaaaaagccgattcagttcgggggccgccccgcggcccaacgttaacacgggagtaattaacggcaacgactttgccgctattgttcccgttattgccggacgcattggcgggcgtgaagccaatattgtgagcgctaaggcgttgcataaagcgctgggggtgggccgcgactttactaactggattaaaggccgaattgaccagtacggttttattgccggaaccgattttatccgtgttgaaaatttgagcacgccaaaacgggcgagcgcaaaaactcgccagcaaatagagcatgattacctgctatcgctggatatggctaaagaagtggcaatggttgaacgcaacgagcagggccgcgctatccgccgttatttcatccagtgcgaggaagaattacagcgtagcgtgcctgaaatcgccgcccgctatcgtcgccagctaaaagcccgtctcagtgccgcaaacaactttaagccaatgtgcgatgcgctgaatatggcccgtgccgagatgggcaaaacgacgcagcagcgccactacagcaacgagagcaacatgatcgcccgtatcgtgctgggtggcatgacggcgaagcagtga

SEQ ID NO: 468382 - DNA, 492 bp, Shigella boydii; identical to SEQ ID NO: 461815

SEQ ID NO: 468383 - DNA, 207 bp, Shigella boydii
atgagtgtcggcattcgacgagataaacagccagccgtttttctgatcctcccggacaccacgcatccagtcacggatggtgaagggctcaccgttatgctcaatcccctgcaggtaacggatggctttcacatagttggtcagcacagcacggatggatatggccgttttctcgattttctcttccaccaggttggccgccggtga

SEQ ID NO: 468384 - DNA, 516 bp, Shigella boydii; identical to SEQ ID NO: 466253

SEQ ID NO: 468385 - DNA, 210 bp, Shigella boydii
atgaaactgcgtatgcttaatggcagccactcttttctcgcttatctgggttacctttcaggattcgcccatatcagtgattgcatgcaggatcgcgcatttcgccatgccgccagaacattaatgctgaatgagcaagcgccgacactacaaattaaagatgtcgatttaacacaatatgcgggtgatgctgccaacttactgatttag

SEQ ID NO: 468386 - DNA, 1170 bp, Shigella boydii
atgaatcagaagtggaagacgttaattatttcattattaacaccatcaagtattatatcagggattgcgttgatagttctctggggatatttcagtcgcctgggccgactagatattttctttgatgtaatgaatattaaaagcatcttggtattggtttgttgtgcaactatactatcattggctatgatagtatttatcttttttataacctctttttttatacccgtagttattcctcaggatataaataatcttcctgcttacaataagattcagggtaattttttatctgtgatgatgttatctggcatgttccccatggcctttatatatgtgttatactgtgcatttgattttgatcagaatgttaaagataactctggctggttatctattgcaagtatgggtgtactgatagctgttattttagccatagtaaataagaggtatcttgaatatgacttatcgtttaaaaacaatagaatgaaactgttgagacgtgttcagatctatcttgtcattccgttgtctattgctttactggtgcatcttcagttaattcctctggagatagtttttagtaatattgcaacttcagataagagtgttaatttcaaagtgatagctgaactggctttcatgtcatattttatctttcttctgacaatgcttcctggagtcatttatctgaaaatgaatccacagcataaattttcaaaaagaattagctattcatttatcgcatccttgatgttattattaataatatcgactcaaataaccgtgttaccagtgatttttacccattccgttattaagctatcaggtataagtgacttcaaaatacatagctacattattaaaacaagtgaatatcctgaagagtttttttccaatgcagcatgggataaaaaaaatataaaaccgggggattattactctgtgcaggctgtttctatgtttacgacaaaccagtttattctcctttgtcctaaggatattataaagttttatcgggaaagctggaagttcgagttgcttaatgtagacttcgatataaataccaggaagaaactccaggaagaagctgcatattgcgtaccaatttctgcaatatctgtaaaacgatgggatatgcctcttcagggctcgaaaccctcaagttag

SEQ ID NO: 468387 - DNA, 183 bp, Shigella boydii; identical to SEQ ID NO: 7620

SEQ ID NO: 468388 - DNA, 258 bp, Shigella boydii; identical to SEQ ID NO: 7619

SEQ ID NO: 468389 - DNA, 741 bp, Shigella boydii
atgaacaatgtcattcccctgcagaattcaccagaacgcgtctccctgttacccattgcgccgggggtggattttgcaacagcgctctccctgagaagaatggccacttccacgggggccacaccggcctacctgctggccccggaagtgagtgcccttcttttctatatgccggatcagcgtcaccatatgctgttcgccaccctctggaataccggaatgcgtattggcgaagcccggatgctgacaccggaatcatttgacctggatggagtaagaccgtttgtgcggatcctgtccgaaaaagtgcgtgcgcgacgcgggcgcccgccaaaagatgaagtgcgcctggttccgctgacagatataagctatgtcaggcagatggaaagctggatgatcaccacccggccccgtcgtcgtgaaccattatgggccgtgaccgacgaaaccatgcgcaactggctgaagcaggctgtcagacgggccgaagctgacggggtacacttttcgattccggtcacaccacacaccttccggcacagctatatcatgcacatgctctatcaccgccagccccggaaagtcatccaggcactggctggtcacagggatccacgttcgatggaggtttataccagagtgtttgcactggatatggctgccacgctggcagtgcctttcacaggtgacgggcgggatgctgcggagatcctgcgtacactgcctcccctgaggtga

SEQ ID NO: 468390 - DNA, 978 bp, Shigella boydii
gtggataagtcgtccggtgagctggtgacactgacaccaaacaataacaacaccgtacaacctgtggcgctgatgcgtctgggcgtttttgtaccgacccttaaatcactgaagaacagtaaaaaaaatacactgtcacgtactgatgccacggaagagctgacacgtctttccctggcccgtgctgagggattcgataaggttgagatcaccggcccccgtctggatatggataacgatttcaagacctgggtggggatcattcattcctttgcccgccataacgtgattggtgacaaagttgaactgccttttgtcgagtttgcaaaactgtgtggtataccttcaagccagtcatcccgcaggctgcgtgagcgtatcagcccttccctgaagcgcattgccggtaccgtgatttcgttttcccgtaccgatgagaagcacacccgggaatatatcacccatctggtacagtcagcctactacgatactgagcgggatattgtgcagttacaggccgatccccgcctgtttgaactgtaccagtttgacagaaaagtccttctccagcttaaggcgattaatgccctgaagcgacgggagtccgcccaggcactctacacctttatagagagcctgccccgggatccggcaccgatatcgctggcgcggctgcgtgcacgcctcaatctgaagtctcctgtattttcccagaaccagacggtcagacgggcaatggagcagttgcgcgagattggatatcttgattacacggagatccagcgggggcggacaaaattcttctgtattcactaccggcgtccccggttaaaagcgccgaatgatgagagtaaggaaaatccgttgccaccttcacctgcggaaaaagtcagtccggagatggcggagaagcttgccctgcttgagaaactgggcatcacgctggatgacctggaaaaactcttcaaatcccgctga

SEQ ID NO: 468391 - DNA, 732 bp, Shigella boydii; identical to SEQ ID NO: 8301

SEQ ID NO: 468392 - DNA, 204 bp, Shigella boydii; identical to SEQ ID NO: 8300

SEQ ID NO: 468393 - DNA, 441 bp, Shigella boydii
atgactagtctaaaaactagtattaagactatcacttatttaagtgatactggttgtctggagattcagggggccagtctaacaggtaaagccctgtttatggcgctcaggagccagcgcccacctgccgggctaatccaccactctgatcgaggttcacagtactgcgcatacgattaccgggtcatacaggagcagtctggtctgaaaacatcaatgtcgcgtaaaggtcactgttacgacaacgctccgatggaaagcttctggggaacgctgaaaaatgagagcctgagccactatcgttttaataaccgggatgaagccatctcagtaatacgggaatacattgagattttctacaatcgtcagcgtcgtcactctcgtctggggaatatctccccggcagccttcagggaaaaatatcatcagatggctgcttaa

SEQ ID NO: 468394 - DNA, 297 bp, Shigella boydii; identical to SEQ ID NO: 461859

SEQ ID NO: 468395 - DNA, 837 bp, Shigella boydii; identical to SEQ ID NO: 460825

SEQ ID NO: 468396 - DNA, 714 bp, Shigella boydii
gtggcacatatccgcactcgcgaaacatatggaacccggcggctccagacggagctggtagataacggaattatcgtcggtcgtgacagactggcacgtcttcgtaaggagctgaggctgcactgtaagcagaaacgcaagttcagggcgaccacaaactctgaccacaatctgccggttacgccgaatctgctgaatcagaactttacgcccacagcacctaatcaggtctgggtcgcagatataacgtatgttgccacccgggaaggatggctgtatctcgccggcgtcaaagatgtttatacgtgcgaaattgtcggttacgccatgggagagtgcatgacgaaagagttgacgggtaaagccctgtttatggtgctcaggagccagcgcccacctgccgggctaatccatcacaccgatcgaggttcacagtactgcgcatacgattaccgggtcatacaggagcagtctggtctgaaaacatcaatgtcgcgtaaaggtaactgttacgacaacgctccgatggaaagcttctggggaacgctgaaaaatgaaagcctgagccactatcgttttaagagccgggatgaggccatctcagtaatacgggaatacattgagattttctacaatcgtcagcgtcgtcactctcgtctggggaatatctccccggcagccttcaggataaaatattatcagatgactgcttag

SEQ ID NO: 468397 - DNA, 510 bp, Shigella boydii; identical to SEQ ID NO: 461065

SEQ ID NO: 468398 - DNA, 213 bp, Shigella boydii; identical to SEQ ID NO: 5358

SEQ ID NO: 468399 - DNA, 534 bp, Shigella boydii
atgctgaaactggcagaccttgcacccgtcatccttgatgcgctggcagaagaccgcatcaccaccgaacactgtcaggcgctggcgctggagaacgacaccgcgcgtcaggtgcaggtgtttgaagccgcctgccagtcaggatggggcggtaaaccggatgtgcgggttatccgcaacctgattaccgaaagtgaagtggcggtggctgggaacagtaaattccgcttcgtgggggctgatgccttctcgccagacgaactgcgcaccgatttgttcagcgacgacgagggtggctatgtggactgcgtggcgctcgatgccgccctgctggaaaaactccaggctgtcgcagagttccttcgggaagccgaaggctggggatggtgtgccggacgcatggagcctgtaggtgagtgccgtgaggatgccggaacataccgctgtctgccggagccggaagcggtgctgacggaggcggaagaagaacgtctgaacgaactgatggctcgttacgacgcgctggaaaactag

SEQ ID NO: 468400 - DNA, 453 bp, Shigella boydii
atgtcagttacagagtctaaggcaaaaacggagcgtaaatccagccgtaaacctgcaaaaacgcaggaaacagtcctgtctgccctgctggcgcagacggaggaagtgagcgtgccgctggcctcactgattaaatcaccgctgaatgtgcgcacggtgccgtattctgtggagtccgtcagcgaactggctgagtccattaagggcgttggcctgttgcagaatctggtcgtgcataccctgcctggtgaccgttacggtgtcgccgcaggtggtcgccgactggctgcactcaacatgctggcagagcgtggcatccttacggctgactggcctgtacgcgtgaaggttattccgcaggaactggcgactgccgcatcaatgactgaaaacggtcatcgtcgggatatgcaccctgccgaacagattgccggattccgcgcaatggcgtag

SEQ ID NO: 468401 - DNA, 540 bp, Shigella boydii; identical to SEQ ID NO: 16163

SEQ ID NO: 468402 - DNA, 159 bp, Shigella boydii; identical to SEQ ID NO: 10991

SEQ ID NO: 468403 - DNA, 492 bp, Shigella boydii; identical to SEQ ID NO: 460462

SEQ ID NO: 468404 - DNA, 303 bp, Shigella boydii; identical to SEQ ID NO: 459543

SEQ ID NO: 468405 - DNA, 822 bp, Shigella boydii
atgaaaaaaaggagtttcggtatttctgttgttgtacctgtgtataacaggaaagaaaagttaatcagggctattgactcagttgatactttatccccacatcttgtggagattattgtaattgatgattgttcagatttggctcctgacacatttttagagaagagtaataagtatggggttaatgttcacatttatcgcaataaatataataaggggccgcaaatttgtaggaacattgggattaggagagctaaatttaattatattgcctttttagattcagatgattatttttgcatgggaaaaatagattggctattgaatattctgaaggatgaggatatagattttctctaccatgcagtaaatggatgtgaaaaatataatcgaatttcatcatattggtttaatacagtaggtaagtttattcattttagatggtttttgatttttttgaatccttgtgttacaccaagtgtagtgattaaaaggaaagtttgtttatttaatccatgtttgagatattcagaggattatgcatattttttatcttatattaattcaaaaactaaagttaaatattttgaaagcatatatacaacagttcctcgagaaataggcacaagaggtggtatttcgcataatattataaaaatgagaaagggagaattttatggaaaaaaaaatatattaaggaagaggcgaaatatatcgaattatattcggtttctgatatctttaggcatggcttgtcttagagttttctttgatatagtgagaaaacggtataaagtgaataatttatttaaagatatatag

SEQ ID NO: 468406 - DNA, 654 bp, Shigella boydii
ttgttaactaatgctctgaggcagggattctcaatagcagtactgttattatcgttctgtttgtttataaagaggcgatattttttattcttgatagctgtaaccatttcttttctttttcatcaagcttcgattctgatcgtttctatttttattatttctagatgtagcattagaattgtagttcctagtattgttgtaggtgtgtttttgttgtttgcgacaaatattctagatgttgtgccttgggttattgagtttaaaaagttaatatataaatatttgccgtatgcagatgaggactttattattcgaatcataagtataattaatactttatgtctttgtgtattatatttaattgtcatgattaaatcacattgtaaggataaaataataaacaatattgttattaatgctacctttgtttgttgtatcgcatctattgttccgtatcttggttttcgaattatatatggcgtatatccattattattacttttaacctactgtagcataagaaattatatcggcagagtgtcttcatataattatttatcgctttcgatatgtattaatatctttatctcaattatgtggttgtgtggttcctcccatatgaacaaaataccatttgtgagcattattatatga

SEQ ID NO: 468407 - DNA, 654 bp, Shigella boydii; identical to SEQ ID NO: 7676

SEQ ID NO: 468408 - DNA, 258 bp, Shigella boydii; identical to SEQ ID NO: 5121

SEQ ID NO: 468409 - DNA, 333 bp, Shigella boydii; identical to SEQ ID NO: 5122

SEQ ID NO: 468410 - DNA, 1311 bp, Shigella boydii; identical to SEQ ID NO: 5783

SEQ ID NO: 468411 - DNA, 1455 bp, Shigella boydii; identical to SEQ ID NO: 461930

SEQ ID NO: 468412 - DNA, 1761 bp, Shigella boydii; identical to SEQ ID NO: 461901

SEQ ID NO: 468413 - DNA, 192 bp, Shigella boydii; identical to SEQ ID NO: 8419

SEQ ID NO: 468414 - DNA, 255 bp, Shigella boydii; identical to SEQ ID NO: 8324

SEQ ID NO: 468415 - DNA, 621 bp, Shigella boydii
atggcggttatgggacttgccggtgttctccggggtaaaaaggtccgtacgaccatcagccggaaagccgttgccgcaggcgaccgcgtaaaccgtcagttcgtggcagaacgacctgaccagctgtgggtggctgattttacttacgtcagcacatggcagggcttcgtctatgtggcgttcatcattgatgtgtttgccggatacattgtggggtggcgggtctcatcgtccatggagacgacattcgtgctggatgctctggagcaggcgttatgggcccgtcgaccgtccggcacggtccatcacagtgataaaggttctcagtatgtatcgctggcctacacacagcggcttaaggaagccggattactggcatcaacaggaagtacaggcgactcgtatgacaacgcgatggcggagagcatcaatggtctttacaaagcggaggtaatacaccgtaagagctggaaaaaccgtgcagaagtggaactggccacactcacgtgggtggactggtataacaatcgacgattgctggaaaggctgggccatactcctccggcagaagcagaaaaagcttattatgcttccatcggaaacgatgatctggcagcctga

SEQ ID NO: 468416 - DNA, 441 bp, Shigella boydii; identical to SEQ ID NO: 460257

SEQ ID NO: 468417 - DNA, 246 bp, Shigella boydii; identical to SEQ ID NO: 460696

SEQ ID NO: 468418 - DNA, 150 bp, Shigella boydii; identical to SEQ ID NO: 463008

SEQ ID NO: 468419 - DNA, 378 bp, Shigella boydii
atggacgaacagtggggatacgtcggggctaaatcgcgccagcgctggctgttttacgcgtatgacaggctccggaagacggttgttgcgcacgtattcggtgaacgcactatggcgacgctggggcgtcttatgagcttgctgtcaccctttgacgtggtgatatggatgacggatggctggccactgtatgaatcccgcctgaagggaaagctgcacgtaatcagcaagcgatatacgcagcgaattgagcggcataacctgaatctgaggcagcacctggcacggctgggacggaagtcgctgtcgttctcaaaatcggtggagctgcatgacaaagtcatcgggcattatctgaacataaaacactatcagtaa

SEQ ID NO: 468420 - DNA, 207 bp, Shigella boydii; identical to SEQ ID NO: 14967

SEQ ID NO: 468421 - DNA, 255 bp, Shigella boydii
atggggcatggcctgagtgttactggacgtgttaacccatcagattacggaaattttgattcccgctatgtgaaagatgttcgcctgggtacgcgtgttgttcagaccatgcaaaaaggcgtgatgtatgagaaatcaggccatgtaattacagggcttggcattgtcggcgaagttgatggcgatgatccggcagtattcagaccaatacaaaaatacattaatggcacatggtataacgtcgcacaggtgtaa

SEQ ID NO: 468422 - DNA, 240 bp, Shigella boydii; identical to SEQ ID NO: 12955

SEQ ID NO: 468423 - DNA, 405 bp, Shigella boydii; identical to SEQ ID NO: 82542

SEQ ID NO: 468424 - DNA, 654 bp, Shigella boydii; identical to SEQ ID NO: 102250

SEQ ID NO: 468425 - DNA, 897 bp, Shigella boydii
ttgtcggacgcacctctgcttcaggtcataattgctggcacgtccaaaaaaacaggtgcggagattaaaaaattgagtcatttacccgccagcattttccagatttcacgtagcgacgcctggaatttaaccctctctcccgatgcagcccgtaatatgcgggatcttgcagcacagattggcgcaggaatgccgaaatatctgatagcaccggaagtctcactgcttctctcctacatcgatgatctgaacatccgtatgtattttgagacgctctggaataccggagcacgactgaacgaagctctggcactgaaacctgccgattttatgctgactccgacgcggcagtacccgcaacccgtggtgatcctgaaaacactcaagcaacgtctaaaagaagcagaaagaagaccaggacgcccgaccaccaggcatccaccattacatcctgatccgcgatacagaaaaccacaggagcctgctgtaaggctggttcctgttctggatgccggatacgcattgcgtatgcgggaatacctggcgacctggaaaaagcggatcaaacatcagcctgtgtgggacataacatcgagacagacaccgctgaactggataaacaccgcagtggcacgggcagagcgtgacggcgtaacattttcggttccggtcacgcctcacacgtttcgccacagttacgccatgcacctgacaatgagtggcgttcctccgcgcgtcctgcaatccctgctgggacaccgttatgcaagaagcaccgagatttacacccgcgttttttcgctggacgtcctgacaggaagtggcctgtcctttacctgcgatccacggcgagcaaaacagcttctcggataccctgaacgcattaatgatgagtaa

SEQ ID NO: 468426 - DNA, 660 bp, Shigella boydii; identical to SEQ ID NO: 102251

SEQ ID NO: 468427 - DNA, 303 bp, Shigella boydii
atggcaaagctcccaaagaaaattgatcaggaaattaaaccgctggatttacgccagtttgtaagttctgctgcacaaaaaccagcatcggcatccgcagtaacgcgtataaatctgaccatgacagatgatgatctggatacagcgcaggtgttccagaacaagtacggcgcaagccgtgctgaagttatcagagcagcactggcagcgctacgtctggtatcagcagaagaacgccggaggctgtttgatgatataaggaaaaacagcccgaaagcaggaagaccaaccgtgaataaatag

SEQ ID NO: 468428 - DNA, 252 bp, Shigella boydii; identical to SEQ ID NO: 102253

SEQ ID NO: 468429 - DNA, 216 bp, Shigella boydii; identical to SEQ ID NO: 102254

SEQ ID NO: 468430 - DNA, 336 bp, Shigella boydii; identical to SEQ ID NO: 82465

SEQ ID NO: 468431 - DNA, 351 bp, Shigella boydii; identical to SEQ ID NO: 280396

SEQ ID NO: 468432 - DNA, 375 bp, Shigella boydii; identical to SEQ ID NO: 82466

SEQ ID NO: 468433 - DNA, 312 bp, Shigella boydii; identical to SEQ ID NO: 82467

SEQ ID NO: 468434 - DNA, 384 bp, Shigella boydii; identical to SEQ ID NO: 5293

SEQ ID NO: 468435 - DNA, 672 bp, Shigella boydii; identical to SEQ ID NO: 5292

SEQ ID NO: 468436 - DNA, 228 bp, Shigella boydii; identical to SEQ ID NO: 20701

SEQ ID NO: 468437 - DNA, 369 bp, Shigella boydii; identical to SEQ ID NO: 5354

SEQ ID NO: 468438 - DNA, 474 bp, Shigella boydii; identical to SEQ ID NO: 237488

SEQ ID NO: 468439 - DNA, 219 bp, Shigella boydii; identical to SEQ ID NO: 5327

SEQ ID NO: 468440 - DNA, 348 bp, Shigella boydii; identical to SEQ ID NO: 5328

SEQ ID NO: 468441 - DNA, 393 bp, Shigella boydii; identical to SEQ ID NO: 5106

SEQ ID NO: 468442 - DNA, 480 bp, Shigella boydii; identical to SEQ ID NO: 229897

SEQ ID NO: 468443 - DNA, 375 bp, Shigella boydii; identical to SEQ ID NO: 461579

SEQ ID NO: 468444 - DNA, 420 bp, Shigella boydii; identical to SEQ ID NO: 462828

SEQ ID NO: 468445 - DNA, 174 bp, Shigella boydii; identical to SEQ ID NO: 459318

SEQ ID NO: 468446 - DNA, 867 bp, Shigella boydii; identical to SEQ ID NO: 463340

SEQ ID NO: 468447 - DNA, 1026 bp, Shigella boydii
ttgaaacgccgtcttattattgctgcttctttgttcgtttttaacttatcgtctggttttgcggcggaaaacattcctttttcacctcagcctccagagattcatgccgggtcctgggtattgatggattacaccaccggtcagatcctcaccgcgggtaatgagcatcaacagcgcaatcccgccagcctgacaaagctgatgacgggttatgtcgtggatcgcgctatcgatagtcatcgcattacgccagacgatattgtcaccgtggggcgcgatgcgtgggcgaaagataatccggtgtttgtcggttcttcactgatgtttttgaaagagggcgatcgcgtatcggtacgtgatttaagccgtggtttaattgtggattccggaaatgacgcttgtgttgctctggctgactatattgccggtgggcaacggcagtttgttgaaatgatgaacaactatgccgagaagctgcatctcaaggatacgcattttgaaacagtgcatggtctggatgcacctggccagcatagctcggcttatgatttagctgtgctttctcgtgctatcatccacggcgagcccgagttttatcatatgtacagtgggaaaagtctcacctggaacggtatcacccagcaaaaccgtaacgggttgttgtgggataaaaccatgaatgttgacggcctgaaaacgggtcatacttctggtgccgggtttaatctcattgcttcggctgtagatgggcagcgtcgtctcattgcagtggtaatgggggctgacagtgcaaaaggtcgtgaggaagaggcaagaaaattactgcgttgggggcaacaaaactttactacggtgcaaattttgcaccgtgggaaaaaggtcggaacggaacgcatctggtatggcgataaagaaaatatcgacctgggaacggaacaagagttcggtaatgactccaacttattgatagtgttttatgttcagataatgcccgatgactttgtcatgcagctccaccgattttga

SEQ ID NO: 468448 - DNA, 261 bp, Shigella boydii
atggtgattgccctcacctctgcgggtaccccgctcgcccgggaagcaacgctggcaattaccctcgacgtaccggaagatactgacatttatatgcccatggtttctcgacttgcacagctgaccgtgatagatgtgctggcgacaggatttactttgcgacgcggtgcaaaattcagagataacttgaagcgggtcaaggaagcgctgaaggaatcgcgttttgataagcagttacttaatttaagtgacgatcgctaa

SEQ ID NO: 468449 - DNA, 372 bp, Shigella boydii
atggatttttctttaactgaagaacaagaactgctgctggccagtattcgcgaactgattacgactaactttgcggaagagtatttccgcacctgcgatcaaaacgggacatatccgcgtgagtttatgcgggcgctggcggataacggcatttctatgcttggcgtgccggaagagttcggtggcatccctgcggattacgtcacccagatgctggcgctgatggaagtgtcaaaatgcggtgctccggcatttttgattaccaacggtcaatgtattcacagtatgcgcgtttcggttctgcagagcagctacgtaaaacggcagagagcaccctggaaacgggtgatcccgcctatgccctggcgttga

SEQ ID NO: 468450 - DNA, 1596 bp, Shigella boydii
atgaaacctgtaaaaccacctcgtattaatggacgagtgccggtcctgtcggcacaggaagcggtgaattatattcccgacgaagcaacactttgtgtgttaggcgctggcggcggtattctggaagccacgacgttaattactgctcttgctgataaatataaacagactcaaacgccacgtaatttatcgattattagtccaacagggcttggcgatcgcgccgaccgtggtattagtccgctggcgcaagaaggtctggtgaaatgggcattatgtggtcactggggacaatcgccgcgtatttctgaactcgcagaacaaaataaaattattgcttataactatccacaaggtgtacttacacaaaccttacgcgccgccgcagcccaccagcctggtattattagtgatattggcatcgggacatttgtcgatccacgccagcaaggcggcaaactgaatgaagtcacgaaagaagacctgattaaactggtcgagtttgataacaaagaatatctctattacaaagcgattgcgccagatatcgccttcattcgcgctaccacctgcgacagtgaaggctacgccacttttgaagatgaggtgatgtatctcgacgcattggttattgcccaggcggtgcacaataacggcggtattgtgatgatgcaggtgcagaaaatggttaagaaagccacgctgcatcctaaatctgtccgtattccgggttatctggtggatattgtggtggtcgatccggatcaaagccaactgtatggcggtgcgccggttaaccgctttatttctggtgacttcactcttgatgacagcaccaaacttagcctgcccctaaaccaacgtaaattagttgcgaggcgtgcattattcgaaatgcgtaaaggcgcggtggggaatgtcggcgtcgatattgctgacggtattggcctggtcgcccgggaagaaggttgtgctgatgactttattctgacggtagaaacaggtccgattggcggaattacttcacaggggatcgcctttggcgcgaacgtgaatacccgtgccattctggatatgacgtcccagtttgatttttatcacggtggtggtctggatgtttgttatttgagttttgctgaagtcgaccagcacggtaacgtcggcgtgcataaattcaatggcaaaatcatgggtaccggtggatttattgatatcagtgccacctcgaagaaaattattttctgcggcacgttaaccgcgggcagtttaaaaacagaaattgccgatggcaaattaaatatcgtccaggaaggacgggtgaagaaatttattcaggaactaccggaaattacttttagcggaaaaatcgcgctcgaacgggaactggatgttcgttacatcaccgaacgtgctgtattcacgctgaaagaagacggcctgcatttaatcgaaatcgcccctggcgtcgatttacaaaaagatattctcgacaaaatggatttcaccccagtgatttcgccagaactcaaactgatggacgaaagattatttatcgatgcggcgatgggttttgtcctgcctgaagcggctcattaa

SEQ ID NO: 468451 - DNA, 153 bp, Shigella boydii; identical to SEQ ID NO: 464494

SEQ ID NO: 468452 - DNA, 231 bp, Shigella boydii; identical to SEQ ID NO: 468350

SEQ ID NO: 468453 - DNA, 375 bp, Shigella boydii; identical to SEQ ID NO: 461773

SEQ ID NO: 468454 - DNA, 279 bp, Shigella boydii; identical to SEQ ID NO: 468349

SEQ ID NO: 468455 - DNA, 369 bp, Shigella boydii; identical to SEQ ID NO: 462861

SEQ ID NO: 468456 - DNA, 261 bp, Shigella boydii
atgacacagggctggcgggaggataaatgcccgtctgtccgcgccgggaaaagacagcacgccggtggcgctgaaaggggccgcgcttacgcgccgcccctttcattacgcggatgttctgctgtgtgcttctgtcttttcatgcctgtcatttgtctgttactgatgatgttgttgttcctgctactgctactgctactgctactgctactgctactgctactgctactgctactgctcttctttttcctgccgctctga

SEQ ID NO: 468457 - DNA, 375 bp, Shigella boydii; identical to SEQ ID NO: 461579

SEQ ID NO: 468458 - DNA, 1224 bp, Shigella boydii; identical to SEQ ID NO: 460415

SEQ ID NO: 468459 - DNA, 642 bp, Shigella boydii; identical to SEQ ID NO: 460406

SEQ ID NO: 468460 - DNA, 492 bp, Shigella boydii; identical to SEQ ID NO: 461815

SEQ ID NO: 468461 - DNA, 492 bp, Shigella boydii; identical to SEQ ID NO: 460462

SEQ ID NO: 468462 - DNA, 471 bp, Shigella boydii
atgactgccatttatatcctgctatcaaaggccaatttgatagacacatatactgggttgcttctggtttatgtaaccggttcattgcccttcatgacgtggttggtaaaaggttattttgatgctattccaacttctttggatgaggccgataaaatagatggagcagggcatctgactatttttattcagataatattgccattggctaagccgattctcgttttcattggattagtttcgttcactggaccatggatggacttcattttgccaacgttggtgcttcgtagtgaggataaaatgaccctggcgattggcatttttagttggattgcttctaattcagcagagaattatacgctttttgctgctggggcgcttttagttgcagtacctatcacattgttatttgtattcacacagaagcatataactactggacttgttagcggtgccgttaaggaataa

SEQ ID NO: 468463 - DNA, 1992 bp, Shigella boydii
gtgcactcattgacgggctttcagaatggcactttaaatatcgatgctggtggcaatgttactgttaatcaaggtagttttgctggcaccatcgaaggtgctggtcagctcaccattgcgcaaaacggcagctacgtgctgtcgggggcgcagtcgatggcgctaaccggcgatatagtcgttgatgatggtgcggtgctttcgctggaaggcgacgcggcagatctcgccgctctccaggacgatccgcagtcgatcgtgttaaacggcggtgtgctcgatctctctgatttctccacctggcagagcggcacatcatacaatgatggccttgaagtcagtggcagcagcggaacggttatcggcagtcaggatgtggtagatcttgcaggtggcgacaatttgcatatcggcggcgacgggaaagatggcgtctacgtggtggtcgatgcgagcgacgggcaggtaagtctggcaaacaataatagttatttgggcacaacacaaatcgcctccggtacgctgatggtgagcgacaactcgcagcttggagatacccactataaccgccaggttatctttaccgataagcaacaagaaagcgtgatggagattactgccaatgtcgatactcgcactacgacgactgagcatgggcgtgatattgaaatgcgcgccgacggtgaagtggcagttgatgcgggggtagacacgcagtggggcgcactgatggctgacagcagcgggcagcatcaggatgagggtagcacatttactaaaacgggggcgggtacgctggagctgaccgccagcggtacaacgcagtcggcagtacgtgtcgaagaaggcaccctgaaaggcgatgttgcggatatctttccttatgcttcgtcactgtgggtcggtgatggggcgacgttcgttactggcgcggatcaggatattcagtctatcgatgctacttccagcggcactatcgatatcagcgatggtacggttttgcgtctgaccgggcaggatacttccgtcgcccttaatgcctcattgtttaacggcgatgggacgctggtgaatgctaccgatggcgtgacgttgacaggtgagcttaataccaaccttgaaactgacagcctgacctatcttgccgacgtgacggttaatggtgatctgaccaatacgtccggtgcggttagcctgcaaaatggcgtcgctggcgatacgctaacggtaaacggtgattataccggcggcggtacgctactgttcgacagcgaattaaacggcgatgactcggtaagcgatcaattggtgatgaacggtaatactgctggcaacacaactgtggtggttaactccattacagggattggtgagccgatatcgacaggcattaaagtggttgatttcgcagctgatcccacgcagtttcaaaacaatgcacagttcagtctggctggcagtggctacgtcaacatgggagcgtatgactacacgctagtggaagataacaacgactggtatctgcgatcgcaagaagtaacgccgccatcgccacctgatccagacccggacccaacacccgatcctgacccaacacccgatccaatccccgcttaccagccggtgctgaatgccaaagttggcggttatctcaataacctgcgggcggcaaatcaggcgtttatgatggagcgacgcgatcacgctggtggcgatggtcagacgctgaatttacgtgttatcggcggacgttatcattacacggtggcagggcaactggctcagcaggaagacacttctacggtgcagcttagcggcggcttgtttagcgggcgctggggcacggatggcgagtggatgcttggggcggttggtggctacagtgataatcagggcgacagccgctcgaatatgaccggaactcgcgccgataaccagaaccacggttatgccgttgggctgacctcaagctggtatcagcacggtaattag

SEQ ID NO: 468464 - DNA, 1002 bp, Shigella boydii
gtgggtaaaaagtggcagcacaaattccagccgggtcagcgttatgtgattcaggccaacctgcaactccccgaccgcccggactgccccggctactccttcccgtgggtgggcggcgaagccacgcatgtggttattcccaacgaggtcatggaacaagattgcctgctggcatacgacggcgaaacctattttgaaggctcactggttgaaccgctttcctgcgtgattggcgcgttcaacgccaactatcatcttcaggaaggtagttataaccacacgatggggattcgcccgcaagggcgcatgctgatcctcggcggcaccggaccaatgggactgttggcgattgattatgcgctacatggacccgttaacccgtcgcagctcgtcattaccgataccgacaacgataaattgagttatgcgcgcaagcactatccatcagaaccgcaaacactgattcattatctcaatgccgccgatgcagcatttgatacgctaatggcgctgagtggcggtcacggcttcgatgatattttcgtctttgtgcctaatgaaggactggtgactctcgcctcttccttgctggcgacagatggttgcctgaatttcttcgccggaccgcaggataaacatttcagcgcgccaattaatttctacgatgtgcattatgcatttacccactacgtgggcacgtcaggcggcaataccgacgacatgcgcgcggcggtcaaactgattgaagagaaaaaagtgcaggccgcaaaagtggtaacacatattcttgggctgaatgccgcgggcgaaaccacgcttgaattgcctgccgtcggcggcggcaaaaagctggtgtataccgggaaatacctgccgctgacgtcactcacgcagattcaggatcaagcactggcggcgattctggcgcgtcatcaggggatctggtccggtgaggcggagcaatatctgctcactcatgcagaggcaatttcccatgattaa

SEQ ID NO: 468465 - DNA, 699 bp, Shigella boydii
atgcaggatattcgcgaagaaaggctgaacgagtcggttaaatcagagcagtcaccgcgggtggtactctgggaaatcgacctgacggtgcagggtggtgagcggtattttttctgtaatgagctgaatgaaaaaggggagccggtcacctggcaggggcgtaagtatgaggcatacccgattgacggcagcggctttgagatgaacggccggggcagcagtgccagaccgtcgctgacggtgtccaatctgttcggtctggtcaccgggatggcggaagacctgcagagtctggtgggggccacggtggtccgccgccgggtgtatgcccgttttctggatgcggtgaatttcgttgcgggcaatccggaggcggacccggagcaggagctgagtgaccgctgggtggtggagcagatgtcgcagctgacagccatgacggcctcgtttgtgctggctacaccgaccgagacggacggggcgctgtttcccggtcgtatcatgctggcgaacacctgtatgtggacctaccgctctgatgagtgtggttacacgggcggggctgtggcggatgagttcgataaacccaccacggatatccgtaaggacagatgcagcaagtgcatgcgcgggtgtgaactgcgcaggaatgtcggcaattttggcggtttcctttccattaataaactttcgcagtaa

SEQ ID NO: 468466 - DNA, 837 bp, Shigella boydii
atgggaagaattattgaagctctgtatgggatatcaacggaactgaaagagcgaatcttgaatatgggagagaaaacagttccggtgaattactatacaagacataataactggggtgatcaattaaataaatatttaattgaaaaaattaccaataaaaaggtagtaaagaacaacttcaaaaagctacctcatatattagctataggaagcgttctttcaagtgcatcaaataaaagtatcgtatgggggagtggttttatatctaaagatgcgccattacgagaaacagcccctgatattagggctgttcgaggtgttttgactagaaataaacttcagaaagatttttcaattgactgccctgatgtgttgggagacccggccgttcttttgcctttattttataaagcaaaacatagaagtaaaaaatacaaagtcggtattattccacactataaagataagcaacgagctgttgtacaggattttttacataaaggatgtgttcttgttgatattcaagatgacattgaagtttttattgataaaattaacgaatgtgaggttgtaatttcatcgtcacttcatggattaattgctgcagatacttatggtatacctaatttatgggtttcatttggtgaccaagtattaggtggtgattttaagtttttggactattatagtactactaataatataaatcctaaaatgatacgactagataatgatcataaatattctattgatgatttggttagaatttctagatgtaataaatttattagaagttctgaagagttacttgaagcgtttcctagggagtacatatga

SEQ ID NO: 468467 - DNA, 519 bp, Shigella boydii
atgcagaacgccagacacccgaaaacacacagggaactgtgtgaactggcctgccgttttctccgcaacaacggctttaaggtggtgttcagtgaccgttttcacgcatggacgtcctgcggtgaacatcctgatgccctgggcttccgtaacggagcgtcatgtctcattgaggtgaaatgctcacggtctgatttcctggctgaccggaaaaaggtgttccggtcagagccggaaaagggcatgggagactggcgtttttatctctgcgagccgggggtgattaccgtggccgatttaccggcgggctgggggttgctgtatgcgattaacgggcgggtcaggaaagtacatggctggcccggaaatcatcagtgggtggttacggtcgcgaaaccgttcagggcaaacaaacaggctgaatgcgattatctgttcagtgctctgcgtcggctggaaatccggggcgtgacggagaacggtgcagatgctgacagggtgcagacatatgggctatga

SEQ ID NO: 468468 - DNA, 510 bp, Shigella boydii; identical to SEQ ID NO: 461158

SEQ ID NO: 468469 - DNA, 543 bp, Shigella boydii
atggcctgcagctggtccgtgtcaccactggccacggcacgaccgccaccggccgcaatcagggcgtatgcccgtgccatgtcggtattgcccaccattgagctctcatcgagcaggaacagcgtgttgctgaaatccggcgtttctccgctgcgctgctgcagctgcgtgtcatgcagaaaggacgccagtgtctgcgcatccacgccggcgctgcgcatctccccgaccgcacggtgcgtgggccccagccccacaacacggggacgctcactcgccggcagcatgttcacggctgacatcaccgcccggaactgtgtggtcttacccacaccggcatacccctgtaccaccgtgaaacggtcggacgtttccagtatcatacgggtggcggcacgctgtcccgacgtcagtgtctccatgagttcgccgggtactctctccatcagcggcgtgaccgcttccttaccttcgagaatatggcgaagaatacttttttctgcctcatacgacgcacgggaaaccagcaggcctgtgccatag

SEQ ID NO: 468470 - DNA, 135 bp, Shigella boydii; identical to SEQ ID NO: 461398

SEQ ID NO: 468471 - DNA, 792 bp, Shigella boydii; identical to SEQ ID NO: 229467

SEQ ID NO: 468472 - DNA, 522 bp, Shigella boydii; identical to SEQ ID NO: 229466

SEQ ID NO: 468473 - DNA, 819 bp, Shigella boydii; identical to SEQ ID NO: 229465

SEQ ID NO: 468474 - DNA, 246 bp, Shigella boydii; identical to SEQ ID NO: 460696

SEQ ID NO: 468475 - DNA, 1416 bp, Shigella boydii; identical to SEQ ID NO: 461512

SEQ ID NO: 468476 - DNA, 861 bp, Shigella boydii
atgaaaattacggatcacaaactctctgaaggtattgccctgacatttcgtgttcctgaaggaaatataaaacatcctttgattatcttatgccatgggttatgcggtatcaggaatgttctgctcccttgctttgcgaatgccttcacagaagcaggattcgcaacgattacttttgattatcgaggattcggtgagagtgatggagaacgagggcgtctggttcctgcaatgcagaccgaagatattatttcagttatcaattgggcagaaaagcaggaatgtattgataatcagcgtattgggttatggggaacatcgctgggaggggggcatgtcttcagtgcagctgcgcaggaccaacgcgtaaaatgtattgtcagccagctggcttttgctgacggtgatgttctggttaccggagagatgaatgaatcggagagagcgtcttttctgtccacgctgaataaaatggcagagaagaagaaaaacaccgggaaagagatgtttgtgggggttacccgggtactgagtgataatgaatcaaaggtattcttcgagaaggtaaaaggtcagtatcctgaaatggatataaaaatacctttccttacggttatggagacgttgcaatataaaccggcagagagcgcagccaaagtacagtgcccagttttgattgttattgccggccaggatagtgttaatccaccagaacagggaaaagccttatatgatgctgttgcttctggtactaaggaattatacgaggaagctgacgcatgccattatgatatttatgaaggcgcgttttttgaacgtgtggcggcagtacagacgcaatggtttaaaaaacatctttaa

SEQ ID NO: 468477 - DNA, 1143 bp, Shigella boydii; identical to SEQ ID NO: 461951

SEQ ID NO: 468478 - DNA, 243 bp, Shigella boydii; identical to SEQ ID NO: 7701

SEQ ID NO: 468479 - DNA, 324 bp, Shigella boydii; identical to SEQ ID NO: 239471

SEQ ID NO: 468480 - DNA, 303 bp, Shigella boydii; identical to SEQ ID NO: 461506

SEQ ID NO: 468481 - DNA, 381 bp, Shigella boydii; identical to SEQ ID NO: 458903

SEQ ID NO: 468482 - DNA, 381 bp, Shigella boydii; identical to SEQ ID NO: 458903

SEQ ID NO: 468483 - DNA, 375 bp, Shigella boydii
atgacaaaagagctgacaggtaaagccctgtttatggcgctcaggagccagcgcccacctaccgggctaatccaccactctgatcgaggttcacagtactgcgcatacgattaccgggtcatacaggagcagtctggtctgaaaacatcaatgtcgcgtaaaggtcactgttacgacaacgctctgatggaaagcttctggggaacgctgaaaaatgagagcctgagccactatcgttttaataaccgggatgaagccatctcagtaatacgggaatacattgagattttctacaatcgtcagcgtcgtcactctcgtctggggaatatctccccggcagccttcagggaaaaatatcatcagatggctgcttaa

SEQ ID NO: 468484 - DNA, 702 bp, Shigella boydii
atgttggatgcagtattcaatcatttaggcgctgactctccaatatggcttgacgttgtacgcaatggtgccaattcacgttacgccgattggttctggattcataaattgcctgtttatcccgatactccaaaaagtgaatgggattttaaaaactttaactatgaaacctttggcaatgttattgaaatacctaagctaaatactgagaatgaagagtgccgtgaatacttacttagtatagttcgctattggacgcaaaattttgatattgatggttggcgtctggatgttgcgaatgaagtggatcatcatttctggcgagatttcagaaaggtgattaaagatatcaaacctgaatgttatattttgagtgagatatggcatgagggcaccccctggttgcgtggtgatcagtttgattcattaatgaattatcccttaacatatgggattattgattattttgcgttacaggatacaacaaaacaagaatttatgacatccgttacacgttcttatctttgttatcctaaaaatataactgaagttatgtttaatcttctggatagtcatgacaccgcgcgtattttaagcgtttgtttgaatgataaacgaaaagttaaactcgcctatttatttatgttaactcaagcgggctctccttgtatctactacggggtaatgctgccaacttactga

SEQ ID NO: 468485 - DNA, 663 bp, Shigella boydii
gtgctgcgtcgacgggctattgatgcgctgctgcaggggctgtgtttccactatgacccgctggccaaccgcgtccagtgttccatcaccacactggccattgagtgcggactggcgacagagtccggtgcaggaaaactctccatcacccgtgccacccgggccctgacgttcctgtcagagctgggactgattacctaccagacggaatatgacccgcttatcgggtgctacattccgaccgacatcacgttcacactggctctgtttgctgcccttgatgtgtctgaggatgcagtggcagctgcgcgccgcagtcgtgttgaatgggaaaacaaacagcgcaaaaagcaggggctggataccctgggtatggatgagctgatagcgaaagcctggcgttttgtgcgtgagcgtttccgcagttaccagacagagcttaagtcccgtggaataaaacgtgcccgtgcgcgtcgtgatgcgaacagagaacgtcaggatatcgtcaccctggtgaaacggcagctgacgcgtgaaatctcggaaggacgcttcactgctaatggtgaggcggtaaaacgcgaagtggagcgtcgtgtgaaggagcgcatgattctgtcacgtaaccgcaattacagccggctggccacagcttctccctga

SEQ ID NO: 468486 - DNA, 375 bp, Shigella boydii; identical to SEQ ID NO: 461626

SEQ ID NO: 468487 - DNA, 177 bp, Shigella boydii
atgaaaaaaagaaattttagcgcagagtttaaacgcgaatccgctcaactggttgttgaccagaaatacacggtggcagatgccgccaaagctatggatgttggcctttccacaatgacaagatgggtcaaacaactgcgtgatgagcgtcagggcaaaacaccaaaagcctcgtaa

SEQ ID NO: 468488 - DNA, 279 bp, Shigella boydii; identical to SEQ ID NO: 463003

SEQ ID NO: 468489 - DNA, 270 bp, Shigella boydii; identical to SEQ ID NO: 465276

SEQ ID NO: 468490 - DNA, 426 bp, Shigella boydii; identical to SEQ ID NO: 461631

SEQ ID NO: 468491 - DNA, 351 bp, Shigella boydii; identical to SEQ ID NO: 467559

SEQ ID NO: 468492 - DNA, 219 bp, Shigella boydii; identical to SEQ ID NO: 465001

SEQ ID NO: 468493 - DNA, 219 bp, Shigella boydii
atgactaaaaatactcgtttttcccccgaagtccgtcaacgggcagtccgtatggttctggaaagtcagggcgaatatgactcacaatgggcgacaatttgttccattgctccaaagattggctgtacgccggagactctgcgtgtctgggttcgccagcatgagcgggataccgggggcggtgaggtgggctcaccaccgctgaacgtcagcgtctga

SEQ ID NO: 468494 - DNA, 219 bp, Shigella boydii; identical to SEQ ID NO: 465006

SEQ ID NO: 468495 - DNA, 138 bp, Shigella boydii
atgggcaactttaatgttaaggaagtagatggatgcttcatggatgcacaaaagatagctatagataaactattttctatgctgaaagacggggttgttttaaacgaccataataaatcatttggaatagaaaaataa

SEQ ID NO: 468496 - DNA, 684 bp, Shigella boydii
atgaagttaaaaaagatagcattatttgatctgtgtgaaaccttagttgattttcaaactggcgatgggtttatatactatgtaatagatcgtttggggatatgtaataacatcaaaatacagactttaaatagggtggcatcttcattatccattttcaaaatcgaacaaataataaataaaataagattgggggaaagtttaaggaaaagaattttattgtatatgttaaaaaatattgaaagggatattcttaatgtaatggctcgtgattacgttaatgaaattatattgcgcagagttaatcctgccataattaagatattgaataagcatttaaaagatggagatgaggttattattatttctggaggctatgatatttatattcaatatttagttaaagcattagagattaatagctttgtatgcacaaaaattaaatttgataatagaggcaggtgtttagggagaattagtggcaagaattgcatgggatataataaagtattaatgttaaaaggtgttttgtcgttagatgtttctgagtatcatataacaacttactctgattctattagcgatttaccaatattaaaaatgagcaacgttggggtagtagtatcgaaaggccaggcaagagaatgggtaagacagcataaattatttgagattctaatatga

SEQ ID NO: 468497 - DNA, 198 bp, Shigella boydii
atgacgattgcagaacgtcttatacagaaaggtttcgacgaaggtttcgacgaaggttttaaagaaggttttaagaaaggtgcgcttgaagtggcgcgggaagcagcctgccggctgcgggatatgggctggacgccggaacggattcaggaggctaccggactttccgatgacgaactgaagaaaatcattcactga

SEQ ID NO: 468498 - DNA, 1086 bp, Shigella boydii
atgtcgcagttaaaacaacctattttcctgaaaaagataaaaaaagtcatcaacacaatccctgggcttgaagagcaaatctttgcatgccgaaataaaaaacgcagcgacaatccattattatttatcgacagaaaagatgaagaacgcatactaatgagtcgtctccagagccaacaaaaaaatgaagaaatggcttctaaactagaatctttatttcatggaaacgaattatcgtcaccacacagtattttgtgttttatatactggcgctatacaaagaaaatttatcgcctaagcgaggacatcatcagtgatgtggctaacacctatgttgataacattcctgcacagatcctcaaggaactcccttcatggagtatctatgtttcagccgaaaatctgcatactatacttcctacgtcctatccgatacatggatttttcttttatccatttttggacaataatggaaatattatccggcttttcattattgatgatctgaaacaaagtcaaggaactacagggctaaaagaaaaggatgttgacgtcgtcaataatatcatcagaataaaggactctcgtgaaggacttcttgactccagaaagatggagtgtatcgatggtgaagtcgtcgtaacagttaacgaaaagctcaaagatttcagagacagggagtttaatcttcttaacgcacagatatcaatggtgctttatatctgttcacagatcaatgatataaaagaaaaaaatcaatttaaacggtcagaaaagcacaaaaagcatgttcacactcaccatgaactaccagcacaaaacattcgggagtgggacgttggtattcgaatggggcaagccatacggcaatatcgccaagcagaacccacagggaaagagcggacaacaataggtagcaaacgtcctcatatacgccggggacactggcatacatactggacaggaagtaagaaaccagaactagcccatgagcgtaaacctagattaatatggttacctccggtaccagttaatttagaagacgtaaacaaactaccggtggtaataacacccattgataaatga

SEQ ID NO: 468499 - DNA, 297 bp, Shigella boydii; identical to SEQ ID NO: 10662

SEQ ID NO: 468500 - DNA, 210 bp, Shigella boydii
atggcaaaaacaaaacaggaatggttatatcagttacgtcgctgttccagcttaaagacacttgagaaaattattgctaaaaaccagggcactttagcctcggataaaatagaagcattcaactctgcagttgatcatcgccttgcggaactgacaatgaacaaattgtacgacaaagtaccggcttctgtctggaagcatgtaaaataa

SEQ ID NO: 468501 - DNA, 615 bp, Shigella boydii
atgattggagcatatgcaaaccgtggcggcacccattctaaaaaagaaacatgcgtgatcgcattcgcacttttctacattattttcgccgtcccattactaatcatttggaatacacctaccagttggggactagcagtaatcccaactggattcctactatactccggatataaaaatggaagaaagaaaagagcaatcgtaaataatatcctagaacagataaagactgaatatcatgatgtattcgatccagacccatcttacgaacacaaatcaataccatcattatatttcggaattgatatcaaaaaaggtactgcgttatatattcggctttaccccaataaaacattagatatcattggcattgatattgataattttacacggacagtagtaagagaaaactgtatggaaatacacacaaagtatgtcaatatgccaatgttagaattgcctattggtgttaactctgctcgttctattgcaaacacattgcacgcaatggcaagtcgaggatatgattaccctgtcgactttcctcgcctgattcaggaaaagcgtaaggagtgggagcagattgcaggtatgcctgtagctgaagtattttaa

SEQ ID NO: 468502 - DNA, 2169 bp, Shigella boydii
gtgaaaattttacttcgcgcactctgtgcaggccttgctatatcctcactgccggcaatggcttcagtgacctatcaggatattgtgtctgccgcaaccaatcctgacgatctgtcccgtcaggcgctggtcacgatattcggtgatgtggtcaccaatccactgtcaaccagcgcccccaccctaatcggaagcatgttcggggcgttcaacagtatcatcgccgtacttgccgttgtctggtttatgttcattggtatccgtcatgttgtgcgttcggggcatcagggacaggtattcagcaccggacgcgatgtcgtcggcacactgagtgtcgttgcaggttttctgatgatcgttccaaccggaaatggctggagtctcgctcagctcattatgttatggggcgcatcgataatgggggttgggtccgccaatgtgatggttcaacttgctgctgataatatcgcaaatggttattcaatgactgtacagccagttcaggcatccacacgaacagcagcgcgtggcatttttgaaatggaactgtgtaagtatgcggttaacgcaggactaaatgattttaatcagacggccaaatcctcgacttcactgatgacagaatcagctaaaaccgccagtggtaattacactgtcacggtatccaatggcagcggtatctgtggtacagccagcctgtcagtagaaggaaacggaacaacagatcaatcgacgattggaaaattctttaatcccttcagtaaaaacgaatacagcggtgttatctcagcacaacgtgcagccatggataatatgattagcgacatggacaacgctgccagtgagtttgtgacaacatttctggaaaaaagaaattctggcaacggaacattgccggatatcgagacacggattcagagagcagccgacgagtatgagcgtgctgtacaaaaatcgctacctattgataacggagaacaatccaggaaagaagctctcaagtcttatctcacaacctatggatgggtaacgcttggcgcgtggtatcagacctttgccactgctaaccagcgtctggcagagctggctgacagagctccagctgtaacttcaatgtcatcacttggggaagttggcgatactgatttatttagtgctgttatgggggcatacaagactcaattgcagaattcaacttataccccacctttaggtactataacttcagcagacgaacaactactttcaaaaacaagcacgccacaagatgctttaatcaagcccacagagaagtttgggcaatggcttacgaacaatattgccaccgagtggactgattcgggtacaagtagcaatcaagttaatccactgataaaaatgaaaaatattggtgataaaactatggtcgctgcagagggtatttggattacttatacatctgctagagttattacttcaggaactgggagttctatatttggtaaattcatagatttgacgacaagtgctatttcaacactaaatgccttacttgaggccttagcgccccccgtatactttctgttactactgctgttttgtgcaggattctctttatctatttatttaccatttattccgtttattttctggatgactgggattggtaactgggtcattagtgtattaatcggatgtacagctggacctctgtggggggcaactcatctaggcacatcacaggacagagggagtcgtgctgcctacggttatatatatttaatagacagcatgataagaccacctatcatggttttcggattcttttttgcctctgtagccattatagcaataggtactatattaaactttttattcggtgctgcactgaccaatgtacaaataagttcatttacaggtatatttagcctcgcaggtttcttacttctttatgctagaagttgcacaaccattgtagccgcagcatttgccttacaagcatacctcccagaccatgtaattaatttcctaggaggacgtgatggtgtaaacacgcttggcaatatggctggttcaataaaagagatttttgctggcagcaatagaaacataagacacgcacctaatataagagaggagcaaattaaaaggatgaataacgacaacaataaggatggaataaagggataa

SEQ ID NO: 468503 - DNA, 135 bp, Shigella boydii; identical to SEQ ID NO: 10665

SEQ ID NO: 468504 - DNA, 435 bp, Shigella boydii
atgatgaataaatttagttatgtcaatcgtatgcttcggcaagtttttgtttttagttttatcacggccccatcaatagctttatttgttgtttttatgtttttttcgtttaataactcaattgctggttcatttttaaaagaggccagggggcttataaccgatactccttctgataaggttaacgtctgtcttttcgaaaagggcgtaccacaggatatggagttgacaaactccacaactgaacatgtattaaaaaataaatgtataacaacgttagttgatgctgctgactggcaggaatctgttgacggttccattcgatatttttattggtcgtcagttgttattggctttgtggtctggcttacctttaattttcgtgcactggaagaactattttatcgtagaaacagaaaaggagacgttgaatga

SEQ ID NO: 468505 - DNA, 516 bp, Shigella boydii
atgaggatttttttaagcgtaattttattcctgtttactgcttttcagtctgcaaatgcaggtggaatacctggtgctttagcaggaatactttctacattaaaccaggaaatccaggggaaagttattcgtgttctcgatggcgatacaatcgaagttttacaggacaaaaagcccgtcaggattcgcctggcaaacatcgatgcaccggagaaaaaacaggctttcgggcgctggtcagcaaatcagcttaaagctctgcttgcagcacagcctgttacggtgacgtacacgcagacagaccgctacggacgcattatcggtcatgtgttcacgacgaacggcacggatgccagccgctttatggttcagtctggcgctgcatgggtatatgaacgttacaacgtggatgagtcattaccggctctacaacgggaagcgcaggaacaaaaacgcggtttgtgggtcgatgcaaatccggttccaccgtgggagtggcgatacaaacataactaa

SEQ ID NO: 468506 - DNA, 576 bp, Shigella boydii
atggagcaatgcatctttgatttaggcattatgaactatatggtcgtcttgttttgcgacctttcattaattccaatagcctcgcaggggtataaaatgaattacgatgaaataacaaaaatcaccgctgaacttatagatagttatatgacacaagctgtcaacgcagactctacaggagttgcaaaagggaaacttattcctactgataccggatatgcgcttattgatgccctgcctggtatagcggttaatcctgatatgacagcattatggtctgaaaagcaggctgccatagaaaatggcgatctgacggttgaacagtttattaatgatctgtacggtgaactgacaggcatgatttctgatgttgacctgggcgagatgaagattgaacccgctgcgccagcagggcagtttcaacgcctggactctccctgcccttcctgtggtaaacatattgttatcaggccgaaaggttatttctgtaccttaaaatctggagtgagttttatggtaagaaaatcacccaggcacaggccgaaaaactggttaaatcagggaaaaccgatttga

SEQ ID NO: 468507 - DNA, 462 bp, Shigella boydii; identical to SEQ ID NO: 38636

SEQ ID NO: 468508 - DNA, 510 bp, Shigella boydii; identical to SEQ ID NO: 109551

SEQ ID NO: 468509 - DNA, 1026 bp, Shigella boydii; identical to SEQ ID NO: 468447

SEQ ID NO: 468510 - DNA, 591 bp, Shigella boydii
atggcaaataatatgtcgtcccgtcaggcgtgccatgccgcccggtatgttgtcgcccgggttctgcgaggactgttctggtgtctgaagtacaccgtcattctgccactggccacaatggccctgatggctctgtttgttttatggaaggacaacaccacgccggggaaattactggttaaggagattaacttcgtaagacaaacagcacctgccggacagttcccggtcagtgaatgctggttttcttcctctgattcttcaggcagatcagaaatacaggatatctgccattaccgcgcggctgatgctgcagattatgtcagggagactgaccggtcactgatgcaactggtcaccgcattatgggcaacactggcactgatgtatgtctcgctggcagcgatcaccgggaaatatccggtgcgacccggaaaaatgaaatgtatccgggtggtaaccgcagatgaacatctgaaggaagtttatacggaagacgcttccctgccgggaaaaatcaggaaatgccctgcttatcttcctgatgacagaacaaacagaaacaacggagataaaaatgaacatgcgtaa

SEQ ID NO: 468511 - DNA, 198 bp, Shigella boydii
atgaacatgcgtaatattaatgttattacagccctctctgtgccaggtaaaaccgtgtcagatgattttatgcatgctgttctctgtaactgcgccacaagaatcgtacttcctgcaccggagaaattcggttctgagtcattgccggacaattttaatatgactgctgtcggtgtgatgaagaattcagaaatataa

SEQ ID NO: 468512 - DNA, 258 bp, Shigella boydii
atgaaagtcatattcacgtcgaaccgttttattgattttcttatccggcttttgattacagcgattgtcatttccccggtaattatctggtcgtgggatacggtaaaagaaaccactgcaggtgagatacttgctgctgctttcgttattttttactccggtgtgctcctgtttattctgtatttttgtttttctgccctgactgacctgcagaaacctgatgaaagaaaaagtgatgaaaggaatgaagatgaataa

SEQ ID NO: 468513 - DNA, 1374 bp, Shigella boydii
atgccacgcattaaacctcttctggttctttgtgctgctttactgacggtcacacccgcagcgtcagcggatgtgaacagcgacatgaatcagttctttaacaagctgggcttcgcctccaataccacacagccgggcgtctggcaggggcaggctgccggttatgcttacggtggctccctgtatgcccgtactcaggtcaaaaatgttcagctgatttccatgacgctgccggatatcaatgccggatgtggcggcatcgacgcctatctcggctcgttcagttttattaatggcgagcagctgcagcgttttgttaagcagattatgagcaatgctgccggttacttttttgaccttgccctgcagacaacggtgccggaaatcaaaaccgcaaaagacttcctgcagaaaatggcaagcgacattaacagtatgaacctcagttcctgccaggctgcacaggggattatcggcgggctttttccccggacgcaggtgtcccagcagaaagtctgtcaggacattgccggtgagagcaatatttttgctgactgggcggcttcccggcagggatgtaccgttggcgggaaatctgacagtgtcagggataaagccagcgacaaggataaggagcgggtgaccaaaaacatcaacatcatgtggaatgcgctttccaaaaacagaatgtttgacggcaacaaagagctgaaagaatttgtgatgacgctgaccggctcactggtgtttggtcccaacggcgaaatcacaccgctgtcagccagaaccactgaccgctcaattatccgggccatgatggaaggcggcacagcaaaaatttatcactgcaacgattctgataaatgcctgaaagtggtggcagacacaccggtgaccatcagccgggataatgcactgaagtctcagattactaaacttctggccagcattcagaacaaggcggtcagtgacacgcctctggatgacaaggaaaaaggctttatttccagtaccaccatccccgtcttcaaatacctggttgacccgcagatgctcggtgtttccaacagtatgatttaccagctgacggactatatcggttacgacatcctgctgcagtacattcaggagctgatacagcaggcccgggcgatggtggccacaggaaattatgacgaagcagttatcgaacatattaacgacaacatgaatgatgccacccggcagattgcggcgtttcagtcacaggtgcaggtacagcaggatgcgctgctggttgtcgatcgtcagatgagctacatgcgtcagcagctttccgcccgcatgctcagtcgttaccagaacaactatcacttcggagggagcacgctgtga

SEQ ID NO: 468514 - DNA, 498 bp, Shigella boydii
atgaaaaatttagctcatattgctctggtgacggtgatacagctcattgcctgttatctggctgattgggggagtgccgaaacagtttttatcctgtgctttattgtactatggcagggattgtttatatggttattttctcaaatacgaaaaaaacggcatgtgtcggatgagtttaaattcagtaaaggcgtttggtatatactgatgccagtatcttccttactctctccgttattaagcctgatggtttttatcattggtacactatacgaattaaggcgaattagtggttgtgtaagtgtaagagaatggatgcaatctcaggtaaatgaacaaactaatgaagatttgcatctggattttgatgatgtgaattttgattatgtggatttttatcgtactaatccggcaacaggattagctatgcatggaggatttgattcagcaggaaatacttttgggacttgttggcaggactatgatgacaggcgataa

SEQ ID NO: 468515 - DNA, 1251 bp, Shigella boydii
gtgaggttcaaaatttccctgaccacacgcctgagcctgattttttctgcggtgatgcttacggtatggtggttatcaagttttatcctgattagcacccttaatggctatttcgataatcaggaccgcgattttctgacaggtaaacttcagctcaccgaagagtttcttaaaacagagacgtttcggaacaaaacggatattaagtcattatcagaaaaaataaacgatgcgatggtagggcacaatggtttattcatttctataaaaaacatggaaaatgaaaaaattgttgaactctatgccaaaaattctgttgttccagcggtcctgcttaataagtcgggtgatattctcgactatatgatccagacggaagaaaataacaccgtgtaccgcagtatctcgcggcgggttgccgtgacgccggaacagggtaaaagcaaacatgtcatcattacggttgccacggatactgggtatcacaccctgttgatggacaaactcagtacctggctgttctggttcaatatcggtctggtctttatttctgtttttctgggctggctgaccacacgtattggtctgaaaccgttacgggaaatgaccagtctggcttcctccatgactgtacacagcctggatcagcgtctaaatcccgatctggctccgccggaaatctctgagaccatgcaggagttcaataatatgtttgatcgcctggagggggcattccggaaactgtcagatttctcgtctgacatcgcgcatgagctgcgcacaccagtcagtaatctgatgatgcagacgcagtttgcactggctaaggaaagggatgtttcgcattaccgcgaaattttattcgctaacctggaagaactgaaaaggttgtcacgaatgaccagtgacatgctttttctggcacgttcagaacatggtctgctgcggctggataaacatgatgtggatctggcagccgaactgaatgaattacgtgagttgttcgagcccctggcagacgaaacaggaaagacaatcacggttgaaggagagggcgttgttgccggagacagcgatatgctccgacgtgctttcagtaacctgctttccaatgcaatcaagtattctcccgataacacctgtacagcgatacaccttgagcgtgacagtgactgtgtgaacgtgatgattatgaatacgatgtccggccaggttcccgctaatctggaacgtttgtttgaccggttgtaa

SEQ ID NO: 468516 - DNA, 429 bp, Shigella boydii
gtgcgggacaaagtgaaaggactggagcttggcgcagatgactacctgattaagccctttgattttacggagctggttgcacgtgtaagaaccctactgcgccgggcacgctcgcaggccgcaacagtctgcaccatcgccgatatgaccgttgatatggtgcgccggaccgtgatccgttcggggaagaagatccatctcaccggtaaagaatacgttctgcttgagttgctgctgcaacgcaccggagaagtgttacccaggagtcttatctcgtccctggtctggaacatgaattttgacagtgatacgaatgtgattgatgtcgccgtgagacgtctgagaagtaaaattgatgatgactttgagccaaaactgatccataccgttcgcggtgccggatatgtcctggagatcagagaagagtga

SEQ ID NO: 468517 - DNA, 183 bp, Shigella boydii
atgcagcgtattttaatcgttgaagacgaacaaaaaacaggtcgttacctgcagcagggactggttgaggaaggctatcaggccgatctctttaataatggccgcgatggtctcggggccgcgtcgaagggacagtatgatttgataatactggacgtgatgctgcctttcctcgacgggtag

SEQ ID NO: 468518 - DNA, 930 bp, Shigella boydii
atgaacgacctgattatgattgttattcgttttcttctttatctggatttgatggtaatatttggattgccattttttcagatatatggaataagtggtgtcagacatgaaacctataacctgactaatttcaggtcgtttataacctttgctgttgttacaggcatcattcttactggcattaatatgctcctggtatctaatgccatgagtggagtaactgacctcagagaattatccatccatgttatcgagatggtgatagaagaaactgatgtgggtattagctggattgtcaggctctgtgccctgtttaccacactcggtgctttgttcctttacactaataagagagtattgtcctgcctgctgatgacgatgagtgggggcgtggcgctggccacacttgcctggggaggacacgccgttatgcatgacggtctgcattactatctccatttactgagcgatctgacccatctcggcgctgcaggtgcctggacaggtgctctggttgcatttgctatcctgctgatgcgcagaaacgagcataatgcacagagcgtcattgtgatatctgactccctggcaaaatttgccacggcaggaacggtgattgttgtagccctgatcctgagtgcgctggtcaactatctgtatattgctgagggtaacttaactcccttattcaacagttcctgggggaggatattgcttgccaagacggctctgtttgttctgatgcttcttctggctgcagcaaaccggtttcacctggggccccggcttgaagttatggtcagggaagggaattatgatcgcagcgttgccctgatgcgaaacagcatcctgacagaattcgttgttgcgattatcattctgggcgccgtagcgtggctcggaatgcttgctccgtctcaggtcagctag

SEQ ID NO: 468519 - DNA, 381 bp, Shigella boydii
atgtcgattttaaataaagccattcttacaggtggcctcgttatgggcgttgctttctctgctatggcccatccggaattaaaaagctctgtgccacaggctgattcagccatagcggccccggaaaagattcagcttaatttctcggaaaatctgaccgtgaaattctcaggtgcaaaattaacgatgacgggtatgaaaggcatgtcatcacattctccgatgccggtcgcggcaaaagtggcgccaggcgctgaccctaaatcgatggtcattattccgcgagagcctttacccgctggcacttatcgtgttgactggcgcgcggtttcttcagatacgcaccctattaccggtaattacacctttacagtgaagtaa

SEQ ID NO: 468520 - DNA, 897 bp, Shigella boydii; identical to SEQ ID NO: 19852

SEQ ID NO: 468521 - DNA, 1818 bp, Shigella boydii; identical to SEQ ID NO: 117755

SEQ ID NO: 468522 - DNA, 450 bp, Shigella boydii
atgaatatattaatcacgaccactgcgtttacagctttattttgtggggcagcttttgctcagtccagtgatattgcccatgaagcacatcgatttgttaataatgcctcagccgtcagtcatgtgaattcctcgacgcatgaaaacttaccggacagggttaataaaaacaacacgccctcattctctgaaatgaatgaacatgaaagggccattgttgctcattcatttatgaacaacagcgcgtcctatgcgcatcagaaaatgattgaggaacataaaaaaatgctgtccggcagtgatgcaaattcaaagacctcgtcttcttcttttaacgaactgaatgccggagaaaaagccgctctcgtgcatgagcaggtcaataatgccggtgcggaagcacatcagatgcaggcaagaaagcttcgcgggctgtattcgaccaggtaa

SEQ ID NO: 468523 - DNA, 738 bp, Shigella boydii; identical to SEQ ID NO: 117753

SEQ ID NO: 468524 - DNA, 198 bp, Shigella boydii; identical to SEQ ID NO: 117752

SEQ ID NO: 468525 - DNA, 2448 bp, Shigella boydii
gtgaaaaatgacaatgcagtgcaacacaacaaccagactgcttctgagcagacattatccccggacgagggccacgtattgcataaggtgagagatcccgtgtgcgggatggccatcctgcccgacagggcgcacagcagcattcgataccaggaccatcaactttatttctgctccgccagctgtgagagtaaatttaaagcccatcccgatcgttatcttaccgaagatgccagtgaacattcccatcaccatcaccacgatcatcacgaagtcagccctgatcagataaaacagcctcaccaccaggcggaaaaagagaattctgaaggtgtgtggacatgtccgatgcacccggagatacgccgcagtggtcccggaagctgtcctgtctgtggaatggcactggagccgctcgtagctacggcatccacggggccgagtgatgaacttcacgacatgacaagacgcttctggctggggttgttgctggcgtttccggttctggtactcgaaatgggatctcatctgtttcccgagttgaggaatacagtaccgccacagtacaacacatggctgcagctgcttctggcctcccctgtcgtgttgtggtgtggctggccattcttcgcccgggccggaatgtcgttacgtaaccgctccctgaatatgtttacccttgttgcaatggggaccggcgtagcctgggtttacagcgtcattgcaaccgtcttcccctcctggtttcctgcatcgttcagaaacatggatggcctggtggccgtttattttgaagccgcagcagttattacggtgcttgttctgctgggacaggttcttgagctgcgggcacgggaacaaacctcaggcgccattactgcgcttctgaaccttgcccccaaaaccgccagacggctggatcatgacggtcatgaaacggatattaatgcggaagatgtcctgcctggcgataagctccgcatcagacctggagagagtattccggtcgacggtatcgtgatcgaaggcaaaacaaccgttgatgaatcgatggtgaccggggaatctatgccggttaccaaaacggagggtgaccctgtcatcggggggaccattaatcagacagggagtctcatcatccgtgcagagaaagtcggtgatgaaacaatgctctcacgaattgttcagatggtcgctgatgcacagcgttcgcgtgcccccatccagagaatggctgacagcgtttcaggctggtttgttcctctggtgatacttatcgcggttgttgctttcgtgatctggtctgtctgggggcccgagcccaggatggcgcacggtctcattgcggctgtgtcggtcctgattattgcctgtccctgcgcgctggggctggccacgccgatgtcgataatggtgggggtgggcaaaggagcccaggccggggtgttaatcaggaatgccgaagcccttgagcgtcttgaaaaagtggacacgctggttgtcgacaaaacaggcacgctcacggaaggttcgcctacggtgacagggattatcagtctcaatccgggtggggaaacatctcttttgcgtgtaacagccgcagtggaaaaaggctcgcagcatccgctgggtatggcagtagttaaagcagcacaggaaaaggggatcgcaatacccgcagtcactcatttcgatgcaccgtcgggtaaaggtgtctcaggcgatgtcgaaggtcaacgggttgttattggtaatgaactggctatgcaggaaaacagtatcgttattgataatcaaaaggccgttgcggatacgttgcggatggaaggcgctaccgttatctatgtggccacagacggggaccttgcaggcctgatagctatctcggatcccgtgaaaacaaccacgccggatgcgcttaaagctttgcgtcaggcggggatccgcatcgttatgctcaccggggataaccagcttactgctgaagcagtcgcacggaaactgggaatagatgaggttgaagccggaattctgccggatggcaaaaaagcagtgataacccgactgaaagagtctggccatgtggttgcgatggccggagacggtgtgaatgatgccccggcgctggcagcggctgacgtgggtatagccatgggaacgggtacagatgtggcaattgaaagtgccggagtcacccttctcaaaggcgacttgatgatactgaacagggcccgtcatctgtcagagatcaccatgaaaaatatccgtcagaatctgttttttgcatttatctacaacgcacttggcgtgcctgtggctgcaggtctgctttatcctgtgtatggaatactgctgtcgccagttattgcggcggcggccatggctctttcctccgtcagcgtcattgtgaatgcgttgcgtctgaaaagtgtcaggctcgggaaataa

SEQ ID NO: 468526 - DNA, 441 bp, Shigella boydii
atgaaaaaagtggttctgatggcgctggctctcggcctttcactgcccgcgatggcgagtgaaaaagtgattgatatgtacaaatctgaaaactgtggctgttgttccctgtggggcaaggcgatggaaaaagacgggtttgaagtacgaactcacgtcatgaatgatcaggcgctgtcagccctgaaagaaaagcatgctattcctgcaggactgcgaagttgtcataccgcggttgccggtaatttgatcattgaaggccatgtgcctgcgacaacgatacataaggcaatgctgtctggttcaggtatatacggtctcgccacccccggtatgccagcaggaagtcctggaatggagatgggagcccgaaaagaggcttacgatgttatcgcattctcaccggatggaagtaaaaaagtcttccagcgaatcgaatag

SEQ ID NO: 468527 - DNA, 3147 bp, Shigella boydii
atgattgaatggattatccggcgctctgtcgccaaccgtttcctggtcatgatgggggccctgtttctcagcatctggggcacatggacgattattaacacgcctgtcgatgccttgcctgacctgtcagatgtgcaggtcattatcaaaaccagctatcccggccaggccccgcagattgtagaaaaccaggtcacctatccacttaccaccaccatgctgtccgtgcctggcgcaaaaaccgtgcgtggtttttcacagttcggtgattcgtatgtgtatgtcatttttgaagacggcaccgatctgtactgggcccgttcccgcgtgctggagtacctgaaccaggtacagggaaaactgcccgccggtgtgagttctgaaatcggtccggacgccacgggggtgggctggatatttgaatatgcccttgtcgatcgcagcggaaaacacgacctttcagaactgcgttctctgcaggactggttcctgaaatttgagctgaaaaccatcccgaacgtggctgaggtcgcttcggttggcggcgtggtgaaacagtaccagattcaggtcaatccggtaaaattgtctcagtatggtatcagcctgcccgaagtgaaacaggcccttgaatcgtctaaccaggaggccggtggctcatccgttgaaatggccgaagctgagtatatggtccgtgccagcggttatcttcagagcattgatgattttaataacatcgtcctgaaaacaggcgagaacggcgtgccggtttatctgcgggatgttgcccgcgtgcagaccgggcctgaaatgcggcgtggtattgccgagctgaacggccagggcgaagtcgctggcggcgtggtgatcctgcggtcgggtaaaaatgcacgcgacgttatcacggcagtgagggataaacttgagacgctgaaggccagcctgccggaaggcgttgaaatcgtgaccacctacgatcgcagccagctcatcgaccgggcgattgataacctcagttccaaacttctggaagagtttatcgtggtggccatcgtctgtgccctgttcctgtggcacgtacgttctgccctggtggcgattatctctctgccgcttggtctgtgtatcgcctttatcgtcatgcacttccagggactgaacgccaatatcatgtcgctgggagggatagcgattgccgtcggtgcgatggtggatgccgccattgtgatgattgagaatgcgcataagcggcttgaggagtgggatcatcagcatccgggtgagcagattgacaacgccacccgctggaaggtgattaccgatgcctccgttgaagtgggacccgcactgtttatcagcctgctgatcatcaccctgtcctttattcctatctttaccctggaaggtcaggaaggacgtctgtttggcccgctggcattcacgaaaacgtactccatggcgggcgcggccgcgctggccatcatcgtcattccgattctgatgggattctggatccgggggaaaattcctgcagagaccagtaaccccctgaaccgggtactgatcaaagcgtatcatccattgctgttgcgggttctccactggccaaaaacaaccctgctggttgcggccttgtccattttcaccgttatctggccgctgagccaggtgggcggtgagtttctgccgaagattaacgagggcgacctgttgtatatgccgtcgaccctgccgggtgtctctccggctgaagctgcagcgctcctgcagacgacggacaagttaatcaaaagcgttcctgaagtggcctctgtatttggcaagaccggtaaagcagagaccgccacggattccgcaccgctcgaaatggttgaaaccacgatccagctcaaacctgaggatcagtggcgtccaggcatgacgattgacaagattattgaagaactcgacaggaccgtccgtttaccggggctggcaaacctctgggtgccgccaatccgtaaccgtattgatatgctctcaaccgggatcaaaagcccgataggtatcaaggtgtccggaacggttctgtccgatatcgatgcaacggcgcagagtatcgaagcggtcgccaaaaccgtacccggcgtagtgtctgctctcgcagagcgactggaaggcgggcgctacattgatgtggatatcaaccgggaaaaagcctcccgctacggaatgacggtgggcgatgtgcagctgttcatctcatcagccatcggcggcgcgacggtaggggaaacggttgaaggcgtggcccggtacccgattaatatccgctatccgcaggattaccggaacagcccgcaggccctgaaacagatgccgatcctgaccccgatgaagcagcagatcacgctgggcgatgttgcggatattaaggtcgtttccgggccgactatgctgaaaacggaaaatgcccgtccagccagctggatttacattgacgcgcgcggcagggatatggtgtcggtggttaatgacattaaaacggcgatcagtcagaaagtgaaactgagaccgggtaccagcgtgtcattctccggacagtttgaactgcttgagcatgccaacaagaaactgaagctgatggtgccgatgacggtgatgatcatcttcatcctgttgtatctggcattccgccgggttgatgaagccctgctgatcctgatgagcctgccgttcgccctggttggcgggatatggttcctgtactggcagggcttccatatgtctgtcgcaaccggaacggggtttatcgctctggccggggtggcagcagagtttggcgtggtcatgctaatgtatctgcgtcatgccattgaagcgcacccggaattgtcccgtaaagagacgttcacaccggaaggccttgatgaagccctctatcatggtgccgtactgcgtgtccggccgaaagccatgaccgtggcggtgatcattgcgggtctgctgccaatactctggggaaccggtgcaggttcagaagtcatgagccgtatcgcggcacccatgattggtgggatgatcacggctccgctgctgtccctgttcattattcctgccgcctacaaattaatctggctgcgcagacataaaaaaagcgtgtcctga

SEQ ID NO: 468528 - DNA, 1293 bp, Shigella boydii; identical to SEQ ID NO: 117748

SEQ ID NO: 468529 - DNA, 354 bp, Shigella boydii; identical to SEQ ID NO: 117747

SEQ ID NO: 468530 - DNA, 1386 bp, Shigella boydii; identical to SEQ ID NO: 117746

SEQ ID NO: 468531 - DNA, 681 bp, Shigella boydii
atgaaaatattgatcgtcgaagacgaaattaaaacaggtgaatatctcagcaaagggcttacagaggcagggttcgtagtggatcacgctgataatggtcttaccggatatcatctcgccatgacagccgagtatgatttagtcattctggatatcatgctacctgatgtgaacggctgggatatcatccgcatgctgcgcactgccggaaagggtatgccggtcttactgctgacagccctcggcacgatcgaacatagggtcaaaggactggaactgggtgcggacgattatctggttaaaccctttgcgtttgccgaactgctcgcccgggtgagaacccttctgaggcggggaaacacgatgatcacggaaagccagtttaaggtggcagacctctcgattgatctcgtatccagaaaagtcagtcgcgccggaaaccgcattgtgctcaccagtaaagagttcagcctgctggaattcttcattcgccatcagggagaggttcttccccgctccctgattgcctctcaggtctgggacatgaattttgacagcgacactaatgcgatcgatgtcgcagtaaagcgactccgcgctaaaatagacaacgattacgagacaaagctgatccagacagtccggggcgtgggctacatgctggaggtcccggatgcatag

SEQ ID NO: 468532 - DNA, 1476 bp, Shigella boydii
atgcatagcaaaccttccagacgccctttctcactcgctctgcggctgaccttttttatcagcctgtccacgatactggcttttatcgcattcacctggtttatgctgcattctgttgaaaatcattttgccgagcaggatgtcagcgatcttcaacaaatcagcaccacactgaaccgtatactgcagtccccggtggatccggatgataaaaaaataagcaaaataaaggaatcaattgccagctaccgcaacgttgcccttttgctcctcaatcccaggggggaagtgctctttagctcagctcagggggcggcactacgcccggcagtgaattcagcagattttagcgagcacagccgcgcacgggatgtctttctctggacggtggaggatcctgcgggaccgatggataccgggtccgaaatgaagatggaaacatacaggattatcgcctcctctggtcaggcgatatttcagggcaaacagcagaactatgtcatgctgactggcctatccattaatttccatctccattacctcgatgcgctgaaaaagaacctgattgcgattgccgtcgtgataagcctgttgattgttctgatcattcgaatcgctgtccgtcaggggcacctgccccttcgtaatgtcagcaatgccattaaaaacatcacctccgagaatcttgatgcgcgactggaaccgacacgcgttcccattgagctggagcaactggttatctcgttcaatcatatgattggaaagattgaggatgtctttacccgccaggccaatttctctgccgatatcgcgcatgagatcagaacgcccatcaccaatctggtgacgcagactgaaatcgcactgagtcaggatcgaacacagagggaacttgaggatgtcctctattccagtcttgaagagtataaccggatgaccaaaatggtcagcgatatgctgttcctggcacaggcagataataatcagctgatacctgacagggtcatgtttgacctcagagcggaagtcatgaaagtcttcgagtttttcgaagcctgggccgaagaacgcaatatcacgctcaaatttaacgggatgccctgcctggttgagggagatccacaaatgttcagaagggcgattaataatctgttatccaatgccctgcgttataccccggagggacaggcaatcaccgtctcaataagagagcaggagagcttttttgaccttgtgattgaaaatccggggaaaccgatccctgaagaacatttatcaaggctgtttgaccgtttttatcgggtggatccatccagacaacgaaaaggagaaggcagcggcatcggccttgcgattgtgaagtcaatcgtggaagcacatcacggaagagtgcaggtggaatcagacgtacgctccacgcgttttatcttatccgtgcccagactggagaaaatgatcccggaaacccaatgctga

SEQ ID NO: 468533 - DNA, 432 bp, Shigella boydii; identical to SEQ ID NO: 227668

SEQ ID NO: 468534 - DNA, 351 bp, Shigella boydii
atgaaaatcaaaaacaccctttttgtaatattaatgttatccctgccagccatttctgctgaacattcggaaatgaaaatgtcagatatgcactcatcggcatcatcacaggaatatatggctggcatgaaaaatatgcatgaaaaaatgatggccgccgttaatgaatccaatcccgataaggcctttgcaaaaggtatgatcgcacaccatgaaggggcaatcgcaatggctgagaccgagctcaaatacggaaaagatcccgaaatgagaaagcttgcgcaggacatcattaaagctcaaaaaggtgaaattgagcagatgaataaatggcttgacagtcataaataa

SEQ ID NO: 468535 - DNA, 567 bp, Shigella boydii
atgctgccacagcagttcccccgtctccgggttctccaccgtctgccgttcgcccgtcaggcggcccttatcgtcgtagccgtagtggacagcgacacggtggccttcgctcaggtggctgatttctctcagccagccgtggccgtcatactgccactgctctgccgggtcgccgttcaccgtccggtgcgtgatgcggtccgacgcatcgtagtgccagagggtgacaagcccctcatcctcactctgcgtgagttttccggtcaggtcataatgataacgttgcgtccgcccgtcaaagccgccctgctgtaccagccggtccagcgcatcgtagctgaagtcgctgtgactgccgttctcgttagtcagactgatgacacgtccggcagcatcgtactccatactgcgcgtcagcccgccctgcgtggtgctgaccgcctttccccacgcatcgtactgtgtctcgctccggttgccgtccggggtgataacggcagtcaggtcgcctgcggcgttgtactcatactgcgtttcacggccctgtgcgtctttcaccgaggttaa

SEQ ID NO: 468536 - DNA, 1359 bp, Shigella boydii
atgcaaaccgttttagcgaaaatcgtcgcagacaaggcgatttgggtagaaacccgcaaacagcagcaaccgctggccagttttcagaatgaggttcagccgagcacgcgacatttttatgatgcgctacagggtgcacgcacggcgtttattctggagtgcaagaaagcgtcgccgtcaaaaggcgtgatccgtgatgatttcgatccggcacgcattgccgccatttataaacattacgcttcggcaatttcggtgctgactgatgagaaatattttcaggggagctttgatttcctccccatcgtcagccaaatcgccccgcagccgattttatgtaaagacttcattatcgacccttaccagatctatctggcgcgctattaccaggccgatgcctgcttattaatgctttcagtactggatgacgaccaatatcgccagcttgcagccgtcgctcacagtctggagatgggggggctgaccgaagtcagtaatgaagaggaactggagcgcgccattgcattaggggcaaaggtcgttggcatcaacaaccgcgatctgcgtgatttgtcgattgatctcaaccgtacccgcgagcttgcgccgaaactggggcacaacgtaacggtaatcagcgaatccggcatcaatacttacgctcaggtgcgcgagttaagccacttcgctaacggttttctgattggttcggcgttgatggcccatgacgatttgcacgccgccgtgcgccgggtgttgctgggtgagaataaagtatgtggcctgacgcgtgggcaagatgctaaagcagcttatgacgcgggcgcgatatacggtgggttgatttttgtcgcgacatcaccgcgttgcgtcaacgttgaacaggcgcaggaagtgatggctgcggcaccgttgcagtatgttggcgtgttccgcaatcacgatattgccgatgtggtggacaaagctaaggtgttatcgctggcggcagtgcaactgcatggtaatgaagatcagctgtatatcgatacgctgcgtgaagctctgccagcacatgttgccatctggaaagcattaagcgtcggtgaaaccctgcccgcccgcgagtttcagcacgttgataaatatgttttagacaacggccagggtggaagcgggcaacgttttgactggtcactattaaatggtcaatcgcttggcaacgttctgctggcggggggcttaggcgcagataactgcgtggaagcggcacaaaccggctgcgccggacttgattttaattctgctgtagagtcgcaaccgggcatcaaagacgcacgtcttttggcctcggttttccagacgctgcgcgcatattaa

SEQ ID NO: 468537 - DNA, 261 bp, Shigella boydii; identical to SEQ ID NO: 468448

SEQ ID NO: 468538 - DNA, 381 bp, Shigella boydii; identical to SEQ ID NO: 463706

SEQ ID NO: 468539 - DNA, 381 bp, Shigella boydii; identical to SEQ ID NO: 463706

SEQ ID NO: 468540 - DNA, 477 bp, Shigella boydii; identical to SEQ ID NO: 460213

SEQ ID NO: 468541 - DNA, 1224 bp, Shigella boydii; identical to SEQ ID NO: 460415

SEQ ID NO: 468542 - DNA, 564 bp, Shigella boydii
atgccactgctggataagctgcgtgagcagtacggggtcggaccgctatgcagcgaactgcatattgccccgtcaacgtattaccactgtcagcaacagcgacatcatccggataaacgcagtgcccgtgcgcagcgcgatgactggctgaagaaagagatacagcgcgtatacgatgaaaatcacaaggtatacggtgtgcgtaaagtctggcgtcagttgttacgggaaggcatcagagtggccagatgcactgtggcacgtctcatggcggttatgggacttgccggtgttctccggggtaaaaaggtccgtacgaccatcagccggaaagccgttgccgcaggcgaccgcgtaaaccgtcatcaaggcaatgtgccgcgtactccgggtggcccgcagcggctggtatacgtggtgtcagcggcggacaaggataaacacacgtcagcagttccgtcagcactgcgacagcgttgtccgcaaggcttttacccagtccagcgttacggtgccccacgcctgacggatgaactgtgtgctctggttaccactttaacgtaa

SEQ ID NO: 468543 - DNA, 243 bp, Shigella boydii; identical to SEQ ID NO: 462679

SEQ ID NO: 468544 - DNA, 1119 bp, Shigella boydii
atggaagcattacttcagcttaaaggcatcgataaagccttcccgggcgtaaaagccctctcgggcgctgcgttaaatgtctatccgggccgcgtgatggcgctggtgggcgaaaacggcgcgggtaaatccaccatgatgaaagtgcttactggtatctatgctcgcgatgccggcacgcttttatggctggggaaagaaacgacatttaccgggccgaaatcttcccaggaagccgggattgggattatccatcaggaactgaacctgatcccgcagttgaccattgccgaaaacattttcctcggtcgtgagtttgttaatcgctttggcaaaattgactggaaaaccatgtatgccgaagcggataaattgctggctaaacttaacctgcgctttaaaagcgacaagctggtgggcgatctttccatcggtgaccagcaaatggttgaaatcgccaaagtgctgagctttgagtcgaaagtcatcattatggatgaaccgaccgatgcgctgaccgataccgaaacagaatccctgttccgcgtcatccgcgaactaaaatcgcaaggccgcggtattgtctatatctcccaccgcatgaaagaaatcttcgagatttgcgatgccgttaccgtttttcgtgacgggcaatttattgctgagcgcgaagtggcatcactgaccgaagattcgctgattgagatgatggtgggtcgcaagctggaagatcaatatccacacctggacaaagcgccgggagatatccgcctgaaagtcgataatctctgcggacctggcgttaacgatgtctcttttactttacgcaaaggcgaaattcttggcgtctctggtttgatgggcgcaggtcgtaccgaactgatgaaagtgctctacggcgcactaccgcgcaccagcggttacgtcaccctggatgggcatgaagtcgttacccgttcaccgcaggatggcctggcaaacggcattgtgtatatctccgaagaccgtaaacgtgacggtttagtgttgggcatgtcagtaaaagagaacatgtcgctgacagcgctgcgctacttcagccgcgctggcggcagtttgaagcatgccgatgaacagtag

SEQ ID NO: 468545 - DNA, 819 bp, Shigella boydii; identical to SEQ ID NO: 461362

SEQ ID NO: 468546 - DNA, 381 bp, Shigella boydii; identical to SEQ ID NO: 463706

SEQ ID NO: 468547 - DNA, 825 bp, Shigella boydii
atgtctcagaacttagacgcaaccgcaattaatcaaatccatgcccttatttctgctcagggtgttaatgaaattatcagtaagattggtgccgatgctgtggcattgcctgagaatttccgcattcatgatctggaaaaatttaatttaaatcgcttccgtttccgtggtgcgctttccactgccagcatcgatgactttacccgttattctaaagatcttgcagatgaaggcacccgctgctttatcgatgccgataatatgcgagccgtcagtgtgcttaacctgggtactattgatgaaccaggtcacgcagataacaccgccacactcaaactgaaaaagacagcaccgttctctgctctgttgtctattaacggcgagcgtaactcccagaagtcactagcagaatggattgaagactgggcagactatcttgtgggctttgatgctaatggtgacgctattcaggcaacaaaagcggctgcggctgtccgtaaaatcacgattgaagcaaaccagaccgctgattttgaagataatgacttcagcggcaaacgctccctgatggagtctgtcgaagcgaagaccaaagacattatgccagtggcatttgaatttaaatgcgttccgtttgaaggtctgaaagaacgtccgtttaaattacgcctcagtattatcactggcgatcgtcctgtactggttctgcgcattattcagctggaggcggtgcaggaagaaatggctaacgaatttcgtgatctgcttgttgagaaattcaaggacagcaaagtagaaacctttattggtactttcaccgcctga

SEQ ID NO: 468548 - DNA, 618 bp, Shigella boydii; identical to SEQ ID NO: 460597

SEQ ID NO: 468549 - DNA, 294 bp, Shigella boydii; identical to SEQ ID NO: 460208

SEQ ID NO: 468550 - DNA, 1002 bp, Shigella boydii; identical to SEQ ID NO: 468464

SEQ ID NO: 468551 - DNA, 405 bp, Shigella boydii
atgaaatcattaaccgcagtgcgtaaaaaaagccctaattatcccgttgagttcaaaatcaaaatggttgaactctcgcatcgaccagagatctccgtagcgcaactcgctcgtgagcatgggatcaacgataatttgctgttcaagtggcgccagtactggcgcgaaggaaaactacgtcctccttcaacaacagaaaacaacgtgcctgagctgctcccgataacacttgatgccgaagatgttgtccctacaacctccccccggtcacaacctgtagctgctgcgacacctgaatcactcaatatcagctgtgaagtgacgttccggcacggatcactccgtctggatggtgccatcagcgaaaatatcctgaacctgctgatacgggagctcaaacgttga

SEQ ID NO: 468552 - DNA, 321 bp, Shigella boydii
atgacaggcactgttgcgcagacaccggtcatggatgtaatggaaataccagctgaaccgcaggtcttccagtcggggacacagagtacagggctggagcttgtggatacgtatctctggatcttcaaacactttatggaaggaaaggagttaaccagatcccttgcctgccaggtttatatcaagccctatagcgacaggatggacagtgtcaccttccagtcagtagctaaacgatctaaggtgttcctggacaaactgcaggagccaacgtctgaaatgataaataagcgagggaatacctggtgctggaagagttga

SEQ ID NO: 468553 - DNA, 198 bp, Shigella boydii
atgaacaagcctctgcttatttttcatgcgactgaagatgatactgtgttaattgagcaggccgaaaaaatattcaaagcagcaaagcatcccaagagtttcatttcgttgggtaaggcggatcaccttctgactcatgctcaggatgctgaatacgttgccgatatcattatatcgtggagcgaatgttacctataa

SEQ ID NO: 468554 - DNA, 510 bp, Shigella boydii; identical to SEQ ID NO: 461065

SEQ ID NO: 468555 - DNA, 306 bp, Shigella boydii; identical to SEQ ID NO: 7670

SEQ ID NO: 468556 - DNA, 219 bp, Shigella boydii
atgaagcagcgtattacagtgacagttgacagcgacagctatcagttgctcaaggcatataatgtcaatatctccggtctggtaagcacaaccatgcagaatgaagcccgtcgtctgcgtgccgaacgctggaaagcggaaaatcaggaagggatggctgaggtcgcccggtttattgaaatgaacggctcttttgctgacgagaacagggactggtga

SEQ ID NO: 468557 - DNA, 351 bp, Shigella boydii
gtgaacgatctctggggacacgcagagggagacgaggtgctgaaggtttttgccggctttttacatcagcacctcgaaccgggcgaaatagcaggccgcctcggcggggatgagtttgccgccctgatccggcgaaacgggaacacgagttcttttctgcacgcgctgagtgccagtttggatcattacaatgacacctcgggcaagccctacaacatcaattattcctttggcgaactgatcaataacgcagaccagtacgcgacgctggcggaaatgatcggcaaatgtgacgaagtgatgtacctgaagaaaaaacgaaagaccctgtcgcggaaagcagaaccgtga

SEQ ID NO: 468558 - DNA, 576 bp, Shigella boydii
atgcaggcacccggtataccggagaatgaagaacagaggctgaagtccctgtatattaccggccttcttgatacccgtgacgatgagcgttttgaacgcctgacgcggctggcccgtaaagcctttcaggtcccggtggccctgataagcctgctggatcgcgagcgccagtggctcctcgcctgccagggcgtcggcgtgcgcgaaaccccgcgtaacatctcgttctgcgggcatgccattctgcaggaggggcccttcattgttcacgacgcagctgctgatgagcggttccgtgacaatcccctggtcaccggtgagccccacatccggttctacgccggccagccggtgagcctgcccgacggcacggtggccggcacgctgtgcctgatccacaccgttccccgcgccttcacggatgatgacattgcgtccctccgggatctggcctgtatcgtggaagacgaattcgaggccatcagcatagccatgacggacagcctgacgggcattcccaaccggcgcgggttttaccgcgccggcgaaaaactcttccgcgcgatgaaccggtag

SEQ ID NO: 468559 - DNA, 909 bp, Shigella boydii; identical to SEQ ID NO: 126360

SEQ ID NO: 468560 - DNA, 144 bp, Shigella boydii; identical to SEQ ID NO: 126359

SEQ ID NO: 468561 - DNA, 591 bp, Shigella boydii; identical to SEQ ID NO: 464517

SEQ ID NO: 468562 - DNA, 3576 bp, Shigella boydii
gtgctgcctgccccattgccgccgtaccgggtgctgaccggcctggtggaccgcttcgggcgcacgcaaaccttccaccgtgaggccgcaggcgaatttaccggagaaatcaccggcgtgaccgatggggcaggccgtcagttctgcctggtgctgaccacgcaggcgcaacgggcagaaaacgcccggcagcaggccatcgccgcaggaacgaaaggatcggatatcccggattcactgccggactatacggagtatggccgggataacggtatccgcctgtcaggggtgtggctgacgcacgacccggaatacccggagaatctgcccgccgcccccctggtacgctacgactggacggcacgcggtgagctggcggcggtgtatgaccgcagcggtactcagatgcgccactttacttacgatgataaataccggggccggatggtggcgcaccgttacgcaggcaggccggagatgcgttaccgctacgacgacataggtcgcgtgacggagcagtttaatccggcaggcttaagctacgcctatcagtatgagaaaaaccgtatcaccatcaccgacagcctgaaccggcgggaggtgctgcacacggaaggtgaagccgggctgaaacgtgtggtgaaaaaggaattcgcggatggcagcatcacccgaagtaaatttgactatatggggcgactccagtcacagacggatgcagcaggccggacaacagaatacagtccgaatgtggtgacgggactcgtcacgtgcatcaccacgccggacggcaggaaatcggaattttactataacaatcaaaaccagttaacctcagccaccgggcctgacggactggaaatacgccggaaatatgatgagtacgggcgtctgacgcaggaaacagcacgcaacggcgatgtcacccgctacagttatgataatccacacagtgaattaccctctgtaacagaagatgcgacgggtagccgcaagcagatgacgtggagccgctacgggcagttacagaccttcaccgactgctcaggctatgaaacccgttatgaatatgaccgcttcgggcaaatgacggcggttcaccgtgaggaaagcatcagcctttaccgcagttacgacaaccgtggccagttaatctcggtgaaagatacgcagggccgtgaaacgcagtatgagtacaacgccgcaggcgacccgaccgccatcattgccccggacggcaaccggagtgagacacagtacgatgcgtggggaaaggccgtcagcaccgcacagggtgggctgacgcgcagcatggaatacgatgcagcgggacgtgtcatcagcctgaccaacgagaacggcagccatacagaatttagctgggatgtgcttgacctcctgatacagcagcgcggctttgacgggcggacgcagcgttaccgttatgacctgaccgggaaactcacgcagagcgaggatgaggggcttatcaccctctggcactacgatgcatcggaccgtatcacacaccgcacggtgaacggcgaaccggcagagcagtggcggtataacgaccacggctggctgacagaaatcagccatctcagcgaaggccaccgggtggcggtgcattacggttataaccgtaagggacgtctcacaggcgagcgccagacggtacatcacccggagacgggggaactgctctggcagcatgagacgcaacacacttacaacgagcaggggctggcaaaccgctttcaggcagacagcctgccaccggtggagtggctaacgtatggcagcggttacctggcgggaatgaaactgggcgacacgccgctggtggagtacacacgggatagactgcaccgggaaacggtgcgcagcttcggcaataatgcatatgaactgaccagcacttacacccccgcaggccggttacagagtcagcacctgaacagcctggtgtatgaccgtgactatggctggaatgacaatggcgacctggtgcgcatcagcggcccgtggcagtcgcgggaatacggctacagtgccacgggcaggctggagagtgtgcgcacccttgcatcagacctggatatccgcatcccgtatgcctccgacccggcgggaaaccgcctgccggacccggagctgcacccggacagtacactcacggcgtggccggataaccgcatcgcagaggatgcgcactatgtttaccactatgatgaatacggcaggctgacggagaagacggaccgcatcccgacgggtgtgatacggacggacgacgagcggacccaccactaccactacgacagccagcaccggctggtgttttatacgcggatacagcatgaggagccactggtcgagagccgctatctctacgacccgctgggccgccggacggggaaacgggtgtggcgttgcgagcgtgacctgacgggatggatgtcgctgtcgcgtaaaccggaggtgacgtggtacggctgggacagcgaccggctgacgacggtacagaccgataccaagcgtatccagacggtataccagccggggagcttcacgccgctcatccgtatcgaaacagagaatggtgagctgcagaaagcgcagcgccgcagcctggcggagaagttgcagcaggaaggaagcgaggacggccacggtgtggtgttcccggcagaacttgtgaggatgctggacaggctggagggggaaatccgggcagaccgcgtgagcagtgaaagccgccagtggctggcacagtgcgggctgacggtggagcggctggcggcacagatagagccggtttatttacctgagcgaaaaattcatctttatcactgtgaccaccgggggctgccgctggcgctcatcagtaccgaaggagcaacggaatggcgtggggagtatgacgagtgggggaatcagcttaatgaggagaacccgcatcatctgttccagccataccgcctgccggggcagcagtacgatgatgaatcggggctgtgctataatcgttatcgttactacgagccgttacaggggaggtatattacacaggacccgattgggttaaatggggggtggaatttatataaatatccgctgaatccaataaattatgcagatcctcttggcttagccgtagatataaaccacttcccagttaacgaagacatacgaaattatgcagagaaagtttggaataatcctaatatcattacaattggaacacatggtgatcctcaatcagtatatgatgaaaattataataagatagatgtcaagacattagctaatgaggttcgaaatcatcctaaatttaaacatggaatgtcagtaagactgttatcctgtaatacaggaaaaggaaataactcttatgcacagcaattggcagatgaactaggtgtgagagtctatgctcctgaccaatatgactggtactattcaaatggtaaggtagagccttggggaggattctatgatgcaaacaatcaattgcaaatggacacgaatcagcctggacatgagtttacattcaagcgaaggaaaccatag

SEQ ID NO: 468563 - DNA, 702 bp, Shigella boydii; identical to SEQ ID NO: 5274

SEQ ID NO: 468564 - DNA, 972 bp, Shigella boydii
atgaagcgtgcgcctgttattccaaaacatacgctcaatactcaaccggttgaagatacttcgttatcgacaccagctgccccgatggtggattcgttaattgcgcgcgtaggagtaatggctcgcggtaatgccattactttgcctgtatgtggtcgggatgtgaagtttactcttgaagtgctccggggtgatagtgttgagaagacctctcaggtatggtcaggtaatgaacgtgaccaggagctgcttactgaggacgcactggatgatctcatcccttcttttctactgactggtcaacagacaccggcgttcggtcgaagagtatctggtgtcatagaaattgccgatgggagtcgccgtcgtaaagctgctgcacttaccgaaagtgattatcgtgttctggttggcgagctggatgatgagcagatggctgcattatccagattgggtaacgattatcgcccaacaagtgcttatgaacgtggtcagcgttatgcaagccgattgcagaatgaatttgctggaaatatttctgcgctggctgatgcggaaaatatttcacgtaagattattacccgctgtatcaacacagccaaattgcctaaatcagttgttgctcttttttctcaccccggtgaactatctgcccggtcaggtgatgcacttcaaaaagcctttacagataaagaggaattacttaagcagcaggcatctaaccttcatgagcagaaaaaagctggggtgatatttgaagctgaagaagttatcactcttttaacttctgtgcttaaaacgtcatctgcatcaagaactagtttaagctcacgacatcagtttgttcctggagcgacagtattgtataagggcgataaaatggtgcttaacctggacaggtctcgtgttccaactgagtgtatagagaaaattgaggccattcttaaggaacttgaaaagccagcaccctga

SEQ ID NO: 468565 - DNA, 1167 bp, Shigella boydii; identical to SEQ ID NO: 224830

SEQ ID NO: 468566 - DNA, 756 bp, Shigella boydii; identical to SEQ ID NO: 7912

SEQ ID NO: 468567 - DNA, 222 bp, Shigella boydii
atgaactatgccggacataaaaaacttcgcgccgacgtggcggaggtggccaacaccatgtgtgaccttcgggccaggctgaacgatatggagcatcgctgtcgctttgattccgatgtgcttgttgaacgcctggcacgccagacgctgtatcgcgccaaccgcctgttcatggaggcgtataccgaaattctggaactggatgcgtgctttaaagattga

SEQ ID NO: 468568 - DNA, 684 bp, Shigella boydii
atgtcccgttttatccagggtgactgcgtgcgtgttatggccacgtttccgggcaatgctgtcgatttcatcctcaccgacccgccatatctcgtcggtttccgtgaccgtcaggggcgtaccatcgccggcgataaaaccgatgaatggctgcaaccggcctgtaatgaaatgtaccgcgtgctgaaaaaagatgcgctgatggtgagcttctatggctggaaccgcgtcgatcgctttatggccgcctggaaaaatgcgggattcagcgtggttggccacctggtgtttaccaaaacctacacatcgaaggccgcatatgtgggctatcgccacgaatgcgcttacatcctggcaaaagggcgtccggcgctgcctcagaagccattgcccgacgtgctgggctggaaatattcaggcaatcgtcatcacccgacggaaaagcctgttaccagcctgcaaccactgattgagagcttcacacacccgaacgctattgtgctggacccgtttgcaggcagcggctcaacctgtgtggccgcccttcagtccggacgccggtatatcggtatcgagctgcttgaacagtatcaccgtgccggacagcaacgtctggctgccgtacagcgggccatgcagcagggggccgcaaatgatgactggtttatgccggaggctgcgtaa

SEQ ID NO: 468569 - DNA, 438 bp, Shigella boydii
atgccgtttgacctgctgacggttctgtccactcgcctggatgttgaagtgaatggctttaacggtggtgttctgaacggtgttccttctgcatatcactggtatacggaacagtatggcgtgaagtggccttgtgggtatgaggtgaatatcagcagtcagggagacaacttcattcaggttgatttcgacacgccgtggtgtcagccggaaagcgacgttattgcagtattaagccgccgtttcagttgcacgctggagcactggtacgccgagcagggctgcaatttctgtggctggcagcgatatgagcgtggagagcttgttgatgtgctgtggggggaactggaatggtcttccccgacagatgatgatgagctgccggaagtcaccgcgccggagtggatagtcgacaaggtggcgcattacggtggatga

SEQ ID NO: 468570 - DNA, 507 bp, Shigella boydii
atgccaaactggtgctcgaatcgtatgtatttttctggtgaaccggcacagatcgctgagattaaacgactggccagcggtgcagtcacaccgctttatcgccgcgccacaaatgaaggtattcagctgtttctggccggaagtgccggacttctgcagaccactgaagatgtgcggtttgaaccatgccccggactgacggctgccggacgtggcgttgtatcgccggagaatatcgcgttcacccgctggctgacacacctgcaggacggtgtacttcttgatgagcaaaactgcctgatgctgcatgaactctggctgcagagcggtactggccggcgtcgctgggaagaattaccggatgatgccagggaaagcattaccgctcttttcaccccaaaaagaggtgactggtgcgacatctggagtaacgaggatgtatcggtgtggtggaaccgtctgtgtgacaacgtcctgccggaaaaaccatgccgtttgacctgctga

SEQ ID NO: 468571 - DNA, 222 bp, Shigella boydii; identical to SEQ ID NO: 461465

SEQ ID NO: 468572 - DNA, 1401 bp, Shigella boydii
atggctataaatgacgccggaatgttcaccgtgaaagaaatcaatcgcctcaaaatccttcaggatgtcatcgatcgcaatatccgtcctggacaggctgccgaaatgctgggcatcacgccacgtcattgcagccgtctgctcaaacgttatcgccagtatgggccgcttggcatgaacaaccagagtcgtggccgcactggtaaccgtctgttgccagcgtcactgacagatcaggcactcagtataatccgggagcactaccgtgattttggccccacgctagcgcgggaaaagctggaggaagttcacggtctggtccttggaaaggaaaccatccgacgtctcatgataaaggccggactctggattccccgcagacaacgcgcaccgaaaattcatcagcctcgttaccggcgtccttgtactggcgagctgatacaaattgatggctgcgaccaccactggtttgaaaaccggggtcgaccctgtactgccctggtctatgttgacgatgccaccagtcgcctgatgcacctgctgtttgtgaaatctgagtccacatttacctattttgaagctacacgtggctatatcgagaaatacggtaaaccgatgatcctctacagcgataaagccagcgtattcagagtcaataataagcacgccaccaccggccccggcgaaacccagtttgccagggccatgcgctgccttaatattactcctttgtgtgctgaaaccagccaggcaaaaggccgcgttgaacgtgctcatttgacacttcaggaccgactcgttaaggagctcaggcttaaggggatctgtacaatagaagcggccaatgcatttgcagaagaatacatggcggattataaccggcgctttgccaaagaacccttgcatgattttaacgcgcaccggccgctggcattagacgatgaccttgatgcagaatttacctggcgagagcctcgccgggtatcaaaaaatctgactgtacaatacgataaaatgctctatctgattgaggacaacgagtacagtcgaagagccatcggcaagtatattgatgtctggcattatcctgacggacataaggagctgcgactaaatggcgtgctgctgccctactccacctatgaccggctttctgaggttgatcccgtcgccattgtagataacaagagacttggccatgtgttggatgttgcccgtcaggtccagagaaaacgggacaataatcgctcacaatcgttaccttgttctggtgatgagccttcccgcagacggcacgcccctagcatcaacaaatctcagcgctcactgaacgaagatgacctacttgaagccatgataaagcttcagggaagctctgaggccatctttggtaaaaggtga

SEQ ID NO: 468573 - DNA, 942 bp, Shigella boydii
atggcaattattaatatttattctaagagacaaagaaagattcgtggcgaagtaaatgacgtatatcaatataacaatattccacatgcactcagggtgcaaataattaaaataataactgattctatcggcttaccctcttctaatgaacgctacacatcgtatagaaatgaagctgacaaagtatatgcatatatccatgagatactttctaaggaatatggtgttttttctttgaaggaatttgcaaagaatgactttgacgctcttgtcgactttttccttaaagagagaaatacagagaaatgcctagatttcatagaaatatgcttccagatactagtgagccacgttgcgaaaaaccattatgaattcaaagacataacaagtcaaagtcctgggaatgcagttattgaactaaatgaaaggtttagagagcatggggttggttatcagtttgaatctgaagagataataagggtagactctcaattgattcatgctgatgtcgtaaagccaaccctgattcttttaagtggagaacccttgtttgaaggcgccaatgatgaattccttgctgcgcatgagcattacaggcataagcgttataaagaatgtctaaatgattgtctgaaatcatttgaaagtataatgaaagcaatacatgataagaataactggaaatatagtcctaatgatacagcatcaaaactaataaatagctgtttaagtcaaaatttaattccggcatatttacaaagccagttcacaagtctgaaaacaatgctggaaacaggaattccaaccatcagaaacaaaaatgcaggtcatgggcaaggagctgatattaaagaggttccggaagaattggcaagctatatgcttcatcttactgctacaaatttactatttctcttaaaatgcgagaagaacattaagtga

SEQ ID NO: 468574 - DNA, 1761 bp, Shigella boydii; identical to SEQ ID NO: 461901

SEQ ID NO: 468575 - DNA, 276 bp, Shigella boydii; identical to SEQ ID NO: 464525

SEQ ID NO: 468576 - DNA, 138 bp, Shigella boydii
atgatggagatattctggaccatgctggccagccaggacaggaagcgcattcgtgagtacattgcggagcagaacctgatggccgccattgaactggacgaacggattggttattcagccagcagcctggccgggtag

SEQ ID NO: 468577 - DNA, 381 bp, Shigella boydii; identical to SEQ ID NO: 463706

SEQ ID NO: 468578 - DNA, 207 bp, Shigella boydii
atgaagtaccttaacactactgattgtagcctcttctttgcagagaggtcaaagtttatgacgaaatatgcccttatcgggttgctcgccgtgtgcgccactgtgttgtgtttttcactgatattcagggaacggttatgtgagctgaatattcacagaggaaatacagtggtgcaggtaactctggcctacgaagcacggaagtaa

SEQ ID NO: 468579 - DNA, 258 bp, Shigella boydii
atgtcgcagaaagaaaatgcagtgacttcctcatcaggcaccaagcgtacataccggaaaggtaaccctgttccggctagagagaggcaaagagcttctctggctcgcagaagcaacactcataaggcttttcatgcggttattcaggcccggttaaaagacaggctgagtgaactggcggatgaggaaggtattactcaggcgcagatgcttgaaaaactgattgaatcagagctgaaacgcagagcgacttcgtaa

SEQ ID NO: 468580 - DNA, 1416 bp, Shigella boydii; identical to SEQ ID NO: 461512

SEQ ID NO: 468581 - DNA, 249 bp, Shigella boydii; identical to SEQ ID NO: 25922

SEQ ID NO: 468582 - DNA, 141 bp, Shigella boydii; identical to SEQ ID NO: 465328

SEQ ID NO: 468583 - DNA, 222 bp, Shigella boydii; identical to SEQ ID NO: 461513

SEQ ID NO: 468584 - DNA, 1062 bp, Shigella boydii
ttgattatcggcccctggtatacccagaccgataccacgattgtttctgcggaatccatcgtccgtaatctgatgtacggaatgcgtgactgcctcgcgtttggcgagccgatgaaaataggttatttaccagattcctttggcatgtccgggcaactgccgcatatctacaatggatttggcattacccgcaccatgttctggcgcggatgttcggagcgccacggtactgataaaaccgagtttttgtggcaaagcagtgacggtagcgaagtgacggcgcaggtgctgccgctgggctacgccatcggtaagtacttacctgccgacgaaaacggattacgtaaacgcctcgacagttattttgacgtgctggaaaaagcgtctgtaaccaaagagattttgctgccgaatggtcatgaccagatgccattgcagcaaaatatcttcgaagtgatggataagctacgtgagatctaccctcaacgtaagtttgtgatgagccgctttgaagaggtatttgagaagatcgaagcgcagcgtgaaagtctggccaccctgaaaggtgaatttatcgatggcaaatatatgcgcgtacatcgcaccatcggttccacgcgcatggatatcaaaattgcccacgcacgtattgaaaataagattgttaatctgctggaaccgctggcaacgctggcctggacgttgggttttgaataccaccacggcttgctggagaaaatgtggaaagagatcttaaaaaatcatgcccacgacagtatcggttgttgttgcagtgacaaagttcatcgcgaaattgtcgcccgcttcgaactggctgaagacatggcggataatctgctgcgtttctacatgcgcaaaattgccgataacatgccacagagtgatgccgacaaactcgtgctgtttaacctgatgccctggccgcgggaagaagttattaacaccactgtgcggctgcgcgccagccagtttaatctacgagacgatcgcagcctgtaccgtattttattcgtcatgcccgtgagatcgatccaggcctaa

SEQ ID NO: 468585 - DNA, 273 bp, Shigella boydii
atggagtccgccagttcgctgacggactccgcagaatacggcaccgtgcgcacattcagcggagacttaatcagcgaggccagcggcacgctcacttcctccgtctgcgccagcagggccaacaggactgtttcctgcgtttttgcaggtttacggctggatttacgctccgtttttgccttagactctgtaactgacatagttagtacctcccaaaacggtaataatgattgtctgccggacgcgttcccgtccggcacctctcttacttaa

SEQ ID NO: 468586 - DNA, 435 bp, Shigella boydii
atgaaaaagattctcgtatcatttgttgccattatggctgtcgcttcatccgccatggctgcagagacaatgaacatgcatgaccaggtaaataatgcacaggctcctgcccatcagatgcagtcatctgctgaaaaaagcgcagttcagggagacagcatgacaatgatggatatgagcagtcacgatcaggccgcaatgtcccatgacatgatgcaaaacggcaattctgctgcccatcaggacatggctgaaatgcataaaaaaatgatgaaatccaagccagcagcttctaacgaaacagcaaaatcattttccgaaatgaacgagcatgagaaatccgctgttgtgcatgagaaggcgaataatggtcaatcttccgttattcatcagcagcaggctgaaaagcatcgcagccagatcacccagaattaa

SEQ ID NO: 468587 - DNA, 657 bp, Shigella boydii
ttggcggcaagtttaaataaattaatttttggcgcgtgtaatggctatgattttattgccagaatggatgctgatgatattgttattaacgggcgttttaaaaagcaattagaatatctgaataagcattctgatgtcagtttagtcggtggacaggctgttgttattgatgagaacgataatgttgttagggattattttaatatgaacccagtagatttttcgtgggggaatgaaataattcatccaacttggttgttaaggtcagagctttattataaattaggtggttacaggcgtttagatgctgctcaagattatgattttttgtgtagggctgtattgagtggatgtattgtaaggaatatagatgacgtggttttattttataggataaggcatggctcaattggcagttgtaagaagtttatccaaataaaaaacaagactattttatctaaatttttcagaaaaaatgaagttgcacctattcatttatttaatgcaaccaacttttcagttgagttttttttattctctgtcattgaatcaataaaaatcaagcacaatattgtggggaaatgtattgggtggttgtctccactccatgctaaaaattattatttaaatttaagaaaacgaatggggaaaaaatga

SEQ ID NO: 468588 - DNA, 240 bp, Shigella boydii
atgagagtacttgtttttggccctatgatatctggtcatattagtaactggattcatggttccaaagaatatattgattatagaattgtcacactacactatgacaaaagtatttctgagaatgttggaataggagagatatataagataccaagacttacaaaaactaaatttgattttatatacgcacctgtttttcttcttttttatagtattgttaatgtcacttccccatactga

SEQ ID NO: 468589 - DNA, 441 bp, Shigella boydii
gtggtgttcccggctgaactggtggggctgctggacaggctggagggggaaatccgggcaaactgcgtgagcagtgaaagccgccagtggcttgcgcagtgcgggctgacggtggagcggctggcggcacagatagagccggtttatttgcctgagcgaaaaatacatctttatcactgtgaccaccggggcttgccgctggcgcttatcagtgaagacggcaatacggcgtggagcgcggaatatgatgaatggggcaaccagcttaatgaggagaacccgcatcacctgcaccagccgtaccggctgccggggcagcagtatgataaggagtcggggctgtactacaaccggaaccggtactacgatccgttgcaggggcggtatatcactcaggacccgatagggctggaggggggggtaatgactccaacttattga

SEQ ID NO: 468590 - DNA, 198 bp, Shigella boydii
atgtatttgaatctgcatgatgatattgacatgaaatctgttttttcaaggtgtgtgaaattaatagatagtaatcaatataggtgttcgattgaatataaccgagatacaataataaaaatgtttgatataaataaaaacacaaagcgtatggttgatatttattatcgggtcgtgtcacaaaaggaatttttatga

SEQ ID NO: 468591 - DNA, 327 bp, Shigella boydii
atgactaaaaatactcgtttttcccccgaagtccgtcagagggcgattcgtatggttctggaaagtcagggcgaatatgactcacagtgggcggcaatttgttccattgccccaaagattggctgtacaccggagactctgcgtgtctgggtacgccagcatgagcgggataccggaggcggtgatggcgggctcaccaccgctgaacgtcagcgtctgaaagagctggaacgtgaaaatcgtgaactgcgccgcagtaacgatatccttcgccaggcttccgcttattttgcgaaggcggagttcgaccgcctctggaaaaaatga

SEQ ID NO: 468592 - DNA, 381 bp, Shigella boydii; identical to SEQ ID NO: 463706

SEQ ID NO: 468593 - DNA, 486 bp, Shigella boydii; identical to SEQ ID NO: 462983

SEQ ID NO: 468594 - DNA, 279 bp, Shigella boydii; identical to SEQ ID NO: 463424

SEQ ID NO: 468595 - DNA, 273 bp, Shigella boydii; identical to SEQ ID NO: 461110

SEQ ID NO: 468596 - DNA, 273 bp, Shigella boydii; identical to SEQ ID NO: 7046

SEQ ID NO: 468597 - DNA, 141 bp, Shigella boydii; identical to SEQ ID NO: 465328

SEQ ID NO: 468598 - DNA, 168 bp, Shigella boydii; identical to SEQ ID NO: 462763

SEQ ID NO: 468599 - DNA, 348 bp, Shigella boydii; identical to SEQ ID NO: 25773

SEQ ID NO: 468600 - DNA, 348 bp, Shigella boydii; identical to SEQ ID NO: 25773

SEQ ID NO: 468601 - DNA, 327 bp, Shigella boydii
atgactaaaaatactcgtttttcccccgaagtccgtcaacgggcagtccgtatggttctggaaagtcagggcgaatatgactcacaatgggcgacaatttgttccattgctccaaagattggctgtacgccggagactctgcgtgtctgggttcgccagcatgagcgggataccgggggcggtgatggcgggctcaccaccgctgaacgtcagcgtctgaaagagctggagcgtgaaaatcgtgaactgcgccgcagtaacgatatccttcgccaggcttccgcttattttgcgaaggcggagttcgaccgcctctggaaaaagtga

SEQ ID NO: 468602 - DNA, 378 bp, Shigella boydii; identical to SEQ ID NO: 460256

SEQ ID NO: 468603 - DNA, 726 bp, Shigella boydii; identical to SEQ ID NO: 463717

SEQ ID NO: 468604 - DNA, 783 bp, Shigella boydii; identical to SEQ ID NO: 461746

SEQ ID NO: 468605 - DNA, 348 bp, Shigella boydii; identical to SEQ ID NO: 25773

SEQ ID NO: 468606 - DNA, 375 bp, Shigella boydii; identical to SEQ ID NO: 461773

SEQ ID NO: 468607 - DNA, 306 bp, Shigella boydii; identical to SEQ ID NO: 459937

SEQ ID NO: 468608 - DNA, 219 bp, Shigella boydii
atgctgctatcaggcagtgtgattgccggcagggatttcgttttattctgtttcttcccggggttcgggtttgaattttcccagaaagttgtacattggccgcatgcacggatgcggatagccgtcccgcataaacaccacccggggttcctcaacactggtcacggtgacaagcgcaccatgattgtctctgtatcgctgattgacgactttcggtaa

SEQ ID NO: 468609 - DNA, 234 bp, Shigella boydii
atggcaaggtccgattacgatattatcaatctgtctctggaacatgaactgaatgagtggctggcagagagaggttatgccggactggcggataaccggaatcgcctggaagaagttgttacccgcagattgcaggacaggttttatatgaacgtttcctgggatgcgctgaacacggcattcagtgaacacccggagtgggtttccgggcttgtctccggggatgaggattaa

SEQ ID NO: 468610 - DNA, 138 bp, Shigella boydii; identical to SEQ ID NO: 33815

SEQ ID NO: 468611 - DNA, 2361 bp, Shigella boydii
atggttcataaatctgacagtgatgaattagctgcattgagggcagaaaatgcccgtctggtctcattacttgaagctcatgggattgaatggcgacgtaaaccgccgatctctgtgcagcgcgtttctgtattatccaccaatgagaaggttgcattatttcgtcggttgtttcgcgggcgtgatgatgtatgggcacttagatgggaaagtaaaaccagcggcaaatcagggtactctcctgcctgcgctaacgaatggcaggcgagaatatgcggtaagccccggataaaatgtggggactgcgctcaccgtcagttgattcctgtatctgatctcgtcatctactaccatctggcaggtacccatactgccgggatgtatccgttgctggaagatgattcctgttattttctggctgttgattttgatgaagctgaatggcagaaggatgcatccgcattcatgcgatcctgtgatgagctgggtgtacccgctgcgctggaaatatcccgttcacgtcagggagcacatgtctggatattttttgcttcacgagtttcggcccgcgaagctcgccgtctggggactgctattattagttatacgtgtaatcgaactcgacagctgcgattgggttcttatgaccgattatttcctaatcaggatacgatgccaaaagggggatttggtaatctcatagcattacctctgcaaaaaagaccgcgtgaatcggggggaagtgtttttgttgatatgaatttccagccttattctgatcaatgggcttttcttgcatcggtgatcccgatgaatgtgcagaatattgaaccgacgatattacgggctacaggaagtatccatcctctggatgtgaactttatcaacgaagaagacctgggtacgccatgggaagggaaaaaatcatcaggaaacagactgaatatttctattgcagaaccgctgaaaatcacgctggcaaaccagatctatttcgaaaaagcgcaattacctcaggtgctgattaaccgacttattcggctggcagcatttccgaaccctgagttttataaggctcaggcaatgcgtatgtcagtctggaataagccccgtgttataggttgtgcggagaattacccgcaacacattgcgttgccccagggatgtctggacagcgtattatctttccttagggacaacaatattgctgcagaattaatcgataaacgatttgccgggacggaatgtaatgccgtttttatgggaaacctcagagcggagcaggaagaggccgtttcggcattactccgttatgacactggtgtgctttgtgcgccaacggcttttggtaagacagttaccgcagcggcagtgattgccagacggaaagtgaatacactgatactggtacacaggactgaattgctgaagcagtggcaggagcgtctcgcggtgtttctgcaggttggtgacaatattggtattatcgggggaggtaaacataaaccctgtggcaatattgatattgcggtggtgcagtccatatccagacacggagaagttgaacctctggtcaggaattatgggcaaatcattgtggatgagtgccatcatattggcgcggtttcattttctgcgattctgaaggaaacgaatgccagatatctgcttggcctgacggcaacaccaatccgacgggatggtctgcatcccattatttttatgtactgtggtgccattcgccatacagcggtccgcccgaaggaaagcccacataatctggaggtactgacccgttcccgttttacatctggtcatttaccatcggatgcgagaatccaggatattttcagagaaattgctctggatcatgacagaacggtggcgatagctgaagaagccatgaaagctttcgggcaggggcgaaaagttctggtactgactgaacgtacagatcatctggatgagatagcatcagtgatgaattcactgaaattgtccccctttattctccatggacgactatcgaaaaaaaagcgtgcgatgctgatatccgggctgaatgctcttcctcctgattctccccgtattttgttgtcaacaggcagacttattggtgagggatttgaccaccctccgctggatacgctgattcttgccatgcctgtgtcatggaaagggacattacagcagtatgcgggacgtctacacagagagcataccggtaaaagcgatgtcaggatcattgattttgtggataccgcgtatccagtgctgctcagaatgtgggataaacgccagcggggttataaggcgatggggtacaggattgtggctgatggtgaagggctttcattttaa

SEQ ID NO: 468612 - DNA, 189 bp, Shigella boydii
atggcaaactaccaactgaatgaacaattactggagggatgcaggccctggattgttatttttgatgacgttcttactgccggtagccattttaaagcgatgaaaagcctgatactacaacatattcctgaagcctgtatactgggactctttgttgcccgaacaacccggggagctcaaattatttaa

SEQ ID NO: 468613 - DNA, 381 bp, Shigella boydii; identical to SEQ ID NO: 463706

SEQ ID NO: 468614 - DNA, 792 bp, Shigella boydii
atgaggtgtttgtatcatgttttcagttggttaacgcaatgtaatcagacatttcccctggcagactgttcagaagaaaatccagttccataccgcgcgggcaacagagaccaccgtgtcacggacggcacgcagaactgtgcgtgcaacagaggcaacacagacgctctccaccgtgtcaaatatccggtccaccgcaccggtaaactgttcacgggcctgcccccggacagattccgtgcacagctcgtcctgcaggcgggtcatcaggggactggcggcatggtcgggaagcgctgtcatgagcgcactgaccagcgtatccagttcctagccggtgcgggccgatacggcaacaaccggatgtacgggccggaacagccggaataccgcatctgttttttcgcgaatgttctgttcctgtgcgggagaaggctgaatacctgccatatcccattcatggcagggctctgttttgtcggcctgcatcaccacaaacagtacccgctgatgtccccggtgcaggatgtgtcgccagaaatactcatccacagacagagcacggtcatcggctttaatcagccacagtaccaggtccagttcgagcagaatgtcacggtacagggcttcatactctgcatccctgtcccggctctcgcccaccccgggcaggtcagtgataaccatgctgtgaccatggccattcagacggaagcgctgcacttcccgggtgccggcgtgaacatcactgaccggggtgacctccccctgaaacagcgcattacagagtga

SEQ ID NO: 468615 - DNA, 381 bp, Shigella boydii; identical to SEQ ID NO: 463706

SEQ ID NO: 468616 - DNA, 183 bp, Shigella boydii; identical to SEQ ID NO: 460595

SEQ ID NO: 468617 - DNA, 273 bp, Shigella boydii
atgaccgtcgaaacgcaacttaatcccacacagcctgtcaatcagcaaatttatcgtatccttcgtcgcgacattgtccattgcctgattgctccaggcacaccgttgtcggaaaaagaagtttctgttcgtttcaatgtgtcacgccagccggttcgtgaagcctttattaaactggcggaaaacggcctgattcaaattcgtccacagcgtggcagctacgtcaacaaaatttccatggcccaggtgcgcaacggcagttttatccgttag

SEQ ID NO: 468618 - DNA, 1206 bp, Shigella boydii
atgatcctagatgccagttatacattattagtcgcatgtatcgcgctactcataggaatgtttgtcgtaaaatttaccccgttcctacaaaaaaaccacataccagaagccgtcgttggtggctttattgttgcaattgttctgttaattattgataaaacatcaggttattcgtttacttttgatgcttcattgcaaagtttattaatgctcacattcttttcctctatcgggctaagttctgacttttctcgactgattaaaggaggaaagccgttagttctattaactattgcagtaacgatcctaatcgccattcaaaatactgtcggcatgagtatggctgtcatgatgaatgaaagtccatttattggcttaattgcaggttcaattactctaacaggtggtcatggtaatgccggagcatggggccctattctcgctgataaatatggtgtaacaggcgccgttgaattagcgatggcttgtgcaacacttggattagtgttgggtggtttagttggcggccctgttgcccgtcatcttttgaaaaaggtctctattcctaaaacaaccgagcaagagcgcgacactatcgttgaagcttttgagcaaccaagcgtcaaaagaaaaatcaatgcaaataacgttattgaaaccatttcaatgctgattatctgtattgttgttggtggctatatcaatgcattgtttaaagatacttttctgcaactgcctacttttgtctggtgtttatttgtcggtattattatccgtaatacactgactcatgtatttaaacacgaagtgtttgagccgaccgtcgatgtattaggtagcgttgctttatcgcttttcttggcaatggcgttaatgtcattaaaatttggtcaattggcaagcatggcagggccagtattaattatcattgctgtacaaactgttgtcatggtgctatttgcctgctttgtcaccttcaaaatgatgggcaaagattatgatgctgtcgtgatcagcgcgggtcactgtggctttggtatgggagcaacaccaacagcaattgcgaatatgcaaacagtcacaaaagcatttggaccatcacataaagctttccttgtcgttcctatggtcggtgcctttattgttgatatttcaaacagtatcttaattaaaatatttattgaaattggtacatactttacctaa

SEQ ID NO: 468619 - DNA, 621 bp, Shigella boydii; identical to SEQ ID NO: 465338

SEQ ID NO: 468620 - DNA, 348 bp, Shigella boydii
atgaaaaccctgtcgcgacactcagaactggcgaaagcgttcgcatacgccctgaaccagtggccggcgctgacgtactatgcagatgatggctgggctgaggcggacaataacatcgctgaaaatgcgttgcggatggtcagtctgggcagcaaaaactacctgttcttcggttcggatcatggaggagagcggggagcgctgctgtacagcctgatcgggacgtgcaaactgaacggagtggagccagaaagctacctccgctatgtccttgacgtcatagccgactggccgataaaccgggtcggcgaactgctcccctggcgcgtagcactgccgactgaataa

SEQ ID NO: 468621 - DNA, 510 bp, Shigella boydii; identical to SEQ ID NO: 465339

SEQ ID NO: 468622 - DNA, 1125 bp, Shigella boydii
atgcgaaaacgtattctttttattggcccaccgctgtacggtttgttatacccattgatttctctggctcaggcctttcgtgtaattggacatgatgtagtaattagtagcgctggcaaattcgcgaataaagcagcagaagctggactggttgtttttgatgcagttccaggtttagattcagaggctggatatcgccatcaggaagagttgaggaaaaaaagtaatattattggtcatttctctttttttagcgatgaaatggcagataacctcatcgattttgcaggaaaatggaggccagatttaatagtctatccccctcttgatccggcaggcccattggttgctgctaaatatagaattccttcagtgatgctggctgttggattcgcgcatacatctgcccatattcagatgttaaaccgttctttaagcaatgcttacaggcggcatggagtcagtggtccactatgtgatttagcatggattgatgttgctcccccaagtatgagcattcttaaaaatgctggagaaccggttatctcaatgagatatattccttataacggaggtgctgtaaaggaaacatggtgggacagggattctgatcggaaacgtttacttatcagccttggcactgtaaaaccaatggttgatggtctggagctgatttcatgggttatggattctgcaaatgaagttgatgctgatatcattttgcaacttgcaataaatgctcgtactggtttacgaaaactaccatcaaatgtacgtctggttgactggatacctatgggtgtattccttaatggagctgatggatttattcatcacggtggcgcaggtaataccctgacagcgctgtatagtggaataccacagattgtgtttggcgaaggtgcagatcgctctgttaatgcagaaattgttgcgaagcgtgggtgtgggattattccggacaagcatggactgaccagtgatttggtaaatcgcctgctttatgatgattcactacgcttctgttcagatcaggtagccgctgaaatggctgaacaacccagtcctgcagagattgcagaggttttgatgagaaaattaaaaaacaacgggaaacaattgtag

SEQ ID NO: 468623 - DNA, 198 bp, Shigella boydii
atgttgactacaacaagccacgacagcgtatttctgcgtgccgataattccctgatcgacatgaactatatcaccagtttcaccggtatgaccgacaaatggttttacaagttgatcagtgaaggccatttccctaaacccatcaaactggggcgcagcagccgctggtacaaaagtgaagtggagcagtggaagtga

SEQ ID NO: 468624 - DNA, 273 bp, Shigella boydii
gtgagctatcagcctggtggtctggttttgcctgatttaagccgccgtgggtatttgtccaagaatgcttcaagctccaatcgttttggcctggtgaatggagatgggttaagcaaagactctcgttgctggtgtactttttcgcgctggcgctcaagcatggataatgcgattgcctgtagttcttcgttagtcattgtctgcacctggaaagcaatttaccggagtacctcacactacggcaaaaatgttttattgttgcaacttgcgtaa

SEQ ID NO: 468625 - DNA, 180 bp, Shigella boydii; identical to SEQ ID NO: 13422

SEQ ID NO: 468626 - DNA, 153 bp, Shigella boydii
atgaatgagaacaaaataaaaaggctggagcaactgttacaggcacgccaacgggagtttgccactaaatggggacgtgccgcgctgccacatgaacgcctaaccctgatgaatcccctaatgatttttatcaaaatcattaagttaaggtag

SEQ ID NO: 468627 - DNA, 348 bp, Shigella boydii; identical to SEQ ID NO: 25773

SEQ ID NO: 468628 - DNA, 1365 bp, Shigella boydii
atgtcccagccggttggtgatcttgttattgacctgagtctggatgctgtccgtttcgatgagcagatgagccgggtaaggcgtcatttttcaggtctggataccgacgccagaaaaaccgccagtgctgttgaacagggcctgagccgccaggcgctggctgcacaaaaagccgggatttccgtcgggcagtataaagcggccatgcgaaccctgcccgcacagtttacggatatcgccacgcagcttgcaggtggtcagaatccctggctgatcctgctgcaacagggcggtcaggtgaaggactccttcggcgggatgatccccatgttcagggggcttgccggtgcgatcaccctgccgatggtcggggtcacctcgctggcggtggcgacaggtgcgctggtgtacgcctggtaccagggagattccacgctttcagcgtttaataaaaccctggttctttccggtaatcagtccggactgactgccgatcgtatgctgactctctcaagagccgggcaggcagcagggctgacgtttaaccaggcgaaagagtcactggcagccctggtgaatgccggtgtgcgtggtggtgaacagtttgatgccatcaaccagagtgtcgcgcgttttgcgtctgcatccggtgtggaggtggataaagtcgctgaagccttcgggaagctgaccactgacccgacgtcgggactgatggcgatggcgcgccagttccgtaacgtgacggcagagcagattgcgtatgttgcacagctgcagcgttccggagacgaggccggggcattgcaggcggcgaacgatatcgccacgaaaggctttgatgagcagacccgtcgcctgaaagaaaacatgggaacactggagacctgggcggataaaacagggaaggcattcaaatcgatgtgggatgccattctggatatcggtcgtcctgaatcctcagcggatatgctcgccagtgcgcagaaggcatttgatgaggcggataaaaaatggcagtggtaccagagccggagccagcgccggggaaagatctcctcttttcgtgcgaaccttcagggggcatgggatgaccgggaaaatgcccgtctgggtctggcagcggccacgctgcagtcggatatggaaaaagccggtgaactggcggcaagggaccgggctgagcgtgaggcgtcacagctgaagtataccggagaggcgcagaaggcgtatgagcgcctgcagacgccgctggataaatataccgcccgtcagaaagagctgaataaggccctgaaagacggaaaaatcctgcaggcggattgcaacacgctgatggcgtcggcaaaaaaggattatgaatag

SEQ ID NO: 468629 - DNA, 327 bp, Shigella boydii; identical to SEQ ID NO: 5975

SEQ ID NO: 468630 - DNA, 348 bp, Shigella boydii; identical to SEQ ID NO: 25773

SEQ ID NO: 468631 - DNA, 222 bp, Shigella boydii
atggagtttgatatacagatcaaccagattgtcccttctatgggctatcgcacgctttatatcgaagcgaatcagcctggcaacgtgattgcggcaaaaagtgacgctgaagggatactggaaaatgctttctggcaaattgcgctcaatgaggatggttctttgcaactggtagataaagacagcggtgtgcgctatgaccgagtattgcaaattgggtaa

SEQ ID NO: 468632 - DNA, 327 bp, Shigella boydii; identical to SEQ ID NO: 5975

SEQ ID NO: 468633 - DNA, 450 bp, Shigella boydii; identical to SEQ ID NO: 461614

SEQ ID NO: 468634 - DNA, 480 bp, Shigella boydii
atgctgccgggttacttcaggttcgtctgccagaacgggtgcgtctgtggccagtctctgggggaagtgcgtgttccacaccggggaaatgtagtggagaaagttatcgaaggggcttacgaggtggtgggcgtgtttgaccggatagaggagaagcgtgatgccatgcagtcgctggtcctgccgccaccggcacgccaggcgctggcacaggcggcactgacttaccgtaatggtgacgaacatcagcccgtcaccaccgccgacattctgacaccacgacgccgggaggattacggtaaggacctgtggagcgcatatcagaccatccaggagaatatgctgaaaggcgggatttccggtcgcagtgcaaaaggaaaacgtatccatacccgggccattcacagcattgataccgacattaagctcaatcgcgcattgtgggtgatggcagaaacgatgctggagagcctgcgctga

SEQ ID NO: 468635 - DNA, 312 bp, Shigella boydii
atgagagttgagcagaataatttcagggacatgttctccgtttatctctccggcccgccgcagacgcagcatgtgttttgtgtattcccggcggctctggtcgcgcacgcgggtctggcaggcaaagaacggctgaaagccttcctgctgcagattttccaggacggtaatggtgggaatgtacgcataccgttcactgcgggaggtgtgccggtcttccccaaaaatactgggtacatggcgtatcagttcttcatgtgtcagcggacggtcacggcgtatctggtttgcagcataaccaaaacgacttga

SEQ ID NO: 468636 - DNA, 723 bp, Shigella boydii
atggatacgttttccttttgcactgcgaccggaaatcccgcctttcagcatattctcctggatggtctgatatgcgctccacaggtccttaccgtaatcctcccggcgtcgcggcgtcagaatgtcggcggtggtgacgggctgatgttcgtcaccattacggtaagtcagtgccgcctgtgccagcgcctggcgtgccggtggcggcaggaccagcgactgcatggcatcacgcttctcctctatccggtcaaacacgcccaccacctcgtaagccccttcgataactttctccactacatttccccggtgtggaacacgcacttcccccagagactggccacagacgcacccgttctggcagacgaacctgaagtaacccggcagcatctggtagctggaggtaccgtcatgagagttgagcagaataatttcagggacatgttctccgtttatctctccggcccgccgcagacgcagcatgtgttttgtgtatccccggcggcccgggtcgcgcacacgggtctggcaggcgaagaacggctgaaagccttcccgctgcagattttccaggacggtaatggtgggaatgtacgcataccgttcactgcgggaggtgtgccggtcttccccaaaaatactgggtacatggcgtatcagttcttcatgtgtcagcggacggtcacggcgtatctggtttgcagcataaccaaaacgacgtga

SEQ ID NO: 468637 - DNA, 129 bp, Shigella boydii
atgggagcggatgttacagagttctcggtacaggggaaaagtggtacctgtcgccagttctccgatctgtttaaccgggaaattatctcctacagcttgtcagaaaggtcggtgatggagcatcgttaa

SEQ ID NO: 468638 - DNA, 327 bp, Shigella boydii; identical to SEQ ID NO: 5975

SEQ ID NO: 468639 - DNA, 642 bp, Shigella boydii
atgttacccaggatcagacacaataattttattggtgcggtggagttattcgtaaaatcatcgcatacaaaaacacattcaaacaatttttttaataatattcagcatgcatttaagaaaaaagattggatttcgaattatgatagcctgttaactttgtgggagttttttcgttgcgcaactcagattgataaagatagttatcaagtgctttcatcaaaaaatgaaactgttaaagccatggataagtttcttatcagtttcagccttaaagataacggtgccgaatatacaatgacattgcgaggcagtggatttgaatacgaagaaatccccataacaataaatgagtataactcattcatggatttcaaaaaccgtgaatttccgttagaacaaaacagaagattgtatgcctgggatattctgcagaaaaaacagtctgacataccgaaaaggattaaaggttatattcaccaggcgattggtgacgtgtctttaggttatgccttattggaggatatagtaagcaaattaaaacggggtaaatttgaactccaaataccaggaggtggaattaaagaatgcgatggatggtatatttacgaaaaaataggtaatgctgccaacttactgatttag

SEQ ID NO: 468640 - DNA, 411 bp, Shigella boydii; identical to SEQ ID NO: 463834

SEQ ID NO: 468641 - DNA, 312 bp, Shigella boydii; identical to SEQ ID NO: 468635

SEQ ID NO: 468642 - DNA, 381 bp, Shigella boydii; identical to SEQ ID NO: 463706

SEQ ID NO: 468643 - DNA, 282 bp, Shigella boydii; identical to SEQ ID NO: 463818

SEQ ID NO: 468644 - DNA, 186 bp, Shigella boydii; identical to SEQ ID NO: 459561

SEQ ID NO: 468645 - DNA, 348 bp, Shigella boydii; identical to SEQ ID NO: 25773

SEQ ID NO: 468646 - DNA, 378 bp, Shigella boydii; identical to SEQ ID NO: 466032

SEQ ID NO: 468647 - DNA, 348 bp, Shigella boydii; identical to SEQ ID NO: 25773

SEQ ID NO: 468648 - DNA, 372 bp, Shigella boydii; identical to SEQ ID NO: 461665

SEQ ID NO: 468649 - DNA, 366 bp, Shigella boydii; identical to SEQ ID NO: 465371

SEQ ID NO: 468650 - DNA, 267 bp, Shigella boydii; identical to SEQ ID NO: 462029

SEQ ID NO: 468651 - DNA, 351 bp, Shigella boydii; identical to SEQ ID NO: 467559

SEQ ID NO: 468652 - DNA, 186 bp, Shigella boydii; identical to SEQ ID NO: 459562

SEQ ID NO: 468653 - DNA, 324 bp, Shigella boydii
gtggaaaaagcccgcccgatcctggctgcttcaccgcaggcgaatgccggaccatcactccgtgatcagatcatggcactggatgaggcaaaaggggctgaggcgcaggctgaacagctggctgcctgcccgggaatgactgtggagagcgcccgggctgtgctggctgcgggatcaggtaaggcagaaccggtctctgcatccacaaccgccctgtttgaacatttcatggcgaaccattcaccggctgcggtccaggggggcgtgtcacaggcatcagaagacggtgatgcggacgtgaaaatgctcatggccatgccatga

SEQ ID NO: 468654 - DNA, 168 bp, Shigella boydii; identical to SEQ ID NO: 462763

SEQ ID NO: 468655 - DNA, 546 bp, Shigella boydii
gtgttgaattatctcggcaaagatcccaacagcactaaagcggatgattacaccggaccggcaaccgatctgctgttaaagctgcgcccgaacattcgttatttccattcatctcaatacattaacgacctggcaaacggcgatatttgcgtcgctatcggctgggcaggtgatgtctggcaggcgtcaaaccgcgcgaaggaagcgaagaatggagtgaatgtctcgttctcgattccaaaagaaggggcgatggcgttctttgatgtattcgccatgcctgcggatgccaaaaacaaagacgaagcctatcagttcctgaattacctgctgcgcccggatgtagtagcgcatatttccgaccatgtgttctatgccaacgccaataaagcagccacgccgctggtgagtgcggaagtccgtgagaacccgggtatttatcctccggcggacgttcgtgcgaagctattcactctgaaagtacaggatccgaaaatcgaccgtgtgcgcacccgcgcgtggaccaaagtgaagagcggaaaataa

SEQ ID NO: 468656 - DNA, 981 bp, Shigella boydii
ttgcggctggcggacctgggaccgttgattggcgttgattcggggaaaggggcagaaaagtcgaaacggtctgaacagaagaagggcgaaaaaagcgttcagcctgcgggcaaagtgctgccttatgaccgcttcgaaaccgataaatgggacgttatggatgccgatgttcgcttcaaaggccgacgtatcgagcatggcagtagcctgccgattagcgatctttctactcatatcatcctccaaaatgctgacctgcgcctgcaaccgctgaaatttggcatggcgggcggcagcattgcggcgaatatccatctggaaggcgataaaaagccgatgcaggggcgggcagatattcaggctcgtcgactgaaactgaaagaactgatgcccgatgtggaactgatgcagaagacgctgggggaaatgaacggtgacgcggaactacgcggtagcggtaactcggtggcggcgcttttaggcaacagtaacggcaacctgaaactgttgatgaatgacgggctggtgagctgcaacctgatggagattgttgggctgaatgtcggcaactacattgtcggtgcgatatttggtgacgatgaggtgcgggtgaactgcgcggcggcgaatctgaatattgccaacggcgtagcgcgcccgcagatttttgctttcgatactgagaacgcgttgattaatgttaccggcacggcaagttttgcttcggaacagctggatttgactattgatccggagagtaaagggattcggattatcacactgcgttcgccgctgtatgtgcgtgggacgtttaaaaatccgcaggctggggtgaaagccggaccgctgattgcccgtggtgccgttgcggcggcactggcaacgctggtaacaccggcggcggcgttattggcactgatctcaccttccgaaggggaggctaatcagtgtcggacgatattgtcgcagatgaagaagtga

SEQ ID NO: 468657 - DNA, 171 bp, Shigella boydii
atgagtcaggctaaatcgaacaaaatgggcgtcgttcagttaaccatactgacgatggtcaacatgatgggctccggtatcatcatgctgccgacaaagcttgccgaagttgggacaatctcaattatctcctggctggtgacagccgtaggctcaatggcactggcatga

SEQ ID NO: 468658 - DNA, 573 bp, Shigella boydii
atgggggatattatgcgtcccattccgtttgaggaacttttgacgcgcatatttgatgaataccaacaacaacgctcaatctttggtattcccgagcaacagttttactcacctgtaaaaggtaaaactgttagcgtcttcggtgaaacctgtgccactcccgtcggccctgccgctggcccgcacacgcagctcgcgcaaaatattgtcacttcctggctgactggcggacgtttcatcgaactaaaaaccgtccaaattcttgaccgcctggagctggaaaagccctgtattgatgccgaagacgagtgctttaacaccgaatggtctaccgaatttaccctgcttaaagcctgggatgaatacctcaaagcctggtttgccctgcaccttctcgaagcgatgttccaaccttctgattccggtaaatcgttcatctttaatatgagcgtcggttacaacctcgaaggtattaagcaaccgccaatgcaacagttcatcgacaatatgatggacgcatctgaccatccgaaattcgcgcaatatcgcgatacgctgaataaattactctag

SEQ ID NO: 468659 - DNA, 426 bp, Shigella boydii
atgtctgatataaaccatgcaggttctgaccttatatttgaactggaggatcgccctccctttcatcaggctctcgttggtgccattacccatctgttggcaattttcgttccgatggtaacccccgcgttaatcgtgggtgcggccttacagctttccgctgaaacaactgcctatcttgtttcaatggcgatgatcgcctctggtattggtacctggttacaagtaaaccgctacggcatcgtcggttctggcctactctcaattcagtcagtcaatttttcatttgttacggtcatgattgcgctgggcagcagcatgaaaagcgacggttttcacgaagagttaatcatgtcgtcgcttctcggcgtctccttcgttggcgcatttctggttgtcggctcttcttttatcctgccctattga

SEQ ID NO: 468660 - DNA, 189 bp, Shigella boydii
ttgatcgcccagattagccattcaacgctggaacaggccgatgggctttccagcctgacccgtgcagtggatgagcttaacctgatcacccagaaaaatgctgagctggtggaagagagtgcgcaggtgtcggcgatggtgaaacaccgcgccagccgactggaagacgcggtgacggtgctgcattaa

SEQ ID NO: 468661 - DNA, 402 bp, Shigella boydii
atgttacgtcctgtagaaaccccaacccgtgaaatcaaaaaactcgacggcctgtgggcattcagtctggatcgcgaaaactgtggaattgatcagcgttggtgggaaagcgcgttacaagaaagccgggcaattgctgtgccaggcagttttaacgatcagttcgccgatgcagatattcgtaattatgtgggcaacgtctggtatcagcgcgaagtctttataccgaaaggttgggcaggccagcgtatcgtgctgcgtttcgatgcggtcactcattacggcaaagtgtgggtcaataatcaggaaggatggagcatcagggcggctatacgccatttgaagccgatgtcacgccgtatgttattgccgggaaaagtgtacgtatcaccgtttgtgtga

SEQ ID NO: 468662 - DNA, 399 bp, Shigella boydii; identical to SEQ ID NO: 463081

SEQ ID NO: 468663 - DNA, 1473 bp, Shigella boydii
atgtataaaaaattaaaattaaccacaataagcgaattgattaaaaatatttattgttcattatccgttctcatcattggttgtgcgtcagcttatgccgttgaattcaacaaagatttaatcgaagccgaagatcgtgaaaacgttaacctttcccaatttgaaactgatggccaattacccgtaggtaaatactcattaaacgctattattaataataaaaggacgccaatccatctggacctgcaatgggtattaattgataaccaaactgcagtttgtctgactccagagcaattaacattattaggctttactgatgagattattgaagaggctcagcaaaacctgatcgatggttgttaccctatcgaaaaagaaaaacaaattacaacttatctcgataaagggaaaatgcaattatccatatctgcacctcaggcatggttaaaatacaaagatgcaaactggacgcctcctgaactttgggatcatggtattgctggggcatttcttgactacaatttatatgcctctcattatgcaccacatcagggcgataattcacaaaatataagttcctatgggcaggctggggttaatcttggggcctggcgcctgcgtactgattaccagtacgatcagtcatttaacaatggcaaaagccaggcgaacaacctggattttccgcgtatttatttgtttcgcccaatcccagcaattaatgcaaaactaactataggtcaatacgatactgaatcctctattttcgactctttccatttttctggcgtttcgttgaaaagcgatgagaatatgttgccgcctgatctacgtggttacgcaccgcaaatcacgggtgttgcacaaacgaatgcaaaggtcactgtctcacagaacaaccgtattatttatcaagaaaatgttcctcctggcccatttgctattactaatttattcaatacattacaggggcaactggacgtcaaggttgaagaagaggacgggcaagtcacgcaatggcaagttgcatctaatagtattccttatctgacgcgtaaagggcagattcgctacaccactgctatgggtaaaccgaccagcgttggtggtgattccttacaacaacccttcttctggactggtgaattctcatggggttggctgaacaatgtatccctgcatggtggttcagttttaacaaaccgtgattatcaatctctggctgccggcgttggctttaaccttaactcattgggttcattatcttttgatgtcacacgatctgatgctcagttgcataatcaggataaagaaacgggttatagctaccgcgctaactattcaaaacgttttgaatctaccggtagccagctcactttcgctggttaccgtttctctgataaaaactttgtgacaatgaatgaatatatggatttgcccctatatttccagacatctgttatcacttaa

SEQ ID NO: 468664 - DNA, 165 bp, Shigella boydii
atggcggggcatgtttatggtactgaaggagagggctatctgcgtcttaatctggcctgcagtcgagaaaaattatatatggggcttgcgcgccttgcgagtgtaattaaaaatattaatcaggaaaaagaaaatgaacaatacggatcttatccatcttattaa

SEQ ID NO: 468665 - DNA, 1050 bp, Shigella boydii; identical to SEQ ID NO: 463097

SEQ ID NO: 468666 - DNA, 378 bp, Shigella boydii; identical to SEQ ID NO: 465880

SEQ ID NO: 468667 - DNA, 366 bp, Shigella boydii
atgaattttcatcatctggcttactggcaggataaagcgttaagtctcgccattgaaaaccgcttatttattaacggtgaatatactgctgcggcggaaaatgaaacctttgaaaccgttgatccggtcacccaggcaccgctggcgaaaattgcccgcggcaagagcgtcgatatcgaccgtgcggtgagcgcagcacgcggcgtatttgaacgcggcgactggtcactctcttctccggctaaacgtaaagcggtactgaataaactcgccgatttaatggaagcccacgccgaagagctggcactgctggaaactcggcccggcgctggcggcgggaaacagcgtgattctaaaaccgtctga

SEQ ID NO: 468668 - DNA, 843 bp, Shigella boydii
atgagattaacgacgaaattttcggcctttgttacgctgctcaccgggttaacaatttttgtgactttgctgggctgttcgctaagtttctacaacgcaattcagtataagtttagtcatcgcgttcaggcggtggcgacggcgattgatacccaccttgtgtcgaatgacttcagcacattaaggccacaaattaccgaattaatgatgtcggcagatatcgttcgtgtagacctgctccatggtgataaacaggtttataccctggccagaaatggtagttatcgtccggttggctccagcgatctgtttcgtgaactgagcgttccgttgataaagtatccggggatgtcgctgcgtctggtttatcaggatccgatgggcaactatttccattcgttgatgaccaccgcgccgctcacgggggcgattagctttatcattgttatgctcttcttggcggtacgctggttacaacggcaacttgccgggcaagaattgctggaaacccgggctactcgtatcttaaacggtgagcgtggctctaatgtgttgggaaccatctatgaatggccgcccagaaccagcagtgcgctggatacgctgcttcgtgaaattcagaacgcacgcgaacaacacagccgtcttgatacgctgatccgctcttatgccgcccaggacgtgaaaaccggcctcaataaccgactctttttcgataatcagttagcaacgttactggaagatcaggagaaagtaggtacccacgggatcgtgatgatgattcgtctgccggatttcaatatgttgagcgatacttgggggcacagccaggttgaagaatag

SEQ ID NO: 468669 - DNA, 315 bp, Shigella boydii
atgatctacgcgttgtctggcgtgttctatgcctttggcgggatgttagaagccggacgtatcggctctgccaccaacaacctcggctttatgtatgagctggatgctatcgcggcgtgcgtggtaggcggtgtatcgttcagcggcggtgtggggacggtgattggcgtggtgaccggggtaattatttttaccgtcatcaactatggcctgacgtatatcggcgtaaacccatgctggcagtacatcatcaaaggggcgattattatcttcgccgtagcgctggattcactgaaatacgcgcgtaagaaatga

SEQ ID NO: 468670 - DNA, 1197 bp, Shigella boydii
atgaaggttttatatattgttaatcagttcccttgtctttcggaaacatttgtttacaatcaaattaagggattaagtaatttaggtcatgatgttaaggtgctagccgtttataaaggtgctaagggagaggaagttggtgtcaattataggtgttgtgcaactgagaaattatctagacttgagcaactatgtttgctcttaaaatcattctcaattgccattttaaaatttgatccaataattattgagtttattcgcctattgttgagcttcaatttgtcaggactagttagcctttctttattaagaaagcagatttataattactatgatactgaatgcataattgcccatttcggtgattgtggatattatgcagcaatgctcaaaaaattcaacattaaaagtgtgaagacaatagctatatatcatgggtatgatgtaagtgtgaaaaaaattcttgaaaaatggcttccctcatataagagaagttttgagattttagatttcttattgccaattagtgaactatggaaaaataaattactttccctcggagcattaccagaaaaaataattgtgcaacatatggggataaatattaatgatttcaactttacttcaaggtcattgcataatttagaaataaaatataaaacaactaggatactgtctacgggacgttttgttgaaaaaaaaggatttaaatatattgtttctgctatgcaatatcttcctgagtgttcgttggagattattggagatggccctttatttactgatataatgcgatttattgatgataataatataaaaaacgtaaaatgtgttggtgccttgaagcataatgacgtcaaaaataaattacaggagtgtgatattttttgtctaccatcagtaactggcggtaatggagatatggaaggtataccagttgtattaatggaggcaatggcctgtggtaaaatagttgtatccacaaggcatagtggaatccctgaattgatagaggatggcgtaacaggatttctctgtgaagaaaaaaatgttgaagaactcgttgaaaaaatcaagtttattaactcgctgggaacgcgtaagaaaaatattgctgttgaggcgagaaaaaaagtagttaatgatttcaataacgagataatctatgctgatttagataaaataattaagtgctaa

SEQ ID NO: 468671 - DNA, 714 bp, Shigella boydii
gtgatcgataatctcataaaaagaacccctgaaattaataggttgttagaaaataaaagagttacaggggttgttacatttgttaatccttactcatattataaaataaaggaatataataagatatcacaactcgattacatatatatagatggcattctattattgaagctatttaatttcgttaatgggacgaaaattaaacggcatagttttgattatagttcgatagctaaaactgtttttaattattctatacaaaataaaatgaaaataggattaatcggttctaaggattatgaaatagagcaagctgtaaagaatattagaaaaaaacatccgggaattgatatatcttattttcattccggatatttttcctcattagaggaaaaaagctctgttatagattctgttattaaaaaaagtgatattataatttgtggtttaggaacccctgcgcaggaagaattggcgcttgatataaaaataaaatctaatgaacatttaatttttacatgtggtggttttttcacacagacggcttcgagagcagacttctactacccatggattaagagatataatcttatgtggctgcaacggattgttttatataaacatgttaggaaaagattttttatcgattacccgaagtttatagttagatttatatctgaaaatttaatgaaaatattcacgagaagtaattga

SEQ ID NO: 468672 - DNA, 570 bp, Shigella boydii
gtggtgttgaaggcttatatgcaaaatgctctaaaaaaaatcattaaacgaattattttagcgctttttttttgtagaaaagaaaataatatttatttcaataaatccagtgaaccacataattgttctcgagaatatattgataattttgttcaaggaaaactaataagcacagcacctattcgtaacatcaatataataaatactgaggatgattatttattcgacattacattgtcttcatgggctccaatagctaatagtattaccttaactggctatgactctttcgacagtgttaataaagcttatgagaacataaaaaaagttattgagattagaagagggggggctcaatcttcatatcagaatataagtgtccctttaggagttgtattgatacctaaagtttatgatgatattacgtcacgcgattttgactatatttggggtgtttctcttgatggtcaagtgctgcaattaatgttaaaaacaggcgagttaaaaaaaagtagcataaaactctccagagaagaatgtttttttatttatatgaaggaaattaagtga

SEQ ID NO: 468673 - DNA, 429 bp, Shigella boydii
gtgggatatcaggaatgtttgaaaaaaaataaagatggtagtcttgcagattattacaatttttctttttcaaaatcaacaaccgattatattttaaagtgtgatgctaattatatttacacaaaagctgggaaatattcgattgttaatgcattaaacagtggctatgacgtaatttgttttcctggtgtagaaatatttgggcatcatcactcctatgaaccttttttatttaagcgagattcaaagtggatatttatagatgacgacatgtgggaaagtattaagtttaacaagaaggtgcttacgcatcatataattttaccttgtttcattcatgtgaaaagattaaattatattaaattttatggagaagctatcagtggtgttgaaggcttatatgcaaaatgctctaaaaaaaatcattaa

SEQ ID NO: 468674 - DNA, 381 bp, Shigella boydii; identical to SEQ ID NO: 458155

SEQ ID NO: 468675 - DNA, 798 bp, Shigella boydii
gtgaccggcgcagtcatcattgtattaatgctattgatgatgtttttttcaccgtggcttgcgacgcatgatcccaacgccattgatttaaccgcccgccttttgccgccttctgcggcgcactggtttggcaccgatgaagtgggacgcgatctgttcagccgcgtactggtcggcagtcagcaatcaattctcgccggattagtcgtggttgccattgcgggtatgattggttcgctactcggatgtctatccggtgtgcttggcggacgcgcagacgccatcatcatgcgcatcatggacattatgctgtcgattccttcgttggtactgacaatggcactggctgccgctctcgggccgagtttatttaacgccatgctggcgattgctattgtgcgaattcccttttatgtgcgcctggcgcgggggcaagcattagttgtacgccagtatacctatgttcaggcggcgaaaacctttggtgcgtcgcgttggcatctgatcagctggcatattttacgtaactccctgccgccgctgatcgtgcaggcatcgctggatatcggtagcgcgattttaatggccgccacgttgggatttattggcctgggtgctcaacaaccgagtgctgaatggggcgcgatggtagcgaatggtcgcaactatgtactcgatcagtggtggtattgcgcatttccgggggcagcgattttgcttaccgccgttgggtttaatctctttggtgatggtattcgcgatctgcttgacccgaaagcaggaggaaagcagtcatga

SEQ ID NO: 468676 - DNA, 378 bp, Shigella boydii
atggacgaacagtggggctacgtcggtgctaaatcacgtcagcgctggctgttttacgcgtatgacaggatacggaggacggttgtggcgcacgtcttcggtgaacgcactctggccacactcgagcgtcttctgagcctgctgtcggcctttgaggtcgtggtatggatgacggatggctggccgctgtatgaatcacgcctgaagggaaagctgcacgttatcagcaagcgttacactcagcgcattgagcgacataatctgaatctgagacaacatctggcaaggctgggacggaagtcactgtcgttctcaaaatcggtggagctgcatgacaaggtcatcgggcattatctgaacataaaacactatcagtaa

SEQ ID NO: 468677 - DNA, 426 bp, Shigella boydii
gtgacgctgctgccttatcaggtctggcgtcacgccatcggtacgccagcatcgcaagataaactgatctacgaagaaaaagacgatacctattacgtcagcctgcataaaacgacctcgaagcactatgtagtcattcatttggccagcgccaccaccagtgaagttcgcctgctggacgcggaaatggccgatgccgagccgtttgtttttctgccgcgccgcaaagatcacgaatacagccttgatcactaccagcatcggttttatctgcgttccaaccgccacggcaaaaactttggcttataccgtacccgcctgcgtgatgagcaacagtgggaagagttaattccgccacgcgaaaacatcatgctggaagggtttacgctgtttaccgactggctggttgaggtgtactggcaatag

SEQ ID NO: 468678 - DNA, 345 bp, Shigella boydii
atgcatcatattaaaacagccgcggatcttaattgttttttaaattcaatggttgctgtttcgcaaccaactgttgataaaattatttttggtgctgaggcgacacttattaataaaattgggacctgctggattgcctcaatggatgttttaagaaaggctgtttttgaaggtgtcaatatcattattacacatgagactacattttattcttatgctgatctggagggtgacgatcttgagttttcatgggccagaaaaataatggattatactcgcggtgaactcagttatttaaaaataattgagcaaaaaaaggagtttttgcataaaataatttggtaa

SEQ ID NO: 468679 - DNA, 354 bp, Shigella boydii
atgaaacttaacgacagtaacttattccgccagcaggcgttgattaacggggaatggctggacgccaacaatggcgggatcatcgacgtcaccaatccggcgaacggcgacaagctgggtagcgtgccgaaaatgggcgctgatgaaacccgcgccgctatcgacgccgccaaccgcgccctgcccgcctggcgtgcgctcaccgccaaagaacgcgccaacattctgcgcaactggttcaatttgatgatggagcatcaggacgatttagcgcgcctgatgaccctcgaacagggcaaaccactggccgaagaaggcaaacgtatttatggcgataccattcccggtcattag

SEQ ID NO: 468680 - DNA, 1560 bp, Shigella boydii
atgaaaaaaatcagcttaccgaaaattggtatccgcccggttattgacggtcgtcgcatgggtgttcgtgagtcgcttgaagaacaaacaatgaatatggcgaaagctacggccgcactgctgaccgagaaactgcgccatgcctgcggagctgccgtcgagtgtgtcatttccgatacctgtatcgcgggtatggctgaagccgctgcttgcgaagaaaaattcagcagccagaatgtaggcctcaccattacggtaacgccttgctggtgctatggcagtgaaaccatcgacatggttccaacccgcccgaaagccatttggggctttaacggcactgaacgtcccggcgctgtttacctggcagcggctctggcagctcacagccagaaaggcatcccggcattctccatttacggtcatgacgttcaggatgccgatgacacatcgattcctgccgatgttgaagaaaaactgctgcgctttgcccgcgccggtttggccgtcgccagcatgaaaggtaaaagctatctgtcgctgggcggcgtttcgatgggtatcgccggttccatcgttgatcacaacttctttgaatcctggctgggaatgaaagtccaggcggtggatatgaccgaactgcgtcgccgtatcgatcagaagatttacgacgaagccgaactggaaatggcactggcctgggctgataaaaacttccgctatggcgaagatgaaaataacaaacagtatcaacgcaatgccgagcaaagccgcgcagttctgcgcgaaagtttactgatggcgatgtgtatccgcgacatgatgcaaggcaacagcaaactggccgatattggtcgcgtggaagaatcacttggctacaacgccatcgctgcgggcttccaggggcaacgtcactggaccgatcaatatcccaatggtgacaccgccgaagcgatcctcaacagttcatttgactggaatggcgtgcgcgaaccctttgtcgtggcgaccgaaaacgacagtcttaacggcgtggcaatgctaatgggtcaccagctcaccggcaccgctcaggtatttgccgatgtgcgtacctactggtcaccagaagcaattgagcgtgtaacggggcataaactcgatggactggcagaacacggcatcatccatttgatcaactcaggttctgctgcgctggacggttcctgtaaacaacgcgacagcgaaggtaacccgacgatgaagccgcactgggaaatctctcagcaagaggctgacgcttgcctcgccgctaccgaatggtgcccggcgatccacgaatacttccgtggcggcggttactcttcccgcttccttaccgaaggcggcgtcccgttcaccatgactcgtgtcaacatcatcaaaggcctgggaccggtactgcaaatcgcggaaggctggagcgtggaattccgaaggatgtgcatgacatcctcaacaaacgcaccaactcaacctggccaaccacctggtttgcaccgcgcctcaccggtaaagggccgtttacggatgtgtactcggtaa

SEQ ID NO: 468681 - DNA, 543 bp, Shigella boydii
gtgttaaagaatcgacagggcagtgcggtatcattaggtgcggttttattatgggtcgcgaatcgtctcgatttgccgctgctgccggtgattttccctacgcagctgatattgcgcattgaatgtccggatggcgaaatttggctgattaatccttttaacggtgaatcgttaagcgaacatatgctggacgtatggttaaagggaaatatcagcccgtcggcggaactgttttatgaagaccttgatgaagctgataacattgaggtaatccgcaaattgctggatacactcaaagcctcgttgatggaagaaaatcagatggagctggcgttacgcaccagcgaagctttattacaattcaaccctgaagatccctatgaaattcgcgatcgcgggttgatttatgcgcaactggattgcgaacacgttgcgttgaacgatttaagttatttcgttgaacagtgtccggaagacccgatcagcgaaatgatccgtgcgcaaataaataacatcgcgcataaacatattgtgctgcattaa

SEQ ID NO: 468682 - DNA, 654 bp, Shigella boydii
atgacagatcttcccgacagcacccgttggcaattgtggattgtggctttcggcttctttatgcagtcgctggacaccaccatcgtaaacaccgcccttccctcaatggcgcaaagcctcggggaaagtccgttgcatatgcacatggtcattgtctcttatgtgctgaccgtggcggtgatgctgcccgccagcggctggctggcggacaaagtcggcgtgcgcaatattttctttaccgccatcgtgctgtttactctcggttcactgttttgcgcgctttccggcacgctgaacgaactgttgctggcacgcgcgttacagggcgttggcggcgcgatgatggtgccggtcggcagattgacggtgatgaaaatcgtaccgcgcgagcaatatatggctgcgatgacctttgtcacgttacccggtcaggtcggtccgctgctcggtccggcgctcggcggtctgctggtggagtacgcgtcgtggcactggatctttttgatcaacattccggtggggattatcggtgcgatcgccacattgctgttaatgccgaactacaccatgcagacgtggcgctttgatctctccggatttttattgctggcggttggcatggcggtattaacccctggcgctggacggcagtaa

SEQ ID NO: 468683 - DNA, 423 bp, Shigella boydii
atgacagcacagatagccgcttacgggcggctggtggacgacccgcaggtaaaacagaccagcaagggcacaccgatgacgctggcgcgtatggcggtatcgttgccatgtagtcaggcgcaggatgggcaggcgacgttatggctatcggtcatcgcatttggtaagcaggccgacttcctggctaaacatcaaaaaggcgacgttgccagcgtatccggcacgatgcaggtcagccagtggaccggacagaacggggaaacgcggcagggctggcaggttatcgcagacagtgtaatcagtgcgcgaacggcgcgactgggcggcaaaaaaggtcaacagggccaggctactgacgcgctgaacagggcaaaacaacaggcggggaatgatgatccgtacggggataacataccgttttaa

SEQ ID NO: 468684 - DNA, 258 bp, Shigella boydii
atgcgcacatcaggaaaacttaataatcagaagaagcagcataaccgcgccattgaccttacagagcactggctgagagtggcgataaaaatcatcgaccgcaacacgggggaaggatacgcgaaagcacatcccgacctgataagcgcattcatgaccacagcagcggcaaactttgccacgctgacagagcgggagattgccgaagcggaacaggtaacaaccatcaacgttaaaaccggagaggtggaattatga

SEQ ID NO: 468685 - DNA, 231 bp, Shigella boydii
atgtgcaataaaaccacaccggacgcagcagaagaagcaatgcaaatactgatacgtgcgctcgttgatgttacccacatggtggagattatggagagaaaatcacagtcggagcacgacaaaagaaaacttaaaacaataaaaataattgccaaaaactcgctgataaaagttacagacatccttaatgaggacattaaaagaataagggagaaaatttgtgatgcataa

SEQ ID NO: 468686 - DNA, 306 bp, Shigella boydii
atggctacaggttcaaaaaacgcaaaatcacaatcactgacagctcggatcccgcatgatgttattgaaggcatggaatccgtaaaactggacggtgaaagcaacgccggattcatagtaaccgccatgcgcggtgaaatcgcccgccgccaggcagaaggaagcagagaaaaccccctgatttcttcgctcgatgcactggcgcaggtggaaaaactcggaatcaaagccgccgaggagatcgggcagctcgtcactgtcgcacgtgaagaactccagcgccgcaagaccaaagaaccagagtaa

SEQ ID NO: 468687 - DNA, 378 bp, Shigella boydii
atggacgaacagtggggcgacgtcggtgctaaatcacgtcagcgctggctgttttacgcgtatgacaggatacggaggacggttgtggcgcacgtcttcggtgaacgcactctggccacactggagcgtcttctgagcctgctgtcggcctttgaggtcgtggtatggatgacggatggctggccgctgtatgaatcacgcctgaagggaaagctgcacgttatcagcaagcgttacactcagcgcattgagcgacataatctgaatctgagacaacatctggcaaggctgggacggaagtcactgtcgttctcaaaatcggtggagctgcatgacaaggtcatcgggcattatctgaacataaaacactatcagtaa

SEQ ID NO: 468688 - DNA, 261 bp, Shigella boydii
atgattcaggccggggctgcgagtcgtattgcggaaatggaagcaatgaagcgaaatattgcgcaagccgaatcggagattaaacagtcgcagcaaggttatcgtgcttatcagaatcgaccggtgaaaacacctgctgatgaagccctcgacactgaattaaatcaacgctttcaggcttatatcacgggtatgcaacctatgttgaaatatgccaaaaatggcatgtttgaagcgattatcaatcatgaaagtgagtag

SEQ ID NO: 468689 - DNA, 1143 bp, Shigella boydii
atgaagctaaccgatgcggaaaatgccgccgatggcatttttttccccgcccttgaacaaaatatgatgggcgcggtgttaattaacgaaaatgatgaagtgatgtttttcaaccccgccgcagagaagctctgggggtacaaacgtgaagaagtcattggcaataacattgatatgctgattccgcgggatttgcgtcctgcgcatcctgaatacattcgtcataaccgtgaaggtggtaaagcgcgcgtcgaggggatgagtcgggagctgcagctggagaaaaaagacggcagtaaaatctggacccgttttgcgctatcgaaagtgagcgccgaggggaaagtttattacctggcgctggtacgggatgccagcgtagaaatggcgcaaaaagaacagacccgacaattgattattgccgttgaccatctcgaccgaccggtgattgtcctcgatccggaacgccatattgtgcagtgcaatcgcgcatttaccgaaatgtttggttactgcattagcgaagccagcggtatgcagcccgatacactcctgaacattcctgaattccctgccgataaccgcattcgtttacaacagttgctatggaaaaccgcccgcgatcaggacgaatttctgctgttgacgcgcaccggtgaaaaaatctggattaaagcctctatcagcccggtttatgacgtgctcgcgcatctgcagaacctggtaatgactttctcggatatcaccgaagaacggcaaatccgccagcttgaaggcaatattctcgccgccatgtgcagcagccgccatttcatgaaatgggggaaatcatttgtcgtaacatcgaatctgttctcaacgaatcgcatgtttcgctgttcgcactgcgcaacgggatgccgatacactgggcgtcatcttcgcacggtgcagaagttcaaaatgcgcaaagctggtcagcgaccattcgtcagcgtgatggcgcgcctgcggggatcctgcaaattaaaacctcgtcaggagcagaaaccagcgcctttatcgaacgcgtggcagatatcagtcagcatatggccgcgctggcgctggaacaggaaaaaagccgccagcatattgaacaactcatccaatttgatccgatga

SEQ ID NO: 468690 - DNA, 930 bp, Shigella boydii
gtggatagtaataatcaaattgaaccctgtttaagcagaaagtcgtcagaaggtaaaccacaaatatttacaaccttacgaaatattgctcttaaccttctgactatttttgaagctgtatatgtacataaagggatcgttaatgcagcgaaagtgcttaatctgcccccctcggcaatcagtcagtctattcagaaactgcgcgttatattccctgacccattgtttattcgcaaaggccaaggtgtcactcctaccgcatttgcgatgcatctacatgagtatatcagtcagggccttgagtccattcttggcgcgctggatatcgaaggaagctatgataagcaacgaacgataactattgcgaccactccctcggtcggagccctggtccttcctgtcatctatcgggcgattaaaactcactatccgcagcttttactgcgcaacccgcccatcagcgacgcggaaaaccaactcagtcagtttcaaaccgatctcatcatcgataacatgttttgcaccaatcgtacggtgcaacatcatgttctgttcaccgacaatatggtgttaatttgccgcgagggaaatccactactctctttagaagatgacagagagactatcgacaacgctgcgcatgtacttctgttaccggaagagcaaaatttcagcggtctgcggcagagagttcaagaaatgtttccggaccggcaaatcaatttcaccagctacaacattttgacaatcgctgcactggttgccaacagtgacatgttagcgattattcccagccgtttttataacctgtttagccgctgctggccgctggaaaaactgccttttccgggtaatgactccaacttactgatagtgttttatgttcagataatgcccgatgaccttgtcatgcagctccaccgattttga

SEQ ID NO: 468691 - DNA, 1392 bp, Shigella boydii
atgattaagtttagcgcaacgctcctggccacgctgattgccgccagtgtgaatgcagcgacggtcgatctgcgtatcatggaaaccactgatctgcatagcaacatgatggatttcgattattacaaagacaccgccacggaaaaattcggactggtacgtacggcaagcctgattaacgatgcccgcaatgaagtgaaaaacagcgtactggtcgataacggcgatttgattcaggggagtccgctggccgattacatgtcggcgaaaggattaaaagcaggtgatgttcatccggtttataaggcgctgaatacgctggattatacggtcggtacactcggcaatcatgaatttaactacggtctggattacctgaaaaatgcgctggcgggagcgaaattcccttatgtaaatgccaacgtcattgacgccagaaccaaacagccaatgtttacaccgtatttaattaaagataccgaagtggtcgataaagacggaaaaaaacagacgctgaagattggctatattggcgtcgtgccgccgcaaatcatgggctgggataaagctaatttatccggaaaagtgacggtgaatgatattaccgaaaccgtgcgcaaatacgtgcctgaaatgcgcgagaaaggtgccgatgtcgttgtcgttctggcgcattccgggctgtctgccgatccgtataaagtaatggcggaaaactcagtttattacctcagtgaaattccgggcgttaacgccattatgtttggccatgctcacgccgttttcccgggtaaagattttgctgatatcgaagaggctgatatcaccaaaggcacgctgaatggtgttccggcggtaatgccgggcatgtggggcgatcatcttggggtggtcgacttacaactcagtaatgacagcggtaaatggcaggtgacgcaggcgaaagcggaagcacggccgatttacgacatcgccaataaaaaatccctcgcggcggaagacagcaagctggtagaaacactcaaagccgatcacgatgccacacgccagttcgtcagcaagccaatcggtaaatctgccgacaatatgtatagctatctggcgctggtgcaggacgatccgaccgtgcaagtcgtgaacaacgcgcaaaaagcgtatgtcgaacattacattcagggcgatccggatctggcaaaactgccggtgctttcagctgccgcaccgtttaaagttggtggtcgcaaaaatgacccggcaagctatgtggaggtggaaaaaggccagttgaccttccgtaatgccgccgatctttatctctaccccaatacgctgattgtagtgaaagccagcggtaaagaggtgaaagagtggctggagtgctccgccggatag

SEQ ID NO: 468692 - DNA, 750 bp, Shigella boydii
atgacctggtttattgaccggcgtctgaacggcaaaaacaaaagcatggtgaatcgccagcgttttttacgccgttataaagcgcaaattaaacagtcgatctccgaggccatgaataagcgttcggtgactgacgtcgacagcggcgaatccgtatccattcccacggaagatattagcgaaccgatgtttcatcaggggcgtggcggcctgcgccaccgcgtacatccgggcaatgaccatttcgtccagaacgaccgaattgaacgtccccagggtggcggcggaggttcctgcagtggtcagggccaggccagccaggatggtgaaggtcaggatgaatttgtctttcagatttcgaaagatgagtatcttgatctgctctttgaagatttggccttaccgaatctgaaacaaaaccaacaacgccagctgaccgaatataaaacgcatcgggcgggttataccgctaacggcgttccagccaatatcagcgttgtgcgttccttgcagaactcactggcgcgacgcacagccatgacggcggcaagcgacgggaacttcatgcgctggaagagaatttggccatcatcagcaacagtgaacctgcgcaactgctggaagaggaacgtctgcgcaaagaaattgcagaattacgtgccaaaattgaacgcgtcccttttattgacaccttcgatttacgttacaagaactacgagaagcggcccgatccctccagccaagcagtga

SEQ ID NO: 468693 - DNA, 174 bp, Shigella boydii
atgagcattattaaagaatttcgcgaatttgcgatgcgcgggaacgtggtggatttggcggtgggtgtcattatcggtgcggcattcgggaagattgtatcttcactggttgccgatatcatcatgccacctctgggctgtaagcgtaaactgaccgccgtatgtagccattaa

SEQ ID NO: 468694 - DNA, 381 bp, Shigella boydii
atggacccgtatgtggtggaagaagatccgggcgttaaatcggtgctcaatatctacgactactataagcaacaccactatgaaaccattgtgatgggcgcgagcttccgtcgcaccgaacaaatcctcgccttaaccggctgcgatcgactgactatcgcaccgaatttgctgaaggagctgcaggaaaaagtttcgccagtggtacgtaaattaatcccaccttctcagacgttcccacgcccagctcccatgagcgaagcggagttccgttgggagcacaatcaggatgcgatggcggtagaaaaactgtctgaaggcattcgtctgttcgccgttgatcaacgcaaactggaagatcttcttgccgccaaactataa

SEQ ID NO: 468695 - DNA, 150 bp, Shigella boydii
atgactgatcaagctgaaaaaaagcactctgcattttggggtgttatggttatagcaggtacagtaattggtggaggtatgtttgctttacctgttgatcttgccggtgcctggtttttctggggtgcctttatccttatcattgcctag

SEQ ID NO: 468696 - DNA, 378 bp, Shigella boydii; identical to SEQ ID NO: 468687

SEQ ID NO: 468697 - DNA, 378 bp, Shigella boydii
atggacgaacagtggggctacgtcggtgctaaatcacgtcagcgctggttgttttacgcgtatgacaggatacggaggacggttgtggcgcacgtcttcggtgaacgcactctggccacactggagcgtcttctgagcctgctgtcggcctttgaggtcgtggtatggatgacggatggctggccgctgtatgaatcacgcctgaagggaaagctgcacgttatcagcaagcgttacactcagcgcattgagcgacataatctgaatctgagacaacatctggcaaggctgggacggaagtcactgtcgttctcaaaatcggtggagctgcatgacaaggtcatcgggcattatctgaacataaaacactatcagtaa

SEQ ID NO: 468698 - DNA, 213 bp, Shigella boydii
atgttatgttttttgatttatatcactctccccttcattcagcttgtctatttcatttcctctgaaaagaaactaactattcacattgtgcagatgtttcacttgttatcacaggtattctataatctcaaaaagtttttaatgatggatattctcggagttggagatgcaattaatattaatacaaataaaaatatccggcaggtatgctaa

SEQ ID NO: 468699 - DNA, 1356 bp, Shigella boydii
atgttttcagaagtcatgcgttatattctcgacctcggccctacggtgatgctgccgattgtcatcattattttttctaaaatattaggcatgaaggcaggcgattgctttaaagcgggtcttcatatagggattggctttgttggcattggccttgtgattggcttaatgctgaattccattggtccggcggcgaaagcgatggcggaaaatttcgacctgaatctgcatgtggtcgatgtcggctggccgggctcttcaccaatgacctgggcgtcgcaaattgcgctggtggcgattccgattgctattctggttaacgtggcgatgttactgacccgtatgacgcgggtggtaaatgttgatatctggaatatctggcatatgactttcaccggcgcgttgctgcatctggcaaccggttcatggatgatagggatggcgggtgtggtaattcacgcggcgtttgtttataagctcggcgactggtttgcccgcgatacccgaaatttctttgagctggaaggtattgctattccgcacggtacgtcggcgtatatggggccgattgcggtgctggtcgatgctatcatcgagaaaatcccaggcgttaaccgaattaaatttagcgccgatgatattcagcgcaaatttggcccttttggcgaacctgtcaccgtgggttttgtgatggggctgattatcggcatcctcgcgggttacgatgtcaaaggtgtattgcagctggcggtaaaaacggcggcagtgatgctgctaatgccacgggtgattaaacccatcatggatggtttaacgcccatcgctaagcaggcccgtagtcgtttacaggcgaagttcggcggtcaggagttcctgattggcctggatcccgcattactgctggggcatacggcggtggtatcggtaagcctgatttttatcccgctcaccattttaattgctgtttgtgttccgggtaatcaggtactgccgtttggcgatcttgccaccatcggcttctttgtggcgatggcagtcgccgtgcatcgtggaaatctgttccgcaccttaatctcgggtgtcatcatcatgagcatcactctgtggatcgcgacgcaaactattggtttgcacacccaactggcggctaatgctggggcgttaaaagccgggggtatggtggcttcaatggatcagggcggttctcccattacctggttactgattcaggttttctccccgcaaaatattcccggtttcattattatcggcgcaatttatctgaccggtattttcattacctggcgtagagcgcgtggttttattaaacaagagaaagccgttctcgcagaataa

SEQ ID NO: 468700 - DNA, 378 bp, Shigella boydii; identical to SEQ ID NO: 465880

SEQ ID NO: 468701 - DNA, 183 bp, Shigella boydii; identical to SEQ ID NO: 465217

SEQ ID NO: 468702 - DNA, 453 bp, Shigella boydii
ttgacgcttactaaacggttaatccaacttcagctagatatcgcagcgatacaagaacaaacaccagaagaaaaagcccttcaagagttagataccgaagatcagcgtcatttatatctgatgctgaaagaggattacgattcaagcctgttaattcccactattaaaaaagcgtttagccagaatccaacgatgacaagacaaaagttactgcctcttgttttgcagtggttgatggaaggcgaaacggtagtgtcagaactagaaaagccctccaagagtaaaaaggtttcggctataaaggtagtcaagcccagcgactgggatagcttgcctgatacggatttacgttatatctattcacaacgccaacctgaaaaaaccatgcatgaacggttaaaagggaaaggggtaatagtggatatggcgagcttatttaaacaagcaggttag

SEQ ID NO: 468703 - DNA, 351 bp, Shigella boydii
atgacaactcaacacacaactgaacggatgattcaggaatatgtccctggtaagcaggtcacgctggcacatgtcattgccaatccagggaagggtctgtttaagaaattgggtttaccagacaccatttccgctattggcattctgacgattacccccagcgaagcatctatcatcgcatgcgatatcgccacaaaatcgggcgctgtagagatcggttttcttgatcgttttaccggtgccgtagtgctgactggtgatgtttctgcgattgaatatgcacttagccaggttacccgtacgctgggtgaaatgatgcgctttaccgcctgccccattacgcgaacctga

SEQ ID NO: 468704 - DNA, 555 bp, Shigella boydii
atgtcgaaagcggtaggtattttagaacttagcagtatcgcgaaagggatggaaaccggcgacgccatgctgaaaagcgccaacgttgagttactggtcagcaaaacgctatgccccggaaaatttctgctgatgctcggtggcgatgtgggcgtggtgcaacaggccatcaacagcggagcgtcccttgctggtgaaatgctggtcgacagtcttgtcctgccgaatattcatcccagcctccttactgcaatcagcggacttaaccatgttgaacagcaccgggctgtcggcgtagtcgaaacctggagtgtcgccgcctgcattgacgctgccgattgtgctgtcaaagctgcgaatgtcattctcgttcgcgtacatatggcttttggcattggtggtaaatgctacatggtggttgctggcgatatttcagatgttaataacgcggtctctgtcgccagcgagcgtgcgggggaaaaaggtttgttggtctatcggtcagtgattgcccgtccacatgaagccatgtggcgtcagatggtggagggataa

SEQ ID NO: 468705 - DNA, 1281 bp, Shigella boydii
gtggtgggtgctggcggcgcaggttttccaacccatattaagctacaagcgcgtgttgacactttcctggtgaatgcggcggaatgcgaaccaatgttgaaagtggatcaacagttaatggcgcagcaagccagccgcctgcttcgcggtgttcactatgcgatgaaagccaccggggccagtagcggaatcatcgcgctgaaagagaaatatcaacgggcaataaacgcactcacgccactgttaccaccggatatccgcctgcatattttgcccgacgtttacccagcaggagacgaagtgctgaccatctggatggcaactggtcgccgcgttccacccgctgcattacccgttagcgtcggtgtggtagtcaataatgttcaaaccgtacttaatattgccagagccgtcgagcaacagtatccagtgacgcgccgcacactcaccgttaatggtgcagtggcgaaaccaataacggtaaccgtccccatcggcatgtctttacgtgaagtcctggcgctggcgggcggcgcaacagtagatgctcctggttttatcaatggcgggccgatgatgggaagtttgatcacatcgctcgacacaccagtcagcaaaaccactggcggcttgctggttttacccaactctcattcactgatccaacgtcgattgcagaatgaccgcagcgtacttgccgtcgcgaaaactgtttgtgagcaatgccgcttgtgtaccgatctctgtccacgtcatttaatcggtcacgaactggctccccatttattagtacgtgcggttaactaccaacagctcgctacgccgcaactgttactgacggcgctcacctgttcggagtgcaacgtctgcgccagcgtcgcctgtccggtaggaatttcaccaatgcgcataaaccgcctgcttaagcaggaattacgcgcacaaaatctccgctacgaaggtgccttaaatcctgcagatcccatggcaaattatcgactgattcccgtaaaacagctggtaaccagacttggcttaaccccgtggtatcaggatgcgccattgtcggaacaggtgcctcagcccgaaaaagtgacgttattgttacgccagcacatcggtgccagcgcaattgcgtgtgtacaaaaaggcgatcgcgtcgttcatgggcaatgtgtaggtcaaattccacacggcacattaggtgcccccattcatgccagtattgatggcatggtcagcgatgtgacagaaaacgcgattacgcttgtgagaggttaa

SEQ ID NO: 468706 - DNA, 885 bp, Shigella boydii
atgcagactttacgcccggatgtggttatcggttttggcggcggttctgccctggacgccgcaaaagcgattgtctggttcggtcgccagtgtggcattgaaattgaaacctgcgtagccattcctaccaccagcggtaccggttccgaagtgaccagtgcttgtgtcatcagcgatcctgagaaagggattaaatatccccttttcgataatgcactttatccggatatcgcgatccttgatccatctctgatcgtcagcgtgccaccggcgataacgcccaataccgggatggatgttttaacccatgcgcttgaagcttatgtttctcctcgcgccagcgacttcacggatgcactggtcgaaaaagccgtgcaaattgtttttcaatacctgcccactgcagtgaaaaaaggcgattgtcttgccacccatggcaaaatgcataatgcatcgacgcttgcaggaatggcctttagccaggccggactcggtttaaaccatgcaattgctcatcaactcggcggacagtttcatctgccgcatggactggcgaatgcgctcctgctcacggcagttatccgctttaatgctggcgatccgcgcgctgccaaacgctacgcccggctggcgaaaacgtgccaattatgcccggacaacgccaatgacaccgccagcctgaatgcacttattcaacatattgagcagcttaaaacaacctgtaagctgccgactcttgccaatgcgctgaaagaaaaaaaagcagaatggtcattatgcataccagatatggttcaggcggcactggtggatgcaacgttgcgtaccaacccgcgtgcggctgatgtctccgcgattgcagaactgctcgaggagttgttatga

SEQ ID NO: 468707 - DNA, 534 bp, Shigella boydii
atgccgctgaatttttcggcgtttagtgatgtcctctccccccttgccgaatgtgcgccgacgtttgcctgcttcggcaaccacgatcgccctgttggtacagaaaaaaatcacttaattggcgagacgttgaaatcagtgggcatcacggtgttgtttaaccaggctacggtgatcgccacgccgaacaggcaattcgaactggtaggcaccggtgacttatgggccggacaatgcaaaccacctcccgccagcgaagcaaatctgccaagactgatgctggcacataatcccgacagcaaagaagtcatgcgtgatgaaccctgggatctgatgctgtgcggccatactcacggcgggcaactgcgcgtaccgttggttggtgaaccttttgcccctgtcgaagataaacgttacgtcgccggattaaatgcctttggcgaacgacacatctacacaacccgtggcgtgggcagtttgtatggtttgcgtctgaactgccgcccggaagtaacgatgctggaactggtgtag

SEQ ID NO: 468708 - DNA, 378 bp, Shigella boydii; identical to SEQ ID NO: 465880

SEQ ID NO: 468709 - DNA, 234 bp, Shigella boydii
atgtcacttatcaccgatctacccgccattttcgatcagttctctgaagctcgccagaaaggctttctcaccgtcatggatctcaaggagcgcggcattccgctggttggcacttactgcacctttatgccgcaagagatcccgatggcagccggtgcggttgtggtttcgctctgttctacctctgatgaaaccattgaagaagcggagaaagatctgccgcgcaacctgtga

SEQ ID NO: 468710 - DNA, 453 bp, Shigella boydii
atgcgggtccggtgctgcaagatgttttgccatctgatcatccacgtacaccttcagctccagtaccttatcatccacatacttgcgggttgccagcactacggcagggtcgattttcagggtgatattgtccgtgctgctggtaatcagcaccatgcgcacggtctgggtacgcccgctgccttcagccagttgcggcttatagctttccgggcagtttcccacggcaatcaatgccccggactcatcaaacaggcccacttcacgtatccaccaaccgccctcgttttcagggatcacctgttcagcaataatcaggctgctgttctgcgggtcgatatagagcatattcagcgcagcccggcgtttctcatttaccagtgcactctgctttgcgtccggcgtcggcaatgttccgccaccatcgcccaccgccatatgggtaatttttaa

SEQ ID NO: 468711 - DNA, 1014 bp, Shigella boydii
atggattttaaagaatggttaagctcaaataaaaacagtcttcccgatgcaaccagagaaaattttgaaaagctatactgggagttcatagacttcaaagcaaatgaatacatgtcggaatttaaagaaaaaaaagcagaattactggcccaaaatgaacaagaacatcaaaatttcataaaaagacatattaatatttggagagatggttttggattattagagttgttgttagagttatgtattaatcaaggttctaaatatagtacaagcttacaacaagataaagacaccgacacaaacaaccatttgcaattactaattagattacacgcaaaggcatgtgcaatttctaacgagattttatgtctattaaaaaatggatttcctgacgcagcccatgcaagatggagagcactgcatgaaacaaatgtaacacttcatttcatcaacaagcatggtcctaaatgctcagaaatatttttagcacatgaaatttatgatagctattatctaatgatgtcacataaaaagtatgaaagcaggcttcaagagaaagggcccagtaatgaagaggccagagaattaacagacttgttcgataaagccattaaaacatatggcagaagttttgattcgcaatatggttgggccacaccatttttaactgataagaaacacaaagctagctttaaatcaattgaaaaagaagttaaattagatcacatgcgcccatattttaaatgggcatgccaaaacatccatgtaaatataaaaacaatcactaatagcttgtcactaccccatcacctgaagaacgtcatcaacataggtccaagtaatttcggattagttgaccctgcacatgctacagcccttagtcttactcaatcaacgtgctgtctactgaaaaatgactgcaacgaagagaatttaattttcatgaatttaattaaacaactatctatagaaataggggacacattcctatctatatctaactcaattgggtaa

SEQ ID NO: 468712 - DNA, 1866 bp, Shigella boydii
atggcttttaaacactatgacgtggtcagggcggtatcgccgtcagaccttgcggaaaagctgacacataaactgaaagagggctggcagccgtttggtagtccggtggccataaccccttatactctgatgcaggcgattgcagcagaaggtgcagtaatcagcgccaccagcgacccggagtattactttgttgtggttctggcagggcagtcaaacggcatgtcgtatggtgaaggccttccgctgccggggacatatgaccgtccggacccgcgtattaagcaactggcgcgtcgcagtacggtgacaccgggcggtgcagcatgcaaatataacgacatcattccggcggaccattgtctgcatgatgtgcaggacatgagccgtcttaaccatccgaaagcggacctgtcaaaggggcagtacggaaccgtggggcaggggctgcatatcgccaaaaaactgctgccgtttataccggcgaatgcgggcattctgctggttccgtgctgtcgtggtggttcagcgttcaccaccggagctgatggcacatacagtgacgcgagtggtgcctcggagaattcaacccgctggggtgtggacaagccgctgtataaggaccttatcggtcgaacaaaagcggcactggagaagaacccgaaaaatgtgctgtttgccgtggtgtggatgcagggggaatttgattttggcggtacgccggcaaatcatgccgcacagtttggtgcgctggttgataaattccgtgcagacctggcggatatggcaggccagtgcgtcggtggctctgctggcggtgttccctggatatgcggggacacgacgtatttctggaagcagaagaacgaatccacgtaccagacggtgtacggcagctataaaaataaaacggaaaagaatatccatttcgtaccgttcatgaccgatgagaacggggtgaatgtgccgacgaacaaaccggaagaagacccggacattccgggtatcggttattacggttcgaaatggcgtgacagctcagccacctggacgtcacaggacagggcgagccatttcagttcatgggctcgccgtgggattatttccgaccgtctggcaacggcgattctgagctgcgcgggtaagtcttctgcgtttgttaatggtactgccggggtggttgttccagacaggccggttaccacctcagagtctgtaattttttacgatgccaaaaaagctacagacaatcagctgaaaccttatggctgggacggtatgtatggcagacgcacactggttgatgacagcggcaataaagctctgcgaattgagaaaaataacagcgcgaaatcctggtcaatgtactgtgatattgctgcagacaaggcaaaacttttactggaaaaaggcggggaaattgctgtccggtttaaaatccccgaaaacgtcaatcttgagacaaccagaaacaagtatgcctttggtttgtactggcgaatagcggaatggccgggtgagggtggtgaaggccatctgagttctttctttgtccagacagataaagccagtattaatgttgcataccatcatacagttaatcaacaaaaagaacttggcacgtttggcgcattcgaccatgactggcatacgcttgcatttaaatttaagggcagtaacagcattaatgttactccggtgcttgatggtgtggatggacaggcgtttgacctggtgaaatgggccaatactgctaatggactcaacaggtttgtcattacggatattacaggtagtgcagaaacctaccctgtacttattgatacggtggaagttaaagcaaacaaagctggagcagccgcataa

SEQ ID NO: 468713 - DNA, 378 bp, Shigella boydii; identical to SEQ ID NO: 465880

SEQ ID NO: 468714 - DNA, 378 bp, Shigella boydii; identical to SEQ ID NO: 465880

SEQ ID NO: 468715 - DNA, 378 bp, Shigella boydii; identical to SEQ ID NO: 465904

SEQ ID NO: 468716 - DNA, 711 bp, Shigella boydii
gtgctgcaaaaactctccggcgtgagcgggatcctggcgattaccgtcggcgtgccgaactcattaggcccgggcgagctgctgcaacattacggcactgacgagcagaaagatcactatctgccgcgtctggcgcgtggtcaggagatcccttgctttgcactgacaagcccggaagcgggttccgatgcgggcgcgattccggacaccgggattgtctgcatgggcgaatggcagggccagcaggtgctggggatgcgtctgacttggaacaaacgctatattacgctggcaccgattgcgactgtgcttgggctggcgtttaaactctccgacccggaaaagctgctgggtggcgcagaagatttaggtattacctgtgcgctgatcccgaccaccacgccgggcgtggaaattggtcgtcgccacttcccgctgaacgtaccgttccagaacggaccgacgcgcggtaaagatgtcttcgtaccgatcgattacatcatcggtgggccgaaaatggccgggcaaggctggcggatgctggtggagtgcctctcggtaggccgcggcatcaccctgccttccaactcaaccggcggcgtgaaatcggtagcgctggcaacgggcgcgtatgctcacattcgccgtcagttcaaaatctctatcggattgaagagccgctggcgcgtattgccggtaatgcctacgtga

SEQ ID NO: 468717 - DNA, 378 bp, Shigella boydii
atggacgaacagtggggctacgtcggtgctaaatcacgtcagcgcaggctgttttacgcgtatgacaggatacggaggacggttgtggcgcacgtcttcggtgaacgcactctggccacactggagcgtcttctgagcctgctgtcggcctttgaggtcgtggtatggatgacggatggctggccgctgtatgaatcacgcctgaagggaaagctgcacgttatcagcaagcgttacactcagcgcattgagcgacataatctgaatctgagacaacatctggcaaggctgggacggaagtcactgtcgttctcaaaatcggtggagctgcatgacaaggtcatcgggcattatctgaacataaaacactatcagtaa

SEQ ID NO: 468718 - DNA, 171 bp, Shigella boydii
atgatggcgggacttgcttcgtgttgggtagacggaatgccgtttgccgaatctgttcgtttcgcacagggatgttcgtcaatggcgctctcctgtgaatacaccaataaccccgatttatcgattgccaacgttatatcgttagtggagaacgcagaacgtctgaattaa

SEQ ID NO: 468719 - DNA, 147 bp, Shigella boydii
gtgaagtttcatttagatgaacttaaaagaatggcaacgctcgataattttgcgcgttttctcaatgagtcgtctacgaatgaaaaatgtttgtcgtgtggcgatacggatatgtacatgtatttgacgaatattgttgaggtgtga

SEQ ID NO: 468720 - DNA, 1215 bp, Shigella boydii
atggatacccaacgattccaatcccaatttcattggcatttatcgtttaaattttctggcgcgatagcagcgtgcttgtctctgtctcttgtgggaacagggcttgctaatgctgatgattcgcttccttccagtaactatgcgccgcccgccgggggaacattctttttgcttgctgacagcagttttagcagcagtgaagaggcgaaagtgcgactggaagcgccggggcgtgattatcggcgctatcagatggaagagtacggcggcgtggacgttcgcctgtatcgtattcctgacccgatggcatttttgcgccagcagaaaaacctgcatcgcattgtggtgcaaccgcaatatctgggcgacgggctgaacaatacgctgacctggctgtgggataactggtacggcaaatctcgccgcgtaatgcagcgtactttctcttctcagtcacggcagaatgtgactcaggcattacccgaattacatctcggcaatgccattattaaaccttcccgttatgtacagaacaaccagttttccccgctgaaaaaatatcccttggtggaacagttccgttatccactatggcaggctaaaccggtcgagccgcagcaaggggtaaaactggaaggcgcatccagcaatttcatctcgccgcagccgggtaacatttatattcctctcggccaacaagagccgggactgtacctcgtcgaggcgatggttggtgggtatcgggcgacgacggtggtgtttgtttccgataccgtggctcttagcaaagtgtcaggcaacgagcttctggtgtggaccgcgggtaaaaaacagggtgaagcgaagcccggctcagagatcttgtggactgacggtcttggcgtgatgacccgcggtgtgaccgatgacagcggtaccttgcagttacaacatatatcgccagaacgttcatacattctgggtaaggatgctgaaggcggcgtttttgtctccgagaacttcttctacgaaagcgaaatctacaacacccgcttgtatatttttaccgatcgcccgctatatcgcgcaggcgatcgtgtcgatgttaaagtgatgggccgcgagttccacgatccgttgcattcatcccccatcgtcagcgccccggcgaagctttcggtgctggacgctaacggcagtctgttgctgaaccgccccgggaatcctggagactaa

SEQ ID NO: 468721 - DNA, 378 bp, Shigella boydii; identical to SEQ ID NO: 468717

SEQ ID NO: 468722 - DNA, 192 bp, Shigella boydii
atgaatacagtatttgcactcgttctgacggtttttcttgtttccggtgaaccggttgacatggttactggcgtatacagctcaatgaaagaatgtatgactgccgcagcgaaacagaaaattcccggtgactgttatccggtcgataaagttattcaccatgataataacgaaatcccggcaggtctttaa

SEQ ID NO: 468723 - DNA, 846 bp, Shigella boydii
atgttgaatgtagctattgaaaaccagaacgggtggaattatagtgcacctgcacctcataaaacgggtgccgggattgctaccccgaagtcattcacggcgcataaccgcgctcaggcggtttttttatgcgtaatgcacagccacattcaaattatggtggggcgtgcggggcagtcgcaagactggccgggttccgtgatgaccggttgtagcaaccctgtacgtctcaccacccatgagattgctacctccggtggtgagttaatcaaattcatcgcggaggctgccatcatggctactaccctttctcacccttgtgtaaccgtagaaaacggtcgcgctgtcactacgtctgttgcggttgcagagttcttccacaaacgacacgacaatgtgttacgtgccatcgcaaatattgaatgctcagataaatttactgccctcaattttgaggcgagcgaatacaccgactcaaccgggcgcaaactcccaatgtaccaaatctccaaaaacggcttcgttttcctggttatgggattcactggcaaaaaagccgctgcattcaaagaagcctacattgctgagttcgaccgcatggaggccgaactgcgccagaataacaccccacctgctgacaagatgattccgggtgatggtcgcactctggttgttcacttcgacaaattcggcaatgtcgaattcaccgaaaccgttcctgatggcgcactggtctgtaccctggagactttccggttttatctggaaaaacagggatggactcttgttaaccggggcgcaattaaaaatatgactgtggaacaattactcaaaattcattgttga

SEQ ID NO: 468724 - DNA, 291 bp, Shigella boydii
ttggcttacacttgcgggccacggaatgatgagacctgtcgggaactgttagccctgttgactccgttctgtatcggcatggtgaccagcgatgactggggcagctacgccagagaagtgccgaaggagaagcacctgaccggcaaaatcttcacgcaacgtattgaacgtaacaaccggaccctccgcacccgcatcaagcggctggcacgtaaaacaatctgcttctcgcgttccgtggaaatccacgaaaaagtcatcggttccttcattgaaaagcacatattctaa

SEQ ID NO: 468725 - DNA, 123 bp, Shigella boydii; identical to SEQ ID NO: 463918

SEQ ID NO: 468726 - DNA, 1335 bp, Shigella boydii
atgagtaaagtctttatttgcgccgctattcctgacgaactggcaacaagggaagaaggcgctgtggctgtagccacagccattgaagctggcgacgaacgccgtgctcgagcaaaatttcactggcaattcctggaacattatccggctgctcaggactgcgcttataaatttattgtctgcgaggataaacctggcataccccgccctgccctcgattcatgggatgctgaatatatgcaggaaaaccgctgggatgaggattctgcttcttttgtcccggttgagactgaatccgatctgatgaacgtcacttttgacaagctggcccctgaagtacagaacgctctcatggttaagttcgacacatgtgaaaacatcaccgttgatatggttattagcgcacaggaattgttgcaggaagacatggcaacattcgacggccatatcgttgaagcgttgatgaaaatgccagaagttaacgccatgtatccggagcttaagttgcatgccattgggtgggttaagcataaatgtattcctggtgctaaatggcccgaaattcaggcagagatgcgcatctggaaaaaacgtcgtgaaggtgaacgcaaggaaaccggaaaatacacgtctgttgttgatcttgcccgcgccagagccaatcaacagtacactgaaaattcaacaggaaaaatcagcccggtcattgctgccattcatcgcgaatacaagcagacatggaaaacactggatgacgaactggcctacgctctctggcctggtgatgtggatgccggaaacattgacggcagcatccatcgctgggcaaaaaatgaagttatcgacaacgaccgcgaagactggaagcgtatctcggcatcaatgcgcaaacagcctgatgtccttcgctacgaccgccagactatttttggccttgtccgtgaacgtccgatcgacattcacaaagaccctgtggcactgaacaaatacattactgaatacctgactacaaagggcgtgtttgaagatgaaggaagaaatcagagcgcaactgatactctctcgtcgccagtaccagaaactgatgcagtggaaacggcaattccggacaacgaaaaaaccgaatgcaaagtggaagtcgaaccatctgtagagcgtgaggggccgttctacttcctcttcaccgacaaggatggcgaaaaatacagtcgcgcaaacaaactttctggtctggataaggcgctggctgccggggcaactgaaatcacgaaagaagaatattttgcccgcaaaaacggcacatacacaggttcacaacaaaatgaggtagcctga

SEQ ID NO: 468727 - DNA, 402 bp, Shigella boydii; identical to SEQ ID NO: 463160

SEQ ID NO: 468728 - DNA, 612 bp, Shigella boydii; identical to SEQ ID NO: 462151

SEQ ID NO: 468729 - DNA, 288 bp, Shigella boydii
atgagtcgtttagtcgtagtatctaaccggattgcaccaccagacgagcacgccgccagtgccggtggccttgccgttggccttgccgttggcatactgggggcactgaaagccacaggcggactgtggtttggctggagtggtgaaacagggaatgaggatcagccgctaaaaaaggtaacattacgtgggcctcttttaacctcagcgaacaggaccttgacgaatactataaccaattctccaatgccgttctctggcccgcttttcattatcggctcgatctga

SEQ ID NO: 468730 - DNA, 591 bp, Shigella boydii
gtgtgccacttcactgctatggggatgcggccaagtgagatttttcaagccaatggagttatctgggtagagggcgttagcgatcgcatttatatccggcactggctgaaactgtattgtgaggaaaacggccttgatacccctatcgaaaacgttcactatgcgttcattccttatggcggcgcaatgttaaaacactactcggcggaaagtgctaataccattcaggcactgatgatcaacaagaactgcatttttatcgctgaccgtgataatgattatgatatgaccacgcctgcgaatcccattttactgaatgctaaaacggcaaaagaagcaatccgacaaaacctacccacgtggattacgcagggttatacgatagaaaactacttacccgaaccagtgcttcgtacgtttttcgatgtaacagcggataagaccagcttgaaaaacggtaaagcgaaaatggatgttgcggcctattttgaaaatactgtctctgagtttaaagggagctataacccaaacttgaacctaccggagatgattgaattcatcattaatcatatttccgcctggaataagtag

SEQ ID NO: 468731 - DNA, 1302 bp, Shigella boydii
ttggctttttcacatcgtccaaaagaaacatttccgttaattttaaattttggcgcaacagaactggcgctgcctgttgcccgcgtctggcgacgtttcgcggcgcagcgtgatctggctcgccagtggattttacaatggccggaacatacggctagtgcacttatccctcttgtctttaccaaacccagcgataatagcgaagccgcattacttgccctgcgtttactgtacgaacagggacatggcgaattgctacaaaccgtggcaaaccgctggcagcgtacagatgtatggtctgccctggagcagttgcttaaacagggtccaatggacatttacccggcacgcattccaaaagcccctgatttctggcatccggcaatgtggtccaggcctcgacttatcactaataatcagcctgttaccggtgacgctctggaaattatcggcgaaatgctgcgctttacccaggggggacgtttttatagcgggctggaacaactgaaaacgttctgccagccacaaacgctggccgcttttgcctgggatctcttcactgcctggcaacaagcgggggcccccgcaaaagacaactgggcatttctggcattaagtctctttggtgacgaaagcacggcacgggatctgacgacacagatcctcgcctggccacaagaaggcaaatctgcccgtgctgtcagtggtctgaatatacttaccctgatgaataatgatatggcgctgatgcagctgcatcatgtatcacaacgggcgaaatcacgccccttacgtgaaaacgcagcggaatttcttcaggtggtcgcagaaaatcgcgggctaagccaggaagagttagcggacagattagtcccaaccctgggccttgatgatccgcaggcgttgagttttgattttggtccccggcagtttaccgttcgcttcgatgaaaacctcaacccggttatctttgatcagcaaaacgttcgccagaaaagcgttccccggttgcgcgccgatgacgatcaactgaaagcgcccgaggcactggcccgactaaaagggctaaaaaaagatgctactcaggtgagcaaaaacctgctcccgcgtcttgaagctgccctacgtaccacccgacgctggtcgctggcagattttcattctctgtttgttaatcatccctttacccgtctggttacccagcgattaatatgggggggttatccggcaaatgaaccgcgttgtttactcaaagcctttcgtgtggccgcagagggggagttctgcaatgcgcaagattga

SEQ ID NO: 468732 - DNA, 225 bp, Shigella boydii; identical to SEQ ID NO: 133446

SEQ ID NO: 468733 - DNA, 378 bp, Shigella boydii
atggacgaacagtggggctacgtcggtgctaaatcacgtcagcgctggctgttttacgcgtatgacaggatacggaggacggttgtggcgcacgtcttcggtgaacgcactctggccacactggagcgtcttctgagcctgctgtcggcctttgaggtcgtggtatggatgacggatggctggccgctgtatgaatcacgcctgaagggaaagctgcacgttatcagcaagcgttacactcagcgcattgagcgacataatctgaatctgagacaacatctggcaaggctgggacggaagtcactgtcgttctcaaaatcggtggagctgcatgacaaggtcatcgggtattatctgaacataaaacactatcagtaa

SEQ ID NO: 468734 - DNA, 189 bp, Shigella boydii; identical to SEQ ID NO: 467093

SEQ ID NO: 468735 - DNA, 618 bp, Shigella boydii
atgatttactctaatcaacttcgttacactggcaaagatggcgtttacttccacttaagagataatgtagatgccttcttaaccttatcagcaactgaaaacatggaatttgacagccctatgcaggtgactacacagaacatgcaatcagggcaaaccgtcacagataatgtgcaaagagcacccagaacaatcactattagtggtgtcgttgtagttggtgaatccggtagtatccttatctcacgagatactaagctggtggagaacttcatcgacactctggaaaactggcgtgaccagaagcagattatttcggtcatctgtaaagacggaattaaaattgatgattccattatcacgagctttaaagcctctaaagatgttggtatttcaaatggtctaagaatccagctaacttttcaggaaattaacttcaaagctattgtgggtcagactgatatttcggctgcaactggcaagactgctaccacgaatgatggtggtgctaccagtaaaaagaatactggcaacactacaacgagccttggaagccctatgctgacctgtaaagagctttttagctattcgggtaatgctgccaacttactgatttag

SEQ ID NO: 468736 - DNA, 684 bp, Shigella boydii
gtgagagcattctttgatgaggtgacattagcttatcgtggtttaaccgatgaacaaaagaaagttgttgatgctttaggttctggcttgattaatagtttaaaagtcttggctggtgttattgctgtgaataaagttattggtgtaaccagaagtatttacgggcttatgactgctatcacaagattaggtcaggtagctgatactacagcggataacgtgaatagaaagaatgggaaaccatcaagactaaaccctatgaatatgctattagctggtagtgctatctatgcaggttatgaaagattagcttctacacctgaacgaatggaagcacaagctaaattaccagagctggctaaagagtctggacttaaacccgctttcactatggatgatgttaaagggtggtttaatagtgctgctatgaatcttgctaacttccagcatccagaattaaacaacattaagcaagattcagcattaacgagtgcagatatccaaagcctgagagatgaaatctccgctttgagcaaacgtattcaggagcctgtgaaagtttcacttggtggtgaagttgccattaaaccagatgaaaccagctttatggcctttagcagtaatatctacgaccaatatgcagaagctacgctattaagttcatcattcccagaagatgattaa

SEQ ID NO: 468737 - DNA, 975 bp, Shigella boydii
ttggcagcattacctgtcgcctttctgacgggtattgcgggcgctcttcagactcctaccctaagtatattcctcgcagatgaactgaaagcccgtcctataatggtaggttttttcttcaccggtagcgctattatgggaattctggtcagtcaatttctggcaaggcactccgataaacaaggcgaccgtaaattactgattctgctatgttgcttatttggagtgctggcctgcacgctttttgcgtggaatcgcaactacttcattctcctctctacgggcgtacttctgagtagttttgcttctaccgcaaacccgcaaatgttcgccctcgcccgtgaacacgccgacagaacaggccgtgagacggtcatgttcagtacatttttacgtgctcagatctcgcttgcctgggttatcgggccaccgctcgcttatgaactggcaatggggtttagttttaaagtgatgtatctcaccgctgccatcgcatttgttgtttgcgggctgatagtctggttgtttttgccatcaatacaaagaaatattcctgtcgttacccaacccgtagaaattttaccctccacccataggaagcgggatacgcggctactttttgtggtctgttcaatgatgtgggcggcgaataatctctacatgataaatatgccgctatttattattgatgaactgcatctaaccgataaactggctggagaaatgattggtatcgctgccggtctggaaattccgatgatgttaatcgcaggctattacatgaaacgtattggcaagcgactattaatgctcattgctatcgtgagtggtatgtgtttttacgccagcgtactcatggcgacgactccggcggttgagctggaattgcaaattctaaatgccatcttccttggtattctctgtggtatgaggtgtactggcaatagcggacactaccatttgttctttttttaa

SEQ ID NO: 468738 - DNA, 207 bp, Shigella boydii; identical to SEQ ID NO: 24440

SEQ ID NO: 468739 - DNA, 840 bp, Shigella boydii; identical to SEQ ID NO: 462680

SEQ ID NO: 468740 - DNA, 378 bp, Shigella boydii; identical to SEQ ID NO: 465880

SEQ ID NO: 468741 - DNA, 177 bp, Shigella boydii
atggcacaagtaatctttaatgaagagtggatggttgaatacggcctgatgcttcgcactggtctgggtgccagacaaattgaagcataccgccagaactgttgggtggaaggcttccacttcaaacgagtatctcctttagggaagccagacagtaagcgagggattatctggtaa

SEQ ID NO: 468742 - DNA, 765 bp, Shigella boydii
ttgctgggcattccgctgggaacgtatttaagtcaggaatttagctggcgttacacctttttattgatcgctgtttttaatattgcggtgatggcatcggtctatttttgggtgccggatattcgcgacgaggcgaaaggaaagctgcgcgaacaatttcactttttgcgcagcccggccccgtggttaattttcgccgccaccatgtttggcaacgcaggtgtgtttgcctggttcagctacgtaaagccatacatgatgtttatttccggtttttcggaaacggcgatgacctttattatgatgttagttgggctagggatggtgctgggaaatatgctaagtggcaggatttcaggacgttattcaccactgcgcattgcagcagtgactgactttataattgtactggcactgctgatgttctttttctgcggcggcatgaaaacaacgtcgcttatttttgcttttatttgttgcgcgggattatttgccctttcagcaccgctacaaatattgttactacaaaacgccaaaggcggagagttattaggtgccgcaggtgggcaaatagcgtttaacctcggtagcgccgtcggcgcatattgcggtggtatgatgctgacgctggggctggcatataattacgtggcgctgcctgccgccctgctttcgtttgctgcgatgtcgtcgttgctgctgtatggtcgctataagcgccagcaagcggcggatactccggtgctggcgaaaccactggggtag

SEQ ID NO: 468743 - DNA, 378 bp, Shigella boydii; identical to SEQ ID NO: 468717

SEQ ID NO: 468744 - DNA, 396 bp, Shigella boydii
gtgctggcttctccggcctttaaggttaaattgtatgtgccgctggcacgtcctgcgctggcgttatggcatcgtctgcgtggtctgttttttattaattcctatgtgaaaggacgctatttgacccacgatcggcaacgggtggcgagtttcaataatgatccgctgatcacacgggcgattgccgtcaatatcttgctcgatctctataaaacgtctgaacgtattattagagatgcggcggcgattacgctccccacgcaacttctgatatcaggcgatgactatgtggtgcatcgccaaccgcagattgatttttatcagagattacgtagccctctgaaagagctgcatctgctgccaggcttttatcacgacacgttgggtgaagagtga

SEQ ID NO: 468745 - DNA, 603 bp, Shigella boydii
atgacagtaaatgataatgctaatgatgttgcagttactgagtcgtacaaacccatctggaactggaaaatatcgcaatacaatgtatttgatattaaattcgaaacaattataaacacccagttcgctgacagaatctatttctccaattgttcacctgttgatcccacaagtaccaggccgacctattttggggataccgatggttcagttggtgcagttttgtacgcgctttttgctacgggatatttgggaatcatgactgaaggagaaaatttcctttgccagttgcttactatagaagatgaagttctcaacgtattgctaagggaaaactttaatgagcaacttgacactaatattaatacaataatcagtaacctgaacagaagagataatgttttagaaagtcttcagccttatttagttattaataaagacgcagtcacgccatgtacgtttctgggcgaccaaaccggcgatcgatttagtaatatctgtggcgatcaatttatcatcgatttgttaaaacgcataatgagtatcaatgaaaatgttcatgtattagctggaaatcatgaaacgaattgcaatggtaactag

SEQ ID NO: 468746 - DNA, 627 bp, Shigella boydii
atgcaggctgtattagccagttatcagaagattatggaaattggccttcaacgtgcaagtgctgagcgttcaattgatttcgtatttgataaagatgcaggtcaggtaaaagagttcacaaagtcattagctcaaacaacgggtttagatatcgctgaactgcaatcacagtttgctggttttggtgcttcagctaaagagtctatgggtattcaaggttctgaagagctttttagaaatatgattggctattctcgtttaatgggtcgaagtgaggaagagattaagcgagcactgacagcattatcacagatggctggtaagggtcagattatggctgaagagcttaaggggcaactagctgaagctgttcctggtatggttcaggtattcgctaaagcaaccggaaagagtgaacaggaattatttgatgccatgaagaagggggctttaaaatctgccgatactcttcagaaggtcactcaggaactgaataaacaaatcacagctaaaggtggctggaaagctatttcagaaagcacacaagcacaactggggaacctgaaaaactcttggaataccacgcttgaaccgccccgagtttcctggagagtgttttatctgtga

SEQ ID NO: 468747 - DNA, 189 bp, Shigella boydii
atgaaaacgttattaccaaacgttaatacgtctgaaggttgttttgaaattggtgtcactatcagtaacccagcatttactgaagatgccattaacaagagaaaacaagaacgggagctattaaataaaatatgcattgtttcaatgctggctcgtttacgtctgatgccaaaaggatgtgcacaatga

SEQ ID NO: 468748 - DNA, 267 bp, Shigella boydii; identical to SEQ ID NO: 462029

SEQ ID NO: 468749 - DNA, 492 bp, Shigella boydii
atgcgttatgccgtacagtctggcatcatcagatataatcctgctctggatatggctggcgcattgactacggtaaaacgccagcatcgccccgctcttgatctttctcgcctgcctgaacttttgtcgcgtattggcagttacaaagggcaacctgtcacccagcttgccgttatgctgaatttactggtttttattcgttccagtgaactcagatacgcccgctggtctgaaattgatattgacaatgccatgtggactattccagccgaacgcgaacccctgccaggcgtaaaattctcacaccggggctccaagatgcgaacaccacatcttgtgccactcagcaaacaggctgtagccatactgacagaactacagacatgggctggtgaaaatggtctgatctttacgggagcacatgacccgcgtaaaccaatcagtgaaaatgtaatgaacgcatctcacacaattaaacacggagcagtatga

SEQ ID NO: 468750 - DNA, 267 bp, Shigella boydii; identical to SEQ ID NO: 462029

SEQ ID NO: 468751 - DNA, 669 bp, Shigella boydii
atggcaagaaataaaggaattgaacgagcatctggggattatattacctttttagatgatgatgattattattatcctgaaaaaatacaaaagcaattgaagttcatgattgaaaatagctatgatatttctctatgtgatatggaaatagcaaatcccttaagtaaaaaatttaagcatagaaaaaaatactctgaagcaaatggcttcaatttaaaggattttttaatagcaggtgtggcatttactcctatgattatggtaaaaaaggaagtattacttgaggttaacggctttttggatactccccgttttcaagatcatactttgatgctaaagatgttgactgttacagaaaatgttggccatttggctgagcaactatttgttcattgttctgactataccgctagaatcagtaactccccaagatctaggaaaggttttttaattaggcatgcccttgaaaaaaaaatagtaatagacaataaactttgcttgcctaaattaaggtttaatcagtgtgctcaaatttccccttatgtaaaagaaaaatttggaaaatacaagtatatttgctttatgttatggtctcttaaattctctcgaagctgccatagcgtatttttaactggatataggattatgagattatgtttaaaaaaataa

SEQ ID NO: 468752 - DNA, 378 bp, Shigella boydii; identical to SEQ ID NO: 468717

SEQ ID NO: 468753 - DNA, 225 bp, Shigella boydii; identical to SEQ ID NO: 133446

SEQ ID NO: 468754 - DNA, 225 bp, Shigella boydii; identical to SEQ ID NO: 133446

SEQ ID NO: 468755 - DNA, 726 bp, Shigella boydii
gtgctgcacacgcagggtgaagccgggctgaagcgggtggtgaaaaaggaacacgcggacggcagcgtcacgcagagtcagtttgacgccgtgggcaggctcaggacacagacggatgccgcaggccggacaacagaatacagcccggatgtggtgacgggcctcatcacgcgcatcaccacgccggatggcagggcatcggcgttttactataaccaccacagccagttaacgtcagccaccgggcctgacgggctggaaatacgccgggaatatgatgaatggggccgtctgattcaggaaactgcccctgacggcgatatcatccgctaccgttatgataatccacacagtgacttaccctgcgcaacggaagatgccaccggtagccggaaaaccatgacgtggagccgttacggtcagttgctgagcttcaccgactgttccggttatgtaacccgttatgaccatgaccgcttcgggcagatgacggcggtgcaccgcgaggaagggctgagtcagtaccgcgcatacgacagccgtggacagttaattgccgtgaaagacacgcagggccatgaaacgcggtatgaatacaacgccgccggtgacctgaccgccgtcattgccccggacggcagcagaaacgggacacagtacgatgcgtggggaaaggccatccgtaccacgcagagcagtggcagtatgacaaacgtggctggctga

SEQ ID NO: 468756 - DNA, 225 bp, Shigella boydii; identical to SEQ ID NO: 133446

SEQ ID NO: 468757 - DNA, 207 bp, Shigella boydii; identical to SEQ ID NO: 24440

SEQ ID NO: 468758 - DNA, 378 bp, Shigella boydii
atggacgaacagtggggctacgtcggtgctaaatctcgtcagcgctggctgttttacgcgtatgacaggatacggaggacggttgtggcgcacgtcttcggtgaacgcactctggccacactggagcgtcttctgagcctgctgtcggcctttgaggtcgtggtatggatgacggatggctggccgctgtatgaatcacgcctgaagggaaagctgaacgttatcagcaagcgttacactcagcgcattgagcgacataatctgaatctgagacaacatctggcaaggctgggacggaagtcactgtcgttctcaaaatcggtggagctgcatgacaaggtcatcgggcattatctgaacataaaacactatcagtaa

SEQ ID NO: 468759 - DNA, 378 bp, Shigella boydii
atggacgaacagtggggctacgtcggtgctaaatcacgtcagcgcaggctgttttacgcgtatgacaggatacggaggacggttgtggcgcacgtcttcggtgaacgcactctggccacactcgagcgtcttctgagcctgctgtcggcctttgaggtcgtggtatggatgacggatggctggccgctgtatgaatcacgcctgaagggaaagctgcacgttatcagcaagcgttacactcagcgcattgagcgacataatctgaatctgagacaacatctggcaaggctgggacggaagtcactgtcgttctcaaaatcggtggagctgcatgacaaggtcatcgggcattatctgaacataaaacactatcagtaa

SEQ ID NO: 468760 - DNA, 378 bp, Shigella boydii
atggacgaacagtggggctacgtcggtgctaaatctcgtcagcgctggctgttttacgcgtatgacaggatacggaggacggttgtggcgcacgtcttcggtgaacgcactctggccacactggagcgtcttctgagcctgctgtcggcctttgaggtcgtggtatggatgacggatggctggccgctgtatgaatcacgcctgaagggaaagctgcacgttatcagcaagcgttacactcagcgcattgagcgacataatctgaatctgagacaacatctggcaaggctgggacggaagtcactgtcgttctcaaaatcggtggagctgcatgacaaggtcatcgggcattatctgaacataaaacactatcagtaa

SEQ ID NO: 468761 - DNA, 216 bp, Shigella boydii; identical to SEQ ID NO: 5123

SEQ ID NO: 468762 - DNA, 384 bp, Shigella boydii; identical to SEQ ID NO: 51105

SEQ ID NO: 468763 - DNA, 129 bp, Shigella boydii
atggtgtatacggagaagcacatccgtatcatcagtgtgacgactgcggcgaccatccatccagtcatcggttcgtctgagaatgacgtgcaactgcgcacgcgacacccggagacaacggctgactaa

SEQ ID NO: 468764 - DNA, 378 bp, Shigella boydii; identical to SEQ ID NO: 468733

SEQ ID NO: 468765 - DNA, 225 bp, Shigella boydii
atgtcgcgtaaaggtaactgttacgacaacgctccgatggaaagcttctggggaacgctgaaaaatgagagcctgagccactatcgttttaataaccgggatgaagccatctcagtaatacgggaatacattgagattttctacaatcgtcagcgtcgtcactctcgtctggggaatatctccccggcagccttcagggaaaaatatcatcagatagctgcttaa

SEQ ID NO: 468766 - DNA, 267 bp, Shigella boydii; identical to SEQ ID NO: 462029

SEQ ID NO: 468767 - DNA, 267 bp, Shigella boydii; identical to SEQ ID NO: 462029

SEQ ID NO: 468768 - DNA, 267 bp, Shigella boydii; identical to SEQ ID NO: 463503

SEQ ID NO: 468769 - DNA, 207 bp, Shigella boydii; identical to SEQ ID NO: 24440

SEQ ID NO: 468770 - DNA, 276 bp, Shigella boydii
atggttctggaaagtcagggcgaatatgactcacaatgggcgacaatttgttccattgccccaaagattggctgtacaccggagactctgcgtgtctgggtacgccagcatgagcgggataccggaggcggtgatggcgggctcaccaccgctgaacgtcagcgtctgaaagagctggaacgtgaaaatcgtgaactgcgccgcagtaacgatatccttcgccaggcttccgcttattttgcgaaggcggagttcgaccgcctctggaaaaagtga

SEQ ID NO: 468771 - DNA, 180 bp, Shigella boydii
atgctgcagcagataatcagcgctagtagtcgtccgggtgacctgattgcagattttttcatggggtcgggttcgacagtgaaagcggcactggcgctcgggcgtcgtgcaattggcgttgagctggagactgaacgttttgagcagacggttcgggaagtacaggatttagtcgtttga

SEQ ID NO: 468772 - DNA, 1251 bp, Shigella boydii
atgtattccaataatttaaaaaagttagttactcatcctgtattactaaatatatactggttgatgtctgaaaaaattttgactgtgggtttgatattttatgcagaaggtttaatagctaaattattaactaaatatcagtatggtgaatggatatacagtttaaacttagtcacgcttatatcgtcccttgctcttatcgctggtgctgaagttgcagtaccagcattatcaaggaataaatctttaacagatgaaataataacgtccctctttaagattcggttcttttttgcactgatagcttttttggcattaaatgtatattgcgttatatttgttgagccgtctttgttaaaaaaattcataatgatgttatctgtcattattatattgaatgaacccttttcagttgtaataaattattaccaatcaataacaaagattaaatcaatagcattgctgcgattattttcattagcttgtcgaaccttttttatatggttatgttattgtttgactcttcaggcaaatttacttgctcttagtcgtgttattgaattgtttgttttggcgatatcattaatatttctttggaaatataagaagtttcgatggaaagttaaacctggtattactaagtttttatttatacgaggcgcttcgttatggccctcattggttttaatgtatttatacttaagaatggaccgtttttttgttgaacactacttatcatttgaggttttggctgtctatggtatagctgtacaattaactgagcaaacatttgttttagttaaaatgattatacagtcggcagcaccgagatacgtatatgccagaatgaatcatgctaacttattaaggaatattaaaaaattaattttatttaatgtaataatatgctcttcaatcagtgtgttatgtttttttgttttgccacttattgtaacaagtttatttggtgagaattatcagagagcagcaagtttagctattaatatgcttcctgcgctgttcttttattcaattgatagtgtgataatgcagtatttatacagagaaaagaaaagtatccttatattgtttaaatggggggcggggactatattaatgtttgtttcctattatatgtattttgattttttcgaaatgaaagcattatcgataatatataatctaaactatttctgcatgatgctattgacaataacagtttttttatgggggaggcagtatgataagtaa

SEQ ID NO: 468773 - DNA, 825 bp, Shigella boydii
atgataagtaaaaaaatagttatttttacaccgacttataacagaaaacacacattagaaagatgttatcagagtattattcagcaagattatccaggtgttgtatggcttgtgattgacgatggttcgacagataacacagagcaattagttactgagtttattaaagaaggcaagttagaaatacaatatatataccaaacaaatggaggaaagcaatctgcttggaataaagctgtccaattatgtcagaagtatgatctttttatatgtgttgattctgatgatattttatatgagaacgctctaactaaggtgtcaaagtatttctctttagttgatgaagacgatgtaataggactgcgttgcttagctatcagaaatacaaccaaaaaagctgatagtaagtttatgaataataagatacataaagactactggtttatggagataatgagtaatcagatcggtgaacgagtggatatatttaaaccgcagaaattacttgattatttatttcctgtgaacgattgcatcaaatttatacctgaaagttggatgtatgctaatatatcgaaaaaatataaatttgtttatgttcctgaacctgtgacattattttatgatgaccatgatcatctgcgattaagtaaatcctcattaaaaactaatgctaaaggtcaaaatattgcgcgtaaagcagtattaaaaaatgtgccagttaaagtttggtttaaaaatccaatttcagcattaaagaattccgcacgttatttccaaacactttattatctcgctgtggaaaaatatgaaaataaacattaa

SEQ ID NO: 468774 - DNA, 246 bp, Shigella boydii; identical to SEQ ID NO: 460696

SEQ ID NO: 468775 - DNA, 384 bp, Shigella boydii
atgaagagatcgataccgtttcgtcctacattgctcgcgctcgtccttgccacaactttcccggttgcgcacgccgccgtaccgaaagatatgctggtgattggtaaggccgccgatccacaaaccctcgccccggcggtaacaatagataataacgactggacggtgacctacccgtcttatcagcggctggttcagtacaaaacggacggtgataaaggctcaaccgacgttgaaggcgatctggcaagtagctggaaagcgtctgacgatcaaaaagagtggacgttcaccctgaaggacaatgctaaatttgccgatggcacaccggtcactgccgaagcagtaaaactctcttttgagcggctactaaaaatcggctag

SEQ ID NO: 468776 - DNA, 831 bp, Shigella boydii
atgattttttcactttggaaaacgtcttttcttggtattttacttgtattgtttcgtaaattaattagagttcaaacacgtacagcaataataatacatagctcaaaacatgctcatatatttgacaaatatgtgacaaatcttgccgtaaaactattagataatgtctattttgactcacaggaagcaaaagcattatataatattgaaggtgaaatcataagttttattttacgtaaacctgagtgcattccaaccaaggtatatgatttaaactattcttttgtttttataggtcgggttcatccggtaaaaaatatattggcagcgcttaattttattcgtctaataaaatctcagaatattaaagttattttcgatatctacgggcctgatgaaggaggattagcggaagtacaaaattatattaggaattataatctttatgatgtcgtatctataaagggacctgtcgaaggggctgcaattaagaatattttacctaactatactttctatttgcagtttagtaagtatgagggtatggcaatatctgttgtcgaagcgatgcaatatggtttgattccgtgtgtaacaaacgttggagaaattaataattattgcaaggatgattataacgcttttatatttgatttgagtaaaattaatagcgattgttatttagttgataagctattcaaaattagaacggcattagaaaacaacaatgaatatgaatatatttctaataatgctcggacaacatttttgcattcccggacatataaagaggatgtcatgagcaaagtaattcacaataaaaagaactaa

SEQ ID NO: 468777 - DNA, 1125 bp, Shigella boydii
atgaaagcagtagctttgagtgcaaatacttgctggtatttatttaatttccgaactaacaccattaaaaaactaatcagcaatggttatatggtatatattatttccggtaaagatgattacgttcataaattggaagggctgggatgtacttttatagagcttgcaataaagccaaagagtaaaaatccttttgttgatataaggacaatatttcactatattaaaattttcagagaaattaaagttgatgctgtgttgaatttcactcctaagtgtaatatttattctactatagctgcatcgttatgcaatattccatcattgaataatatttcaggacttggtgctgtattttcatcgcaagggatcgtgcgaattattacagaagcgctttacaaattcagtcaaaaaagagcaagggtagtattcttccaaaataaggatgatatgaagctttttacacaacttgtggactttagtaatgatacagatgtcatgttattacctggttcaggggtagatttaaagcgatttaaacagttgccctatgttgataaaaaagagggagttgtttttttaatgtcttcaagattattggaagaaaaaggagtaactatttactacgaggctgcaaaaaggattagaaatatatacccttctgttaacttctatttggctgggtttgtggagaaagaatgtgctaatgcaatttctgctgatgatatagaacgttggcaaaatgaaggcgcaataaaatatcttgggagtacagataaaattgaagaatttttatcaatggctgattgttttgtcttgccatcatattatagtgagggggtgccaaaatcattactcgaagcagcagcgatggggttgccaatcattacaacggataatataggttgtagggaagtaattgttcataatgaatctggatatttatgccctccacgttctgttaaaggtctttttgatgcaatggttaaatttattgaacttaagcaagaagatagaattttgatgggtaaacgagccagaataaagatagaacaagagttcaacgaagaagttgtaattgaaaaatacatcagcgcattaactaatatacttcataaacaataa

SEQ ID NO: 468778 - DNA, 420 bp, Shigella boydii; identical to SEQ ID NO: 462828

SEQ ID NO: 468779 - DNA, 645 bp, Shigella boydii; identical to SEQ ID NO: 464492

SEQ ID NO: 468780 - DNA, 639 bp, Shigella boydii
atgaaacctgtaaaaccacctcgtattaatggacgagtgccggtcctgtcggcacaggaagcggtgaattatattcccgacgaagcaacactttgtgtgttaggcgctggcggcggtattctggaagccacgacgttaattactgctcttgctgataaatataaacagactcaaacgccacgtaatttatcgattattagtccaacagggcttggcgatcgcgccgaccgtggtattagtccgctggcgcaagaaggtctggtgaaatgggcattatgtggtcactggggacaatcgccgcgtatttctgaactcgcagaacaaaataaaattattgcttataactatccacaaggtgtacttacacaaaccttacgcgccgccgcagcccaccagcctggtattattagtgatattggcatcgggacatttgtcgatccacgccagcaaggcggcaaactgaatgaagtcacgaaagaagacctgattaaactggtcgagtttgataacaaagaatatctctattacaaagcgattgcgccagatatcgccttcattcgcgctaccacctgcgacagtgaaggctacgccacttttgaagatgaggtgatgtatctcgacgcattggttattgcctag

SEQ ID NO: 468781 - DNA, 246 bp, Shigella boydii; identical to SEQ ID NO: 460696

SEQ ID NO: 468782 - DNA, 246 bp, Shigella boydii; identical to SEQ ID NO: 460696

SEQ ID NO: 468783 - DNA, 246 bp, Shigella boydii; identical to SEQ ID NO: 460696

SEQ ID NO: 468784 - DNA, 927 bp, Shigella boydii; identical to SEQ ID NO: 460216

SEQ ID NO: 468785 - DNA, 141 bp, Shigella boydii; identical to SEQ ID NO: 465328

SEQ ID NO: 468786 - DNA, 303 bp, Shigella boydii; identical to SEQ ID NO: 458125

SEQ ID NO: 468787 - DNA, 5739 bp, Shigella boydii
atgtcaaaggcaatttgttcgaatcgtgaacagagcatggtagccgttcaggcacctacgttaagccagaaagattcctcggtatcgttaagtacccagacgttgagcgcggattcccattcaaccgccacactgacttttattgcgcatgatgcagcaggtaatcctgttatcgggctggtgctctcgacgcgtcacgaaggtgttcaggacatcaccctttctgactggaaagataatggtgacggaagctatacccagatcctgaccacaggtgcgatgtctggcacgctgacgcttatgccacagctgaacggtgtggatgcggctaaagcccccgccgtggtgaatatcatttctgtttcgtcatctcggactcactcgtcaattaagattgataaggaccgttatctctccggcaatcctatcgaggtaacggtagaactgagagatgaaaatgacaaacctgttaaggagcaaaaacagcaactgaataccgcagtcagcatcgacaatgtgaaacctggtgtcactacagactggaaagaaaccgcagatggcgtctataaggcaacctataccgcctataccaaaggcagtgggcttactgcgaagctattaatgcaaaactggaatgaagatttacataccgctggatttatcatcgacgccaacccgcagtcagcgaaaattgcgacattatctgccagcaataatggtgtgctcgccaatgagaatgcagcaaacaccgtctcggtcaatgtcgctgatgaaggaagcaacccaatcaatgatcataccgtcacgtttgcggtattaagcggatcggcaacttcctttaacaatcaaaacaccgcaaaaacggatgttaatggcctggcgactattgatctgaaaagtagtaagcaggaagacaacacggttgaagtcacccttgaaaatggcgtgaaacaaacgttaatcgtcagttttgtcggcgactcgagtaccgcacaggttgatctgcagaagtcgaaaaatgaagtggtcgctgacggcaatgacagcgccacaatgaccgcgacagttcgggatgcaaaaggcaacctgctcaatgacgtcaaggtcaccttcaatgttaattcagcagcagcgaaactgagccaaaccgaagtgaatagccacgacgggatcgccacagctacgctgaccagtttgaaaaatggtgattatacggttacggcctctgtgagctctggttctcaggctaatcaacaggtgaattttatcggtgatcaaagtactgcagccctgaccctcagtgtgccttcaggtgatatcaccgtcaccaacacagctccgcaacatatgactgcaaccttgcaggataaaaatggcaacccactaaaagataaagaaatcaccttctctatgccaaacgacgtcgcaagtcggttctcgattagcaacggcggaaaaggcatgacggatagtaacggggttgcaatcgcctccctgaccggcacgttagcgggcacgcatatgatcacggctcgtctggctaacagcaatgtcagcgatgcacagccaatgacgtttgtggcggataaagacagagcggttgtcgttctacaaacatcgaaagcggaaatcattgggaatggcgtggatgagacgaccctgacagcaacagtgaaagatccttttgataacgtggttaaaaatctgtcagtagtcttccgcacctcccccgcagacacgcaactgagtctgaacgcgcgtaatactaatgagaacggtattgctgaagttacccttaagggcacggttttgggtgttcatacagccgaagccatactgcttaacggcaacagagatacgaagatagtcaatattgcgcccgatgccagcaacgcgcaggtcaccctgaacatccctgcacaacaggtggtgacgaataacagcgacagcgtgcagctgacggcgacggtgaaagatccgtcgaatcatccggtggcgggaataacggtgaacttcaccataccacaggacgtggcggcaaactttacccttgaaaataacggtattgccatcactcaggctaatggcgaagcgcatgtcaccctcaaaggcaaaaaagcgggcacgcatacggttaccgcaacgctgggtaacaataatgccagcgatgcgcaaccagtcaccttcgtggcggataaggacagcgcggttgtcgttctgcaaacatcgaaagcggaaatcattgggaatggcgtggatgagacgactctgacggcaacagtgaaagatccttttgataacgcagtaaaagatctacaggtcaccttcagtaccaaccccgcagatactcaacttagtcagagcaaaagcaatactaacgacagtggtgtggccgaagttacctttaagggcacggttttgggtgttcatacagccgaagccacactgcctaacggcaacaacgatacgaagatagtcaatattgcgcccgatgccagcaacgcgcaggttacgctgaacatccctgctcaacaggtggtgacgaataacagcgacagcgtgcagctgacggcgacggtgaaagatccgtcgaatcatccggtggcgggaataacggtgaatttcaccatgccacaggacgtggcggcaaactttaccctcgaaaataacggtattgccatcacccaggccaatggggaagcgcatgtcacgctcaaaggtaaaaaagcgggtacgcatacggttaccgcaacgctgagtaataacaataccagtgattcacagccggtaacgtttgtggcggacaaaacctcggctctggttgttcttcagatatcaaaaaatgagatcacaggtaatggcgtagatagcgcaacgctaactgcaacagtcaaagatcagttcgacaatgaggtgaacaatcttccggtaacattcagcacagcttcttcaggcctcaccctgaccccaggggaaagtaataccaatgagtctggcatcgcgcaggccactctcgcaggcgttgcctttggtgagcagacggttactgcatcactggctaatactggtgccagcgacaacaaaactgtgcactttattggcgacacaacggcggcaaaaattatcgagttgacgcctgacccaggcagcataatcgccggtaccccacagaacagcaccggtagcgtaatcaccgctacagtcattgataataatggctttccggtgaaaggtgtgactgtgaacttcaccagcaacgcagcgacagccgaaatgacgaatggcggccaagccgtaacgaacgaacagggtaaggctaccgtcacttataccaatacccgctcctcgatagaatcaggagcgagaccggataccgttgaggccagtctggaaaatggtagctccacgcttagcacatcaattaatgtcaacgctgatgcgtctacggcacatctcaccttgttacagtcacttcttgatacagtctccgcaggcgacactaccaatctgtatattgaggtgaaggataattacggcaacggtgtaccccagcaggaggtaaccctcagcgtttcaccaagtgaaggcgtgactcccagtaataacgctatatatacgaccaatcacgacggcaatttttacgcaagctttaccgctacaaaagccggggtttatcaagtgacggcaaccctcgaaaatggcgattcgatacaacaaacagtgacctatgtgccgaacgtcgcgaatgccgaaatcacgctggcagcctcgaaggatccggtgattgccgacaataacgatctcacgacactaacagcaacagtcgctgatacagagggcaatgcgatagccaacactgaagtaacatttactctgccggaagatgtgaaggcgaacttcacgctgagcgatggcggtaaagcgattactgatgctgaaggcaaagcgaaagtcacgctgaaaggtacaaaagcaggcgctcatactgttacagcatcgatgactggcggtaagagtgagcagttggtggtgaactttattgcggatacgctcagtgcgcaggttaatcttaacgttaccgaggacaactttatcgccaataacgttgggatgaccacacttcaggcaacagtgactgatggaaacggcaacccgttagccaatgaggcggtgacattcacgctaccggcagacgtgagcgcaagcttcactctcggacaaggcggttccgccattactgatatcaacggcaaggctgaagttacactgagcggtacaaaatccggtacctaccccgtgacagttagcgtgaacaattatggtgtcagtgatacgaaacaggtgactttgattgccgatgctggtaccgcaacactagcctccttaacctctgtatactcattcgtcgtcagcacgaccgagggcgcgaccatgactgcaagcgtcactgacgctaacggcaacccggtagaaggcataaaagttaatttccgcggaacctccgtcacgctaagcagcaccagcgttgaaacggatgatcagggtttcgctgaaattcttgtgacaagcaccgaagtcggactgaaaacagtttcagcctctctgacagataaacctactgaagtcatatcgcgattactgaatgcaaaagcagatattaattctgcaacgattaccagtctggagatacctgaaggtcagctaatggtcgcacaagacgtagcagttaaagctcacgtcaacgaccagtttggcaacccgattcttaatgaatctgtaacattcagtgcagagccaccagagcacatgaccatcagccaaaatattgtctctactgatacgcatggtatagccgaggtctccatgacgcccgaaagaaacggttcgtatatggtgaaagcatccctggcgaatggagcctcacttgagaaacaactggaggctattgatgaaaaactgacactcacggcgtccagtccgcttatcggtgtctatgcccctacaggcactactctgacggcaacgctaacctctgcaaatggcactccagtggagggtcaggtcatcaactttagcgtaacgccagaaggggcgacgttaagtggcggaaaagtgagaactaactcttcaggtcaggctccggtcgttctgaccagcaataaagtcggtacatatacggtgactgcatcgttccataacggcgtaacaatacagacacagacaaccgtgaaagtcactggcaactcaagcaccgcacatgttgctagctttatcgctgatccatcgactatcgccgccaccaacagtgatttaagtaccttaaaggcaacggttgaggatggcagtggtaacctgatcgaaggtctcactgtgtacttcgccttaaaaagcggctctgccacattaacgtcattaacagcggtgaccgatcaaaacggaatcgcgacaacaagcgtgaaaggagcgatgacaggtagcgtcacggtaagcgcagtcacgaccgctggtggaatgcaaacagtagatataacgctggtggcaggcccggcagacgcctcgcagtccgtccttaagaaaaatcggtcctcactgaaaggggactttaccgatagtgctgagctacatcttgttttgcacgatatatcaggcaatccgatcaaagtttctgaagggatggaatttgtgcaatctgaaccgccccgggaatcctggagactaaactccctgagaaagaggtaa

SEQ ID NO: 468788 - DNA, 492 bp, Shigella boydii; identical to SEQ ID NO: 461815

SEQ ID NO: 468789 - DNA, 171 bp, Shigella boydii; identical to SEQ ID NO: 463748

SEQ ID NO: 468790 - DNA, 246 bp, Shigella boydii; identical to SEQ ID NO: 460696

SEQ ID NO: 468791 - DNA, 246 bp, Shigella boydii; identical to SEQ ID NO: 460696

SEQ ID NO: 468792 - DNA, 246 bp, Shigella boydii; identical to SEQ ID NO: 460696

SEQ ID NO: 468793 - DNA, 471 bp, Shigella boydii; identical to SEQ ID NO: 468462

SEQ ID NO: 468794 - DNA, 291 bp, Shigella boydii
ttgattaatgttaccggcacggcaagttttgcttcggaacagctggatttgactattgatccggagagtaaagggattcggattatcacactgcgttcgccgctgtatgtgcgtgggacgtttaaaaatccgcaggctggggtgaaagccggaccgctgattgcccgtggtgccgttgcggcggcactggcaacgctggtaacaccggcggcggcgttattggcactgatctcaccttccgaaggggaggctaatcagtgtcggacgatattgtcgcagatgaagaagtga

SEQ ID NO: 468795 - DNA, 510 bp, Shigella boydii; identical to SEQ ID NO: 461065

SEQ ID NO: 468796 - DNA, 591 bp, Shigella boydii; identical to SEQ ID NO: 464517

SEQ ID NO: 468797 - DNA, 246 bp, Shigella boydii; identical to SEQ ID NO: 460696

SEQ ID NO: 468798 - DNA, 246 bp, Shigella boydii; identical to SEQ ID NO: 460696

SEQ ID NO: 468799 - DNA, 246 bp, Shigella boydii; identical to SEQ ID NO: 460696

SEQ ID NO: 468800 - DNA, 618 bp, Shigella boydii; identical to SEQ ID NO: 463365

SEQ ID NO: 468801 - DNA, 654 bp, Shigella boydii; identical to SEQ ID NO: 461169

SEQ ID NO: 468802 - DNA, 549 bp, Shigella boydii
atgtctgagcgagcgtgcgcggtccgacattcccacatcctgtcccgaaaattcccgccgtttctcggttttttgagcgtcgcagaccgcacgacaaacgaaacgaagtgtagtttgtatgagtgcgcacttcgtgaaattccccgactgccagtttgtcgatcgcgcggaacagctgtggcacgaaaacggcagaatgatttgctgtccggttgccagaactgcgcgcttacgtggagggcggcgcggcgcaaaaactgccgacattgcgccagtgttccggtggcacaaacccgcagaaatcgggacaggatgtgggaatgtcggaccgcgcacgctcgctcagacattccccacctggtcagggcttcgccccgacaccccgccaacgcctcacggcacgcgaaaaaattccgcgtaccgctcaccgttcccgaattcgtcaaacagaaaatcgcggggccccgcgcctccggcgtgggttccgattttgtgattgacgacggcacggggaaaacgctggggatggtggttggtgtcacggagtga

SEQ ID NO: 468803 - DNA, 282 bp, Shigella boydii
gtgataacagatgtctggaaatataggggcaaatccaccgagcggattgagcaagggctgtatcgtcacggggataaattgccgtcggtgcgcagcttaagtcaggagcacggcgtcagcatcagcaccgtgcagcaggcgtaccagacgctggagacgatgaagctcatcactccgcagccgcgttcgggttattttgtcgcacaacgtaaagcccagccgcctgtaccgccgatgacgcgtccggtgcagcgcccggtggaaattacccagtgggattag

SEQ ID NO: 468804 - DNA, 222 bp, Shigella boydii; identical to SEQ ID NO: 461513

SEQ ID NO: 468805 - DNA, 1062 bp, Shigella boydii; identical to SEQ ID NO: 468584

SEQ ID NO: 468806 - DNA, 1143 bp, Shigella boydii
atgagcggttggtttgacctgaccttaaatcagcgtgtttataatcaggacggtaaaacggcaaatgcggtcgttacctatgatggcaacgtgggtgagcagtataacgatgcctggtttggtgacagtgccaatgaaaatatcatgcagttcagcgatatttacctgacaacgcgaggttttttacccttcgcaccagaggcagacttctgggtcggcaaacataaactcccgcaatatgagatccagatgctggactggaaaaccttaaccacggatgtcgccgcgggtgtggggattgaaaactgggcacttggtgtagggctgtttgatatgtccttaagccgtgatgatgtcgatgtttactctcgtgatttttcgcgtaccagccagatgaataccaattctgtggatgttcgttatcgcaatatcccgttatgggatgatgcgacattatcattaatggctaaatattccgcacctaataaaacggatcaacaacaagataacgaaaatgacaacagttattttgaaatgaaagatagctggatgctgacttctgttttacggcaaaacctgcaacgcgatacgtttaatgaatttacgttacaggttgacaataattcctatgccagcagttttgccagtttctcagatgccagtaatacgatggcgcatggtcgctattactatggtgatcataccaatgggatcgcctggcgtttaatctctcagggcgagatgtatcttactgacaatattattatggctaacgcgcttgtctattctcacggcgaagatgtttatagttatgaaagtggtgctcatagtgattttgacagtattcgcactgtaataagaccggcctggatctggaatacatggaatcagacggggcttgaattaggctggtttaagcaacagaacaaaactcagcagggtgtaacactaaatgaatcggcttataaaacgacactctggcatgcattgaaagtgggtgaaagcattttaggttcacgaccagaaattcgcttctatggaacgtatatcaatattctggataacgaattatcgaattttaagtttaatgagaacagcaaagacgagtttatggccggcatccgggcggaagtctggtggtaa

SEQ ID NO: 468807 - DNA, 246 bp, Shigella boydii; identical to SEQ ID NO: 460696

SEQ ID NO: 468808 - DNA, 564 bp, Shigella boydii
gtgacagataaaaaatactccgatgatagtaaaattatactggccgtgggaagattagcataccaaaaaggatttgatcttttaataaaaaattgggcggagatttgcaacgattatcaagggtggaaactaaggatcattggttcaggtaatgatgaattgtatttaaaagaattggctaagaccttagatgtagatgaaaaagtagaatttgcagggcaaataagtaatatttctgatgaatacaataaagcatcatttttctgcatgtcatcaagatttgaaggaataggattggttttaattgaagcgcaggcatgtggattaccacttatagcttatgattgtgattgtgggccgtcagaggtaattaaaaattcagaaaatggttatttgatcccggcatttaatgatgcagcatataagaatgccatgaggaaaatgattgaaaatccatcattgagacaacagttttctaaagaatgtaagcataatgcagatgttttttctacagaaagtttttgtcaagcatggattcaattgattcagaaaataagcgagtaa

SEQ ID NO: 468809 - DNA, 246 bp, Shigella boydii; identical to SEQ ID NO: 460696

SEQ ID NO: 468810 - DNA, 123 bp, Shigella boydii; identical to SEQ ID NO: 461677

SEQ ID NO: 468811 - DNA, 246 bp, Shigella boydii; identical to SEQ ID NO: 460696

SEQ ID NO: 468812 - DNA, 246 bp, Shigella boydii; identical to SEQ ID NO: 460696

SEQ ID NO: 468813 - DNA, 495 bp, Shigella boydii; identical to SEQ ID NO: 463228

SEQ ID NO: 468814 - DNA, 207 bp, Shigella boydii
atgactagtctaaaaactagtattaagactatcacttatttaagtgatactggttgtctggagattcagggggccagtctacccgctgccgcagatattcccgtggcgagcgataacccagcgcactatgcggatgccattcgttataatgctcgaacgcctctgcaaggttctttgctgccgttaacccgtctggtttgggcatga

SEQ ID NO: 468815 - DNA, 846 bp, Shigella boydii
atgaacagtaataagagacaaactttattcttttcgcttgatcaaataatagattctggacttgtttttatttttattgctattggcggtaatttacttgacaaatcagatatggctaatgttgtgttattccaatctgttgcattagtatctgtattgttttgttcctgttttacaacgcaatatttactgttgcgctataaaaaacaatcttcacttttttggctaaagttatttttatttttttgtattattactatgttgattgtatcattatggtttcaatcggcagaaatattattcttgttttttgttggaatatcttcagaatacataaaacgatactgcttttatattaataattcttgtctctctttcttttcaacgataataacggcatttattttttttgtttttatattgatgtgttggctgaatttcatgcgcattaattcgactatatatatatatatatatagcggtgcaaagttaattccgctaacgataatatgttgttttctttttattaaaacaaagttcaatagtgatggtgaatatgaaatgccatctttatggtatgcaattactgattcattaagatttggaggcgtgttttctgttattaccattatttattggattacaaatcaaggtttctttatattctttcatgacagaatgcctgcagcagagttggtagaaattagagttacgcagaatgtgtttggtgtagttacaatgctaattgcattgtacgactctatgtttttaaagaaaaacatagagaataaaaataaaatatttgattggcgatcttattttaaattccttgcaatttcaaaataa

SEQ ID NO: 468816 - DNA, 645 bp, Shigella boydii; identical to SEQ ID NO: 464492

SEQ ID NO: 468817 - DNA, 783 bp, Shigella boydii; identical to SEQ ID NO: 462840

SEQ ID NO: 468818 - DNA, 231 bp, Shigella boydii; identical to SEQ ID NO: 468350

SEQ ID NO: 468819 - DNA, 477 bp, Shigella boydii; identical to SEQ ID NO: 460213

SEQ ID NO: 468820 - DNA, 471 bp, Shigella boydii; identical to SEQ ID NO: 463364

SEQ ID NO: 468821 - DNA, 369 bp, Shigella boydii
atgcgcgggctggaaaacgacgtttacttccaggtgggcctgttaacggtcattggtttatcggcgaaaaacgccatcctgatcgtcgagtttgctaacgagatgaaccaaaaaggccacgacctgtttgaagcgacgctccacgcctgccgtcagcgtttacgcccgattctgatgacctcgctggcatttatcttcggcgtattgccaatggcaaccagcacgggtgccggttccggtggtcagcatgcggtgggtactggcgtaatgggcgggatgatttcggccactattctggctatttacttcgtgccgctgttctttgtactggtgcgccgccgcttcccgctgaagccgcgcccggaataa

SEQ ID NO: 468822 - DNA, 5703 bp, Shigella boydii; identical to SEQ ID NO: 461817

SEQ ID NO: 468823 - DNA, 1584 bp, Shigella boydii
atgttagctcgttcagggaaggtaagcatggctacgaagaagagaagtggagaagaaataaatgaccgacaaatattatgcgggatgggaattaaactacgccgcttaactgcgggtatctgtctgataactcaacttgcgttccctatggctgcggcagcacaaggtgtggtaaacgccgcaacccaacaaccagttcctgcacaaattgccattgcaaatgccaatacggtgccctacacccttggagcgctggaatcggcccaaagcgttaccgaacgtttcggtatttcggtggctgagttacgcaaactcaaccagtttcgtacgtttgctcgaggttttaataatgtccgccagggtgatgaactggatgtcccggcacaagttagtgaaaaaaaattaaccccgccgccgggtaatagcagtgacaacctcgagcaacagatagccagtacttcacagcaaatcgggtctctgctcgccgaagatatgaacagcgagcaagcggcaaatatggcgcgtggatgggcctcttctcaggcttcaggcgcaataacagactggttaagccgcttcggtaccgcaagaatcacgctgggcgtggatgaagattttagcctgaagaactcccagttcgattttctccatccgtggtatgaaacgcctgataatctctttttcagtcagcatactctccatcgtactgacgagcgtacgcagattaacaacggcttaggttggcgtcatttcactcccacatggatgtcaggcatcaacttctttttcgaccacgatcttagccgttaccactcccgcgccggcattggcgcggagtactggcgcgactatctaaaattaagcagtaacggctatttgcgactgaccaactggcgcagcgcacctgaactggacaacgattatgaagcacgcccggccaatggctgggatgtacgcgcagaaagctggctacccgcctggccgcaccttggcggtaaactggtctatgaacagtattatggcgatgaagtggccctgttcgataaagacgatcggcaaagtaatcctcatgccataaccgctggacttaactatacccccttcccgctgatgaccttcagcgcggagcaacgccagggtaaacagggcgaaaatgacacccgttttgccgtcgattttacctggcaacctggcagcgcaatgcagaaacagcttgacccgaatgaagtcgctgcacggcgtagccttgcaggcagccgttatgatctggtggatcgcaacaacaatatcgttctggaatatcgcaaaaaagaactggttcgcctgaccctgacagaccccgtgacagggaagtcaggagaagtgaaatcactggtttcgtcgctacaaaccaaatatgccctgaaaggctataacgtcgaagccaccgcactggaagctgccggtggcgaagtggtcacaacgggtaaagatattctggttaccctgccggcttaccggttcaccagtacgccagaaaccgataacacctggccgattgaagtcaccgctgaagatgtcaaaggcaatttgttcgaatcgtga

SEQ ID NO: 468824 - DNA, 471 bp, Shigella boydii; identical to SEQ ID NO: 468462

SEQ ID NO: 468825 - DNA, 1047 bp, Shigella boydii; identical to SEQ ID NO: 459724

SEQ ID NO: 468826 - DNA, 1290 bp, Shigella boydii; identical to SEQ ID NO: 459723

SEQ ID NO: 468827 - DNA, 123 bp, Shigella boydii; identical to SEQ ID NO: 462953

SEQ ID NO: 468828 - DNA, 423 bp, Shigella boydii; identical to SEQ ID NO: 461182

SEQ ID NO: 468829 - DNA, 972 bp, Shigella boydii; identical to SEQ ID NO: 461280

SEQ ID NO: 468830 - DNA, 618 bp, Shigella boydii; identical to SEQ ID NO: 463365

SEQ ID NO: 468831 - DNA, 363 bp, Shigella boydii; identical to SEQ ID NO: 461509

SEQ ID NO: 468832 - DNA, 699 bp, Shigella boydii; identical to SEQ ID NO: 461501

SEQ ID NO: 468833 - DNA, 288 bp, Shigella boydii; identical to SEQ ID NO: 462736

SEQ ID NO: 468834 - DNA, 561 bp, Shigella boydii; identical to SEQ ID NO: 461606

SEQ ID NO: 468835 - DNA, 495 bp, Shigella boydii; identical to SEQ ID NO: 463228

SEQ ID NO: 468836 - DNA, 486 bp, Shigella boydii; identical to SEQ ID NO: 462983

SEQ ID NO: 468837 - DNA, 246 bp, Shigella boydii; identical to SEQ ID NO: 460696

SEQ ID NO: 468838 - DNA, 399 bp, Shigella boydii; identical to SEQ ID NO: 468084

SEQ ID NO: 468839 - DNA, 366 bp, Shigella boydii; identical to SEQ ID NO: 463085

SEQ ID NO: 468840 - DNA, 837 bp, Shigella boydii
gtgcaaaaaaatggcgataccttgtccggtgggcttacttttgaaaatgactcaatccttgcctggattcgaaatactgactgggcgaagattggatttaaaaatgatgccgatggtgacactgattcatacatgtggtttgaaacaggcgacaacggcaatgaatatttcaaatggagaagccgccagagcaccacaacaaaagacctgatgacgctgaaatgggatgcactaaatattcttgttaatgctgtcattaatggcagtcttggagttggttcgacgaatgcgttaggtggtagctctattgttcttggtgataatgacaccggatttaaacagaatggagacggtattctggatgtttatgctaatagtcagcgtgtattccgctttcagaatggagtggctattgcttttaaaaatattcaggccggggatggtaaaaaattcatgctatccagctccaacaactccacaaagaatgcaacgtttaatttatggggtgcttcaacccgtccagtagttgcagagttaggcaatgaggcaggatggcatttctatagccagcgaaatacagataactcggtaatattttctgttaacggtcagatacagcccagcaactgggggaattttgattcacgctatgtaaaagatgttcgcctgggtacgcgtgttgttcaattgatggcgcgtggtggtcgttatgaaaaagccggacacgcaattaccggattaagaatcattggtgaagtagatggcgatgatgaagccatcttcagaccaatacaaaaatacatcaatggcacatggtataacgtcgcacaggtgtaa

SEQ ID NO: 468841 - DNA, 195 bp, Shigella boydii
gtgcgcggtcggagcccgacaagggtttacccgcagtcggggcgtatctccgcgttagcgggccgtgagggccgtgagggccgtgagggccgtgagggccgtgagggccgtgagggccgtgagggccgtgagggccgtgagggccgtgagggccgcttacgagcgtgtactcgatacgtccagccagaggactga

SEQ ID NO: 468842 - DNA, 525 bp, Shigella boydii
atggcgctcaggagccaacgcccacctgccgggctaatccaccactctgatcgaggttcacagtactgcgcatacgattaccgggtcatacaggagcagtctggtctgaaaacatcaatgtcgcgtaaaggtcactgttacgacaacgctccgatggaaagcttctggggaacgctgaaaaatgagagcctgagccactatcgttttaataaccgggatgaagccatctcagtaatacgggaatacattgagattttctacaatcgtcagcgtcgtcactctcgtctggggaatatctccccggcagccttcagggaaaaatatcatcagatgactgctcaaaaaagaacaaatggtagtgtccgctattgccagtacacctcaaccagccagtcggtaaacagcgtaaacccttccagcatgatgttttcgcgtggcggaattaactcttcccactgttgctcatcacgcaggcgggtacggtataagccaaagtttttgccgtggcggttggaacgcagataa

SEQ ID NO: 468843 - DNA, 282 bp, Shigella boydii
gtgaccgagccaaatcaggtgtggtgcggtgatgtgacctgtatctggacgggtaagcgctgggcgtacctcgccgttgttctcgacctgttcgcaagaaaaccagtgggctgggccatgtcgttctcgccggacagcaggcttaccatgaaagcactggaaatggcatgggaaacccgtggtaagcccgtcggggtgatgttccaggcgatcaaggcagtcattatacgagcaggcagttccggcagttactgtggcgataccggatcaggcagagtatga

SEQ ID NO: 468844 - DNA, 543 bp, Shigella boydii
gtgaaagaaagcaatcagcgatggtgctctgacgggttcgagttctgctgtgataacggagagagactgcgtgtcacgttcgcgctggactgctgtgatcgtgaggcactgcactgggcggtgactaccggcggcttcaacagtgaaacagtactggacgtcatgctgggtgcggtggaacgccgcttcggcaacgatcttccgtcgtctccagtggagtggctgacggataatggttcatgctaccgggctaatgaaacacgccagttcgcccggatgttgggacttgaaccgaagaacacggcggtgcggagtccggagagtaacggaatagcagagagcttcgtgaaaacgataaagcgtgactacatcagtatcatgcccaaaccagacgggttaacggcagcaaagaaccttgcagaggcgttcgaacattataacgaatggcatccgcatagtgcgctgggttatcgctcgccacgggaatatctgcggcagcgggcttgtaatgggttaagtgataacagatgtctggaaatatag

SEQ ID NO: 468845 - DNA, 294 bp, Shigella boydii; identical to SEQ ID NO: 466223

SEQ ID NO: 468846 - DNA, 543 bp, Shigella boydii; identical to SEQ ID NO: 464540

SEQ ID NO: 468847 - DNA, 753 bp, Shigella boydii
atgaatcttaaatgggatgctttgtctgtccttgttaaagcccttttcagcagtgaagtaaaaatatcgacagtcaatgcactaaggatatttaattcatcttttggtgctatttttcgtcgttctgaagaatgcctgcatatcatcccgacacgagagaatgagggagaaaatggtgatatagggccactacgcccctttacgcttaatctcagaactggtcggataagcatggggcatggtcttgatgttacaggggatatatttgcaaaccgttttgcaattaacagtagtaccggcatgtggattcatatgcgtgaccagaatgttattttgggacgcaatgcggtatccaccgatggtgcacaggcattacttcgtcaggaccatgctgatcgcaaatttatgattggtgggctgggaaataagcaatttggcatctacatgattaataactcaaggacagctaatggcaccgatggtcaggcgtacatggataataacgggaactggctttgcggtgcgcaagttattcccggcaactatggcaattttgactcacgctatgtgagagatgtccgacttggcacacgtgttgttcaattgatgtcgcgtggtggtcgttatgaaaaagccggacacgcaattaccggattaagaatcattggtgaagtagatggcgatgatgaagccatcttcagaccaatacaaaaatacatcaatggcacatggtataacgtagcacaggtgtaa

SEQ ID NO: 468848 - DNA, 1455 bp, Shigella boydii
atgaaaatacctgaagcagtaaatcatattaatgttcagaacaatattgatcttgttgatggaaaaataaatccgaacaaagatacaaaagcattacaaaaaaacatatcatgcgtaacaaactcatcctcttctggcataagtgaaaaacatttagatcactgtgctgatactgtgaaaagctttttaaggaagtctatagcagcgcaaagttatagtaaaatgttctctcaagggaccagtttcaaatcattaaatctttctattgaagcgccatctggagcacggtcatcatttcggtcacttgagcacctcgataaggtgtccagacactatctttctgaaataatacaaaaaactcatcctctttcttcggatgaacgtcacttgctctctattattattaattctgattttaacttcagacatcaaagtaacgctaacctgtcaaataatactcttaatattaagtcctttgataaaattaagtctgagaatatacaaacatataaaaacacattctctgaggatattgaagaaatagctaaccacgattttgttttttttggggttgaaatttccaatcatcaagaaacactcccactaaataaaacacatcatactgtggattttggtgctaatgcgtatatcattgatcatgactctccatatggatatatgacattaaccgaccactttgataatgctattccacctgttttttaccatgagcaccaatcatttttcttagataactttaaagaggttgtggatgaagttagcaggtatgtgcatggtaatcagggaaaaactgatgtgccaatatttaatactaaagatatgaggcttggaattgggttgcatcttattgattttataagaaagagtaaagatcaaagattccgagagttttgttataataaaaacattgatcctgttagtctggatagaattataaactttgtgtttcagcttgagtatcatataccaagaatgctaagcacagataacttcaaaaagataagactcagagatatatctttggaggatgccattaaagcatccaattatgaagaaattaacaataaggtgactgataaaaaaatggctcatcaagctcttgcttattctctaggcaatgcaaaatctgatatggcactttatttactatctaaatttaattttacaaaacaagatatcgcagagatggagaaaatgaacaacaatatgtattgtgagctgtatgatgttgagtatttacttagtgaagatagtgccaactataaagtgctagaatattttattaataatggattggttgatgtaaacaaaagatttcaaaaagcaaatagtggggacactatgcttgacaatgcaatgaaaagcaaagattcaaaaacaattgattttttattaagaaatggagcggtatcaggtaaacgatttgggaggtga

SEQ ID NO: 468849 - DNA, 2505 bp, Shigella boydii
gtggcgtttatccgtcagcttaaagagcaggcaacccgccagaatctttcttcttctgagttgcttcgtgccagggctgcccagctgggggtaagcagtgctgcagaagtgtatatccgcaaaatggagcaggcaggaaaagccacgcattcgctgggtctgaaaagtgcagcagcccgccaggagataggcgttctgataggtgaactggcccgtggcaatttaggagcgctgaggggatccgggataacgctggctaaccgtgccggatggatagacacactgatgtcaccgaaaggcatgatgctgggcggggttattggcggtattgccgcggccgtctatggtctgggtaaagcctggtatgacggtcagaaggagggggaagaatttaaccgccagctgtcactgacggggcattatgccggagtcactgccgggcagctgtggacgctcagtcgtgctatttccgggaatggtatcacgcaacatgctgcagccggtgcgctggctcaggtggtggggagtggtgcatttcgtggaaacgatatcggtatggtggcgagagctgccgcacagatggagcgatcggttggccagtcggtcagcgataccataaatcagtttaagcggctgaaggatgatcctgtaaatgccgcgaaggctctggacaatgagctgcattttcttactgccactcagcttgagcagatacgcgtccttggggatcaggggcggtccagtgatgctgcacggatagccatgtctgcactggcagaggaaaccggtcggcgtactgcggatattgataataacctcaatgcgctgggcagtacgctgaagtatctgtctgatttatggaatcgtttctgggatgcggccatgaatattggtcgtgaagactcgctggatgaacagattgccgctttacaggagaaagtgtcgcgggcgaaaagactcccctggacggcatcatcttctcaggttgaatacgatcagcagcgtcttaacgatcttcaggagaaaaaacgccagaaggatttgcaggatgcaaaagagcaggcagagcggaattatcaggagcaacagaaacgccgtaatgctgaaaatgctgcactgaaccggatgaatgaaacggaagctgcacgacatcagcgtgaaattgcgcgtattaatgccatgcagtacgccgatcaggctgtcagggatgcggcgatacaacgtgaaaatgaacgttacgagaaagccctggcatccggtaagaaaaaaacacgcgaaacccgtaatgatgaggccacccggttattgctgcagtacagtcagcaacaggcacaggtggaaggacagattgctgctgccagacagtcagcaggcattgccacggaaaggatgacagaagcgcataaacagcttctggctctgcagcagcgcatcagcgacttggacgggaaaaaactgacggcagatgaaaagagtgtgctggcccgtaaagatgaactgattcaggcactgacgctgctggatgtaaaacagcaggagcttcagaaacagacggcactcaacgagctgaagaaaaaaacaattcagctgaccagtcaactggctgaagaagagcgcgctcagcgtcagcaacatgacctggatatcgccacggtgggtatgggtgatcagcagcgacagcgatatcaggtacaactgagtcttcgccagaaataccagcaacagctggagcagttgaggcgggatagtgagcagaaagggacatataacacggatgactacagaaaggccgagcaggcgctgacggagagcctgaaccgacaactgaatgagaatcgccgttactggcaacagcttgaagttgtgcagggtaactggaaaaacggagtcctgcgtgcatttcaggattttaccgtggatgcagataatacggcagaaacagcagaacaggtgttctcgtcagccttcagcaacatgggaaatggcctggcaacttttgtcactaccggcaaactcaatttcaaatccttcacctcttctgtgctgtcagatatggcgaaaatcctggcgcaggcaaccatgatgaaatcgataaaagggattggcagtgtactgggatttgatctcagcagcctttccctgaatgccaatggggggatttatcagtctgctgatttgagtcgttacagtggcacggtggttaaccgtccgacgttttttgcttttgcaaaaggcgcgggtgtgatgggggaagcgggacctgaagccattctgccattgcgtcgtggtgctgacggtaagctgggggttgtggcggatattgggggttcaggtatggcgatgttttccccgcagtacaacatcgagatcaataacgatggcacgaacgggcagataggtccggctgccctgaaggcggtttatgacctcgggaaaaaagcggcagcggactttatgcaacagcaggcccgtgatggtggtcggttaagtggagcatatcggtaa

SEQ ID NO: 468850 - DNA, 291 bp, Shigella boydii
atgtgtggcttttcctgcccgctccattttgcggatatacacttctgcagcactgcttacccccagctgagccgccctggcgcgaagcaactcagaagacgacagattctggcgggttgcctgctctttaagctggcggataaacgccgctttctgccgggtggcctgttcctctgcctgcgtcagggcacgggttttcgccgtgatctccgaaatcagcgccagataatcctgctgaccaaccccgccactgtttctggcctgtcggatctgctgctgaatacgctgtaa

SEQ ID NO: 468851 - DNA, 219 bp, Shigella boydii
atgaaaaaaagaaattttagcgcagagtttaaacgcgaatccgctcaactggttgttgaccagaaatacacggtggcagatgccgccaaagctatggatgttggcctttccacaatgacaagatgggtcaaacaactgcgtgatgagcgtcagggcaaaacaccaaaagcctctccgataacaccagaactgaaccgccccgggaatcctggagactaa

SEQ ID NO: 468852 - DNA, 360 bp, Shigella boydii; identical to SEQ ID NO: 463602

SEQ ID NO: 468853 - DNA, 225 bp, Shigella boydii; identical to SEQ ID NO: 462228

SEQ ID NO: 468854 - DNA, 342 bp, Shigella boydii; identical to SEQ ID NO: 463534

SEQ ID NO: 468855 - DNA, 327 bp, Shigella boydii; identical to SEQ ID NO: 5975

SEQ ID NO: 468856 - DNA, 261 bp, Shigella boydii; identical to SEQ ID NO: 467161

SEQ ID NO: 468857 - DNA, 156 bp, Shigella boydii
gtggcgcacgtcttcggtgaacgcactctggccacactggagcgtcttctgagcctgctgtcggcctttgaggtcgtggtatggatgacggatggctggccgctgtatgaaccgccccgggaatcctggagactaaacttcctgagaaagaggtaa

SEQ ID NO: 468858 - DNA, 327 bp, Shigella boydii; identical to SEQ ID NO: 5975

SEQ ID NO: 468859 - DNA, 342 bp, Shigella boydii; identical to SEQ ID NO: 463294

SEQ ID NO: 468860 - DNA, 294 bp, Shigella boydii; identical to SEQ ID NO: 25632

SEQ ID NO: 468861 - DNA, 453 bp, Shigella boydii
atgttaaaagatcaggtaaaggcattaaaagagttaaactctaaaaggggggaaccaacgaaattattaattcggaatagtgatggtcttctgcaagaagtaaaggttaatctaaaagtggtgacatttaactttggtgtaaatgaattagcgctaaaaatgggcttaggctggaggaatgttgacaagcttaatggtgaatcaatatgttctttgttgggggataatttcctcaaaaatggtgtgattggaggttgggctgcagaagctatagaaaaaaatccaccatgtaagaatgatgtgatatatctggctaaccagataaaagagattctaaacaagaagttacaaaagaatgataatggagagccgtataaattgtcacaaagaatggctctattggcttatacctgtctcttatacacatctccgagcccacgagaccgaggctga

SEQ ID NO: 468862 - DNA, 378 bp, Shigella boydii; identical to SEQ ID NO: 463319

SEQ ID NO: 468863 - DNA, 264 bp, Shigella boydii; identical to SEQ ID NO: 462791

SEQ ID NO: 468864 - DNA, 189 bp, Shigella boydii; identical to SEQ ID NO: 462626

SEQ ID NO: 468865 - DNA, 1401 bp, Shigella boydii
atgtctgatataaaccatgcaggttctgaccttatatttgaactggaggatcgccctccctttcatcaggctctcgttggtgccattacccatctgttggcaattttcgttccgatggtaacccccgcgttaatcgtgggtgcggccttacagctttccgctgaaacaactgcctatcttgtttcaatggcgatgatcgcctctggtattggtacctggttacaagtaaaccgctacggcatcgtcggttctggcctactctcaattcagtcagtcaatttttcatttgttacggtcatgattgcgctgggcagcagcatgaaaagcgacggttttcacgaagagttaatcatgtcgtcgcttctcggcgtctccttcgttggcgcatttctggttgtcggctcttcttttatcctgccctatttacgtcgggttattacgcctactgtcagcggtattgtggtactgatgatcggcttaagcctgattaaagtcggcattattgattttggtggaggatttgctgccaaaagcagcggtaccttcggcaattacgaacatctcggcgttggtttattggttttgattgtggtgatcggctttaactgctgtcgcagtccgttgctacgcatgggagggatcgctattgggctatgtgtcggctatatcgcatcgttatgcctgggcatggtggatttcagcagtatgcgcaatttgccgttaatcaccatcccacatccattcaaatacggctttagttttagcttccatcagttcctggtggttggcacgatttatctgcttagcgtgctggaagcagtcggcgatatcaccgccacggcaatggtttcccgccgccccattcagggggaagagtatcagtcccgactgaaaggcggcgtgctggcagatggtctggtttctgttatcgcctccgctgtcggttcattaccattaaccacgtttgcgcaaaataatggggttattcagatgactggcatcgcttcacgttatgtcgggcgaaccatcgcggtaatgctggttatcctcggcttatttccgatgattggcggcttcttcacgaccattccctcggcagttctgggaggcgcaatgacgttgatgttttccatgattgccatcgcagggattcgcatcatcatcaccaacggtttaaagcgccgtgaaacacttattgtcgccacttctttaggtttagggcttggcgtctcctacgatcccgaaatttttaaaatattgccagcctctatttatgtattagttgaaaaccctatttgtgctggcgggttaactgcgattttattaaatattatcctccctggtggctaccgacaggaaaacgttctgcctggtattacctcagcggaagagatggattaa

SEQ ID NO: 468866 - DNA, 378 bp, Shigella boydii; identical to SEQ ID NO: 465177

SEQ ID NO: 468867 - DNA, 375 bp, Shigella boydii
atggaagcatttaagaacctcctcaatcagttggaaattcagaaggcagaacagcgccagcgggaagcccaagaggcaaccaaacagaacgaactccgcaaggcacaggccgatctgtcactggatgaggctatcgctctgtactccacacagttggtagcctccaccggggccgcagacagcgcccagaagggccgcgccattaagagccggggaattgctctgtgtcacaaggatcagggattcagcgccaacggtcgcccggtctctctcctgaccaaatccgcagacctgccagcaggtcaccgccgggtaatcattaacaaggcagcagggcgcaccctgaaggccaccaaactggaaggggatgaataa

SEQ ID NO: 468868 - DNA, 264 bp, Shigella boydii
atggacgccgatgatttgagcgtggataaaatggcggaacttctggggatcaacagtaagatggtttccctacttcttacccaaccttcaccccgttacctggtggagcaaatgctcccgtatgaccaagtgttacagaacctccgcagcgcccgctacgtggaaagccctgtatacaaaaaagggacgagtatgcgccgtgtgcgactgatcgtttctgaagctcgtcagcaggcccgccaggcaatcattaaatcccggtaa

SEQ ID NO: 468869 - DNA, 309 bp, Shigella boydii
atggaaggcgcagaaggcaatgtgtttgtgttacgcaagacttatcagaacgagcaggcagcaagacgcgcagcggcggcaaagtggcagcagttacaacgcggagccgcatccttctccatcacgctggcgcgtggacgtgcagaactctaccctgaaatgcatggcacggtgacaggcttcaaaagtgacatcgataatcaggactggattattgcaaaagccgggcacaccattgataacagcggctttaccacacagcttgagcttgaggcaaaaatcccggaatggatagcggaaacagagtga

SEQ ID NO: 468870 - DNA, 1029 bp, Shigella boydii
atgaataaatttaaacagcattatgcgacggcaagtcgcgactacgggattattcttcccggagcacaggcttatttgccgaaggagtacgccgccgattacggactggcgatggacgcgcagcctgcgctggtcacagcggctaacagcggtatccctgcgtatttcaccaattacgttgagccagaactgatccgcgtgctggtgacgccgatgaaagccgctcagattctgggcgaaaccaaaaaaggtgactggacgacactgtcggcacaattcccgattgcagaatctgacggggaggtgagttcctacggggattacagcaacaacggggtggtaagcgcaaacgtcaactgggtaccgcgccagagctatcacttccagaccttcaccgtatggggcgaacgtgagctggagatgtacggcgcagcccgtattggctgggcggcagagctgaacgtggcgtcagcactgacgctgaataagttccagaataagtcctatttctacggtattgccggactgacgaactacggtttgctgaatgatccgtcgttatctgcaccaatcaccccggataccgttgatggtaaactgaagtgggacgacaaggacggacagggcgtgtatgacgatatcgtgaaactctttaagcaactggtgaaacagactaacggtcatattgagcgtaccgacaaaatgaaactgtgcatgtcgccgctggcagaggtgaacctcaccaaaacaaaccagtacagggttaacgtgtccgatctgctggcgaaaaatttcccggcgatgaccattgaaacggcggtggaatacacctctgacgctggcgagctggtacagcttatcgcggagcgtctgggtgaacaggatacaggctattgcgctttcactgaaaaaatgcgcgcccatgcggtagtggcagatacgtcttcctggaaacagaaaaaatccgctggtacttggggggcgattattcgccagccgctggcgtatgcacaaatgctgggggtgtga

SEQ ID NO: 468871 - DNA, 483 bp, Shigella boydii
atgaatacttttcagacacacatgaaccagtacccggcaccgggtattccgggggcgtttgccagtgctaaccctcatgcctcgtatgtggcgggagatggcgggctgattaccggccctgacgggctggtaattgcccggtttgcctgggtaaccaaaggtgttgccgctaataagggggccggcgcaccggcgggttttgttcctcgtgacgggcaggcttccattgtggaatggctggccggggactcgaacaccatttatccggggcgtgaatgcaccctgatggtgtcgggggatttctgggcgctgaccaccactactgcgacgatcgggcagaaagtatttgcctcactggccaccggggagatagccacgggggcggctggcacctcgatggcggggtttgtcgaaacctggttttccgttgccagcgctgcggcggcaaaagaagtcattaagatcagtacttggagcaaataa

SEQ ID NO: 468872 - DNA, 1350 bp, Shigella boydii
atgattattaccgaaatgctggcgtttgaccgggcatcggtaaggcagttcgataaagtcggtcgcctccagattgagcgcagtaatctcagcaaggcgaacgtctgcggttatttcgggtatgaaataccgggggcggaagcgctgggactcgaccccaaaaaactttatcagctttaccgtgaccccgatgaactgcgcaaggcagtttcaaccttcaacaatattcccgtcctgtgccgacacaaacccgattatccgggcgcgcccgcgcgcgagtaccgggtggggacgactcatgccaacagcgagtttgacggtacctatctggttaatggcatgtccatctgggacaactccgccatcgcggggatagaaacggatgaacaacgggaaatctcatcgtcatatgcctatgtggcagatatgacgccgggaaccacccccgacggtgagccgtatgacggcgttatgcggaatatcgtgggaaatcatgtggccctggtcggcgatggccgggtagggtcggactgtcttgttatggactctctccctcaggagctaaaaagcatgaaactgagtaaaaaagaagtggcggtgcttaccgcgctgggaacctatcttgcgccgcgtctggcgcaggatgcggctcccggggatttgttacgcctgatggcgcagtataagcgtccggcagctatcgccagcgcggtaaaaactgcttacagcgaacggctggcacaggatatggatattgaaccggcggagctggcgcaactgatggaatcagcagaagccgtaccggagctggtcggggatgatgataccgggttaactgacgagtcgaaggcatttgataccgacagcccgatggaaagtgtactggcgttgctgtccggcaaagttcctgatgatgtgctggaaaaaattaaatccgcactgtctccgacaaccgacgaagcccccgaaacaaaagaggctgatgtgaaacccgacgatgtgaaagtcgataaacctgcgatggatgcagcaatcaggctggcaactgaccaggcaacgaaacgggctgctgaaaatttccgcgccgtccgtgtggctgaagctgaagtgcgaccgctgattggcgatgtggtggcgatggactgcgccgaagatgtttaccgtaccgcgctggaacagacggggatcgatatccagggtattcaccccggtgcgtaccgcagcatggtgaagtttgccgttgagcagaagcagacggccaaatcctctccccgtgtggcgatggatcaggccagcgcatcgacgtttgcggcagatttccccggtgcaaaactgaaacgaggttactga

SEQ ID NO: 468873 - DNA, 771 bp, Shigella boydii
atgcagaccctgaggcggatttcacccaacgcggggattgaggcctggtaccgcagacaactggataatgccgtcagtgggatgcacaacagtgtactttactggctgcgggctgagtaccgtaaaacagacctcgcgcaggatgcgtcccccgttaacctgatgcgtggtgccatgcagcaacttgcccggcgctggcagaaaaattttgacgaaatggccctgcggctggcgaggcggtttgccggtgatgtcctgaaaaacagcgatgcgtcactgtacactgcgctccgtgatgccgggtttacggttcctttccgtatgacaacggagatgaataccgcacttcaggccagcatcacggagaatgtgaacctcattcgctccatcccgcagcaacatctcacccaggtggaaacactggtcatgcagtctgttggccggggacgtgacctgaaaacgctgaccgatgaactggaaaaacgttacggcatcacacgacggcgcgcggcgctgattgcccgcgaccagaacaataaggcaacgtcggtaatgcaggccgccagacagcgttcggtgggtatcactgaaggtgtctggaggcattcccgcgcgggtaaaacatggcgtccgtcgcatgtgaaggcgaacggtaaacggtttgacctgcgaaaggggatgtttctggatggtaagtgggtactgccgggcgaagaaatcaactgccggtgtggctgggaggccgttattcccggactggagaaaaaatga

SEQ ID NO: 468874 - DNA, 1542 bp, Shigella boydii
atgtggccgtttaaacgaaaagaaccgtcagcgccggcggtaccggacaaacaacctgaaccacagccaccggaaattaacgatgaggtgatcgcttccgtccggcagaaaccacggagggagtttgttcgctatgagccaccaccgggcgttatcccggcaccggttcgcgacgctgtgctggcaatggatgcaacaccgtatgacaccctgaacagtcattatcctgattttgtttatggtggtttcccgggctatccgtatctggcacttcaggcgcagttaccggagtaccggcgtatggtcagtgtgcttgccgaggagatgacccgtaagtggataaaggttaaggcggtcggagaaggggacgacagccacgcgtcacgcatagcgcagcttactgacgcactggagcactataacgtacaggacgttttcagactggcgattgagtacgacggctttttcgggcgagggcagatttatattgatgtgcgttcgccatcgggtatatctgcctggactgacccggcggagctgggatccggactgtttatttccgacaaaaaaatcccgaaaggttccctgctggggcttcgtgttattgaacccgtctggacgtatccgggtatatataacgcggataatccgctgagtgatgatttttaccgtccgtccgaatggtacgtaatgggaaaaacggttcacgccagccgcatgattgatctgatctcccgtccggttccggacatgctgaagccggcctacaactttggcggcctgtcactggttcagattgctgagccttatgttgataactggctgcgaacacgcgacagcgtgggcgatatgctgcattcgttttcgctgagcgggattaagacggatatgacacaggtattaagtggtaaaagggacccgaattacgcaaaacgcgcggagttgtttaaccgtacccgtgataaccgcgggctgctgatgctggacaagacgaacgaagagtttttccagttcaacactcccctgagcggcctcgacacccttcaggcgcaggcacaggaacacatgttctttgtcagtgccataccgtccgtaaaattcgccgggctgagcccaacgggactgaatgcgtcgagtgagggtgaaatccgggtgttttacgacaccattgctgcacttgccacccgtcttctgaagaaaccgctgaaaaaggtgctggatattatccagttgtctgagttcggcgatatcgatcctgatatcacgtttgaatttgaacccctgcatgagctgacgcgagagcaactggcgaatatccgtaaaactgaggcggaaacggatcagatttatgagagcaccggagcagtgaccaataacgaagtacgcgaacggctggcgactgcgcaggacagcccgtacagcggtattgacctgagcggggacatcgaaattgacgacactgaaattgacaacaccgaagaaaatccgccgcaaggcccgaatgcagaccctgaggcggatttcacccaacgcggggattga

SEQ ID NO: 468875 - DNA, 1620 bp, Shigella boydii
atgccgttaccattccccttcgattttaaacatcctgattaccagatggtttttgaatggcggatggaacgcctacagcgcattcgccagaatcctgaaatattgcctgcactaaaacagttttaccgtaccaacccggctcagttcattatcgactggggcatgacaacggacccgcgtaatattgattatggcctgccggtgaccattccgtttttactcttccctaagcaggaggagtggatccactggattatggaacgctggagcaatcgggagaatggtattaccgaaaaatcccgtgaaatggggctcagttggaccgcgatcggactggcctgctcgctttgtctcttcaacaaagaaatggttatcggtttcggctcccgtaaagaggaatacgtcgacagcaccggtgacccgaaagcattgttctggaaggcgcgcaagttcgtggaaacgctacctgtagagtttcgcggttcgtggagcgagaagaagcacgcgccatatatgcgtgttgagtttcctgaaactggcgcggttatcaaaggtgaggctggcgataatatcggtcgtggtgaccgtacgaccctttattttgtggatgaggctgcttttctccagcgaccattacttattgatgccgcgctttcccagacaacccgatgtcgtatcgatctctcatcggttaacggcatgaacaaccccttcgcacagaagcggcacagtggaaaaatcccggtgtttacgtttcactggcgtagcgatccgcgtaaagacgatgagtggtatcacaaggagtgcgagaaaattgataacccagtcatcgttgcccaggaactggatcttaattaccaggcatcagcagaaggcatcctgatcccctcagaatgggtacaggctgcggttgatgcacatatcagactgggcattcagcccggcggccaacggcttggtgcaatggatgtcgccgacgaagggcgggataaaaacgcctgttcgctccgttatggcatcctgctgaatgacgtacaggagtggtcaggtaaggggagtgacatctatgactctgtggttaaggtttttggtctgtgcgatgactttggtgccgatgagtttcgctttgatgaggacggattgggtgctggcgttcgtggtgatgcgcgcgctatcaacgaactgcgtgaagcggagggcatctgtcaaatcaccgccactccattccggggcagcgggagcgtgtttcatcctgaaaatgaagctgttcccggtgataatggtaaaccggctcgtctgaataaggacttttttgtcaatgccaaagcccaggggtggtggcatcttcgcaaattattccgcaatacatttcgtgcactacagggtatggagtatgacccggatgagattatttccatcagcagcacaatggaaaataaagaccggttgttgatggagctgtcacaacctacctggtcaaaaaatgccaccggaaaaattcttgtggataagcaacctgacggaacgaaatctccaaacctggctgattctgtgatgattgcttatgccccgatggaaatgcccatcgtaatttctgatgactttatggagtggatctga

SEQ ID NO: 468876 - DNA, 573 bp, Shigella boydii
atgactaagaagctgaaagcaaaacacgaggtgttttgtcgcgagtttcttgtcgatctgaatgctacacaagcagctattcgcgcaggctacgcctccaggcgagcacatgttacgggggctgaactatacggtaaacctgagatacgcgcccgtattaacgagctaaagcaggagcgtattgatcaactgggcattgatgcgaattatgtgctgatgcgactggttgagatcgacaggctcgatgtggctgacatcctggaggacgatttaagtattaagcctctgtctgcgtggccggaatcgtggcgtcggtacctgagtggatttaacctcgctgaaatgtttgaggggcgaggagatgacagagaaatggtcgggatccttaaaaagattaaatggcctgataaggttaaaaaccttgagttgcttgggcgccatgtttctgttcaggcgtttaaagacaacgtcaaaaatgaagtgactggcgctgacggaggaccagtcagaacagaaattaccaaattaacgcctgagcaggccgcagaggtgtatagaaaaatgatgggctaa

SEQ ID NO: 468877 - DNA, 525 bp, Shigella boydii
atgaagctgacttataagattgtcatcgcggcatttttcttctctgtctttggggcgctcgtctggtctgcaaaccattaccacagcaagtatcaggcagaaaagttgcgggctgataaagcggaaggtgaagctgaatatcaagggaaagtgatagctaatcaggcattaaacttcaatcgttttaaccagatagcagaaaacgcaagccgattaaattctctggtcgacatcggtcacgagaagacagtcatcaaataccgtgaggttttgctccgtgaaaagaactgtgatttccctgttcctgttgatattgctgtcgggttgctcaactacgcgaaccgtttacgcgccagcgcattgcactccgattccggggacattgactcagccggtgatcgtgccactaccaccagaacgttgacatattgccaggctgttctgtggattaacccactgttggcagccatcgagaaggcgaataaccagttggctggtgtccgacaaatagaacagtcccggtaa

SEQ ID NO: 468878 - DNA, 342 bp, Shigella boydii
atgaaaatgcacaatactcctcattcctggcctgacttactggaactcttacaaagttggtggcgtggagatacgccgttgggcgcagtggttatgtcaattgttatggctggtttgcgcatcgcctattttggcggtggcggcggctggaaacgaaaaacgctcgagattttgctctgtggcgctctgacgctgacttttgcatccgctcttgagtatgtcggatggcctaaatcactttctgttgcccttggtggtggtgttgggctgatcggtgtcgatgctattcgtggggctgcaatgcgagtaatcggtaacaagtttggtggctctaaggagtaa

SEQ ID NO: 468879 - DNA, 342 bp, Shigella boydii; identical to SEQ ID NO: 11692

SEQ ID NO: 468880 - DNA, 423 bp, Shigella boydii
atgcgtaatattcaacaggttttagagcgctggggtggctgggttgcgagtgaaggtggtagcgtctactttcctcctgttgcagccgggtttaagaatctgctacccgcgacgcagtctggaaggctgaaatgcagtgacaatgacggtcttatcatcaactccgctatgagctgcctgaagaaaaaagatccgtatctgtgcacgctccttgagtggcattacgtccaggccatgcccgtgcgggcgatgggtgagaagctcggcgtatctcacacccacgttctgaagaggcttcaggcggcagagggatttattgacggttgcttagccatgctggatgtggtgctcgaaatggatcagtcggttcagtcaaagcctcaggctatcaggactttgcgtaggagctgctcggcggcataa

SEQ ID NO: 468881 - DNA, 231 bp, Shigella boydii
atgaaagtttcaggattaaaaaatcatatcgacggaaataacgaaattacctgcccacgctgcgctagtaacagcgtgtttattcgcgatgtcgccatgcgagcgcataaacacgacaaaacggtagttattgacctcggctgctctgtttgcgacgacaatttccagcttgtgttatctgacgggccaaacgtcagtgttagcggccacctgacattcaacgagtattga

SEQ ID NO: 468882 - DNA, 2262 bp, Shigella boydii
atggctgataacaaaccatggggagctacgcccgatgagtggttccacttcgatctggtgttggggatgacagacaggcttttacctgtggtgtccaatccctgtgcagaactgtcgcctaatagcaagctgtctcataatttcggcaaaactccctgtcgctacaatggccaacgtaaggtcgttggtatccccgactgggctaactatgttgttacggaaaacgattttgcccggtggtcgaacgaacccgattacggtatttgcgttcgtactggcgacggggtggtggctctggactgcgatatcaatgacgccgggatgcaggagatcgtacgcaatattatcctgtcatgcctgggggaacttccgccacgtcgctggcgggctgacagtcataaatgcctgtacctgattgctgttgatggcgactaccgtaaacgtggtcaccgcctggaaggcgaaaataaacaaatagagctgctcgctaagggccagcagtttgtggcttgtggtacccatccggcaggcgaacgtattcagtgggactgcggtttgcccggcgaacctctgaaaattacatctgaacagctcgaaagcctgtggcagcgcctggcggataacttacccgtgaaagacagctataccgcaggtgcgggacgtcagcgtgacctttcctgtgttgatccttccgcgacagatgatgtcgctgactggcttgacgcgaacgggtggactctgtcagtcagctctgatggttcccgcaatctgaaaccgtttcgggatgagtcagaatacagcaacggttgcagcgaaacatccattaagtatttcccaaaagggacggggggatttgaacagggacattttaaaagcatgcacaacaccgatgcggggcttactgatgccgactggctggaaggctacggctatacgcaatccctgttcgaagatctcacggtggttgaagatggcgataagcctgaatttaccgatattaatacagatatgacagctcattttctggaacgctttatctacgtcatcgagggtgaccaggtatgtgatcttagccgaccgccatatcagtgcatgatggatatgaagtcgttcaaaaacctgatggcgccttaccagttcccgccagaagggaaagggcaaccaactcccgcaaccaaacggtggatagagcatcggcataagaagattgctgagacgacaggctataagcccggtgcgggacgtattatcgagcgtttcgacgggcggtttgagataaacgaattttatatgcctgagcatccacgtacagcggatacaagtaaggtgtccacgttccttaatcatatggcgtatctggtacctgatgcctggcagcgcgagtttttcatcgcccgtctggggtggatggttcagcgtccggagcgtcgatgcccgatttctattctgcatgtggctaccgcacatggtacgggcagaggatgggtcagccagttaatggagcgcgtgcttggtccgtggaactgtgctcgtactcgcatgaagatcctgtgcgataaccagttccatgactatctgtacaatacgcttctatgcaccattgacgaggtgcgcgaaaatgataagcggtatgaggtgaacgataagatccgcgatgtgctgacagaaccacggtttgaagtgaaccgcaaatatggcagtaaaaaaacgatggatatatacactggctttctgttctacaccaatcactttgatgcgctggcgctgccagaggaagaccgacgtatcgctgtgctggggggccctgacttcgccgcaactgaagagcattacgccagcctgtacggtgcgctaagcgacagcgactttatcgcccaggtgtactggtatctgatgggcgttgacctgtctcgctttaactggcagcgcgcccccgagacgaaagaacgccttctgatgattgaaagcaataagagcgatgtggaggctgctcttattgaaatcctggataatccgcctgtgccagcaatgacttatcaacaaattgttaacgcaatactggcagaagcaggaatggatgtagaaattaaccagaagcatattactcgcgttttgaaagaaagaacaaaacgtgaagcagtgaaactaaaagtggacggcatgactgttcgcatgtggttacttgtaaaaaataccgatttcagcaacgaagaattgcgtgaaatatataaaaattgcgaaattttgcaatctggattgtaa

SEQ ID NO: 468883 - DNA, 225 bp, Shigella boydii
atgaccagttctacccttgcttcacgtataaaggagcgccgcaaagccttaggtataacccaaacttcattggctgaaagtgttggcatgcgccagcagtctgttcaataccttgagtccggacgcgccacccgtaccggtttcatccttgaattggcaaaagttctgaaatgcgatcctgactggctattaaacggcgaaaattcagagcagcaaaaggtgtaa

SEQ ID NO: 468884 - DNA, 630 bp, Shigella boydii
atgaatcttgccaaccgagctaaaaaacgcagaacagaactaaacttaactcaggtcgaagttgcgaaacgagcgggcattagccagcagtcgattgaagctatagagaatgggaaaacacttaaaccacgcaatcttcttgctttagcgtcagctcttgaatgcgatcctaaatggctacttcttgggggcgatgttgttacagatttcaactacggagcccgaagggtgcctgttctaagctacgtacaagccggggctttcacaagcgctgagctacttcgtgaagaaggcgatttcgaatacattctcaccacggctgagctatcagaaagttcatttgcgctacgtatacgtggggattcaatggaacctgaatttaaagagggggacatcgttataattgacactgacgtataccctactcctggtgaattcgttgcggcatgtaacggtagccacgaagcaacgttcaaaaaataccgcccggtagggattggcgctaaaggtgaggaagactttgaacttgttccattgaatagtgattaccctatttgtcgctcctgggaaaaaccaattaagatcatagggacaatggtagaacatcgcatattccgcagaaaaagataa

SEQ ID NO: 468885 - DNA, 570 bp, Shigella boydii
atgtctgaagaaaaaggaattctttcccggataactgaatcgttatccggcgtgggaggagcaattaaaggcgcggttggagcagcaagagagattcagaatctgactgtcgactatgcagttaaagagaagacgcacaccttactcgataagttaatggatgttcagatgcagcaaatgtcgcttcaggagctgctgattgcggctaaggagaaaattgttgaactggaaaatgagaaagtaaagcaagagaactgggccgctgaagcggcgagctatgaactttaccagcctatgcggggtactctggtctatcgcagcaagctttctgcagatgctgaccaatctccggtttatatttgtcccaattgctacgagcaaaagagaaaatctatattgcaagcggaaggtctggttactaagccaggccttgggcgagccgttaatatggtttgttcgcactgtagggcttcctatctgttcaaccgaaatgctttagaggcccgactgccttctgaagatgaaaatccggggaaggcaatcacggattacgatccttacaaccagtaa

SEQ ID NO: 468886 - DNA, 150 bp, Shigella boydii; identical to SEQ ID NO: 11698

SEQ ID NO: 468887 - DNA, 903 bp, Shigella boydii
atgagtttagaaaccagtctcgaacttaataatcaacttctggcacaacataatgcgctgcttgaacgtcttatccgcacaatggcatcaggcattgttatgcatcctgacacgatttcacgagtgcaggaatgtcgggatacagcaactgaaactgaaaatatgtcagcggcaatgacactggatgatctggagttcagcgacgttatcgcactggctggtttctacccggtagccacccctatcacagaagacatgctgcaacgtgctgttgcctaccgtgatgctgaaggcgataaacgagttgttcagattgatgctctcgacagcgcattgcagggcgtcaaacgagccagggcgctgcttaaacctgctctcctggacctgtcccgtaacatccttaagttctgggacgacctgccaaccgtcggcgagcgacgtgcttttgccgagcagctacttgatgcacctgcggatgggcgtgatgaagttaagccgaaaaaggccagtaacaaggatggagaacgcacggggccgttttacgtcaaaaatgtatccggcacagcagccagtgaactccacaccttacgcaagttgaacgagatgctgaaaaaaggccatatcgagatcaaccgtgttgagtaccttcagctgcaggaagaatttgcacgaagagacgcagcaaattccagccagaataatgacgccaaagatgaccatacaattgatttcgcggcactacgcaaacaagctgaagggttgatcctccagttagcaaaagggggctaccgggcagaagctattgcaattctggaaaaacagggagccaggaaacttggtgaagtaacggatgaaaatctcgctgaagtaatcaccctggctgaaaaagcactggagggttaa

SEQ ID NO: 468888 - DNA, 1302 bp, Shigella boydii
atgccagacgttcacgcacaactttctccatcatcagcgcatcgatggatgcgctgcccaggaagtctggcgctggaggccacacaaccggataaagaaacaacttttgcaatcgagggcactgcagcgcacgcgcttgctgaaaaagttctacgaaacaggcaaacccacccggaacactacgccggatgcaatgtttctatgtttctcggctcatacccccttcgcgaaaatcctgatgatacatctggcccacaggtggatgatgaaatggtcgaagccgtcggccggtatgttgatacggtctggactcttgcaaagaataatgaactattggttgaacaacgtgttgatttctcacatataacgggtgtggaagaatctttcggaactgccgacggcataatcatcgctggtaacgaattacaaatccacgacctgaaatatggcaaaggcgtccgcattgatgcagaacaaaatgagcaactacaactgtatgctctgggtgcgcttgaacaattcagcatgctgtatgactttgaaactgtaagattatttattcaccaaccaaggctcaaccacgtttcagaatggtcgttaaccgtacaggaacttcagtctttcggtgaacgggcgctggaggccgcaaccagtgcgatccttgttctcaatattgctgaatgcgaaggcattgagacactaccgctggaaaacttcatacctggagaaaaacagtgccgcttctgtaaagcaaaagctatttgcactgcccagaaaatgcagcatttacaaacagcggccagcgattttgaagatctgacaaagcctgtcagcgaaataatcaccaatgccagcgcacgtgtacctctgttaaccattgagcagcttgcagagatctatagccaggccgactttattgaatcctggctaaaggcagtacgggaccgggttcacaatgaactcaatgccggacatccggtaccggggtttaaactggtaacaggaaaacaaggtaaccgggcctggagtgacgaagaggcagctcgcgcacttctgaaggatcagttcaggtacaaaactgaagaagtattcgactttaaacttattagtcccacaaaagccgaaaaacttatcaaaaaggccagtccgcgccgttggtcaaaagtcgaggcactgataacacgagctgatggtaaacccaccgtcgttcccgagtcagacccacgccccgcactcaatatcaaccctgtaaatgatttcgacgacgtatccgacgatacgctaaccgcagacctcatctga

SEQ ID NO: 468889 - DNA, 549 bp, Shigella boydii
atgaaactgaagctgaacaatgttcgtctggccttcccgtctctgtttgaagctaaaacggtaaacggcgaaggcgatccgcgtttctccgcagtatttttaatgtctcccaaacacccacaactggaagaaatccgtaaagctatgaagcaggtagcgaaggaaaaatggggggagaagtgggagtccatttataaccagctggagaaaaaactcaatctgtgcctgcatgatggtgatgaaaaagcagagtatgaaggctttcccggcaatttcttcctgaacgctgctaacaaagcgcgcccagctgttcttgatcgcgatcgttcgccactaattcaggctgatggacgtccctatgcagggtgctatgtaaacgccgttatcgatatctgggcacaggacaataatttcggtaaacgcattaatgcctcactcggcggagtccagttcctgcgagacggcgatgcattcgctggcggcggagtggcaagcgctgacgatttcgacgatatcagcgaagatgctgatgctgaagcactaatttaa

SEQ ID NO: 468890 - DNA, 774 bp, Shigella boydii
atgagtacccaactcgtattcaaatcccacattctcgaaacgatcgaacataacggcaaatcttggttcaccgctgccactctggcgaccgcgctggaatactcacgaacggactcagtcgctcgtatttatgaccgtaatcgggatgagttttcagttgaaatgacaacgaccgtcaaattgacggtcgttaggaaaaccggctccgtccaaatgaataaccgcattttctctctacgcggtgctcacctggtagcgatgttcgcaacaacgccagtagcaaaagaatttcgccgttgggtgcttgatcttatagagaaagaaaccgctattccgcagtcctccacggtactggcgccgcacagggagtgtctgccgaaaatggtttaccaccacagtagcaaatacaacccgtacagagcctacgcatggaacggagagaagaacgtttacgtcgggtgctatccaaccgtggatgaggctgtcgctgcgcagaaggacttttaccggaacggcagcacaaagcgtattcagaaagtgcagacagcaatcaatgacgcagagaaggaaatgttcatcaacaatctccgcgccatctgtcataacttccggcgcatcaatgaaatctggcgctcgcagttaatgcctgccctcgaaaaaatggattcgaaactggtttaccagttgcatgatcgtttcagcgacagcatgtgtgctctgccgaccatagaagaccgcatcggcagatatattccacccactttacctcgttaa

SEQ ID NO: 468891 - DNA, 2928 bp, Shigella boydii
ttgtctgaaaacattctatggggcgacctggaaacctattgcgaaatccctattacgaacggtacccatgcgtatgccgaaggcgttgaagtgatgctgttcgcatgggctatcaacgacgggcccgtaaacgtgtgggatatcactgccggtggtggtattccacacggcttatacgaagcaatcgcagcccctgagaccctgctttattttcataactctcacttcgaccgcaccgtcctgcgttatgcaatgccgcgactggcaccgccagtcgaacgttggcgcgacacaatggtgcaggcgctggcgcacggcctcccggggtctctgggggaactctgcgaaatactcggcgtcccgcaagacaaagcgaaggacaaagaaggtaaagcgctgatccagctgttctgtaagccacgcccgaaaaacagcaaactgcgtcgggccaccagtaaaacccacccggaagaatggcggcgctttgttgcttacgccgggctggatatcgaggcaatgcgcgaagtctataaacgtctgccgaagtggaattatcaggggacagaactggcgctctggcatcgtgatcagcagatcaacgaccggggcgtctgcatggacattcaactcgcgcgcgctgcgatcgaagcggtagaccaggagcaaaagcgcctggcaaagcgtacacaggaaatgactgatggcgaagtgcaggcagccacacaacgggacgcgttgattaagcacatcgttgaatcctacggtgtggagctaccagacatgcaacgcagtaccctagaacgtcgtatagccgaccccgatttaccatctgccgtgaaagaactgctggctatccgccagcaagccagtactaccagcaccagtaaatacaaggcactgatgaaaggcgtaagccacgacgggcgcttacgcggtacgctacagttctgcggggcgtcacgtaccgggcgctgggccggacggctattccagccccagaatcttccccgcccttcactaaaacaggaacaaatagacgaaggcatcgaagcactgaaagccggatgtgcagacctgctgtttgacaatatcatggaactaaccagttcagcgttacgtggctgcattatcgcgccaacaggtaaaaaactggtggtaagtgacttgtcgaacattgaaggccgtatgctggcatggctggcgggagaagaatggaaactgaatgcattcagagagtacgacgccggaacgggtccggacttatataaactggcgtatgcaaaagcttacggaattgaagttgagcgcgtcaccaaagaccagcgccagataggtaaagtgctggaattggcttgcatagctccggatactttagtgctcaccgataaaggctataagccgcttgttagtatttcgggcgcggatttgttatgggacggagaagaatgggtaaaacacgaaggactgatttacagggggtacaaagccttaatatcactggacggagcaaaaatgaccccggatcaccaggtgctaacccctactggatggaagctggcaaaccttatcgctttaaacaaaaatacgcttcaccaaagcctggaacttgcttcggagaacttaccgttatcaaagaactggaaaaagtacccggaaaagaccgaaggatacttgtcaaatgcaaatgtggtgcaatgcctcacaccgcaacaatcagcaatctccttaaagggaaaagtacccgatgtaacatttgcgcaaagaaaaagcataacgagtatcgtaaaaaattcttatgctatgcggatgctattgcagatgacgaaacccgtcgcaggctacttaaccgattgtctgccgcaatcagccgttgccataaacccaccaacaggttgtttcacaactacggcggtcgggggatctacgtttgtcagctatggcaggaagataaaagagcttttttgctacacgtcagggaaatcaaagggtttaatgacccaaagttggaaatggatcgcatcgacaataacaaaggctacgaaccgggtaatatccagttcgtctccaaagcagacaataaccgcaacagaagaaaaatcgcagacctgcaaaaacgtatcgacgagctggagcgatgtttacgacattgcacatgcggggcctcgaaacagattcacgattaaaaccgactcaggacatttaatcgttcacaactgcgggtacggtggtggtgtgtcggccttcatcacttttgcactggtttacagtctcgatctcgacgagctggcgaacgccgcactgccaaacattccccgcgatgttatccgcgaggcgaaaagctggtactacgaatcggttaaacgtaagtcaacctacggcctttctgaacgggtatttatcgcctgcgactcacttaaacgtctctggcgcagggcgcacccggcgacctgcgatttctggtacgaactggagcgcaccgtccgcactgcaatcgccacaccgcaaaaaacattgtattgcggttatcttaaaatccgccgcgatggcgcgtggctgcgcatacagctaccatccggacgcgctgtatgctacccgtctccggttatcgaaaaagggaatatcacctacatgggtgttaactcttattcgcgtaaatggcaacgactcaaaacctacggcggaaagctggtagagaacgtcacccaggcggccgcccgcgacgttctggccggaaacatgccgcttatcgaagatgccggttacagcattgtgctgacggtacacgacgaggtgatcaccgaagcacctgacacagaagatttcaacgataaagcgctttccgcgcttctctccactaaccccgaatgggcgcccgatatcccactgaacgctgacggttttgaggcgtaccactaccgtaaggattaa

SEQ ID NO: 468892 - DNA, 216 bp, Shigella boydii
atgtcatttaaataccgggacaatccactttattacagggctgcaagggaggctttgcgacttgaacaatccggcgaatatgaccgggcagcgaaggtctgggcaaaagccaaccgcgaatcacatcacgaactgaatcaggaatggagtgaacgcagatctgatttttgcctgatgcagaatatgcgtgaaaagcgtaaggcggtcgaagaatga

SEQ ID NO: 468893 - DNA, 300 bp, Shigella boydii
atgatcgtttacgttgccgggccgatgagcggttacgagcaatttaaccgcccggcttttcattccgcagcaaagaggctaacggacaagggatatgttgtgcttaaccccgcaactttacccaatggtttgacacaggctcagtatatggacatctgcctcgcaatgcttcgctgtgccgatacgatttatatgctcaaagagtgggagtactctgctggcgcacgtgcagaaaacgcgttggcagagaaactggaattgaatgtgctttttgaagagtgggattcagatggcctatga

SEQ ID NO: 468894 - DNA, 270 bp, Shigella boydii
atggcctatgaacgtgaaagccttatcgaaaagcacctcgtcgctgaagtgaaaaaagctggcggagtggcctttaagtttgtatctcccggtcaccgctcggtaccggatcgcattgtcctgctaccaggtggtcgtatcgttttcgttgaatgtaaatctcccggcaagccaccacggcctgaccaattgcgcgaacatgaacgtctgcgaaaactgggctttaccgtagtggtgctggatagcaaaaatctggagggaatattgtga

SEQ ID NO: 468895 - DNA, 345 bp, Shigella boydii
atgagtcgtgaagatgcacagatgaagatccgtttacctgcggagctgaaagcgcagttagaaaaagcagctctggaaaataagcggtctatgaatgcggaagtactccatcgtctcaaagaaagctttaatgttttagttcacataacatataaagattccgagggggagttatcagatagtaatacctggaagcgttttttggaatcatctgaacatggtgatgaatataaaaaaggctttgttaagcttgtcaaagaaaaatataaacttgataaggaaaatgagaggttatatagcttaattataagctatttgaaccccacaaagagtgaagatgattag

SEQ ID NO: 468896 - DNA, 177 bp, Shigella boydii
atggctattcagatcacgcagttacatcaggcagatattttcgggtatatcgcggacatgctggaaacagcaagacttctcagttcgctggaaaaaggagagcagttagcttttgaattgatttattttgcgcagcaggccgcaagggaagctgcaaacaagccgtgggatgaataa

SEQ ID NO: 468897 - DNA, 807 bp, Shigella boydii
atgaatactttaacactgataaacgataccaagcaaccaatgatgggcagccggaaaattgcagaagtcactggcaaacagcataagcatgttgtacgggatattctggctatgcttgaacagttacaaatctatagtccagatttggatgatgatgattttaaaggatttattatcaagcgcaaagaatacaagggacgtgatgtcatcgacgagatttggcttgatgaaaatctttccatgactctcgtcaccggttacgacgcaaaacgccggctggcactcatcgaacagtggcaggcgatgaagattgaattagagcaacctcgtccggcatcattaccagtgccaactcctgcaattcaggtaaacgacaacatcgttcagtttgcccgtgtcgttgcagaagctacggcatccgcaacgatgaaagcaattgtcgaagtgatggctccccggcaagttcaaaacgtaacgctttcaactctgggacatgaaaccaactgggtagaagacttaaaacaacaagtcagagagtcacaaccacacagtaacggtgaatatgtccccgtcagcaaagcagcatggaaaacaggtttatctgattcaacatgccggaaattgatcggcttcgccaggataccggtacgttcagacaccggtgttcggggattgctcgttaagctcccagcgatcgaacaagcagctcaaaagctgttaaacgaatcgacaccgccgaaaggtaaccgcaagcgctggacacatccgcagtttggcaacttcacctactacaccgatctaatctga

SEQ ID NO: 468898 - DNA, 1395 bp, Shigella boydii
atgggacaaattttcaccccccgcccgtatcaagacctgatcatcaatcaccaaatcgaaaccctgcgcggcaacatctgggcggggatgggaatgggtaaaaccgtagcaacactcaccacgctggaagatcttttcatggctggaacagaaacacgccccgcgctggtcctcgcgccgctacgcgttgcagcaagcacatggccggatgaagcgctgaaatgggagcatctgcgcaatatcgaggtacagccgattgttggtaatgccaaagcgcgctctacggcgctggcgaacagcaacgcaagcgtgttcaccatcaactacgataaccttgtctggctggttgaagaattgggagaacaatggccgttcggtactgtcattccagatgaaagcacccggctaaaatccttccggctgcgaggtggtggtaagcgcgcggcggcgctgggcaaagtggcgcataagtatgtccggcgctggataaatctcactggtacgccagcaccgaacggcctggtagatttgtggggacaatcgtggtttgtggaccaggggcaacgtctcgggcgcacttacggcgcgtttacctcacgctggttcaactcgatacagtttccggggcagagctggaccaaactggagccgtttgctcactcacaggctgaaatacagcgagcgttagccgatgtgaccctctcgctggatgcggccgactggttcgatgtcagagagcccgttcataacgtggtccgcgtggatatgccgccgaaggcacgtcagcagtatcgtgaaatggaaaaggaaatgttcctcgagctgaacggcgaaagcatcgaagcgccaaacgctgcggcaaagacgcaaaagtgtcttcaaatcgccagtggcgcagtatacacagacgacaccggaagttggtcagaactgcatgacaccaaactacaggcgctggacagcatactaaccgaagcagctggcgcgcctgtgctggttgcttatcactggaaacacgatcttgaacgcttgcttaaagcatttcctcgcggtcgtcacctcgaccaggatccacagacactacgtgactggaattccggaaagattcctgttctctttgcacacccagccagcgcgggccacggtctgaacatgcaggacggcggaaatatactggtatttttctcacactggtgggacctggagcagtatcagcaaattattgaacgtatcggccccaccaggcagatacaggccggacacaatcgtccggtatttattcaccacattattgctgccgacactatggacgaaatggtgatggagcggcgcaactcaaaacgaacagtgcaggacatcctgctcgatgccatgaaaaagagaggtatagcatga

SEQ ID NO: 468899 - DNA, 201 bp, Shigella boydii
atgagcgagaaacccgacgatttactcaccccggatgaagtatgccaaaagttaggtattacacaaaaaacgctatgtgagtggaatattaagcatcgtcatcgggctatcctggcaccaattcgtttcagtgcaaaagtagttcgttatgagcgccgaaatgtcgacgcttttattcaaaagtgtcgcagccagtattaa

SEQ ID NO: 468900 - DNA, 498 bp, Shigella boydii
atgtgcggcattttctctgccggtatgtcttttgcgatgaacgccgcaaaaccgatgcatgaagccgctgccgcactgggcgtcgatccactgtatgtcgctctgccaagctatgtcatcatcatgggcggcggcgcgatcatcaacctcggtttctgcttcattcgtctggcaaaagtgaaggatttgtcgctaaaagccgacttctcgctggcaaaaccgctgatcattcacaatgtgttactctcagcactgggcgggttgatgtggtatctgcaattctttttctatgcctggggccacgcccgcattccggcgcagtatgactacatcagttggatgctgcatatgagtttctatgtattgtgcggcggtatcgtcgggctggtgctgaaagagtggaacaatgcaggtcgccgtccggtaacggtgttgagcctcggttgtgtggtgattattgtcgccgccaacatcgtcggcatcggcatggcgaattaa

SEQ ID NO: 468901 - DNA, 720 bp, Shigella boydii; identical to SEQ ID NO: 463482

SEQ ID NO: 468902 - DNA, 141 bp, Shigella boydii
atgtcgcaaaaatcgcttacggccatcacgttctgcgtgacggcaatcctcatcatctggatgctgcacggttcgctgtgtgaaatacggatgagcttctggggagcggagtttgcggcgttcttacagtgtaaacagtaa

SEQ ID NO: 468903 - DNA, 279 bp, Shigella boydii
ttggcgcagcgttacacagtttcactgtgtaactattttcaggcgcaagcaaaaaccgctcacgaaggcagcgacaaaagcggcaaaattttaactttcgcggagaaccgaacgggtgacgtgaaactttacgtagcagagaagcgggaaatcagtagaataatcgcgggtgcctttcggctgatggtcggagggaatacccgaaggccggatgtggaaaggccccggaaaacatttctgtttaaccgaggccctaacatatctaccttaagcaagtga

SEQ ID NO: 468904 - DNA, 1689 bp, Shigella boydii
atgaaaccaattcgtgatctctgcattaacggcaggcgttatcctgtcgtggaagaaaacatcatgttgcgtctcaacggcgcgggaaccggctttatcaccattaacgccgccgacaatactcccccgctacgcggcaaacccgtagagctgtccatcggttacaacgatcagcctgtaaagtggttttcgggatatgtggaaagtgacagttgtacaggcagagggctgcacaagctgatggtgcgcgaagctgctgctattctgcaatacccgctcaacatctccatgcagcatccgacgctgaaacaggtcgcaggacacattgaaggcaatacaggtttacgcatacaactcccgaaggcaggctacaccaccactccggtccctcatctgacccacaatggcaacggttatcagctgatggccatgcttggccgcatattcagtatcccggattacgtctggtatccgtcggttgacggcatcatctacgccggaagctttgctgactgccgttttgcaaaacgccctgccagattgccggtcgatatcaccagaggtgatcacggagcaaatggctggacaatacagacgattcccatgatgcgccccggcgtggtcatgaacgatcaccgtataaatcaggtacagctacagggtgacagcatgatcattagctggagtgatggccgtcagtcgcccgtacaacgccagatcgaaaccctttaccccgagataggcaacaaaacccaccttccacgcatgggacgcgtgatctcaccaactgaaaacacaacccagggggatttgcatgatgaatttcgcccacgctacgccgtcaatgtgcagttgctcgacgagaacggcacccccgacaaggacacaccggtatataacgccgtccccgttcctgtgccaatggccggcaatgaatccgggatattccagtacccgcccgcaggaaccatagttacactggcccacgttgacggcaggccggataaacccatcatcaccggcactcacgccagcggccagagtctgccgggaataaagcccggcgaacaactacaacagcaacgcgcagaggtattccagcgtgtgcatacagatggcacatggcagcgtgaaaccgatcaggttattcgtgagaaatccaccgaccgcatcatccagaacacaacggaaacgcgcaccagtaccactcgtaatattaccgtaaaggccaacaacaccataacggtgctcggcactcataagctgatgagcggccacatacagcacatcgcagacggtgactatgccgtagccgccacgaagaaactgatacagcacgccgacaacgctgaactcgacgttactcaccagtggcaaaccagcacagaaagcgccacccacaatgtggcgaaaacgctggaagaaaagattggccggattaaaaaatccgtcgctggccagatgcaacagatcatcgccccgcaggtctggtttggcagcaataccatcaacacacttaacctcatgctggatctttgcgacaccgttcagcaactggcgcagctcaccgcacaacacactcataccaacaacgggtcgtcacagcccaccaacagcggcagcatagacacggtggcatcaatggcaggcaacctgaaagcgaagtacagtaccgtgattaagcagtaa

SEQ ID NO: 468905 - DNA, 567 bp, Shigella boydii
atgagccagaacacgacaacgccactgctggcccttaatggtcagataatcccgctaaaacgcttaagtgtcagcgtgaagctgaccatcaaagacaaagacgcttccggaaaatcctcatcaacagcgacttcagaacagggtgtaaaagccaaggagctgcagatttccggactgattccgttcacccagccggaagcactcacacgcttatttcgtctggctgaagccagagccgctaacggtgcacaacaggtttaccgcatcgccaacatggatgctaaagcggtcaatatgaagcaagggattttttccggtgccgtgggcgcaactcctgaaacaggcctgatggcatggaaagttgacttcactctgaaagaaaaactcagcagtgccgaaaaggcgacaggacgcggcccggctggcaatcagagtgctgaacagcacgcacaggccgtcaaatcaggtggcaaaggcgaaaaaaacgaagagcatggctggttctggaaaatgtcagacaaactcaataactggataggcccggcaggcaatgaaaccaattcgtga

SEQ ID NO: 468906 - DNA, 744 bp, Shigella boydii
atgtggtttccggcaaaactgatgcttccgacaggtaatatcacccccataacatgttcagctatggctgtacatccgtgggatgttgaagcggggcacattacgccagacggtgcgtatttaagccctgtcaacgcaataaaccaccttaacaacaaactcccgggcctgaccgaaaacagcgatatcgccatcataatggtaacaggcagcaataataacgattttattcgtcaactgtcagcactggcagacacactccctttacccactctgacgcagacgctaagacgcgcaagaacacagctcacccaggcaatcaccagaatgcaaatcccggcgacaccacagaacggactgcccgcgccacaaccacttattgccagcacactacagaacagcatcagtaaccacaccgcgcttaacgctatgaaggccgaagggctgaactctgtcgactcactgaaaaacgcgttatccggttttcaggcacaacgtcaacggttgcagcaacagataatcgctgaactggcaggagcaggcgataaagtggcaaaagcatttgcgttcgtgcataccggcgacgccgttttagcccgccgggaaatgatgaaaaatattccgcaccccacagcttcactgacgtatgcacacctgttcgcaggcgatctttccgggatgctgaactggataacgaaggcagaaaatgagccagaacacgacaacgccactgctggcccttaa

SEQ ID NO: 468907 - DNA, 528 bp, Shigella boydii
atgatgcacttaaagaacataaaagcgggtaacgctaaaacgccggaacagtatgagttaacaaagaagcacagagtcatctggctttacgctgaagacgggaaaaactggtatgaggaagtgaagaactttcagccagatacaataaagattgtttacgacgaaaataatattattgttgccattaccaaagatacctcaacgcttaatcctgaaggtttcagcgttgtcgaagttcctgatattaccgccaaccgacgtgctgatgactccgggaagtggatgtttaaggacggagctgtggttaagcggatttatacggcaggcgagcagcaacaacaggccgaatcacaaaaggccgcgttactttccgaagctgaatcagtcatccagccgctggaacgcgctgtcaggctgaatatggcaacagacgaggaacgcacacgactggaagcatgggaacgctacagtgttctggtcagccgtgtggacactgcaaaacctgaatggccacaaaagcccgggtga

SEQ ID NO: 468908 - DNA, 2007 bp, Shigella boydii
atgacccagagcgctatcacttcagcatttgagcgcctgaaagcgcaggaagccgcaggcggcaaccgtatcatcattgatcagtttgtatttgcaaatatcccggatctgaacattgccgacacgccgtctgaaaacgaaccattgccccccgatgcacagatagttcaccgccagaacgttgatcgcaacggaatggtaaatgagaacaccgtcgcctactccgttaccctgccggagtccacgggtgattttacttttaactggctgggtctggtaagcagcaccacaaatacactttgtatggtggtatatcttcaccctcagaaaaaaataaaaaccgcagacggcaaacagggtaataccctgatttattctgaaattatggaatacgccggagccagcgccgcaaccggcatcaccacgccagtaagcacctggcagattgattttacggcacggcttcacggcatggacgaggccacccgcaaagcggcgctggatatctacgggcctggcctgttctttaataacgcctttaaactcaccgctcaggctaccgggcaggcgaccttcgcgccgggtattgcctatctgcgcggattacgagtggagctggatgaacaaggcacactgacatacgccaccggaatttcacaaactgtttatgttgacgcggcattaaccggtaccctgaccggggaaaataaagccatattcagcctgacgagtcagaaaacagccgactataccgacagttcaggatttgcccattatgtcgaacccatcgccacaatatcagacagtggcgagatcaccgatatacgaaaaacccgcaaaccattaaatgaccgccttgatggcgaatacctgacccgtaacgggaacctgaaagaaattgctgacaaaggtgaacaggcccagtctgatgccagaaagcatatgggcctcggcgacagcgccacccttaatgttggcaccgcgcaggacactgtagccgcaggtgacgacatccgcatcacaggagcgctgcaaaaaaatcagaacggagcagatattcccgataaaccgctgtttatccagaacgttggtttacaggaaacggtaaacaaggctgataacgctgtccaaaagacaggcgataccttgtccggtggacttacttttgaaaacgactcaatcctcgcctggattcggaatactgactgggcgaagattggatttaaaaatgatgccgacagcgatactgattcctacatgtggtttgaaacggcggataacggtaatgaatatttcaaatggagacaccgcctcgctggcggccgggttaaagacctgatgaatctcaaatggaatacactaaatattctggttaatgccgtcattaatggttgtcttggaattggtacgacgaatgcgttaggtggaagttcaatcgttttaggagataacgataccgggtttaaacaaaatggcgatggtctgctggatgtttatgcgaatggacagcatgtatttcgttttcagaatggcgtggctattgcttttaagaatattcaggccggaactgccagaaaattcacgttatccagcgccaacaactccacgaaaaatgcagcgttttatttgtggggtaatccatccaggcctgttgttgcagagcttggtgatgattcaggctggcattttttcagccagaggaatacagataacagcatcacgttcgccgtaaacggacaggtaattccgttaaattacggaaacttcgatgcccgctataaatatcgaacagagggggtacaggatgtacggtatggccatgaaatgtattacagccccggcagtaacaccgtttcatggacgtttcgctcaccttcgggacacgggctgtcagggatatcgatatcggataccggccgtaactcagcggataacgtcaacggtgtgtattaccgaccgctgcaaaaactgattaatggcacctggtataacgtagcgagtatttaa

SEQ ID NO: 468909 - DNA, 573 bp, Shigella boydii
atgtctgataaatcaccggacattaagttgccgtcatggctgaatcgcggcgatgtgctccgcctgaaaaacacctttatccgtttctggggaaaggtgcacgactgggtaacatggccactgagccagaccgacccactgacatgtgcggaatccattctgaacctgacagcctggcaatatgatatagcccgttttgacggcgaaccgctcacgctgtacagaaagcgtgtcaaatatgcctttatcaacgcacaggacgcgggcagcgtggcgggattcagggcaatttttgaacgactggggatcggttatgtggagattcaggagcgccagccaggcacagactgggatgttgttcttttgcgcctgacagacaaccagatctcagaaaatacaacattactcaatcagataattcgccagtacggtcgcacctgccgccgttaccatcttcagataatcacatccacggattgtgttatcggacacggatactggcatggcagctatcactatttttatgcaccggagatgaaaaatgacccagagcgctatcacttcagcatttga

SEQ ID NO: 468910 - DNA, 1179 bp, Shigella boydii
atgcagaataatatcgacttcaaaaacatactgcgcgaaagcggaatgccggttgatgaacagaccgtacgtgacaccctgcaacaggtggcagatgatgaaaaactcatcaccaatacgtcgcgcatgtcgccattctggcggctgattcagttgctggttatcacgccgtatgtgtggattgttgacacactggctgacaatgtactgcataatctgtttctgatgactgccagagggccgttcgttgacctgttcgctgccgccctcaagcttacccgcaaggaagccacgcgtgcgatcggtaaaatcatttttaccaaaaacaaccagaatgacagtgtgaccgtaccggctggcacactgattcagacggagcgtattaacggtgtgatttattccatggcgacccgcgagcaggtaattatccccgcaggcacgcaaagcacccttattgatgtgatcgccaccgacagcggtacggcattcaatctggcaccaggctattaccagatactccccaaagcgattaacggaattgcgtctgtacgtaacggtgataactggctgaccataccgggcgcaaaccgcgaaagtgacgacgaactaaaagatcgttgccgtaaccagtttaaccttgccggcagttatcacactgacgcagtttaccgcagcctgatagctgcacaggccggactgaccatcgatcgcatcttctttttacatgacgccccgcgaggacctggtacagctaatgcctacctgctgctggataccggggttatttcgcaaccctgggttgacagcgtgaatgattacatcatggcacagggacatcacggccacggcgatgatatgcgttgttttgccatgccggaaacccgccacgatctggcggttacggtgtatgttgaaaacctttccaatatcagcaaaaacgatatcgacgccctgaaatcaggcactgaaaacctgattcgttgtgcattccgtgaaaacagtaactacgacgtaacccgcacatggccatacagtcgcttttcattctcgcaactgggacgcgaactgcatgacacctttcctctggtgggatccgtgacgttttcccttgaggatatcatcagcgatctgaacgtaccccgcctgaacacactgacagttgaggtgaagaatgtctga

SEQ ID NO: 468911 - DNA, 339 bp, Shigella boydii
atgagtacgaaatcactttatatcgacctgctcattactgacggcgatcttacgttcaactccgccagtgagccggtcttgtgtgacaaccgccagagtattgctcaggacatgattcacgccctgattgaaagtggtctgccctgtcgtctgattgcggagaacagccccacactcagggccgacctgttcacgcaaatggtgatactcctggaggaggatgaacgcctcattcccggctccgtatttattgacgaagagcaacgcggccagctccttgttaccgccgatacctacgattttggtcagttaagccaggggatgcgctatgcagaataa

SEQ ID NO: 468912 - DNA, 2082 bp, Shigella boydii
atggctgctgaacttgattttacgctaagtctggttgataagctgacgagacccttaaaacaggcgcaatcggctgtgaccggatttgctgacaaggcaacagccgactttaaacgtctcggttttggtgtggccgggttatggggtgctgctcagggaataaaaggactggtcaaccccgcccgcgacatggaagccgcgctggccgaagtcagctcgctggatgtggcaaataaaacactcgatcagctgcgtaaaacttcacagacgtttgccattaactacggcgaaagcgccagcaatttcgtccgcagcgcctacgatatccagtccgccatcgcaggacttcagggcgatgaactgccaaaatttactgaagcatccgccattctcgccaaagccaccaaatcagacacggccaccattactaactatatgggcaccatgtacggtgtttttaaaaataccgcagagaagatggggcgcacgcagtgggttgaacaaattgccgggcagaccgcaaccgccgttcaggtgttcaaaactaccggtaatgaaatgtctgctgcctttactgcgctgggtgccaacgcgcaggcaatgaaggtatctgccgctgaacagttcgccgtactgggacagctccagtccaccatgtcaggcagcgaggcgggaaccaaatataaatcattcctggcggggattgggaatgcgcaaaaagtgctggggctgaactttaccaaccgggacggcagtgccagaagcattaccggcatcatcgatctgattaaaggaaagtttggtgatctgtcaaaagtggcagatgcagacctgctgaaaaaagcctttggcagcgatgaagcggtgtccatgattaaactactggccggagatgttgacgggctgaaacggaacatcaatacattaggtaacatcaaaggcatggataaagccatcgaaatggcgaaaaagatggttgacccgtgggatcaggttaattctttactggagcaggttcgcgtcagtatcggtctgcggctcgatcccgtctttgccccgttcctgcaaaaaatcatcactggcgggaaagccttcatgaaatggctggatacgttccccaatattgcccgctggctgggatatatcactgcaatgaccctcgcctttgccgcagcaggggcgcttgccagtatcacgatgggggccttcggctttatcatgaccgggctcagcggaattgctggcgtgctgaaaggcgcatggaaaggactaatcttcaccctggatttattacgcccctccctgctttcaacccgtcttggcctgatggggctatggattcaggaaaaagccgtctgggtgtggtcaaagctggtcgctctttgggcagggatctgtaaagcagcgatcgtagcctggaacgtagtgttacgtgcgggcgcggttgcaatgcgcctgtggggcgtggcgacggcattcgcaggcggtgcgcttcaactcctgataagtcccataaccctgattattctcgccattgccgcacttgccgtagggatctgtctggctatcaaatactgggacagtattaaagccgccatcatggacacggaagctttcagtgccctgctaaaagtcattaacgctgtggtgggctggtttgatgatgcatggaacagcattaaagccggatgggacaatctgacgaactggtttaaaaatttctcgctggccgacacattcggcaatatcacagctggaattggcaagctctttgacggcatatgggattccattaagagcgcctttaccgggacatggaactggatagcagagaagctcaacaaaatccccggtgtcaatatcagcaccgcacaacagaccgtcgcaccgacacccgccccggagcttatcactggcaaccgtagcgccgccatccagggcgggccggtaagtcaccagataagcaacaaccggggcgacaaagtcaccaataacaacgttaagcaggatatcacactgcacgttgacaccctggcgacaccgggacaactggcggaatacagcgaactggcagcggggtga

SEQ ID NO: 468913 - DNA, 273 bp, Shigella boydii
atgaaagacgaaaataccaccatcatcaccctgaccgtcgcaggcgaggatattcgcttcgccccgaccgaagctgtctacaacaagttcgtgaatgaaataacgatggataacaaggtagcaccagccaaaaactacctgatgcgctgcgtacacccggaagacaaagagaaactggagaagctcattcaccgcccgggagcagcccttcagatggcagcaaaactcaatgaagattttgccgtcaatctggatatcaccgtaaaaaaataa

SEQ ID NO: 468914 - DNA, 465 bp, Shigella boydii
atgaaacgcgcaacgctcgcctttatcgtcttcatggtcgtcgccgtggccgtgctcggcttcacggctgaccactggcacaaccgcttcaccagggcagaaaaagcccgccagaaagccgtaaagcttgccgacacccgacagcagaccattgacgacatgacactgcgtcagcgccagaacgccgcgcttgatgcgaaatacacaaaggagctcgccaatgcaaaagctgaatccgaaaagttacgcgccgatcttgcttctggccgtcgccggttgcagctccacgccgtctgtatgcccgccgccacgcgtgataccaccgccaccggctcaactgatgcaaccgccgcccgacttactccggacgctgaacgggattatcagcatctcagagccgaagcgaaagccgtcgttgcacaagtgaacggcctgcaacagtacattactgaacaatgtcattaa

SEQ ID NO: 468915 - DNA, 444 bp, Shigella boydii
atgaaaatttcagacaacgggctgaccgcacttaaacgcgaagaaaactgcaaactgaccgcttaccccgacccgcgcggcgtatggaccattggtacaggtcacacaggaaaggttgatggtgtcgcagttcacaagggcatgaccatcactcaggacaccgccgacagactgctacgcgacgatctgtcatgggtggagcactgcatcgctgaacgggtaacagttccgctgaaccagagtcagtatgacgcgttgtgtagcctgattttcaatatcggcgctgacgcttttatcggttccaccgttcgccgtcagttaaacgccggcaactacaccgccgccgctgatgctttcctgaaatggagccgcgcaggcagtaacccgacaattctggccccgcgtcgcggacgtgaacgggcaatgtttctgggacagaggtaa

SEQ ID NO: 468916 - DNA, 339 bp, Shigella boydii
atgcaaagccctccccacaactggagcgactggctggcgataatcaaagactggttacgtggtgatatccctcttgacagtctactgatgactgccgtcattgcagcactcagagtgttttacacaggccgcagctggcgtcgtcttttgcttgaggtgccgttgtgttgcctgctggccgtggcggcattcaccctcatcaagccggtccccgtcgcatggctggccgaagactggcgcgtcggtatcggtgccgcaattggccttattggtgttgaacatatccgggcactgggtgtgttcatcacaaagaaatttgcagggaaaaatgacgaatga

SEQ ID NO: 468917 - DNA, 462 bp, Shigella boydii
atgagcaccgaacgcatcagtggcatgagctttgacgtgtcatttaatggccgcatcgttcacgtaaaaactgccacccttgatattaccgacaacaccaaagccatccaggagcgcggtgtacctgatggctgggtacgcggcgacgtggaagctggcggtgaaattgaactggataccgttaacttccagcttcttggcgaagccgcgcgtgaagcagggagctggcgcgacatcgaagaagccgactttctcttctttgcccgtgcagcaaagacagaactcagggtggaagcctttggttgcaaactgctgatcagtaacctgctgagtatcgacagcaagggcggtgacaacataagccataaaatcaaatttatggtgacttcgccggagttcgtcaaaattgacggtgttccggttctcagcgccaccgatgttcgggacatcatgaaccaatag

SEQ ID NO: 468918 - DNA, 1125 bp, Shigella boydii
atgacgtttccacaggtcacgattaatcagctcaacacccacagcggaagcaagcgtgggatcgcctgcaccctgctgatggtgggcgagcacacaaaagccattctcccgacaccggttacagcacaaaccgatcttgactcgctgctaggaacaaaggattcattgttgcgcagtaacgtgcaggcgtttctggataatgccggacaaaatgccatgatctggctggcaaccgtgcagacaccccagccttctggtcggacccgaacgtgggttgatgtggttatggatgcacaggccaccctctcggtggaaggcgttgtcgttgttcgcgctaacgcctcaggtgacgatatcaacaaagcgcagcaactgcgcagcgaactcaataacaccttccagcgctggacatggtttatcctggctgttcgcggctgcggaacaggcgagaagtggtcagaatacgtcaccgccataaccggactacagaaagacattgccgcttacgcggtgcagcttaccccgatgctgttcggcaatgagccggggatactggccggtcgcctttgcaatccgtcagtgacgatcgctgattcccccgcccgtgttgcaaccggcgcactggtcaatatgggccgcaacgataaaccgcaggacagcgacaagcgcgaactggacactgccaccatcagggccctgaacagggcgcgtttcagcgtaccaacgtggtatcccgactacgaaggttactactgggccgacggcgtcacgctcgatgtggacggtggcgattatcaggctatcgaatatctgcgcgttgccgatgaaatggcccgtcaggtgcgtttgctggctatcccaaaaatcgccgatcgctcactgaactccaccccggcaagtgtggccgcgcaccaacagctttttgcgaagcccatgcgcgacggcgcaaagagcctgaaaatcaacggcacggtattccctggcctttgcatgtcaccgcgcgacggcgacgtaaaaatctcatggccggaaaaagacaaagtgcagattgcgatcgtggttcgcccgtataactgcccgaaagaaatcaccatcagcatcatgctggacgaaagcggagagtaa

SEQ ID NO: 468919 - DNA, 729 bp, Shigella boydii
atggacatctccctgcacggcgaacttaaccggacgcagcttaagcaactgcagacaatgctggccaacggtgagatccccccggcaaaacgacagcgtctgctgcagcgtatcgcaaaacgcggcgttattccggccgcaaagcgccatgttcgcgaacaaaagaatgttgatggcagcagttttgcagaacgccgctacggcaacagaccgctgctgaaggggctccctaaatttctgaaagtgcacgacatgccatcagcagaatcggtgcgtatatacgcagcaggcaggagctatcgccagccccacaatcacagggaaatcagcgtaggtgcagtgggatatatccagagccatggcgttacgttcacagtgaacgcatcgcagctgaaaaccgacgcgatggaaaaagccaataaggaaccctgctcccgccgtcaggcgataaagctgcgcaagctgggctatacggtgagcggcaaaaaaaaggggacgcgccgcaaaccatcaacggcagatatccggacgtcgctcacgaaagggcaggcaggcgtgattatccgcagcatggaaggcataccatccaaaagctgctggacgataaccatcccaccccgtcagttccttggtgtcagtaacgaggaatttgcacggatactgtcccgccagttgcagggcattaattatggctggcagacaaagccgcaggacattaagaggaaataa

SEQ ID NO: 468920 - DNA, 480 bp, Shigella boydii
atgagccagttcgacagcctttatgcatatctgcggcaggcgtttgacatttccgtgtttgacaataccggctttgattcgtggatgagtgatattcgtcttttgcccgctgagaaagacatggggcttggacagataagaatgggtattcgccagtacaacgccgtgttcgactggcagcgctggccatggcgtcaggttgaccctgatttgctgttatgcgccctgcttgtctggcgggacgaacaggctaatgactactacagccagcttgagcttgatgcgccggatgtcaacatcgaacccacggacgacaacattgcagaagtgactgtcagtatgcctctcgctgaccccatcattctgatcccggacgaggccggttttatcatgatgggcggcatccgttaccggctggataagccagagatctgggtggcagaaaatatcactgtatccaccatcagggcagggaaataa

SEQ ID NO: 468921 - DNA, 471 bp, Shigella boydii
atgaacctgaaaccaggctacagcacagaccagaacacagacactgctacaggcatgcttaaaaatgatggcttctggccggatctggtcatggctgattttcgcagaagccgaactatcccactggatatccctgcatcactggcagaacaggcgttattgtctgccgtctttgaggtgaacaccgcactgaccggtgtgaaatcccgctacgtagtgcagggaacagcgcaggcggcggacgtggaaggcccgcaacttaacggagaaagcgccctttgcgcacagtacaaaaaagcggtctttgcccgcgccaaagccgatcttctcggtgagtttacggcggtgaacacccgccacgccgacagcaatatcgacagtaatgacacccgcgaaaccctgcttgctgaagcggcctttgtgctgcgtgctatccagggcgcaggccgtgtgggggtgtacatcttatga

SEQ ID NO: 468922 - DNA, 609 bp, Shigella boydii
atgcagactccggcgcaaaagttcagagccagactggccgcgcagcaggcgatggaacgccacgaggcactgaccgtacgcgacagtcttcatctgcaactggcgcaactggaaatcgactgcagggctgtgagcagttgcgccaccaacgccgatcgtgtggcattcaagcgtgaatccctgctgccgcgctggatgccgacgattgaggcgtggctgcaaagcggcgaggagtacaaatacatcccgtttacctggtgcatcgtctggctgtttgataccggcgaaatggacaaagccctggaatgggccgatatcgccatcgggcagaatcaacccatgccaccacgctttgaccgtgatttgccaacgttcgttgccgatgaggtcatgcagtgggcacagattcagtttgataaaggcctttccgtcgagccctatttcagccgcgtgatgagccatatcgaaaaagactggacactgcacgaagatatagttgccagatggtacaaattcgccggtcttaacctgttacgggacagcgatggcaaaccgacaaccccggccgccatttacgacgtggcgaaactacgtagcgccgatgagtag

SEQ ID NO: 468923 - DNA, 1050 bp, Shigella boydii
atggccgcacagatgttatcaccacaggcgcaaaagtttttgcgtaattacgccatttcgatggcaaaagccaatggcgtatttacagcacaacagttttttaccatcagcccaccacgtgaaaccctgctacgcgatgccctgattgagaatgccgacccgttcatgggcaagatcaccgtcatgctggtcgaacagcttgtcggccaggtagtcagtaccggaattccggggctgtataccgggcgcaagaaagacggacgcttcaataaagcgctggggagtgaaggcaacgagtacaagctttacgaagtggattccggttcattcctggactacaccaccctgaccaactgggcaaacgcaggcaccgaaaacgagttctataaccgtcttcaggcgttcttttacaagtcagtcaccaacgacctgttacgcgtggcactgaacggtacgcatgccgcagatgaaaccaatcctgatacctgcccgaacggggaagatattcacccgggatggcatcagattgttaaagcgcgcacaccaaaacagatcattactgacaaggtcgtattgaaccgtacaggaaccggggctgattttacgtctgttgatgctattgccgccgatgtaattaatacctgcattccacccgaattccgtcaacacccggatctggttgtactggtatcacagaacattatcgcagcagatacggtcagtatgctgaaccgcatcgaccgcccgacagaaaaagtcgccgcccagcttatcaaccgtgagatcgccggacgcaagtcattcagtccgccatttatgccggataaccgcctggttgtcaccacgctctggaatctgcatatgtacttccagcgcggaacacagcaacgccgtgctgaatggattgatgaccgcaaacgcttcgaaaacaactggctgcgtatgcagggttgcgccgtggaatatgacgcactctacggttcatttgacaacattgaactggcgggactgccatcacctgaacatgcgaaaccaaaccaggtagcataa

SEQ ID NO: 468924 - DNA, 1173 bp, Shigella boydii
atgaaacccgcgaaaacagccgcaataataccgccagatacatcaaaaagcggtaatgaaatggcaaagcagaaatacaccactgactggatatgcatagcaaccgaaggctacgccatcgacggtcgccccattacccgcgaaatgatccagcaggccgctgacaactacagcaccgccagatacacagcgatgatctggcctaatcaccccgtatacagtcttcaggagcgagaatttacccccaatctggggcttgtttccgagctggcggctaaagaagacgccggaagactgcgccttatggcgaagctggagcctaaccaggcgctggttaaccttaacgatcgcggccagaagctctttacctcgtgcgagttctgggagaactatgccaacaccgggcaaacctatctgtacgggctggcagcaaccgacagtccggcaagtctgggaacccagcgcatggaaatcaaatcagtggaaaacaacacacagggctcacgtccgcagtatgccgccgctggaaatattgaaatgttcagtcttgggcgtctgacgctggtcgctgacaccccaacaaaccatcatgaggataaatccatgactaaagaacaggcgaaccagttgctagcccagattgtcactctgacggcaaaaattgacgcgcaggcgaacacgcaaccacaggcacagcaacccgcaccggcgcagcccacggcatccgcaacagcagacacacagccagtaaccggggatttcagcgctcacgctaatcacgttgcggagctgagtgaaaagctttccgttgccactgacacactggccatcaacccgaaagacgacacggcacgccagaactacaccaccgccgtgacggagctacagaccgcacttaacacctttacggtgcagccacaggatgctgaaaccgcaaaactccaggcacgtatcgccgcccgtaatggcggacaacagccagcgccagccgcagcgcagaatttcagtacccggaagacggaaaaagatgatgaggccgacgccgccacactgacaacgcttaccagtgcaatcgaaaatctgagccagcgtttttcggtcattgaaagccagcgcacaccgacgccgggcgcagcccccggcgaacaacccgcgcagtttgaaccgctgtaa

SEQ ID NO: 468925 - DNA, 1824 bp, Shigella boydii
atgaaatataccgaagaagtcagggacgctgcccgcgccctgtatctgaaattcagtacaccaaaagagatagcggccacgctggggcttcctgtgcgtaccgtttataactgggctgtccgggggcaatggaatgaaatgttaccagccgagtcggtggaagtggctgtcgcccggcgagtggaacgactgacctgcaaggatggtaaaagcgagcttgagcttgaagagctgcgcttcctgatatcccagcacgtcaggctgatggcgcagaagaacaaacatgctgaacggatggaagagatccgggcgatggtcaataccggcgtggtggtcaatgatggccgacagggtagcagtgaagaagggaatgacgaaggtggtaaaaaaaggaagcgactacgtaaaaatgatgtcggcggactgacaaaagaaatatttgatgaaaaagcgaatggtcatctgtttgaatatcagcaatatgtgcgtgagcacggcgacgaactgttccgcttcattctgaaagggcgacaggaaggatttacctactattttgcatgggaagggtttgaaaaggccgttctcacgggcaagaatcagatattcttttccgccagtaaaccccaggcggaagttttccgtttctatattctcagtattgcgcagcaattctttggtgtcgagcttaaaggcaacccgattcgcctcagcaatggtgcgatactgcgttttctggcgaccaatcccaatacggcgcagtcctacagtggcgacctgtacggggatgaggtcttctggataccgaaatttgcccgcctgcatgaagtggcgtcagcgatggcgacgcatgacgaattccgtattacctacttttcaacccccagcgctaaaacgcaccaggcttacaggctgtggacaggggatgaatggaagggcgacgatccgaaacgtaaggcggcggagttcccgaccagcaaggaattgcgtaaaggtggacgggtctgccctgacgggatctggcgctatgtcatcactatggaggatgcgtgcgctaagggactcagtgccagagttaacattgagaagctgcgtaaccgctacagcgccacggcgtttgccatgctgtacatgtgtgagttcactgactcccgcgacacagtatttaaattctcagaccttgaaaaatgtgaggttgagttcggcatctggcaggacttcgacccctccgcattacggccttttggtaatcgtgaggtgtggggcggttttgatccgtcacgaacgggtgataactcaacatttgttattgtggccccgcctgttgagtctaaagaaaaatttcgcgtgctggctgtctaccagtgggtggggcttaacttcacctggcaggttaagcagattgaagaattaatgaaacgctaccggtttacgcatatcggggtggatatcacgggtattggccggggtgtttatgatcaactggtacgctccgcaccgcgtgaggtgatggggattaactacagtgttgataataaaaataaactggtgcttaagatgattgacctcattgagcggcgacgtatccagtgggtgaaagatgcggttgatgaggtgacaaaagaacgtgccgatatcccgctggcatttatggccatccgccgtgtaatgactgccagtcagaacgcaatgacgttcgccgccgaacgcagcgaaacgaccggtcacgcggacgtattttttgccatatcgcacgcggtctgtaatgaaccgctcgactatgaatatgaccgcccctcggtgtgggcattcgggaaggctgcatga

SEQ ID NO: 468926 - DNA, 300 bp, Shigella boydii
atgagtaaacgtaaaagcgcacgcctgcgtaaacgggcacagacagaaaattttactcccggacgcggcaatattatcactttcggggagccggaaccgatactgactaccggcacggaatacatcaacgtctggtataacggtagctacaactactggacactaccaatagacagacttgcgctcgcgcagttgccgaatcttaacgcccagcatggcggcgtactgtatgcacgcaaaaatatggtgtgtgccagctaccaggggggtgcccctattaagttgtcaagcatgttatga

SEQ ID NO: 468927 - DNA, 531 bp, Shigella boydii
gtgattgatgcaaaagttctgaacggtgtcagcacattattacgggctcacgggcgtctgacctgtggggttctggcagagaaaatgcaaatgccaccctctgcaatggtgtatttcctgcgtgatgcagttgatgccggtgcactgactgagctgaatggcttttacgatgttccgcgccctcgtccgacgctgcctgtaagacaaaacgcaacagagcagccttctgttgatgatgcggtgtggtgcaactggcgtcgctcattaccctgggtggaaggtaataccatccccgcgctggcaaaagagtttgcgacgggcgtgctgacctgtgagtcagtccacattgttgctgaggtggataacagaatgtgcgaacagggaatgccccgttttgtgatggcttatatcgatatccggctggggcgttttatttgcagttcaagcgcctggaatatcaccgaccatgtactgcgttatctcattcttgattgttctccggctcccgcagcggtgcaggaggtggcgtga

SEQ ID NO: 468928 - DNA, 531 bp, Shigella boydii
atgttttttaaaacgtcaaatcccgcagcactgcaggcatgggaccagtttatggcggactgcctgaaactacgcgaagaagcccgccatcttgataaggttctgggctgtggttgccggtcagtattcagcacaggtattggtgggcgtcattttcatggcgtgaatttttcgggggatgagcgccccttctcgcgggagctgtggaccgtacaacggcccgcatcaggtaacagttgcaggcccagaacttcgcggatacctgctcatctcagggagcaggcaagagagctggcgaaaatatggcaggagaatattccggtcacttacgcccgcacagacgctcttttacccgcactgggactggatttcagcgcaacaatattcggacctctccagtggttccgtgttggtgatgtgatttacgtcatgacggggatgacacccgcacaaggccgcatgactgaaatcctttcggacgaatttatccgggcgcaaaaacaggcagaggtaaacaatggaaaacagtga

SEQ ID NO: 468929 - DNA, 192 bp, Shigella boydii
atggaaaacagtgaaacatcgtattcgtggctggggaaatttaccacggtgaaacaggaatgcccgacctgcggtaatgaatcccctgaatatctgaaagagtgccctcattgtggcgggcagaaatgcaaccactgcgatatgggcgatgacacggcgtgcatgaattgtgaaggtgaacagaatgaataa

SEQ ID NO: 468930 - DNA, 309 bp, Shigella boydii; identical to SEQ ID NO: 33205

SEQ ID NO: 468931 - DNA, 303 bp, Shigella boydii
atgaacaatgaagataaatttacaccccttaatattgataacgtcatggctgaaaaaaggatgctggaacgtgttcgcgctatcgttgaatatggtattaagcacgctctcactgccagagaagttcgtgacattatcaaccgcgaaatgaatcgtctggaaacagtagtggcactgcaaaatgaaacagcccgcgaggagtacatccgccgcaggctggggttatcagaccaggatattgttactgacgctcatgtatttgaggcttttgagatccgtcagcatctgggtctaacgaactga

SEQ ID NO: 468932 - DNA, 267 bp, Shigella boydii
atggaaaataatgtacaaccttatgatgttgcaggttatgcgattgcatcagcactggtgcgccttctggtgaagaaggcgatcatcaccgcagaagagggcaaagccattttcagctcttcagcagagattttaaaagatgcgcctgcaatgagaacaagccgccgcgaaaaactgcaactgtcaaagatcatggaagacattatcagttcgttagacccagatgctgacggatctcaaaagcctcaaatacatgagcgtcagtaa

SEQ ID NO: 468933 - DNA, 552 bp, Shigella boydii
atgaatcgcacatccctgattaaattaatccatgtcgcccgtcgggagctacaactcgacgacgacacttaccgcgcttttctgatgcagaaaacgggcaaaatcagtcgctgcgagctgactgttacgcaactggaacaggtgctcgatgccatgaaagaacgcggctttaagaagctgaataaacacccacgccgtcgctttaaggggcatgtcacaccccgcgagaaggtctataaagtctggcagcagatgacagaagatgggtttattaccgacggcagtgatgtggcgctggacagatatgttcaacgcctgaccgcgaaacgcaacggcggacagggtgtttccacactggcgtggtgtcatggcgacacgctgctgacagttctcgaaacactcaagcagtggcacatccgctgtattcgtgaagccttttcccgtcacgggcttccgttgccggtcagtccgtccgggcgtgaactgcgcggctatgatgccatgacggcggcttatgcccatgccagaaagacacggaggatggcacaatga

SEQ ID NO: 468934 - DNA, 390 bp, Shigella boydii
atgacggaagatttatttggtgatttgcaggatgacaccattctggcacatcttgacaatcccgcagaggatacgtcacgctttccggcactgctggcggagctgaacgatttactgcgcggggaattgtcccggctgggtgttgatcctgcccattcactggagattgttgtggctatctgtaagcatctgggcggtggtcaggtctacattccacgcggtcaggttctggactcgctgattcgggatttgcgtatctggaatgattttaacggtcgcaacgtcagcgaactgaccacccgttatggtgtcactttcaacacggtttacaaggctattcgccggatgcgacggctgaaataccgccagtaccagccctcacttctgtaa

SEQ ID NO: 468935 - DNA, 231 bp, Shigella boydii; identical to SEQ ID NO: 33206

SEQ ID NO: 468936 - DNA, 423 bp, Shigella boydii
atgcagcatgatttatttgaacacgatccggcaattcgccagttaatcgggcatattgataacatcccggccccggaactggaatcacgctggccccgttcggtggttgatctgattgatgttctggaaaacgaactgaaacgccagaacgtcagcaatccccgtgagcttgcccgtaaacaggccgttgccctgtcctgttttctgggcggacggcagttttatatcccctgcggcgatactatcctgaccgcgttacgcgacgatttgctttactgccagttcaatggtcgtaacatggaagaactgcgtcgccagtaccgcctgtcccagccgcagatctaccagattattgcccgccagagaaagctgcatacacggcgtcatcagcctgatctgttctcacctgaaagccagaaataa

SEQ ID NO: 468937 - DNA, 516 bp, Shigella boydii
atggcggggataccaaaaaaactgaaagccgcactgctggcggcaacgattgccggtggtggtgtgggtggttatcaggaaatgacccgtcagtctctgatccacctggaaaatatcgcttatatgccttaccgcgatattgccggtgtgcttacggtctgtgtgggacataccgggccggatatcgaaatgcgccgttacagccatgcggagtgtatggctctcctcgacagtgatttaaaaccggtttatgcggcaatcgatcgtcttgtcagggtgccgctgacgccatatcagaaaacggcgctggcaacgtttattttcaacaccggtgttaccgcattcagtaaatcaacgctgctgaaaaaactcaatgccggtgattacgccggagcgcgtgaccagatggcccgctgggtgtttgccgcaggccataaatggaaaggactgatgaaccgtcgcgaagtggaaatggcaatctggaatatcaggggggcggatgaccttcgccagtaa

SEQ ID NO: 468938 - DNA, 387 bp, Shigella boydii
atgaccttcgccagtaaaagtttactgctggcagccgtgtttaccgccgttctgtccggggtgttgtggcacaggctggacagcacccgccacgataaccagacgctgcgccgtgaattacagacggagcaacaggcccgccacacggctgaatggttgttacacggtcaggaacagacgatgcaggtattttccgctatccgtgccgcaaatcgtgccgcacggctggcagatgagacagaacatcatgatgcaaaagaaaaaattacaaccgccattactggtgacaattgcagcactcgtcctgtgcctgccgttgctgctgacaggttgcgggaactcgaaaaacgcacccgtgccatcggtggtgatcctgcccgaaactga

SEQ ID NO: 468939 - DNA, 195 bp, Shigella boydii; identical to SEQ ID NO: 14325

SEQ ID NO: 468940 - DNA, 300 bp, Shigella boydii
atggatttgatttcagttttagcgttatggccttacctgttgcctgttgtggccggtggggccgtctgggcgatgcgtcgtagttttgccagcaccgagcgtgtggagcgtcttgaaaaccggatgaccgaaatggaaacccgctacgccagcatccctggcacagaagatgtacacgaaatgcgcctgcgaattgcagagctgtccggcgatatccgggtgctgtcccagcgggtgcagtcattttcccatcaactggagctgctgcttgaaaacgcagtaaaccggagtaattcatga

SEQ ID NO: 468941 - DNA, 291 bp, Shigella boydii
atgattaacgatattctgaccgaagaccgtcgtctggtcatcctgcgttccctgatggactgcaataacgaagcaaacgaatccatccttcaggactgtctggatgcatacggacacaacgtttcccgcgatgtggttcgcggccagattgactggctggcagagcagcaactggtcaccgtggaaaacctgcgcggcttttatgtcgtaacgctgacctcccgaggtcaggatgtggcagaaggccgtgcccgcgttgccggtgtcaagcgtcctcgtccccgtgcatga

SEQ ID NO: 468942 - DNA, 576 bp, Shigella boydii
atggacaggaaaacacggggccgggcttcaaaagtggatttactgccggaaaacgtacgtaaaacgctgcatgaaatgctgcgtgataaagcgatcccacaggcccgcattctggaagaaattaacgcactgattgaagacgcaggcctgccggatgagatgaaactctcccgttccggtctgaaccgttacgcgacgaacgtcgagcaggtaggccataacctgcgacagatgcgtgaaatgacgtcagcactgaccgcagaacttggcgacaagccaatgggcgaaaccacaaagctgattctggaaatggcccgcagccagctttttaaggccatgatgcggcaaatcgaaaacccggaatctgacgtggatattgacctgctgaaaaatgccatgctggcggcacagcgtctggaatccacggcaatgtccagccaccggcgcgagaaagaaatccgccaggcgttcgcagaagaagcggcaaacgctgtcagtgaagaactgcgcgggcaggatggcatcagcgaagaactggagcagcgcatccgtgatgtactgctggggaaagcgtag

SEQ ID NO: 468943 - DNA, 1656 bp, Shigella boydii
atgagcaccagagaaagcaaacttaaagcccttcatgccccccgaaaaatcgacctgcgtaaggaagccgaactgctgggcgtgaatatcgtgaccgatatcggggaagcacagccccgcaatgaaccggtttttctgggctatcagcgccgctggtttgaggatgaaagccagatttgtattgctgaaaaatcccgtcgtaccggtctgacatgggccgaagcgggccgcaatgtcatgacggcagcaaagccgcgtcgccgtggcggtcgcaacgttttttatgtgggttcccgtcaggaaatggcgctggaatacattgccgcctgtgccctgtttgcccgcgcctttaaccaactggcaaaggctgacgtatgggagcagaccttctgggacagcgacaaaaaagaagaaatcctcacttatatgatccgtttccctaacagcggatttaaggtgcaggcgctgtcaagccgtccgtctaacctgcgtggtttgcagggagacgtggtgattgatgaggcggcatttcatgaagccctggacgaactcctgaaagcggcttttgctctcaccatgtggggtgcccgcgtgcggatcatatcgacacataacggcgtcgataacctgtttaaccagtacattcaggatgcgcgcgaggggcgcaaggattacagcgttcaccgcatcacgctggatgatgccatcgctgacgggttgtaccgacgtatctgttacgtcacgaatcagccgtggtcgccggaagcggaaaaagcctggcgtgatggcctgtaccggaatgcgccgaataaagagagtgccgacgaggaatacggctgcattcctaaaaaatccgggggcgcttatctgtcacgcgtgctgattgaagccgccatgacgccagcgcgggatatcccggttctgcgttttgaagccccggacgattttgaatcgctgacaccacaaatgcgccacggcatcgttcaggactggtgtgaacaggagctgctcccgttgctcgatgcgctgtcgccgctcaataaacacgtactgggcgaagactttgcacgccgtggcgacctgacggtgtttgtgccgcttgccatcactcctgacttacgcaaacacgaatgtttccgcgtggagctgcgtaatgtgacctatgaccagcagcgacaaatccttttattcattctgtcccgtttgccccgttttaccggcgctgcatttgatgccaccggtaacggcggttatctggcagaagccgcccgtctgatttatggcccggagatgatcgactgtgtgaatctgaccgcatcctggtatcaggagtggatgccaaaactgaaaggcgagtttgaagcgcagaacatcacgattgcccggcaccagaccacacttgatgacctgctccacatcagggtggacaaaggtattccgcagattgataaggggcgcacaaaagatgaaggcggtaaaggccgacgacatggcgactttgccgtggcgctctgtatggctgtcagggcgtcttatatgaatggttttgttatcgacgaggacagcatacaggcgctgccaccacgccaccgtggtgatgatgttgataacgatgattttgatgattatcaccagtttgaacgagggggctggtaa

SEQ ID NO: 468944 - DNA, 1539 bp, Shigella boydii
atgggccgtattctggatatttccgggcagccgtttgattttgacgatgaaatgcagacccgcagcgatgagctggcaatggtcatgaagcgcacgcaggagcatccttccagtggtgtgacgccgaaccgggccgcgcagatgctgcgtgatgccgaacgcggtgatctgacagcacaggctgacctggcctttgatatggaagaaaaggacacccaccttttttccgaactgagcaaacgccgccttgccattcaggcgctggaatggcgcatcgctccggcacgtgatgccagcgcacaggagaaaaaagacgccgacatgctgaatgaatatctgcatgatgcggcgtggtttgaagatgccctgtttgatgccggtgatgccattctcaagggttattccatgcaggagattgaatggggctggctggggaaaatgcgcgtgccggtggcgctgcatcatcgcgatccggcgctgttctgcgcgaaccccgacaatctgaacgaattacgcctgcgtgatgcgtcttatcacgggctggagctgcaaccgttcggctggtttatgcaccgggccaaatcccgcaccgggtacgttggcaccaatggccttgtgcgcacgcttatctggccttttatttttaaaaactattccgtgcgtgattttgcagagttcctggaaatttacggacttcccatgcgcgtcggtaaatatccgaccggctccacgaaccgtgagaaagccacgctgatgcaggccgtgatggatatcgggcgacgtgccggcggcattattccgatggggatgacgctggattttcagagcgccgcagatggtcagtcagacccctttatggcgatgattggctgggcagaaaaagcgatttcaaaagccattctgggcggcaccctgaccacagaggctggcgataaaggtgcacggtcgctgggtgaagtgcatgatgaggttcgccgggaaatccgtaacgcggatgtgggccagcttgcccgcagtattaaccgtgacctgatttatcccctgctggcactgaacagtgacagcaccattgatattaaccgcctgccgggcattgtgtttgataccagtgaagcgggtgatattacggcactgtctgacgccattccgaaactggcggcgggaatgcgtattccggtctcctggatacaggaaaaacttcatattccacagccggtcggtgatgaagccgtgtttactgctcaaccggttgtcccggataacggtccgcagaaagaggccgcattatccgctgaagatatcccgcaggaggatgatatcgaccggatgggcgtctcaccggaagactggcagcgttcggttgatcccctgctgaaacccgtcattttttctgtgctgaaagatggcccggaagccgccatgaacaaagccgcttcattatatccgcagatggatgatgcagaacttatcgacatgctgacccgtgccatttttgttgccgatatatgggggcgtctggatgccgcagcagaccattga

SEQ ID NO: 468945 - DNA, 1320 bp, Shigella boydii
atgccgcagcagaccattgatctggcgtatgccgcacgcctcccgccaaaggaggctgtcgcgtatttccgcgccaaaggctacaacatcacctggaactggtacgaacaactggcagacgcgcacgcccgcgcctttaccgttgccaaagccacccggatggatgtcctgaccacaatccgtgaggaagtggagcgggctgtcagtgaaggcatcacccgtgaggaatttacccgcacactggccccccggctgcaaaaactcggatggtggggaaaacaaatcatcgtggatgcagagggaaacgcaaaggtaatcgagctgggcagtccgcgtcgtctggcaaccatttataacgtcaatacccgtacggcgtatggggcaggacgttatgcgcagatgatgaataccgcagatttgtatccgtactggcagtatgttgccgttatggatggcagaacacgcccggaacatgcgcggctgcacaatatggttttcaggtatgacgacattttctggcagacgcattacccgcccaatggctggaactgccgctgtcgcgtccgggcggtgtctgcggcccgcatgaaagaactggggctacaggtcagttatggtgcgtcattcatgaacacccgcgaagtggatgccggtacggatgaaagcaccggagagattttccgcacatcgtcaaccacatttgacaacggtcgggtaaaaatgacgccggatgtaggctggtcatataaccctggttcggcggcatttggtacggatcaggcactgattcgaaaactggtggaaattcacgacgcgcagctgcgtgagcaggttgtacagacactgaataacagccgggagcgtcagcttgctttttccctctggcttaaacgcctggcaggatcacgtcaggccggtcatgaaatccgggcgctgggttttatgacgggatccgtggctgaagccgtatatcagcgcaccgggaatatgccagcccgtttgcttgtaatgaacgggaaaagtctggcgaccactgctgatgccgccctgaaaccggaagatttacagcgtctgccgtcgctgatggcaaaaccacaggcggtattgtgggacagggagaaccaccagttgctgtatgttgtggcaacccgcgacggcactgcaaaagttgtggtcagaacatcgcaggctgtcagcaaacagaatgaccgggcggatgtgctggtcagtatcagccgcgtatctgcactgtcgcttgaagccgcgattgctgacgggatgattgacatactggaggggcatgtggaggtgaataagtga

SEQ ID NO: 468946 - DNA, 471 bp, Shigella boydii
gtgagtcttgatatgaacgttgccgtggatgtgcgacgtattcagcttgcactggatgaactgggaaccgttacacgtgaccgcgccattccccgtgtgatggctgcggcgctgctgtcatccacggaacaggcatttgaacggcaggcagacccggatacagggaaaggctgggaagcgtggagcgattcgtggctggcatggcgtcaggatcatggttttgttccgggcagtatccttaccctgcatggcgatctggcacgcagcattaccaccgattatggacaggattatgccctgattggttcgccaaaaatttatgctgccattcatcagtggggcggtacacccgatatggcaccccgcccggcaggcgttcctgcgcgtccttatatggggctggataagaccggggaacaggaaatttttgatgccatcagaaaacgcgtcagcaccgctctgaggcaataa

SEQ ID NO: 468947 - DNA, 1086 bp, Shigella boydii
atgaaaaaacacgcgattggcattgccgcactgagtgcgctgtccattgacgatgacggctggtgccagctattgcctgccggtcatttcagtgcccgtgatggtcgtccgtttgatgtgacaggcggtcaggggtggttcatcgacggtgagattgccgggcgtctggttgaaggcgttcgcgcgctcaaccaggacgtgctgattgattacgagcataaccagctacgtaaggacaaaggattacccccggaacaactcgtcgcggctggctggtttaacgccgatgaaatgcagtggcgtgaaggtgaaggattatttatccacccacgctggacggcggcggcccagcagcgcatcgatgacggcgaatttggttatctctctgcggtttttccgtatgacaccgacaccggtgcggtgctgcaaatccgccttgctgcgctgaccaatgaccccggtgccaccggcatgaaaaagctgaccgcactggcggcagaccttcccgacatccttcaacaggagaacaaacccatgaatgaaacgctgcgcaagctgcttgcgcgtcttggggtgacggtccccgaaaatgcagacatcaccgatgaacaggcaacagcggcactgaccgcactggacacgctggaaagtaatgccgggaaagtggcgtcgttatccgccgaactggaaaaggcacagaacgccgccgttgacctgacgaaatacgtcccggtggaaagctacaacgccctgcgtgatgaactggcacaggcgactgcacaaagcgccacagccagcctgagcgccgttctggacaaggcggaacaggaaggccgcattttcaaaagcgaacgtacctatctggaacagcttggcggtcagattggcgtggcggcactgtcggcacagcttgagaaaaaacagcccatcgctgcgttatctgccatgcagaccacaacggtacaaaacctgtcacaggaaaaaccggcagtggcggtgctgtctgctgatgaacaggcagcagtgaaggcgctcggcattactgaggctgagtatctgaaaatgaaacaggaacaagaaaaatga

SEQ ID NO: 468948 - DNA, 918 bp, Shigella boydii
atgattgtcaccccggcatccattaaagccctgatgacctcctggcgtaaggattttcagggcggtcttgaagacgccccgtcgcagtacagcaaaattgcaatggtggtgaactcttccacccgcagtaatacctatggctggctgggtaaattcccgaccctgaaagaatgggtgggtaagcgaaccattcagcaaatggaagcgcatggctactctatcgccaataaaacgtttgaaggcaccgtgggtatttcccgtgatgacttcgaggatgacaatctgggtatttatgcgccgatttttcaggagatgggccgttctgcggcagttcagccggatgagctgatttttaaacttctgaaagatggctttacccagccctgctatgacggtcagaacttcttcgacaaggagcatccggtatatccgaatgtggacggcacgggcagcgcggttaatacctccaacatcgttgagcaggacagcttcagcggtctgccattctatctgctggactgctcccgcgcaatcaaaccgctgattttccaggagcgccgcaaaccggaactggtcgcacgtacccgtatcgatgacgaccacgtttttatggataacgagttcctgtttggtgccagcgcccgccgtgctgccggttacggcttctggcagatggctgtcgcggtaaaaggcgatctgacgctggataacctctggaagggctggcaactgatgcgatcttttgaaggtgatggcggtaagaagctgggcctgaagccgacgcatatcgttgtaccggtcgggctggaaaaagccgcagagcaactgcttaaccgtgaactgttcgcggatggcaataccaccgtctccaacgagatgaagggcaagctgcaactggttgtcgctgactacctgtaa

SEQ ID NO: 468949 - DNA, 411 bp, Shigella boydii
atgtcaggcacttcgcttaattcacaacggctggacacttctcgcatcacttgcacggcgattattaaatgccttcgtccggtctaccgccgcgccggaatcgcctttacacgtggcgaaaacaccgtggaagtcaccgaagaacaactggcgatcattcgtgccgacagcgtgctgtctgtggtatctgcatcgtcagcagaaacgctcgctgaggctggggggctggacgttctgggtgtgggcgatctgaacgcccgtatccgtgcgaccgttgccggtctggataaggcaaacccggaacactttaccgcagggggggaacccaaagtgaaagccgtcagtgcggcgctgggggaaccggtaagcagcgcgcaaatcaaagcggcgcaggctgaggcggatgcatga

SEQ ID NO: 468950 - DNA, 426 bp, Shigella boydii
atgaattacgcgacggtaaatgacctgtgcgcccgctatacacgtacgcggctggatattctcacccgccctaaaacaacggacgggcagccggatgatgccgtggcagaacaggcactggcagatgcttcggcctttattgatggctatctcgccgcgcgctttgttctgccgcttaccgtcgtcccctcactgctgaaacggcagtgttgcgtggtggcctggttttatctgaatgaatcacaacccaccgagcagatcaccgctgcctacagggacacagtgcgctggctggaacaggtgcgcgatggcaaaacagatcccggcgtggaaagcaggacggcagcctcgccggatggtgaaaaccttgtgcaggtgcagtctgacgcgccggtcttctcacgaaaacagaaggggtttatctga

SEQ ID NO: 468951 - DNA, 549 bp, Shigella boydii
atgctggaagaaaccgaagccgcactgctggcgcgcgttcgtgagttgtttggggcaaccctgcggcaggtggaaccccttaccggcacatggactaacgaggatgtgcaccgtctctttctggccccgccatcggtatttctggcatggatgggctgtggtgaggggcgtacgcgtcgggaagttgaaagtcgctgggcattttttgtcgtggcggagttgctgaacggggaaccggtaaaccggcccggtatttatcagattgtggagcgactgattgccggcgttaacggtcagacgtttggcccgaccaccgggatgagactgacgcaggtcagaaatctttgtgacgacaaccgtatcaatgccggtgtggtgctttacggcgttctgttcagtggcactaccccgctgccgtccgtggtggacatggattcgctggatgattacgagcgtcactggcagacctggaaattcccggacgaaaccccggaatttgccgcacatatcaatgtgaatcaggaagaggatcatgatgctgaaaattaa

SEQ ID NO: 468952 - DNA, 207 bp, Shigella boydii
atgatgctgaaaattaaacccgcagcgggaaaagccatccgtgacccgctcacgatgaaattactggcgtctgagggagaagaaaagccccgtaacagtttctggatacgtcgccttgcagccggtgatgtggttgaagtcgggagcaccgaaaacacggcggatgataccgacactgcgccgaaaaaacggagtaaatcgaaatga

SEQ ID NO: 468953 - DNA, 1488 bp, Shigella boydii
atgagcgatatttcatttaacgcgatcccgtcagatgttcgcgttcctctgacgtatatcgaatttgataacagtaatgccgtcagcggaacaccggcaccccgtcagcgcgtgctgatgttcgggcaaagcggaagtaaagccagtgcggcaccagacgtgcctgtccgtatccgttccggctcacaggccagtgcggcgtttggtcagggttccatgctggcactgatggcagatgcattcctgaacgctaaccgcgtggcggagctgtggtgtattccgcaggggagcggcaccggtaatgctgctgtcggtgaaatttcactgtcaggaacggcaggcgaaaacggctcgcttgtgacttacattgccggtcagcgactggcggtatctgtcgcagcaggtgcaacgggagcggcgctggctgacctgctggttgcccgaatcaaaggccagcctgatttaccggtgacggcagaagttcgcgcagacagtggagatgatgacacccatgcgaatgtggttctgagtgcaaaatttattggtgcattatctgccgtggacgtgcgctggaactattacgcgggtgaaaccaccccttacgggattattacggcattcaaagccgccaccgggaaaaacggcaacccggatatcagcgccagtatcgcggggatgggcgatctgcaatacaaatacattgtgatgccctataccgatgaaccgaacctgaacctgttacgcacggaattacaggaacgctggggaccggtcaatcaggctgatggctttgccgtgacagtgctgtccggcacgtatggcgatatttccacgtttggtgtcagccgtaatgaccatctgatctcctgtatggggattgccggtgcaccggaaccgtcatatctgtacgccgccacactgtgtgccgttgccagccaggcgctttccatcgacccggcacgtccgctccagacgctgacgctgcccggcaggctaccgcctgcggtgggggatcgtttcacctggtcagaacgtaatgcgctgctgtttgacggcatctccacgtttaacgtgaatgatggcggtgaaatgcagattgaacgcatgatcacgatgtaccgcacgaacaggtacggcgacagtgatccgtcttatctgaacgtgaataccatcgccacgctgagttatctgcgttattcgctgcgaacccgcatcacgcagaaattcccgaactacaagctggcaagtgatggcacccgctttgccaccggtcaggccgtggtgacgccatccgtgatcaaaacggagctgctggcactgtttgaagaatgggaaaacgccggactggtcgaggatttcgacacgttcaaagaggagctgtatgtggcacgtaacaaggacgacaaagaccgtcttgatgtgctgtgcggcccgaatctgattaaccagttccgcattttcgcggcacaagttcagttcattctgtaa

SEQ ID NO: 468954 - DNA, 357 bp, Shigella boydii; identical to SEQ ID NO: 374121

SEQ ID NO: 468955 - DNA, 435 bp, Shigella boydii
atggacgaaatgaatttaagtcctgaagcacaggaactgcatgacagcattgtggcagaacttcagtccggcgggctgaaactgaaagacggcctgccgttcggcaccggtgacgagactgaaatgcagtatgacgtgacgctgcgtgaactgaccgcaggcgatctgattgatgcccagatggcggctgaaaaagtggtcatgagcaaggaaggcccggtgctggtcagttctccgtctctgatgggactggaaatgctgcgccgtcagattgccggtgtgggctgcctcaaaggcccgttatcactggcgctgatgcgtaagctgtccgtcgatgacttccagcgtctgtcgctggcagtggagctgcgcgacatggcggtggcggcatcgctgacgcaagaacgggggcgagtggctgcggtgccggaatga

SEQ ID NO: 468956 - DNA, 2073 bp, Shigella boydii
gtgaccgggaaacgcttaaaagcgtctgtcattattgatcttaatggcaatctttcccggcgttcccgccagtattcgaaccagataaacgccctgtcccgtagcggacaaagttccctgcgtgccctgcgtatggaggttgtgcgcgtttctggtgccattgacagaatgggttctctgtcaacccgtacattccgaatgctgtcagccggggcgctgggtatcgctggcgtgggttacaccgccaataaactgtttattggtgcagccgcccagcgtgagcagcagattatcgccatgaactcgctctatcacggcgataaggccagagcacaggccatgatggcgtgggcgaagcagaacgcaaaagaaaccacctgggggctgggtggtgttctgcaggagatccgcacatcaactgcgtttggcatgactgatgcccaggtaaaacagttcatcaccatgctacagaaccagggcgcgatgcatggctgggatttacccactgcacagggggcttcgttacagttcaaacagatgtttgcccgtcagcaaatcacggcggcggatgccaacctgctgaccggttacggtatcaacgtttacaaggtgctgacagatgcaacgggtgaggatgagaaaaaaatccgtaagctgggtgaaaaaggcaaactgggcctgaaatccatcctgacggtgttcagaatcttactggaacagtcaaaaggcgcacaggcggcggccatgaactcctgggacgggatgatggcccagatggagggcaatctgcttgagtttcgcacaaaggtggcaaacagcggcccctttgaagaaatcaagaacgagatgcgccgggtgcttgactggcacgacatggcggataaatccggggaacttgacgcactggcagaaaacattggtcagaaatttctgaccacgttcagaacggtaaaaatcgcggcgcaggaattatggcgctggctgaaaccgggtaaagatgcgctggcatgggttgaccagaatattgccagcctgaaaaaactggctgctgttctggtgtctgtctggcttgccaataaagccctgagagcaggctgggccgtggcaaaaccttcgtggcaggttgccagttacccgtttaaaaccgggcgtcgtatgtggcgctggatgcggaaccgcaaacgtgggcgggcaggtctgccggtgccggatgccatgacgtctgagacgctgttgcagggcaccggcattcagcgtgtgtttgtcatcaactggccccgtggatttggtggctacgggagtggcggcggtcgtcgcggacggagcggcggaagaatggccccgctgttaccccgccagccgttattgctgtccgggccacagccgctggcattacctgcaccacgccctgtactggcattacccccacccggcgtaccggtaacggcacggcctgcaccattacctttacccggtaaatccggtcttctgagcaggcttgcaggcagtgctgccgggcaactggttacgggaacggtcggaaagctggctgatgccgggcgtgctgctggcgggtggttttccggtatcggaaacaaacttgcaggcagtgcgatcggtcgggttgtgacaaaaggtgccggggcgctgggctggatggggaaaggtgccggtcgtgcgttgtcacgtctgggtggcccggtaatgggggcactccagcttgcccccgtcctgatggatgagcaggcgtcaacccatgaaaaagcaggcgcaattggcagtacagccggtgcatggctcggcggtgccgttggcagccttgccggaccgctgggtacggttgccggtgccacgctgggcagtgtcgccggggagtatctgggcggttttgtaaccgacctgtatcagaaatggacggccccggataaggaaccgcaggaacaaaaagtgaatgcggaagcctcgctgcgcgtcgaacttggcgaggggttacgcctgaccagttcccgtgtcaccgaggatggtatggggctgaatatttacacgggcgataactacattacgggctggtaa

SEQ ID NO: 468957 - DNA, 1488 bp, Shigella boydii
atgtttgaagatgctttaaatgccgttaatgctgtccgggataaaaccggtggaggcaggaaaacaaccggcaaaggcacgttccgtaacgtgccgtttctcgtcatcgaggagcaaaaacaggctggcggacgtcgtctggttaaacgcgagtacccgttacgtgataccggcggcgtcaatgacctggggaaaaagcttcgctcccgtacattcagcgcctgcattctgaacagtaacgcagaaacagccagagatgaagcggatgcgctgatggatgctcttgatgctccgggcagcggtgagctggtacatcctgatttcggcactgtggacgtcatggtggattcatgggaatgccgcactaaagcggatgaactgaattattacgcgttcaccgttaccgtttatccgtcgttgcaggatactgccccggacgcagaaacagacaccagtgcagccgtaccggcacaggctgttgctgtaaccggttctctgggggatacgctgtcctctgtctggcagaccgtaaaagatggcactgcggcggcaaccgccgtgatggaagctgtaaccggtgtcatcgatgatatcagtgatgcggtggacaatctgggggttacgcagactgtcagcggtctgatgggatcgctttctgcgatgaaaggctctgtgaccagcctgattaaccagcctgccatgctggcctcctcgctgatgggggcgctgtccggcgtttcatcgttatgcgatacccggacagcattttccacatggaaccgtctggcgcagcgattcgaacgtcgccatgccgccaccgcaggcagacagggggcaatcacaacctcgtacaacagtccggttgcagaaaaaaatattgccacactgaactacgtcatgctggcagcggcgcagacataccgggcagaagctgccagccaggcactgactgcggcactggatttcagtcgccggatggataatgccgcccgtacacctgtactggatgccccgtccaccacaaccggcacagccagcggggccagcagcacatctgctaccgtcacacagggacagttacagttaactaccataaccccggacggcggcttttcacaggtatccttttcagacagtggtacagccacgcccccggtatttgaaagtgtgtccgatatcggaaaaacagccgccatgctgggggctgcactggataccgtcattctgacggcatctgagcagggcttttcgacagacagcgttcagcttacgcaactgcgtctgctggttgttgccgatctggaaaaacgcgggctgcaactggcgggcagtgaaacgcaccgcctgccggagacgatgcctgcaatggtggccctgtaccgttacacaggaaacagccggaactggcaacggctggcccgcaggaacggtatcagcaacccgttgtttgttcccggtggcgtcagtattgaggtgattaatgagtaa

SEQ ID NO: 468958 - DNA, 1134 bp, Shigella boydii
atgagtaataccgtcacgctgcgaacggatggcaggctttttaccggctggacgtcagtctctgtcacccgctcgattgaatccgtagccggatattttgagctgggggtgaacgtgccaccggatacggatttatccgggctggcaccggggaaggcgttcacgctggaaatcgaggggcagattgtctgcaccggttatatcgattcacggcgacgccagatgaccgctgacagtataaaaatcactgtcgccggacgtgacaaaacggctgacctgattgactgtgctgccgtttacagtggcggacagtggaaaaaccgcacactggagcagattgcgcgtgacctgtgcgccccttatggcgttaccgttcgctgggagctttccgataaggaaagttcggcagtttttcccggcttcacgctggaccattcagaaaccgtttatgaggcgctggtgcgcgcctcccgcgcacgcggtgtactgatgaccagcaatgccgccggagagctggtattcagccgggctgccagcacagccactgatgagctggttctcggagaaaatctgctgacactggattttgatgaagatttccgcgaccggttcagcgaatacattgttaagggatatgcacgcgcgaacggcgctgacggggatgatattgatgcggaaagtattgtctcccggaaaggaaccgccactgacagtgatgtgacccgttacagaccgatgatcatcattgctgacagcaaaattacggcgaaggatgcacaggcccgcgccctgcgtgagcaacgccgcagactggcaaaatccatcacttttgaggcagaaattgacggatggacacgcagggacgggcaactctggatgccgaatctgctggtcactattgatgcctcgaaatatgccatcaaaaccacggaattactggtcagcaaagtcaccctgatactgaatgaccaggacgggctgaaaacccgcgtcagccttgcaccacgcgaaggctttctggtgccggttgaaagcgaccgcaaatccagaggggatggtaatgatggcgttgatgatctggttgaggcttatttccgcagacacccggagaaaacaccaccatggaaagagtaa

SEQ ID NO: 468959 - DNA, 594 bp, Shigella boydii
atggaaagagtaaatgattccgccctgaaccgcctgctgatgccgttgatgcgtcgtgtacggctgatggtggcccgcgccgttgttaacgtgattcacgacgggcgaaaggttcagaacctgcaggtcggtctgctggatgatgaggaatctgatgatgtggagcgcctgcaaaattacgggcatttcagcgttcccctgccgggtgcagaggcgctgattgcctgtgtgggcgcacaacgtgatcagggaattgccgttgtggtggaagaccgccgctaccgcccgacaaatcttgaaccgggtgatgcaggcatttaccaccacgaggggcatcgtatcaggctgacaaaggacgggcgctgcatcattacctgtaaaacggttgagatttacgctgatgaaagtatgaccgttgacacacccagaaccacgtttaccggcgacgttgagatccagaaaggtctgggcgttaaaggtgaaagtgactttgcaggcaatatcagcgccccggatgccatcatcaatggcaaatcgacggataagcatatccaccgtggcgacagcggcggaaccacggggccgatgcaatga

SEQ ID NO: 468960 - DNA, 438 bp, Shigella boydii
atgaccgatttagccattatctggacgaacggacgcggcgatattgcacaggatggcattgatatgctgaccgacgacagtctgacaaccgatgtgacaatctccctgtttacagaccggcgcgcgctggattctgacacgctgccggatggttcagatgatcgccgtggatggtggggtgacagttaccgcgaccgccccatcggttcgcggttgtggctgttatcacgtgaaaaagccacaccggatacgctggaacgcgccagagggtatgccgaagaggcgctggaatggctgaaaacagcaggccgggtaagtgcggttaacgtcagagcggaacagttacatcagggctggttatacctctacattgcactgacattaccggatggttccgttattccttatgagtttaaagcagcatttaacggggtttaa

SEQ ID NO: 468961 - DNA, 1083 bp, Shigella boydii
atggcttattcaccaccgacattatcatcgctgattgcccgtacagaacagaatattgaacagcgcctgccgggtagctggcctcaggcccgtgaaaaaacgctgagtgccattgcttatgctcaggcgggccttgctgccggttgtcacgagcatatttcatgggtcgggcgacagattatcccgtcgacagcagatgaagatgagttgctggagcactgccggttctggggcgtgcgccgcaaacaggcgacagccgccagcggcccgctgactgtcaccacatcggcagcgaccacccttcctgccggtacacgctggcagcgtgctgatggtgtggtttacagcctggctgatgccattgtgattgaccgtgcaggaacgacggaaattaccgttaccgcactggctgccggtgaggcaggaaataccggtgagaatacccttttaacgttgattactccggttgcctgtgttgtttccgatgccatcactgtaaaagggttttccggtggagctgatattgagagtgcagcggagctgctgtcacggctggaatatcgtgtccagtatcctccgttcggcggtaatcagtttgattatgttcgctgggcgcgtgaagtcagcggcgttacccgtgcctggtgttttccgacatggaaaggcggtggcacagtcggggtgacgtttgttatggataaccggagcaatatttttccacaaccggcagatgtggaacgtgtggcggattatatcgccggtcatactgacccgataaccggcctgattgtcgggcagcctgatggtgtaaatgtcacggtatttgcgccagagtcaaagccggtaaatccacggatttatatatcaccgaagactgccgaactgaaacaggccattacccacgccattaataccatgttttttaatgaggtgacgccgggcggtgcacttgccccctcccgtattatccgtgcggtggcaggtgttaccggtctggatgattttgaagtgcgtttcccgacagagatccagcgttcggagaatacggaactgttaacaccggggacaattgaatggctgtaa

SEQ ID NO: 468962 - DNA, 543 bp, Shigella boydii
atggctgtaacaccctatcagacggcctttctgcaattactgccgtcagggcttgcctggaataaaagccccgacagcaaattatctgcgctggcgcaggccatcagcgacgtgattgccactgcggcggatgatgcgcggcaaatactgcgggagcgtttcccgtccacatcccgctggtatctgggtgagtgggaatcacttctggggttgccggactgtacaagcgaaaacggcaccctgtccgaacgccagcgggctgccgcgaataaaatgcgtatgaccggcaatctgagtcggtgcttttatgaatggctggctgcgcagtacggttttaccgtcaggctgacggattccacagaaggccagtgggttacgcaggtcaatatttacggtattaaaaattatcgcaacgcaacggtgctggataatgttctgacgccgttacgtgtttatgaatcgggtgcgctggaatgtttactggagaaatataaacccgcgcatcagatttataaatttgtttaccatgacggagataactaa

SEQ ID NO: 468963 - DNA, 540 bp, Shigella boydii
gtgattgatgcaaaagttctgaacggtgtcagcacattattacgggcttacggacgtctgacctgtggtgttctggcggacaaaatgaggatgccggtctctgcaatggtgtatttcctgcgtgatgcggttgatgccggagtgctgactgaactgaacggcttttacgacgttccgcgctcccgggcagagccgcctgccgggcgaaattcaacggagcaccccgatgttgatggtgcgcaatggtgcacgttccgccgctctttgccctggctggaaggcaatgccattccggcactggcaaaagaatttgcgacaggcgtactgacctgcgagtcggtttacatcgttgctgaagtggatgacgagatgtgtaaacagggaatgccccgttttgtgatggcttatatcgatatccggctgggtcgttttatttgtggctccagtggctggaatatcaccgaccacgtcctgcgctatctcattcttgattattcaccggttccggcggaaacacaggaaatcagcgagcatgattaa

SEQ ID NO: 468964 - DNA, 147 bp, Shigella boydii
atgattaagtcaactggctttgtcctgctggttggcacctgcggaaatgatgcctgcgatgccattccggtaacggaaaaaaatctggcccacagagcagacatgtatgcaggtgatggagcgcatacaaaaacgttatcccaatga

SEQ ID NO: 468965 - DNA, 315 bp, Shigella boydii
atgaataaaccagagaataaagaaatgaaattcacaccagttaatattgatgacgtcatggctaatttaaggatgctggaacgtatgcatgatattgttaaatatggtattgagcatgacctcaccgccagagaagtccggagcattatcaaccgtgaaatgaaccaggtggaagctgccgtggcgctacaaaatgaagcagcccgcgaggaatacattcgtcgcaggctgggactatcaaataaagatattcttacggatgctcagatggctgaggcttttgatattcatcagaatcttggtctaacaaactga

SEQ ID NO: 468966 - DNA, 267 bp, Shigella boydii
atgaaaaacagtgaacagccttatgatgttgcagggtatgtcattgcctcaaggttgctgatactccttgtcagaaaggggctaattaccgcagaagaaggcaaaacgatcctcgaagccgcagcaagcggagcggcagaggctccggcattgagaacaacgaataatcccatcctgcaaatatcacagctaatcactgataccatcagtttgttagaccaagattctgatgaatatcaaaagcctcagccatctgagcatccgtaa

SEQ ID NO: 468967 - DNA, 552 bp, Shigella boydii
atgaatcgcacatccctgattaaattaattcatgtcgcccgtcgtgatctacaactcgacgatgacacttaccgcgcctttctggtgcagcacacgggcaaaaccagttgccgcgagctgtccgttgcacaactggaacgtgtgctcgatgccatgaaagagcgcggttttaagaagcagaaaaaacatccccgccgtcgctttaaggggcatgtcacaccgcgcgagaagatttataaaatctggcagcagatgttccttgatggtttcgtctccgatatcagcgacgctgcgctggacaaatacgttgaacgcctgacggccagacgtaatggcggtcagggtgtttccacgctggcctggtgtcacggggaatcgttgcatgttgtgctcgaaacgctcaaacagtggcatatgcgctgcatccgggaagcctttgcccgacatggtgtgcctttacctgtgagcgaaaccgggcggaagctgcgcggctatgatgcactgaccagtgcatatgcccgcgcacgaaacagcgggagaattgctgtatga

SEQ ID NO: 468968 - DNA, 450 bp, Shigella boydii
atgaaacagatgaaagagcaggatttattcgaagacttccgggacgacagcgttctggaataccttaacgattaccaggaaaacacggcttatccggcgttactttctgaactgaacgcactgctgcgtaaagagctggcccggattggcgcagaccctgcccattcccttgagctggttgtggcgatttgtcgctatatcggcgggatgcaggtttatgttccgagggggaatattctggagaatcttgtccgggatatgcgtatctggcgtgattttaacggccataatattcctgaactggttcagcgttacggggtgacgtataaaaccgtctacaaggccatcaagcggatgcggcgtctggagtgtaataaataccagccggatttgttttaccactccccgaacctgcctcaccccgttcgtcgtccgccacgacgtccttaa

SEQ ID NO: 468969 - DNA, 588 bp, Shigella boydii
atggaaaatcaaaaattctccccggcctttgagtatgcgctgaattttattctgcgtcccgatatcgaaggcgtctatgtcaatgaccccactgaccgtggcggcgaaaccagatacggcatttctgaccgccgcgacggtgtgattgacggcaaaaccgatgtcagcggcgacggtaaaccggatacccgcatcagggatttaacccgcgaacaggtcgcgcagatttactggcgcgattactggctgcctgccggatgtgaccagtggcctgatggcgtggcgatgtttgtgttcgatgcggcggttcagcatggcgttaaaaaagctatcaggattttgcaggaagccgctgatgtggatgctgacggcatcatcggtccgcgtacccgtaaggcagtgagcctgtccaccccggactggttgctgacccgctgcattgtccgtcgttcccgcttttatgccgacatcatcaaatccaaacctgcccagggcaaatacctgaacggctggtttaaccgcatggagaaagtgaccgacgcctgtctggaaattatcgacaacgtgtcgtccgtcacgcggggatga

SEQ ID NO: 468970 - DNA, 228 bp, Shigella boydii
atgggcaaaggctgggatgcctcgctgagagccgggcggcgtgaccgcctgcgtcaggaggttttacatcgtatggccggaggtccgcccccgaaaccgctggactataccggtcatgacggcacacacgccagccactacatgcgtggctggaacaccgtggatacacgggacattttctggcagtgccagaagtacaaggaaaaactcaatgcacagaatgaatag

SEQ ID NO: 468971 - DNA, 411 bp, Shigella boydii
atgcacagaatgaatagtctttttgttcgcgttatttactcccgctttatgttgtgccagtggtcgtttctggggctgtcggcagtcctttttctggcgagctgttttgccggatggcaggcgtttgcggtcatggtgctggcatacggcgcgacactctgcctgattcacagtttccagctgggcaacgtaccttatcgcctgcaacccaaaaggcgtttccgggccgcctcccttcgaattgtcgtgtggtcatgggtggtctgggccgttggttttttcatgctgacattcggccttctttatctgaaggagccttatcagctggcgttctggctgggcggtatcttttgtgcggcactttataaacatcagcgccgttttcataagggggattcatggacccgttaa

SEQ ID NO: 468972 - DNA, 609 bp, Shigella boydii
atggacccgttaaccctttcaggcatcgcctccgttctgctgaaagccgggccggggctgattcgttccgtcgggcgctggtttggtggcagcacatctgccgccgctgactcggtggccggtatggtggaaagcgtccgggaaagcctgccggtggctgaacagcaacgcattctggaacaaaaactggtgatgctgtcaccggagcaactggtgcagctggaaaccctgaaagtccagctgcaacagctggaggtggagcggcagaagctggtgctggctgaccagcaggccgctcaccacgaacaacaggaaaccatccgcaacggtgacaacgccacggacagctatgtgcgccagacgcgcccgttgctggcccgtctgtcctgttacagcagtctggcctatgtgctgttgctctcctgtggccagattgccggtgcggttgccggtgcgaacggtatcacgctgcatatgccgtcaccggactgggatatcacgctgatgttgtttaccccggcgctgggctatctcggggtaagaacccttgacggctttgcccgttacagcaaatcgagctgtcacaaaatatcagcggggccgaaatga

SEQ ID NO: 468973 - DNA, 228 bp, Shigella boydii
atgaccgatgaaaccgaccgcatcagtgaagtggttttaaacgaacgtcaggacgtcgttaacgcctggctgatgcggataaaagaagcaccccacagtcggggcttctgcaatgactgcgggaacgttattccggcacagcgccttgcggtgctgccggatgtggtgacctgtattgactgccagcaggcgcgggaacacaggaggaagacgtgtcctgggaagtga

SEQ ID NO: 468974 - DNA, 306 bp, Shigella boydii
gtgtcctgggaagtgatccgggccaactggcctgttttatgggcgctgttgatgacagcaataaacctgattcagctgattctggcgaagacttacgtcaaacgcgaagagtttgattcgctgcgttcccgcgtgtcggtgatggaaggcctggtgaatcagctacccgaccgcaatgaatttcaccgcctgcaactggatatcagcaacctgcggggtgaaatcaaagagctggggccatccatccgccaggtatcccgcatcagcgatttgttattagagaacgaattaaaggaaaaaaattaa

SEQ ID NO: 468975 - DNA, 294 bp, Shigella boydii
atggcgatgaaagagatcctcactgaagaccgtcgtctggtgttgctgcgttccctgctggactgtggcgacagcgcgaatgaatccgtgttgcagacctgccttcaggcctacggtcataaggtatcccgtgatgtggtgcgcacccagcttgcatggctgcgcgagcaggggctggttcgtctgtctgatgtgggcggctgttacgtggctgaaatcaccggcagcggcgaggatgtggcaaacggcctgtccggtgtgccgggcgttaaaaaaccccgtgcgagggactga

SEQ ID NO: 468976 - DNA, 288 bp, Shigella boydii
atggcccgaaaactgaagccgttaagtcgtggagaacgggccgtcgtgcggcagctggcgtactgccttgtgctggcagacattgagcaaaacgccattgtccgtgcatacgaacaacagaccggaaagccctggaacccggatgcaccggatacccccatgaaacgtgccctgcgttcatcaccggcatatgcgcggctgtggaagctgccaggtaaggatattcagtccgttcgtgaagaaatatacgccggtctgaaaacacagaggacagaagatggaaaatga

SEQ ID NO: 468977 - DNA, 582 bp, Shigella boydii
atggaaaatgaacaacgccccacccgtggccgtctttccaaagtggatttactcccggacagcatccgtgagcagttacaccagatgctgcgggaaaagcggcacacgcaggaagaaatccgcgaagccatcaatgccctgattgacgaacataacctgccgggggagatgcagttaagccggacgggcttaaaccgctatgccagccgcatggaaaaagtcggggcaaaaatccgtgcctcccgcgaaatggccgaagtctgggcggcaaagctgggttccgcgccgacgtcagacgtcggcaggctgctgatggagtttgtaaaaacgctggcctttgaaacgtccatgtcgatgacagaagacgacaaacctgttgcaccgaaggcgctggggcaactggcgctggttgcccagcgtctggaagcggcagccatgaccagccataaacgcgaaaaagcaatccgcgatgcgtttgcgcaggaaatggcagagaaaaccgaagagctggtcagagcgggcggtctgtcaggcggtgcggctgacaccatcaaacgtgaaattctggggattagtgtatga

SEQ ID NO: 468978 - DNA, 1536 bp, Shigella boydii
atgacacagatgaacgcattcagtgaatccgatgttctgctgccgtatcagaaacgctgggtggcggatgattcaaaactgaaaatcgccgaaaaatcccgccgtaccggtttaacctgggcggaagcggcagatgcggcactgaccgcatcactgaagaaggaaaacggcgggcgcgatcacttttacatcggttcgaataaggagatggcccgcgaatttatcgacgccgtggcgatgtgggcgaaagcgtttaatgcagccgcggaagaaatccgcgaggaagtgatcaccgacgaagacaaggacattctgacgttcgtcgtgtacttcgccagcggatttaaggtcaaggcgctgtccagtaatccgggcaacattcgcgggatgcaggggaatgtcaccatcgacgaagcggcgtttcatgaaaagctggatgaggtactcaaggcggtcacaccactgaccacgtggggcggtaaggttcgccttatctccacccatgacggcgtggacaacccgtttaaccagctgattcaggaaagccgcgcaggcaaaaaagattaccgtattcacaccatcacgctggatgacgcctgcaatgacggtctgtaccggcgtatctgtcaggtgcgcggcatggtgtggtcaccggaagccgaggcggaatggaaagaaggcctgctgcgaaataccgccacccgcgaagatgcgctggaggagtattactgcgtcccgaaaaacggcggcggcacgtatatcccccgctcactgcgtgaacgtgcggcccgtggcaccggaaaagtgttgcgctttaccggcacgccggagtttaacgcactgacggaaagccagcgccgggcagatatccgggaatggctggaaacggtggtgcgccctgagctggaaaaactcccgaagaatctgcgccactgtctgggggaagactttgcgcgttcgggtgacctgaccgtgctggccccggtgacggtgaacgacgacaccacccgcgaggtgccgtttctggttgagcttgccaatgtgccgtttaaacagcaggagcaggtgctgttctggctttgcgatcgtctgccccgtcgtgacggtatcaaaatggatgcgcggggtaatggtcagtatctggcagaacaggcggcagaacgatacggcgacgaggtggaacaggtgatgctgtccgtggcgttctaccgcgaaaacatgccccgtttccgtgcggcgtttgaagatgatgagctgatccttccgaagcatgaagatgtgatcaatgacctcggggccattcagttactgcgtggtgttcccggcattgacgatgcccgtactaaaggcagtgatggccgcaagcgtcacggcgacgccgctgtggccattttcctgggcttccttgccagcaaggatgactgccaccgttacgagctgcaccgcctgaaccgcccggcgaaaccggaagaaggcaacgcgcgccgccagatgaagctgacacgcggcctgaaaaatgagggaggtttactgtga

SEQ ID NO: 468979 - DNA, 1572 bp, Shigella boydii
gtgaacctgaaacaactggccggggccgttcgccgtctgctgaatccggcaaccggtgaggaagacacgctgaaaaaagaggcgctcaacgaagcacaggcccgtccgcgtcatgccggtgtgcgtccgacctcgccgggtatcagcgtcgcctccgggctgaaccccggcaggctggcaggcattctgcgcaatgccgccgacggcatcacgcgtgatttttttatccttgccgaagagatggaagaacgtgatttgcattacgcctcggtgctgcgcacccgcaagctgacagtggcaggtatcgaaccggtggtggtggccgccagtgatgacgatgccgacgtgcagctggcggacgccatccgtgcgctgatggaagccccgcaaatccccgaactgatgtttgatttgctcgacgggctgggaaaaggcgtggcggtctgtgaaatcctgtgggacacccgcaacaaccactggatgccccgtgattatgagtgggttgatccccgttttctgaaagccgaaaagcccacgctgcgccagttccgcctgctgacggacgatgaaccggtggatggcgtaccgctgacaccgggaaaattcattgttcaccagccgcgtctgaaatccggtctgccgctgcgtaacggtctggcccgtctggtggctgtgatgtacatgctgaaatcctttaccgtgcgcgactggtgggcatttgcggaaaaattcggcattccggttacggtggggaaatacggtcccaacgccacggaggagcaaatccgcgtactgattgatgcgattgcctccattgcctcggatgccgggtgtgccattccgcagtccatgcaactggagatgcaggaaaccgccagccggaataacggcggcgcactgttccgtgaaatggcggaatggtgcgatgcgcaaatcagtaaggctgtgctggggcagaccatgaccacggataacggcagttcgcgttcacaggcggacgtgcacaatcaggtgcgcatggacattgtgcgctgggacgcgcgacagctggctaacacgctgaatgaatatctggtgcggccctacatcgaggccaactacgggccacaggcgcactacccccgtgttgttctgcgtatcagtgaagccgaagatctgaaggcgctgacggatgctctggtgccgctgattgaccgggggatgcgggttcaggaatcggagctgcgggaccggttcggcctggctgagccagacgaaggggctgatgttctgcatccggtttccgccgggatgccgggtgatatggcgatgaaccgcgagcgcgtcgccctgaacagggaacaccccgacgaactggcacagatggtggatgatgccctgcgtgactggcagaaaaccggcgaggcgttcacgaacccggtgctgacactggcgcaggagtgcgacagttttgatgactttctgaaacgcctgcctgagcttcaggaaacgctgaacgcggacgactttgccctgcaactggcggaggtgtgctttaaggcgcgtgcgctgggagacactgctcatgcgtga

SEQ ID NO: 468980 - DNA, 765 bp, Shigella boydii
atgcgtgaaaccctcatcccgaaagaggcgctggcgtggctgaaggcgaagaagctgcgccccggttttgattaccgggatgtatggcgggaagagcaccggaacagcttcacggtggcaaaaatgctgcaactggatttgttgtcggatgtgaaagcccttgtggaagacgccctgcaaagcgggcagacgttcagcgagttccgggagatgctgcaaccgttgctgataaaacgcggatggtggggcgtacaggagatggatgatccgctgacgggtgaaacccgcaccgtgcaactgggcagcgaccgccgcctccgcacgatttttgataccaacatgcgcaccgcccgcgcggcgggccagtgggaacgcattcagcggacaaagcaggccatgccgtatctgatgtacgagctggggccatcccgtgagcaccgggtggagcatgtgaaatgggcgcgtctgtgtctgccggtagatcatccgttctggcagacgcattttgcccctaacggctggggctgcaaatgcaccatccgtcaggtcagccgtggtgagtatgcgcaactggcggcacagggtaccattcacaccgaagcgccggaaatcagaactgtccgctgggtgaacaaacgcacgggcgaagaggaagatgtgccggaagggattgatccgggctggaactacaatcccggtataaaccgtgagcaggagctggcgcgccagctggcggccagacaggcccgttttaacagtgaataa

SEQ ID NO: 468981 - DNA, 957 bp, Shigella boydii
atgcaaccggaactgctggcgctgtgtttttccctgccagaacccatccctgagctgacacccgctcaactgccggaatggcttgaactcgttcctgcgggtgagttcaccgggcgcgatggccggacgtggatgaaccgcaatccacatgaggtggttgcccgttcgtccgacatcaacattccggtggacattgaacatgccaccgaaattaaaggcccgcggggtgaagaggctccggcgtatggctgggtggaagcactgcgggtgacggacagcggcaccattgaagggcgtgttgtctggagtgagtccgcccggtggatgctgagcgagcgccgctaccgctattacagcccggcgtttttccatgacgcagacggtgcggtgacgcgcctgtccagcgtcgggctgaccaacaaacctaacctggattttcctgcactgaatacggagaaaaacccgatgacagtacctgtgcaaatcaccggcctgcttgggctggctgaatccgccacggtggacgataccgtggccgccattaaacaacttcaggagaacgaacaggtggcgctgaaccgcgcacagacacctgacctgacgaagtttgtgccggtggaaacccacaatctggcactgaaccgtgccgaaaccgcagaaaaacgccttcagcaactggaagagaaggaagccgaggcgcttgtggatgcggccatcggggccggaaaagtcgccccggcaaaccgtgacatgttccttgccacctgccgcacggaagaaggccgcaaacagtttgcggagtacaccaaaggtgcacagccgctggttaacaacgacaagcccagccagggcaaggataaacccgcgcagacactgaccgatgccgaactggcgatgtgtcgcagcatggggattaccggggaagagttcctcgccgctaaaccgaaacaggagtaa

SEQ ID NO: 468982 - DNA, 906 bp, Shigella boydii
atgtcacagactatcagttctgaaatccttcatgcactgaccacctgcctgagcgccgcctttacccgtggactgagtggtgtcgaaccgcagtggaatcgtattgcttctgaggtgccgagttcgtccgcctccaacacttacggctggatgaaagatttaccggacatcaaagaatgggtcggtgagcgtcagctggcaacgctggacggttatggttacaccatcaccaacaaactctgggaaagttccattcgcgttaagcgtgaacacattgaagatgaccagattggtcagtacagcattaccgccgaacgctatggccgtatgactgctgtgttcccggacaagctgtgttacgccctgttgtgtgccggttttaacaccctgtgctttgacggccagaacttctttgatgaagaccacccgctgggtgacggtacgtacagcaacgttgtcggcaccccggcatcagacaagggcgaaccgtggttcctgattgatgagtcgcaggtgctgaaacccatcatctggcagacgcgacgcgcctttaagtttgaagccctggacgatctgaacagcgagcacaccttcaagaaccacgagttcctgtacggcgtggacggtcgctgtaatgcgggcttcggcttctggcagaccgccgtcggttcccatgcagcactgacggtggagaactacaaaaaagccaatgagttgctgcggggcatgaagggcaccaacggtgagccgctgggcatccgcccgaccacccttgtggtggggccgaaaaaccgtgcggacgcgaagctcattattgacgccatgctggttaacggcggcgattccaacatctggtacaaggatgtgaagatcgtggacagcccgtacatcaccaccccggcataa

SEQ ID NO: 468983 - DNA, 312 bp, Shigella boydii
atgagtgaaaaagcagaaaccaaaggcgcgaaagccgcaaagaacagcgctgcacaggaaaacccggcaccgctggcagacgttattgtggctgacggtcaggcgaatgaaccacgtccggctgaagacccggttgctgtacagggtgacgcccctgtccggctgaacgtcagggccgtgtctgaaaacgggttctggcgctgtggccgtttctggtcacatatcggtgaggatgtggcggtgagcgctgcggttgccacccgcctgatggcagagccgaatctgattgtccgggaagcggagaaaggctga

SEQ ID NO: 468984 - DNA, 438 bp, Shigella boydii
atgggatacatcacgcaggaagacctgttacgcgcggacggcaatcttgtctggaacatggcgattaaccgggaaaccaacgggctggatgaagacaaaatccgtcaggccatcagtgatgcggaagcggaaattgattcgtttctgtcccgccgctaccagctgccgctgggggtgacggaaatcccgcgcccgctgcaacgcgtggcggtatcgctggcgttttactggttatcagagcgtgacaatcaaatcacggagctgatccagaaacgctacgacgacgccattaaaaccctgcgtgaaatggcgaacggcacccgtgacctgggcctgccgacgtatgccaccccggcagaaaccgacaacgggaaaattattgtggtgggtgccaatgcccggctgttcacccgtaacaacctgaaaggggtgctgtga

SEQ ID NO: 468985 - DNA, 543 bp, Shigella boydii
atggggatttctgtacaggtcagcggtgaccagcgtctggaggatatccgccgcgccgttgaaaagctggcagagggttcattgcagtcagagctgctggaaagcatcggtgcggtggtggaatcacagacccgccgccgcatcatcgatgagaaaaccagtccgggtggcgaacgctggccggactggtctgacgggtacaaaaagacccgccacggcaaccagagtctgctgcgcggtgaaggccatctgctggagagtatccagtacatcgtggaaaaccgcgtggtgcgtatcggttcaccgctggattatgcccgcatcatgaatgacggcttttccggcagcgtgccggtcagcgcccacaaacggcttatctcgcagtgtttcgggcgggcgctgaaatatccggtctggcagaccgtcggtgcacatcaccgcatgatgaacattccgcaacgtgaatttctggggctgtcttctgccagccagcaggagctgcaacaggttatcagtcatttctggaaggaggttctgccatga

SEQ ID NO: 468986 - DNA, 612 bp, Shigella boydii
atgacagaacaacgccctgaactgcgcacaccggggagcaccgttgcggccgcagagcgcattgtggcctggctgcagacggcccttcagggggacacccccgaccgggctgatgtggtggagcgtcacatcggccagttcaacagcacggatgaagtgaaacgctatctgtccggtcgcaccggctgtatccgggtagctgccctgcgtgtccgggatatcaacccgcgcggcgggctgtccggtctggttacctgggtggcttacatcatggcgacggattcgtgggggtactcccgcgacgtgcgctgtgaagtgctggccgggaaggtgatcaaacgcctgctgtcgtcggatgccaccgggggcatgggggctgaacgtatggccgctgatgtgcgggcagacaacatttactccgtcagcctcgacgggctgggtgtcaccatgtgggcggtgacgtgggagcaggaattccggctggatgaagagattgatctcgccgcgctcccggatttcctgcgcctcggggcgacactgcgcagcggcgaacacactgaaattaacgacgtgatccatgtacggggtgacgatggaacagaaactgattaa

SEQ ID NO: 468987 - DNA, 201 bp, Shigella boydii
atgtacggggtgacgatggaacagaaactgattaagccagcgcgggaaaacgtccgtgtccgtaaaccggatggcgcacatttatccccggaaggggaacgtctcaacgtctgcgcttactggctgcgccgtgaagccgagggagatgtggaaataaccacacttccgaaaaataacaacaaaaccagagggaaaaaataa

SEQ ID NO: 468988 - DNA, 1005 bp, Shigella boydii
gtgaaggatgatgccacggataccgtggagctgaccgtgaactggcacggcgtcaccggcaacggtgccgacgttcgcctgaactaccacaccggtgaagccttcccggcaggtgtgaaggtgaccgcaaccgcgtttaccggcggcaccgggacaccggaaatggcagacgccgttgcggccatcggcccggagtggtttaccgatatcatcgccccgttcaccgacacgaaaagcctgaacaccctgcgtgatgaactgctgaaccgctgggggccgctcaaaatgatggaagcgcagctgtggacggcgtttcgtggcacacacggggaaaccggcacgtttggtgaaacccgcaatgactggctgattagctgtatcggcaccaacctgtcaccgcacccggcgtggatgtgggccgcgtcatacggcgcaacggcagcgtatcaccttgccattgacccggcgcgaccgcttcagacgctggtcctgaccggcattctgccgcctgcgcgtaatgttcgctgggatatgccggagcgtaatctgctgctgcatgacggcattgccacgcacatggtggacgccggggataacgtctgcatcgagcgcgaaatcaccatgtaccgggttaaccagtacggtgatgcggatgtgtcgtacctggatgtgcagtcacccgccacgctgggccgtatccgttacatcatcaagaaccgtttcacgaaccgttatccgcgccacaagctggcggatgatgacgtgctggactcgctggatgcggggcagccggtgatgacgccgaagctgtgcaccgcagaactgctggatatctgccagaccgaacttctcccggcgggccttgtggagaacttcagcgattacaaagacacgcttcaggtgacacgtgacagcagtgataaaaaccgcctgaactttatctgccacccgaatctggtgaaccagctgcgtgtgctggcaggcctgattcagttcaagctttaa

SEQ ID NO: 468989 - DNA, 357 bp, Shigella boydii
atggcaaaaattcttggtatggcgaccattcgcgtgaatggccgcgaaattaaaaccgaggggaaatccacgctgaatccgggcggcttcagccgcacccagcatatgggcggcggcaaggtctggggtatctccagcaagatggcctcgccgtccatcaaggtaaccattgcggcggcagcggatatggacgtgattgaaatcagcagctgggaagatgtcacggtgatgttctacggcgacaacggcctgaactacatgatgacgggttccgccacggataacccggcagagctggacgaggattccggcaccatcagtgccaactttatcggtgaaaaatgcgtgaaggtgtga

SEQ ID NO: 468990 - DNA, 396 bp, Shigella boydii
atggccgcaatggaatttgaactgaaacacgggcttctgaccggcaaaggcacggcagatgaaaccctgcataaaaccgtgaaactgcgcgaactgaccgccagtgatgtgattgatgcgcaactggccgcagaacgcgtcgtcatgggcgggaacggaaaggcggtggcctactgttctgaggtgctgatgggactggagatgatgcgccgtcaggttgcgtcaatcggtaatatccccggcccgctggacatgaaacagctgcgaatgctccacccggcagaccttgagcttatcagcacgaaagcggctgtgctggatgacatgcttgaggaggtggcaacgcgggggcgaactgatgccgctggcgtcggcactgatgaacctgctggttaa

SEQ ID NO: 468991 - DNA, 138 bp, Shigella boydii
atgccgctggcgtcggcactgatgaacctgctggttaacctgtcttcgcgattcagcattcagtacctggaacagctgcccctgcggcagctgttccgcctgataaagcaactggagaaacagcatggcaacaggtaa

SEQ ID NO: 468992 - DNA, 1305 bp, Shigella boydii
atggcgcagttctgggaaaaaggtgtccggggcgctgatgcggtcagcaacacaatggacaggttgtatgcacagttcgcggtgggttctgtcagcgttgctgatgttgcccgcgcggccccgaaactgttttccatcattcaggatcagggaccggaagccattgcgcagatgggggcatttgctcaggtgtttgccaaaaacaaaggcagcattgatgagacagtgaccagtattcaggccatgtatgcctccctgtcggacaaaaagaacattgagttcctgaaaaaaaacggcattgacgtttttgtcaaaggcacaaaagacatcaaaaagccctatgagctgatgatggaaatccttaaacgggccaaatacgacccgctgaaacttcaggatgtgtttgatctgaccggaatgcaggggattaaggcgctgcttaaccctgaaaaccggcaactgatggaacaaatgatttacggcacgattgagctgggttccacgcaaaaggccgcacagaccaatgccgaaggctttaatgccgcgatgcagtcgctgaataacgaatggcaacgttttgctgaagggcaactggcaaagcccgttcaggacctggcggatgcgctcaacagcgtggaccagaacactgcccagaactggttgcaggtcggtaaatatatggcgatcgcgctgggcggcattatcgccatcagaaagacgtatcagttcggtaaaaccatccacgacatcatgaatcccaaagggaaaggcaaagggatacccggcagcattacggatgttttcggctccggtgtgatgccggtttatgtggtcaatatgggcagtggcgggatgaagggtaataccggcggtctgccggatgcgccggattcatcgcgcaatccccgtaactcccgcaacccacgtgggccaaagacgccagcgctggttacaccacaaactgcatcaggatttaatctccttgacatggtgctctctgctttccctaagaacaaagaggaagcagatgcgttaatcgcacgggttcaggaaaacaacaaccgcccgacggtatggacggatatcaggaactggtttaactctctggaaaaaaagaatattgccgacccgcgaccgtgggctggtatgcaacccactcagaattatcctttccttccgcaacaattgcagggggaaatccgtgtggtggtggaaggtgatgcccgcgtgaaaagcgtcagagtggatcaacccggcgtcagactcagtgcgcaggctggcgtcaccagcgtggagcagggttaa

SEQ ID NO: 468993 - DNA, 1275 bp, Shigella boydii
atgacaacgagcaacggtaaatgggacgggctgcgcgacgcctcgtttcgtggcgtccccttctttctggtggatacggagggcaccggtggtcgtcgtgccattccccgtgcttatccccggcgtgaaaccgcctggacggatgataacggggccgttccggggcaacagcagattaacgcaaagctgccaggtaaaaacttccgggatgatttaaacgcccttttagatgcgctcaatacccccggccccggcgagcttgtccacccgtggttcgggatacagaccgtacaggttggcaaggtcacccatcgcctcagcacggaggaagacggcattgcgtatgtcacctttgaagtgtttgaggcaggcgagcgcctgttcccgtctgcggcggataacacgcagcaggaagtgctgacaggcattgatgcggtgaaagccgccattgacgatggcgactggttcggcgcactcgacgggctgggtgacatggccgacagttttctggccgatatggaaaaccttgtggctaacctgcccacgttaccggcagcactgaatcagtggatggacaggctgaagcattttaaggcgatggccggaactctcattgccacaccggggcgtctggtcagtgagctgtcagcacgggtggaagatattgcgggccttgtgacggaaccacccgaagcactggcggtttacacgacattacgcaaccagtgggccggagaacgtgccaggcagattgccaccggcgcactgccggaagatatcaccgtgaagcccggcagcgtggcagacggcaaccccggctttgccatcgggctgtcaccggattatcagccggtatctgacagcctgcaaaagaacattgacgacttccgccaggtggttgtgctgggagccctgctgggacaggccagtgccgtggcctcgatgacgttcgatacccgtgatgcggcgttatctgccggtgacacgctggcggctgaactgcatgagcaggcggtggcggcggtggaaaacaaccagcggacattgtggcgaacgctgcgcgatttacggcaggccgtgattacggatgcccgcgagcgtgccgcccgtctgccggaaacccggcaggtgacgctgaccacaaccacctctgccgcattgctggcatggcgcgagcatggtgacacacgccgacgggatgaaatcgtgcagcgtaaccgcctgcgtcatccgtcattcatcctgccgacgcaacctgtggagatcaccgactga

SEQ ID NO: 468994 - DNA, 1071 bp, Shigella boydii
atggaatccgtgattcttaccgttgacggcaaactgtgggaaggctggacggaaatgtccgtcagccgttccctgaaggcgattgccggtgagtttgaactcagtgtgacaacccgctggtcagcggcggcaccgcgcgtgattcgtgaggggcaaccctgcacggtcaggctgggcgcggataccgtgctgacggggtatatcgatgattttattcccggctatgacgctgaaaacgtggagattcgcgtcatggggcgcgataaaaccggcgacctggtggactgctctgtggtgcattcgtccgggaaatggaaaggcgtgcggcttgaacaggtggcggctgatgtctgccgcccgttcgggataaccgtcatcacggaaaccccgaccggggaggcatttgcgtctgtcgttctggaacagggtgaaacgggctttgaactgctcgaccggctggcaaaacagcgcggcgttctgctgacgtctgacggcgcgggtaacctgattatcacccgcgcctcttccgttcgcgcgggcgtgtcactggtgctgggaaaaaatatcctcgccgcccgtgggcgcttcagctggcgggagcgtaacagccagtacatcatcaagggcaccaccagtgccggtggcaaactgtgggacagccagcctgccccgatggtgggcggtcgccagtacatcaccgaagacccggaaattaaccgttaccgcccgcgcattctggtcaatgaagacagcctgaccgtgggcggggccagcattcgcggggaatggtacaaagcccggatgctgggagagtcccgcacgacggaaatcacggtggcaggctggcgcgaacagggcgacagcggcccgctgtggcagaccaaccgccttgtcgatatcgacgacagcattcagaacctgaaaaccacctggctgatatccggggtgacatggacggatggcgcacaggggaggatgacggttctggcgctggttccgcctgaatcactggacatgccggaaatgaaagcgaagacgaaaaaaacaaaggcggtggccacatgggattaa

SEQ ID NO: 468995 - DNA, 537 bp, Shigella boydii
atgggattaaacgcaattgcccgccgcctgcgactgatggttgaccgcgctgttgtccgcctggtgtctgacggtctggcacggcagaacctgcaaattcagacgctggcagatgccaccgatgacgacgtggaacgcttccagaactacgggtttacgtccgttccgccggaaggttctgaagccattgtgctggccgttggcggacggcgtgacgggctggttgccatcgcggtggaagacaagcgatgtcgcccgaaaggactgtcccccggcgatgtcagggtgtatcaccgggacggcaaatcacacatcaccctgaaggaaaacggcgtcattgaaatcacaggagaacaggtagacgtttcagggaaaacggtaaatctcactgccgacgaactgctgaatattatcggtaaacaaatgaaattcgtcggtccctgtgaattcactgaagatgtcagaatcaagggtaaatcattcagcgaacacattcataaggacggcgacaatgagaagacatcaccgcccgtatga

SEQ ID NO: 468996 - DNA, 453 bp, Shigella boydii
atgacgacagaaatccgctggaataacatgctctcacggggtgacatcaccgtcacccataacggcctctcacgggatgaggggctggtcactcaggttcttatctgccttttcaccgatgcccgcgctgatgacgatgatgtcattcctgacggctccggcgacccgcgcggctggccgggcgacacgtacagcgatttttcgtggggttcccgcctgtggctgcttgagcgtgaaaagctgacggaagatgtccgcctgcgcgtggaagattacgcgcggctgtccatgcagccgcttctgcgtgccggttacgcccgtaacgccaccgtcacggccagcatcatcattcccgaccgtattgcctttctggtggtgttaacccgcccggacaaaaccacactcagaatcgaaatcacccgtcgatgggaggccaccattaatgccgtatga

SEQ ID NO: 468997 - DNA, 1077 bp, Shigella boydii
atgccgtatgaaatccccacgctgggcaaactgattgccgacggcgaaaaagatattgcgtatgaactcggcctgcaaaagctgccgcctgtcagtgttgagcaggcgctgaacgtgtcattcagcagtcaggtccgggatttatacgaccatcagagctggattaaggaccagataatcccgtccaccacgtctgatgatgaaaccattatcaaaacagcaaagtatgaaggggttatccgcaagcaggccacctttgccagcgggcgggtgaccttcaccagtcagtccccccttccggcagaaacccggatgcagtccgacacgaaccaggtgtatcaggtactcacgtccggcgaggtgcaggacggcgaggtcaccgtcatcgtgcaggctgaagaagccggtgtggcgggcaatcttgctgccggtgccgtactcaccctgctgtccccgctgcccggaacggccagcacaggcgcggtggctgaaggtggcatcaccggtggcgcagacactgaatccatcgcagcgctgctggaccgtctgctgtatgtgcgccgcaatccaccgacaggcggcgcgttgcatgactacgtgatatgggcgcgtgaagtgccgggcgtcagccgcgcgtgggcgtgggatgcatggcacggccccggcacggtcgggctggcatggctttatgatgaccgggaaaacatcgtgccaacccgcgaagatctgaagacaatggagcagtatctgttctgccacaaacacccggccacgggcgtgatggtgggcaaaccgggcggcattgaggtctggccggtacaggtcaggctgaagaaagtcagcatatccatccgtctgacaccggacagcctagcgaacaggagcgccgtccgggcaaacctgaccgcgttacagaagacactggcacccggtcagacgctgccggtgtcctcgctgcgcacggccatcggtatgacgtccggcatcacggattacttccttaacatcggggaggacaccaccagtgatgtggatgagcttatcaccatcggggaggcgacatggctcacagcgtga

SEQ ID NO: 468998 - DNA, 585 bp, Shigella boydii
atggctcacagcgtgacggaatggctggccgcactgcaacaggtcatgccacggggtaaggcatggccgcgtgataacgacgcggatttaaaccgctttttaagggcgcttgcagaacgtttaaaccgcactgaatacgacgcctcgcgtctgcatgtggagatgcgcccggaaaccacgctccggctgctgccggagtgggagcagtatctggcgctgccggaatgcggaattgcccccaccaccagggaagcccgccgccgtgccgtggtggagaaataccgtcgcaggggcgggctggcaacctggcagactgaagccgcagcagcggcgctgggcttcaccattaaggtgacagccgttctgccgcaccactgtctgcgcgactgcatgtatccgctgcatccggcgcggtatcgctggatgctgaaagtgaacgtcccgggtaaagatgccgggcggtttacctgtattgatggcgtcatgacaccattaatcagcgaacggacccgcgagctggaatgcctgctgaagcattaccggctggcgggcacggaatatgaatattattacaccggagaataa

SEQ ID NO: 468999 - DNA, 273 bp, Shigella boydii
atgagcagaagatatgtcaaggagctggctatagagtctggcacccctttgggtatcgttcctagctccaactatgccaaggctttaaaccgtgactctgtcgtcaaagtgatatcaaaagacatgaatatggtcggaaacgatctcaggcggtcagaaagccgtgtttatgctgaatacatagtaaagtgcactgttcgttttgttgtctctggtggcttcaactcaggcctctgctggtcgttgtcagcacgacagcgatactgccgctga

SEQ ID NO: 469000 - DNA, 369 bp, Shigella boydii
atgctggaagcggccagagaggccagacgtcagggaattgaagcatggcgcacagaacaggaggcgaagccgttcacgtttgaatggaacggtcgcacgtggaacgctggcctcaactcagtggcccgcctgtccccggtggtcatgctggcaaaatctgtcgcggcacaaacacatatggcgtggagtgatgcggataatcagcaggtgcagctgacgacgcaggaacttgaggaactggccacagcgatgatacaggccattgttgagcgcaacgatgagatttatcgctgtcagcgggagatgaaagaacaactttctctgttgcccacactggacgaggtgagagcgttcagaccaggcgattaa

SEQ ID NO: 469001 - DNA, 696 bp, Shigella boydii
gtgggaaaagagaagaaatcacgcattctgacaaaaccctgcgttattgagtatgaaggccggattgtcggctatggttcaagggagctgcgcgttgaaaccatatcctgctggctggcccgcacaatcattcagacaaagcattattcccgccgttttgtgaataactcctggttgcatctgggcgtattcagtggacgtgatctggttggtgttcttcagtggggatatgcccttaaccccaactcagggcgtcgcgttgtgcttgaaacggataaccggggctatatggaactgaaccgcatgtggctacacgacgacatgccccgcaactctgaatcacgggccatcagctacgcgctgaaaaccatcaggttactgtatccgtcagtggagtgggttcagtcctttgcagacgaacgttgcgggcgtgcaggtgttgtgtatcaggcgtcaaattttgattttattggcagccatgaaagcacattctacgaactggacggtgagtggtatcacgagataacgatgaatgcgattaatcgtggagggaagcgcggcgaatatttacgagcgaataaggagcgggccgtggtacacaaatttaatcaatatcgttacatcaggttcctgaacaagcgagcaagaaagcgactaaatactaagctattcaggattcagccttacccgaagtga

SEQ ID NO: 469002 - DNA, 228 bp, Shigella boydii
atgatgtcacgaaatataaaaatggcaacggatgcgcagaactggttacaggcgcacgggagtcacgtaaatgaatcatatctcggcgtggcgcgtccggtacttgaaatcacctgcccaccaccggagctggtcagaaacgctgtcaggattatggagcataaatcaggggttgcccgttcagtatggacggcccgccttaatggctgccagattatctggcgttaa

SEQ ID NO: 469003 - DNA, 951 bp, Shigella boydii
atgactgatattgatgatgttttcaacactattaacgctttgattaacgagggcgacaagtctcaggaagatattgctgatgaagccggaatgtctccggcaacactctcggctctgcgtaaaggagagtacaacggtaatgtcgaaggtatgcatgacaaattacagaaatggtatcaggtctggcagaagggacagaacttgtcaggtacccctggtgttgtgaagacccagacattttgtgatttgcatgagctgtttaaaacagtgcgctcactcgggattatcagtgtcgttgttggcgtaccgggtgtcggaaaaacctttgctgcccgggaatattgtcgcaggacagctaatgcctggatggtgactcttgctccggcacattcgagcgtaacggaatgcctccttgaaatagcatatgcgctggaaattaataatccgggaagaaataaggggaatataacccgcgccattcgcagaaaactgggtggtggtaaagaaaccagtggccgtgttaacccccttctgattattgatgaagctgatcacttaagtgtggatggtctggagcaattacgcgccattcaggatgccactggcgtggggatggttttaattggcaacccgaaacagatggcggatgccacccgtcgtgggactgatgaactggcccgtctgttcagccgttttgccatgacaaaacaactgcgcaaagtaaaaaagaccgatgtgatggctgtagccaaagcatggggagtaacacaggaagatgagctggacctgctgatgagggtagccgaaaagcccgggggattgcgtgtattaactcacacactgaatcatgcgtggctggcggcaaaaggtgcaggcacatccctgaataaaagtcacattaaagcggcttttaaggaggcttacagcaaccccaggttactgaactggtag

SEQ ID NO: 469004 - DNA, 2097 bp, Shigella boydii
atgcagtcgtacgttaccgtaaatgacctgctcggcgtaccaggaatgccagccaccacaaaaggcatccgacaggcgttacagcgtttttctcgtgatcttggtgacgttagtcgccgtcgggaaggcacaaaagccattgagtaccacattgattgtctgcctgaaataacacgaaaggcactgcgtgaacgctatgtggaacagctggtggctacagagaacaatgtttctgaagtgaaagctgttaccagaaaaacacgcaatcctgacgctgtccaggcaatcgaagcatatcgcggttctccacaactgatggaagaacgcctgaatgcgctgaccgaaaaccagcgccgggtatctgaagcaagagctgcgctggtggtggaagtgctgaagctggaaagcgccggtaacctcgggcgactgaaagccattaactttcttgttgaaaaagcccgtaaaggtgagctgccggagcgcctgcaacaggccgcagttaacgccaatgcaaaacgtggcgctaatcgtactatcagccgcgatccactttaccagtgggttctgaaatacaaccagtcgcagaacgccgccgaacggctgctgttactggcaccgggaaaacgcgacgaaataaaaccggaagaaatcagctggctgcctgaatttctggcgcagtatcggcaggtgaacggcagacccatgtcagaagcctacgaggattttgtcgcagaatggcagcgtcgccatgcggacgaaccgtacatgctggaggtgatgccttcctatgatgttgtccggtatgccatgaaaaaactgccggaagtggtgagacaaaaagggcgcgttaccggcagtgaataccgtcagcttgaaggattcacccgccgcgactggacagctatgccggtgaattatgtctggattggtgacggtcacggtatgaagctgaaatgtgcgcatccgatccacgggcgtccattctcaccggaagtcacgtttgtgatcgatggtggaacacggtttgttgttggctggagtcttgaccttgccgaaaacgtgttcgccgttgccggtgcgatacagcacggcattcgcaaccacggaaaaccgttcctgtattactcggataacggttccggtgaaacggctgacatgctggacaaagaggtcgtgggtattctgccacgcctggggattaaacaccctaccggtattgccggtaatccacagggacgcggcattattgaacgcctgaaccggacactgccgatgcgtatagccaggaggtatcgcacctattttggcaagggtgctgaccgggaatcgttgcgtgtacttaaccgtgatctgcgttcagcgtttaacgccctgcaacaggacaagcctctgaacgaccgccagaaagcggcaatgcgcgagctgccatcgtgggcggagcttattgaggctattcgtgaaggcgtggaatggtacaacaaccgcccgcattctgagctgccgatgaaaccgaacggacggcattacagcccgacagagttcagaaaaaaacgcctggcagaagaagacaccgaaattgagtggctgagtgatcttgagctgcgcgacatgttccgcccaatggtggaacgaccggtaagacgctgcgaaattcagtggctgaacaatatttactacgcgccggagttgcgtgacgaacacggtcgcaaagtgcttatcagttatgacattcatgacgccgagcgaattacggtacgtcgcaaggacggcagctttatctgtgaggcgatatggaacggcaataaacgcgcagcctttgctgtcagtgctgaatatcacaaacaacagcagcgtattaaaggaatgcgcaaacgcgctgaggaaaaaattcgtgatgctgaagatgaaggtattcagattctggaacacaaacaggctgaaccctggctgagtaatgtttatcgcccggttggtaatgtggtggcagttcagcaaccggaatatgaagaagagcatgacgaagaatttgaacgcgatttccggctggggatgcaaaaactttttgccatgcaggaagaagatgatccgctggcctga

SEQ ID NO: 469005 - DNA, 564 bp, Shigella boydii
atgagaaaagcaccccaaggttcttttcctgccgatggaaaagaaccgattatcgaaagaatctttaggttagtagaacgatacccttcaagaaatgcggctgctcgggcatgggggatcaatgaaggcactttaaaaaattattacaacaggcgggattacgcaccgataccacgcccgcatcagttaaaaaagatagcagaaagcgaaaatgttaccttggaatggctcatgacgggagagggtgatgttgaactaaaagattccaaagaacccaaaaaagagaatgcggataatgttgatgctcaaattctaatgttcttgtcatttcttaaaccacaagaaaaacaacaagtagctgatgttcttgggagaaaaggagcggagcaattactcattcttctggatgagcacatccaagagttgcacgctctagttggagttcgtagagccatagcgttaagccttggtaatttgccagacgaaaaggttagagagatttacgcgttgtccgaagctaagggcgatcacttaaatctacctcagaaagcagccagcgcataa

SEQ ID NO: 469006 - DNA, 390 bp, Shigella boydii
atgattgaccgtcatgacttcgtaaaatgggtgcgcacacaggacacccgtctggctccaaaacttcaggcaatgcttgatttctatctccgtgcccgtgccagccaggcacgcaccacaaaaccggagaacgcaggccccctttatttcatcgtggacgactgctaccgcgtggacttcacaccacacggtctggccctgtacaccctgacgccacacggcaactccctgctggcgtattacaactccccggtctccttatttgcagcgatgctgacgcatcgcactgctggcggctgcgcttccctgagtgaatacaccactgagtttaaccgcctttctgccctcttctcgcaggagtggcaacgcgtaacgggataccagccatga

SEQ ID NO: 469007 - DNA, 231 bp, Shigella boydii
atggcaaaccgcaaacaacagcgcgcatacgctgcgcgtcgtcacatccagactgaaatcaaccgcagacttttccgcgccttccgcgtcgcgcatatcatgcacatcaatatgctgcatgagcgcagtcacgcactgtcaaacacctattccgccgctgttttcagctatctggcggatgatctgcgcgggcttcagcagctcatccagcagcaaaacaaactccattaa

SEQ ID NO: 469008 - DNA, 555 bp, Shigella boydii
atgtttctgaaaccaatggggggaccaggtaaagcaccgaagcacgtcagtgcctggacacaacaggaagacgaactgcttatctcgctttatcaggatcacagcacatggcaaatggctgaacgacttcagcgaacccgcagcgcagtgatgcaccggattctttttttacgtaatcgcgggttgattggtcgcaagagaaaagcaccgctgagtgcagaagccatcgcctttctcaccaaaaaccgtcacgcaaaaaccgcacgggaactggcccggaaggtgggacgcagcgagtgcaccgtgaggtacacactgcataaacggggttacagccttaagaaatgcggcgagagccaccattgtgccagatacagcgatcgtctgactgagctggttacggagctacgcgacagacgcaacatgacgttctgcatgatcgcgaaacacatcaacatcacgatgcaaatgcacatcagcgatgatacggcgtttcacctctacaaccgccggaccgccgccgacgccctgttgtacgaactgctgccgaactga

SEQ ID NO: 469009 - DNA, 312 bp, Shigella boydii
atggccgttatctatatcgctggccccatgacggggaagcctgatttcaaccgcaccgccttcaccatgacggcgacccgcctgaggatgcagggtcataccgtactcaaccccgcaacactccctgacgggctgagatacagggactacatgcttatcgggagcgccatgctgcactgtgccgatgtgatttacctgctggatggctgggaggactcgccgggggcaaaagaggaacacgccaccgccctgaaactgaatctgatcatctccacaccagaaagccgtaaggaggccaaatcatgtttctga

SEQ ID NO: 469010 - DNA, 960 bp, Shigella boydii
atgaaaggtattctgaaccagcgctcaccgctcaaatgggcgggcggcaaattcagtatcatgccgcagctgcgcgaatatttacccaaagccgcctgcctgatcgaacccttcgtgggcggcggctcggtcttcatgaacacggattatgactattacgtattgtgtgacagcaaccccgcgctgattaatttctaccagcaactgacgaccaacaccacggaattaatggatcgtgcatggtcgctctttaaggatggcggcacaccggaagcctacaaacgccatcgcggggcatttaacaccatcgcgctggccaccgacagattacgcggcgaatccctggaatgggcagcgctgtttctgtacctgaaccgccattgctttaacggcctgtaccgcaccaaccaaaaaggcgaattcaatgtgccattcggcaaacaccgcatgccttatttcccctgccaggaaatgcgcctgtttgctgataaagccaacgagacccagacccgctttattcacgcggatttccgtacagccttcacaatgccggctgagatccgccgtttttcttcggtgcacggcgatatcgccatttactgcgatccgccctacctgccaccggacggtaaagaggcgttcactcactacaacggccgggcatttacccgcaaagaccaccgtgaccttgcggcgctcatgatgaacgcctggcagcgttacggtatccacccggtggtctccaacagtgacacctccgaaacccggcagatctattcctcgtttgagctgcacaccctgagcgttcgccgcgctgtggctgccagcagcagtgcacgccagcaggcaaaagaggtgattggtgtttatccgccagcccgtgaggtccggatccgggatgtcaatgcgggctggctgtctcacattcccgctccacaccccaccacggagatcatgtaa

SEQ ID NO: 469011 - DNA, 240 bp, Shigella boydii
atgaaacccgccattatctgcattctgtgcgagagcactgtcaccggcgaccattaccgcatcagggaacgccacatcaaccctgaccgttcgctgctggacaacatcaccggcccggatgatgaacgcgtgatctgcctgaacgacggctcgcagttacgcgtgcgcaatatccggcgcgaaatcacgctcgaacccaccccattcacacgcgggaaaaaaccggagagtgacgcatga

SEQ ID NO: 469012 - DNA, 531 bp, Shigella boydii
atgttacagatgaaatttaagccctgctttattgacgcattccgcaacggacgcaagaccacatcccttcgcccgacggggtttgattgctaccaggcgggccaggagtcagcagaatattttcatgaagacaccctgacccgcaacatcgttcttcccgattacagcgccggcggtaccctggtttttgaggagggaaccacatttacccgcgcatcagactttgccggactcctgaaaagacagccctaccggcagtatgacaacattcatctggtcacagaaaacaagaacggcgaaaccgtgccgttcgccgtggccttcattgccgatatcggtgtaatacagggccgccagataaccgatgaagtggccgtcagggacggctttaaccctgaaaaccatccccgcgacgaactctttgcattcatgcgggacacctgccacatagaaaaccccaaaaacgaaacctactggcggtacaccttcacccacatcgtgatgttgtcgcagtggagggctgacgcatga

SEQ ID NO: 469013 - DNA, 423 bp, Shigella boydii
atgattaatccgacactcaccctcaaagataaagcccttgcgggcgcaatgtttttacgcaactacgccgcaatgatggctgacactgacaacccgatgatggtgctgtcagtggagcctcaccttatcgccgcagacgcaattgaacaggtggtacaggaaaacacctgtctgagaaatcagcttgccacccttcagacagcagctgacccggcaaaggaaagtgctgaacacacctgccacaccacattcatcaaagggacccgcgtatgtctgaaaaacagtccgcagcaacgcggaacggtcgttgacacccgcaccagtagccccgccattgaccgggttttcgtccgtttcgattcccccttcgaggaagaccgcagggtaaagaccagaaacctggaaataacccccgacaaatga

SEQ ID NO: 469014 - DNA, 186 bp, Shigella boydii
atgaatttcagttattcattcagtgtaccggagtcgttatttgttatcacactgattgcagccgcaatgttttttgccatctgcatactgacacttattgatacatggcgggaaatacgcgacagacgtcgccagaaaaaaaacgggatgcatacaacgcattcattcagcacaaagaagacgtag

SEQ ID NO: 469015 - DNA, 243 bp, Shigella boydii
atgagaaaacacacagcagaacaggtaaacgaatttctgcagggatattacttcgataacgaaattaatccccgcgccagaaaaacacacttcgaagtaatgaagtgcggaatattcagcgtccgcaacaccctgttttgttcaaaagatacgggagccagcgaggaccttaaagaacttaaccggatggcgaaacaattaacggatggcatggttcccgaacccgcaataattacggagtaa

SEQ ID NO: 469016 - DNA, 351 bp, Shigella boydii
atgaaaaaaaacactaataatccatactccaaatttcgtaatggcgtagaacgccatgtacaccacgtcgctaccagtgcatcacgtagtaacagtcgctataacctgaacgagacgcacgcaacaccagatggccatacagtaaaacaaattggcgagcatacctggatgattgagaaagctggaatagtggtccacaaatacccgcgcaatccgtttaccggaaaccgcatttttgctctgagctgcggcgacaatcagttcgggcaggatttcacgttgtacgaagcgctacgcacagttgatcgccttctttacggagaaaattttattaaacaggctgagttataa

SEQ ID NO: 469017 - DNA, 204 bp, Shigella boydii; identical to SEQ ID NO: 18193

SEQ ID NO: 469018 - DNA, 207 bp, Shigella boydii
atgaatcaagttagtcacgacaccaagtcacgcattccgcgtaacaccgccacaggtcaaagactggcacttcgactgtcagcggaggagcgcgcctttattgatgagatggcagctaaagaacaacgctcatcctctaacatggcgcgcatgatcttccttcgcggcctagagctaacccagaaagaacaaaacaaatcttcctga

SEQ ID NO: 469019 - DNA, 414 bp, Shigella boydii
atgtcaacagaaaaagaggaactaagcgtcattattggccgtcgattacgggaggagcgagagaaaattggcatgacccaagatgatatggcgtcgatttttgaagtttctacaaagacttgggggaagtatgaaagaggggtgactacaccggatgcagttatgttgaatctcttgggagggcgctgcggagtagatgtctattacatactttctggtagtcgtgcacatggcatccctaatgctactgaagatgagattgagctaattaaaatatatcgttctgcacctttggctgttaaggcggcagctttggcagccttgactgctggtagtttgtctctaggtacaataagagcttctggcaaaggccatcgtattgcaggtcgtgactataacgaaacgaagggttag

SEQ ID NO: 469020 - DNA, 648 bp, Shigella boydii
atggctgtcaactcaaacggttcagacaatcgcgtttctgggcgtgattaccacgaaaagaacattcggatagagcggtatgatggtcgtcatacagtcaacattgcaatcccttcctgtggggctgatgagcgcccattagtcaaggctcagcgccatcaactgaagttgttggttgataagattgttgatgtcagcaaggaagaatcgtttgttgtctggcgtaaacttcatgctgaaatcggtgttgatagcatcgataagatgacggtgaatcagtatccaaccgcaattagcttcctcaatgcgatgcttgaccgacataaagagcgcgacgcctgcaaatcacttgtaagtctccttcttcgcaatagtgagaataatgaagctagacaaaaacttcttcgatattgtcatatcaattttggaacagggcgcttaaatgatcttactcgctctcagcttcagatggctctttcatggttagatcagcaaacaacagactgtgaaaataatttgccctcagataattctaaatttgtcgataaacaatcgcgattagtgtttcagcaaataattaaaacatatccaaaagaaatgggggtatgttttgttattggtgttttattaggcatgattcttttctga

SEQ ID NO: 469021 - DNA, 1002 bp, Shigella boydii
atgtctgttcgtaaattacctactggcaaatggctctgtgaatgctacccctacggagcagcaggaaaacgcattcgtaaacagtttgttactaagggtgaggcgctctcttatgagcgccgtttaatgaacagtaatttggggagcgagtttcaggatggttctggcccccgcctttccgagttggttgctcgctggtttgagatgtacggtaagacactgtcttccggtgaagagcgaagggctaaacttgaggcgatttgctcccggttgggggatccgcttgcttctcaatttgataaaaacatgtttgccacctacagggaacggcgattatcaggtgaatggaatccaaaggggaagaggaagcttagcgaagcaaccgttaatcgtgagcagtcatatctacatgctgtttttgccgaactgaagcgccttggggagtggtctggtgaaaaccccttaactggcattcgcaaatttcgtgaggaagaaaaggaactggcgtttctgtatgtagatgagattgaacgccttctgattgcgtgtgatgagtcacggaataaagatttgggggttgttgtccgtattgggcttgcgactggtgctcggtggagtgaagcagaaggattaaagcaatctcaagtactgcccggtcgaatcacatttgttaaaactaaaggaaagaagaaccgcactgtaccgatttcacctcaattgcaggctatgcttcctaaaaaacgaggagcgctattttcaccatgttatgaggcttttgacgctgcaattaagagagcgaagatcgagcttcctgatgggcaattaactcatgtgctacgtcacacgtttgccagtcattttatgatgcggggcggaaatattcttgtgttgcaaaaaatactggggcatagcgatataaaaatgactatgcgttatgcgcattttgctccaggtcatttagaggctgctgttgaattgaacccttttgacaatagagggtaa

SEQ ID NO: 469022 - DNA, 612 bp, Shigella boydii; identical to SEQ ID NO: 462151

SEQ ID NO: 469023 - DNA, 387 bp, Shigella boydii
gtgggcgcggcgctggcactctactggcggtcgcaaccgcacagtgcgctacgcagtcaggtacgcggggcgattattcccggcctgctgggcgttggtgaaccgctgatttacggtgtcaccctgccccgcatgaagccgtttgtcaccgcctgtttaggcggtgcggcgggcggtttgtttatcggcctgatagcctggtggggtctgccgatgggcttaaacagcgcctttgggccgtctggtctggtagcgctgccgctgatgacttccgcacaaggcatccttccggccatggcggtttatgctggcgggattctggtggcatgggtttgcgggtttattttcaccacgctctttggctgccgtaacgtcaatctggactga

SEQ ID NO: 469024 - DNA, 420 bp, Shigella boydii
atgtactgtactgttaaagaaatcatccgcgatgtactggatacagacgtgccggacagtgaatgcgtttttgccgtggtgctgacccgtggggatgtgcgtcacatagcccaggactggagtctgacagacgatgagctggaaaccgtcatgcagcggctggacgatgcttttgtatatggcgcatgtgacagagttgtttccgatattgtcaatgaactgatggaggaaaagcgcgtaaaccgtcttgtaacagtccctgcggtgctgctggaaaaagtgatggtgatggctggtagtgaaatttatcgcctccatgctgtcgggagcgagaacgggggcgacggtgacgcatttgtcagggaagaacgtgagattatgcgggtgatgcgtcaggcgctggacggggagaatgggtaa

SEQ ID NO: 469025 - DNA, 1725 bp, Shigella boydii
atgactgagcaggctacaacctgtaaaggtgcgtccttacttaacggtgactcctggcacagtatcaactggcgtcagtgctatcgggaagtgcggagactgcaagcgcgtatcgtaaaggcaacacgagaaggtaaacatggcaaggtcaaatctttgcaatggatactgactcactcgtttagtggcagagcagttgctgtcagacgagttacagagaatagcgggaaacgtactcctggggttgatggtcagacatggtcttccccggaggttaaatttcttgctattaacctgctgaaacggcgtggttacaaaccacagccacttaagcgggtttatatacctaagtcaaatgggaagtctcgtccccttgggatacccactatgaaggatcgggcgatgcaggcgttgtatttgctggctcttgagcccgttgctgaagtcactgctgaccagagatccttcggctttcggactggaaggtctactgcagatgcgatagcacagtgcttctgtgttcttgcgcagaaaacatccgctgaatgggtgcttgagggggatatacggggatgctttgacaatatatctcatcaatggctaatcgataacacctcaacagacagacaaatcctgacaaagtggcttaaagcgggttacagggaaaaggggcagttattccctgtaaattcaggaactcctcaggggggaataatttctcctgtactggctaacatagctctggatggactggaggcgcttcttgcgtcggagtttaaaaagagaacagtcaagggacgattggttaacccgaaagttaactatgtgagatatgctgatgattttattatcactggagagtcaaaagaacttcttgagtctcaggtattacccgtcgtcaggcggtttatggctgaaagaggattaatgctttctcctgaaaagacgaaaatcacacatatcgaggaaggatttgattttcttggacagaacattcgcaaatatggcggtaagatgctgatcaaaccctctaaagccaatgtcagttcctttttaaagaaaatacgcgctgtaatcaaaggcaacaaagctatggatcagcttacgttgatccgcatgctgaacccaatgatcaaagggtgggcggcttaccatcaacacattgtggccaaggtcgcatttaacaaagttgacaatgagatctggctggctttatggcgttgggctgttcggcgtcatcccaataagggaaagaagtggattcggaaaagatatttccatcaacaaggtgcccgaaactggtctttctccacggctaccggagaactccttgccaacggtaagcctcagtatgcaaatctgaggaaagcaatcgatacgcctatcaaccggtttaaaccgattaaaattgcagctaatccgttcgatcctcaatgggagatgtactttgaggagcgttgtgcagacaaaatgcggcacaaactgcaaggacggaaaaagctcattcaaatctggtttgagcagcggggccgatgccccatatgtgatgagaggattacatctgattcccagtggcaggttcatcacatcatacggcgagtcgatggagggagcgactgcctctccaatttgattatgctgcatccgatgtgtcacacacttgttcatgcgaaaggtatacatgtagtgaaaccggctcatgagagtgggcttagaaaggcttga

SEQ ID NO: 469026 - DNA, 393 bp, Shigella boydii
atgtacgacggcgaagaaaggaaaaaactttcactctaccttcacccggaggactctgccgattgtcttgcactggctgaaatcgaaactgttccccggaaaaaacggggggagttatatcggcaggctttgataaccggcctgataatgcatcagcttgatgagcgaattcccgccgtgttaaccgcgctattcaccagagaactgaatgcggatgaggtcattagtcagattgccaggataacaggctggaaaccctcctccggtgatttaaaagaggtactgaaggcgttgggagggcttcagagtacagtttcaccagaacactctcaggatgacggtgaacaggcccgtctgaaagcggctagggtgaagatgcaaaacctaatctaa

SEQ ID NO: 469027 - DNA, 975 bp, Shigella boydii
atgagaattttttgcgatgatggttctacaaatgtgaaacttgcctggtttgaaggcaagacgctgaaaagtgcggtatcagtgaactcttttcgccataactggaaagtcgagggcttaggcagcagtcgtacctataactatttgcttgatggccgtaaatatacctacgacccggtcagcgaagatgcgatcagcacgactcatattgagtatcagtactctgatacaaatgtgttggcagttcaccacgcattactgaacagtggaattgaaccccaggagatcgatctcaccgttacgttacctatcagcgagttttacacggccgactgccagaaaaatacgcttaacattgagagaaaaattcgcaacctgatgcgggaagtcaccctgaacaaagggggaacttttaccattaaaagcgttgaagtgatgcctgaatcactcccggctgtatttactcgcctagttgctgacaatgttggtcagtacgaaaaatcattggttatcgatctcggtggtacaactctggatgtcggggttattgttggccagtttgaggatgtttcggctgtacatggtaatcctgatattggtgtatcaatggtcacgaaagccacgctcactgcactgaaaatggccagcagtgataccagtccaatgattgctgacgagttgatcaaaaacaggaagaacctggattttgtggggcaggttgtaaatgaggtttctaaactaaatctggtgctggataccattgatacagcgataaataaactgggcgagctagttgttgatgatttgctgcagtatcgaaacgtaaaccgcgtatatattgtcggtggcggggctgcactcattgctgatgctgttcgtaaggcatggaaccaccttggcgaaaaggtggttcttatggatgaacctcagacagcgctggtccaggctattgcacgcttcaaagcggaggagtaa

SEQ ID NO: 469028 - DNA, 375 bp, Shigella boydii
atggctgatgcgtcaaaacttagaactaaaagaacccgtagtgggttgggggtacccccgggccccgacgaagtggctaccagcttgaatgcgcctgagatagctccggctgtcgctgccactgatgttcagagacaacaggcagactcatcgccagtgcaccatgagcctgtggttacgcaaactgtgaccgaggtatatacccgccgcgatggccgttctgccagaaaaacaaacaggacgctggcatttgcaacacgtgtcacacctgctttcgaccaagagatccgggatatcgcagagcgtgaggggttgaaactggtggaagttctggaaaaagcagttgaggcatataaggaaaaacagggctattaa

SEQ ID NO: 469029 - DNA, 633 bp, Shigella boydii
atggcctggatagttggttttatttctcagaaaggtggtgtgggcaaaagcactaaagcgagagcgttagcgcgtgaagcatccgcctgtggtatcaaaacaaaattagctgatctcgacttggaacaggcaacgagtgctgagtggcatcgtagacgtctgtcagctggtttgtcaccggttgcttcagttgaagtgttttcaacagcaaagcaggcgatagaatctgccggcgattttgaccttctgattcttgatggccctgctcgtgcaagtaaaggtacttcagaaattgctaaggtcgccgaccttatcgtccagccaacgggggcctcccttgacgatcttgtcccggcaattaaagttttcaacgcgttggtaaaagaaggtataccacgttcaaaactggtcttcgctttaagccgggtaggtaccgaagcggaagagctggatgctcgtgcatatatcagtgaagcaggttatgaaactttatctggatgcctttttgagaagccagcatacagaaaagcgatgaattcaggactcgctgtgacagaaacacgttataaaggtttaaacgagagagctgatgaacttatccaggcactcatcgataagattggagaagagtaa

SEQ ID NO: 469030 - DNA, 189 bp, Shigella boydii
atgttgacccgcaaaagtatagataccgttctgctctctgttggtgctgagaagctctcacaacgtgaatgggactggatgaagatgctcaaacccatggacccaccacctgcgatggtcgcggcctccatcctggagcgccgtggcgacacagcagcccttacccggctacaggataccgggggttaa

SEQ ID NO: 469031 - DNA, 171 bp, Shigella boydii
atgacgcttgcagaacgtcttatacagaaaggttttgaaaaaggtgctcttgaagtggcgcgggaagcagcctgccggcttcgggatatgggctggccgccggaacggattcaggaggcaaccggactttccggtgaagaactgaaaaaactgtttcctgatgagcagtag

SEQ ID NO: 469032 - DNA, 672 bp, Shigella boydii
atgtatccggcggatcgtagacaacttaatactgaacgtcaaatatatttggagcaacagttttttgtcgatatttttccaatacctgcttgtataagaaacactaatggggattttgttagctacaatacaaatttctctaaggaatttataagaactattgatatcaaagactggttttactcccttcctgtacaggtggctacatcgtttttaagagaagaactggatgctatgtctttgccttcgtccatgaataaaatacagaacgtaactataggtgataaactctggctggtccaatttataccattaatgtatgggaaagtagttaatgttttatggctttttttctgcaaaaaatctaatatgatactggattcttgtagaggattgctttcaaatataacaaataacagaatgcttgaatttaaaaacaaatcaacggaaatccaatggaaagtttttattctttattcatttggtttttgtcatgaatcgatagcatctcttttgtctattactaatggttcttcccggaatgcaatttcagaagtgtataagtttttcggtatacgttcaaaacataaattgttaatgatttttcatacaagcgggatgcatagtttattcttggatgaattgttttttattttaaaatgtgctgaatag

SEQ ID NO: 469033 - DNA, 267 bp, Shigella boydii; identical to SEQ ID NO: 463134

SEQ ID NO: 469034 - DNA, 942 bp, Shigella boydii
atggaaatggcatcagcgtttactcttaatgttcgtctggacaacattgctatcatcaccatcgacgtaccggatgagaaaatgaataccctgaaggcggaatttgcctcgcaggtgcgcgccattattaagcaactccgtgaaaacaaagagttgcgcggcgtggtgtttatctccgcgaaaccggacaattttatcgccggagcagacatcaacatgatcggcaactgcaaaacggcgcaagaagcggaagctctggcgcggcagggccaacagttgatggcggagattcatgctttgcccattccggttatcgcggctattcatggcgcttgcctgggtggtgggctggagttggcgctggcgtgccacggtcgcgtttgtactgacgatcctaaaacggtgctcggtttgcctgaagtacaacttggattgttacccggttcaggcggcacccagcgtttaccgcgtctgataggcgtcagcacagcattagagatgatcctcaccggaaaacaacttcgggcgaaacaggcattaaagctggggctggtggatgacgttgttccgcactccattttgctggaagtcgctgttgagctggcgaagaaggatcgcccatcttcccgccctctacctgtacgcgagcgtattctggcggggccgttaggtcgtgcgctgctgttcaaaatggtcggcaagaaaacagaacacaaaactcaaggcaattatccggcgacagaacgcatcctggaggttgttgaaacgggattagcgcagggcaccagcagcggttatgacgccgaagctcgggcgtttggcgaactggcgatgacgccacaatcgcaggcgctgcgtagtatcttttttgccagtacggacgtgaagaaagatcccggtagtgatgcaccgcctgcgccattaaacagcgtggaattttag

SEQ ID NO: 469035 - DNA, 1503 bp, Shigella boydii
atgaacaaaaagctgtatttattcccagactcaaacatttttctacaatgcaaggacttgacgcaggtaaatttttccgagattactgcttgtgatgaagtatgtatcattattacaaggcccattcagcaagagattgaccgccagaaagggcaaggtaattcccgcctatccaaaaaagcaaggaaggctgctagcctatttaatcaagtagttgattcaactgacatgactcttgttattcgtgaacgctcgccgcgagtttttcttaccatggatctaagcctgaaaccatgtgaacagttatctgaacaattggattatcaggaggccgacgatcgttttgttggtattgcggcagggtattgcgctgacgatccagattcggaggtggcaatcattaccaatgatagcggtccacgtttttcagcaataaaacataatataatctgctataaagtgccttcttcatggttgcttcctgctgagccagatgaaaaggataaacaaattaaattgctggaagctaagctgaagcaattcactcagtctatgcccgatttcagcattaaagtagccgatgacgagcaattaaatattgtacttccttattatacagctttatctgaatatgaagttgataatttgctttgtcaactaacggatgcattcccattggttacaaactttgacaatgaacaaactaccccacaatcactagaaaaaatcatcaagtcatttagtcaacaggagtatttccctgtatcagcagatgatatttctctttataaagaaaaacattatccactttggaaaaagcagtgtgaagaaatactgaaaaactgtcatactcatattaatccgaaggcaataaattacccgctgtcgtttttattacaaaacacaggttatactatcgctgaacgtgctgtggtaacatttacagcaaaaggagattttcgtctgtgtggatttaattgggagataatggaagagctgactgaaagcaaaaggattgacctaccttcagcccctaccgcccccaaaggaaaatggcgtagtgtatgtggcgtaacagaaagaatgccttacgctgggggagctttggaaacaccgctatccagtataatttcaaaagaaattggtcctttgttatctcttactccaacagaaagggataaaaacgatttttattataaagaaaagagaaatgagccagttcaagttgtatcgctggaatgcgaagagtggcgtcatcaagtcaaagaagaaatattcccgttgttcgtatatacagccaacaaaccaaagaaagtgaatggtgcaattgaggtgagagttgatgcaaataaccttaccaatccggtcattaaaacatttaaattaaaaataactatagaagaacatagtgcattttcaaccataacagaaatggtgcagacatacattcaagagcagaagaaaagacagaaaagttctattagcgcacaaatcaaaacatga

SEQ ID NO: 469036 - DNA, 261 bp, Shigella boydii
atgttccgttgtccgctttgtggcgcatctgcccgtatccgcaccagtcgtccggaaaatgattcaaacaccgtgcggcaaaagtattaccagtgtaacaatctggaatgcggcgtatgcttctcaacactggaagctttccataaattcacatcaaaacacgcctccggcgttcactcttcagaagatatcccgtggcatgatctgccagcttcacacaggggaaacaatcagatgagcttgcctttacctcagaattaa

SEQ ID NO: 469037 - DNA, 441 bp, Shigella boydii; identical to SEQ ID NO: 467987

SEQ ID NO: 469038 - DNA, 546 bp, Shigella boydii
atgggtaatgtagcaagaaatcttttcggtaattcagcaggtagtgtgtcgcattctgagcgtgatgtgctttatcatggtggcgatggcggcagtagtggaggcggaatgtcagataaacttgaaaggcgaattgagcggctcgaaggtgatttatcgctaacaagaaacgaccttgcgacgcttgctgaacgcactacaaacctctcaactaaagccgatgttggtgaggtgaaaggtgaactcaaagcagacatagcacatctgaaaggtgatcttgaatgcgatattgcgaatctgaaaggtgagcttaaatctgatacagctaacctgaaagagcagctcaaatcagacattaacagcctgaagggtgagcttaccgaagcgatggataaacgctttgacaagattatggatgagatgaatcggcggtttgacaaggttgatgataatacgaagtggcgttggagtggcattattgtgccagtgtgcacaaccattttcacagcggcggttgctgtatttgttgctaaatttgttggctga

SEQ ID NO: 469039 - DNA, 501 bp, Shigella boydii
atggaaataaaaaaacctacaaaaaaagagttatatgactatttactatcgaaatatatagaagataaatgcaaagaagaagctgatgaaatcaataagaagtcgatgagtcgtgtcaaaaaacataaagagcggctgatggagattacgccagaaatcttcttccgtttcttgtctgagaagggggtctccagtgtctgcccttcatgtggatcgtcgcgattatctgttccagaaagtatggatctttgctgggataaaaataagaaaccagaaaattttaacaatctacccctggaggaacagagtgagttaattaaagagaacataaagcattatgtatcttatgcttttttgggtgatgttaagagcatacctgatatgcgcaaaacttattacacgctgcattgcctgaattgtggttacctgagcctttatcgtacgtctgcggtgctgaagtggttggagaaagacaaagcgcaggatggtgataatgggtaa

SEQ ID NO: 469040 - DNA, 312 bp, Shigella boydii
atgtcaatagagatatcaaagaagctaaaagcaattcgagaatctgaggggcttagtcaggcaaagttcgcggattcaataggtattgcggttggtacggttaagcaatacgagactggtattcgaggtgtgggaacggaggttttactgaaaatcacaatgcacccggaatttaaaaaatacactacgtggttgatgagtaacgaaacaaatgaggctgctgggcagatcagtccttctctctcccctgatgggccagaaaacacatcgtcttctcaaaaatcccgcaagactggcacacagcccggctaa

SEQ ID NO: 469041 - DNA, 279 bp, Shigella boydii
atggcaaaagtccttaacacatacgaacaagcggattttgagcgtttggcggcgttctacccataccgtaatgaacatgggctaccggtacttgaagaaagcctagaggattatgcgaaacgcacaaatcaaagcattctcgctgtaagaaggcaggctgatagatcggtaattcccgttactcaagaaggaagaaacacaaaacgcaaagtaaatctcttcgcaattttcctgaaaaccatcagaaacgcagagaaatacgtgcagatgacaaaataa

SEQ ID NO: 469042 - DNA, 204 bp, Shigella boydii
atggcaattaagcattttcctgtcgttcgtttcacctccagaggacgtgaatacgaagttgacgaacgcctgattaccacaatcgacaaacaccgttcagaaaaggatgcacatcatatctatctcactgacggcacttacttctgcgccaccaacgtggtgcaggtgaatcttatcagacaggtacaggagtcacgcagatga

SEQ ID NO: 469043 - DNA, 246 bp, Shigella boydii
atgaccattctggactacatcgctgccaatccgggttgtagcagtggagaaatcgccgcagcactgaatacaccaaccacaaccattaatgcggagctacgccgtctctggcgcagcggtttagtcacaagaaaagagcgcaaaacaggcggtcgcttttcttatcaggtaaacctgatgccgtttgggtgtagcaacccactaacccagatgttcaaccagctactgagggaaatcagagcatga

SEQ ID NO: 469044 - DNA, 1074 bp, Shigella boydii
atgagtgcccttttctataaagatactccaggaacagtgcatatacaaaaaagagcatatgcaataaatttattatggaatcaggtgcctctgggagagaatccattaaaaacagcaaaagaatcagctaaagttattaatacgcagcttatatgtcttgataataatcttcttggaacacaatatggtcttgctgataagcgtttaggtcataaagccggaatgcatgtattggctacacatctagatacatcagtcggggctttttgcggtgcatggaagtttgaacaaggagtatggtacatttttgcgataaacagcgatggtattatcttatccgataaaggcgtttgtacaaaagatgtggcaatagaagaatttaatgatttattatattctaatgaatgggataaggttatatgtccaccggattggttgataccaaatagtgttgatgaacctattactcttttttttgtcaagaaaaaagggagaaaaataagaacaacatttttgaactataactttttgtttttatgcttgtgtcttcttgttataattgcggggggagtgtatttctatattaatagatatgtctcttccgaaaatgcagaagcgtttgaattactacctgagactacagtgaagccgcagacaattaaacctcaaaatattgttactccatggggggatcatattaagccactttcaatgctaactcaatgcattacttatattgatgcaaatgtgctaaacgctgtcagtgtacctggatggtcatgggatgatgaagcgtcttgtgatggtaataatgttttttttccaataaaaaaaaatggaggtacaaatttatggttgcgatctgcctcgttgtttatatctccgtcacctaatgtagttaatggtacaggtgatacggctgttctttcctggcctgtgttcgggactaataaatataaaaaacaagatataaaaattgatgatattaataatatcaatgatatcaaattttttttatcagagtcatttgcctgtctcttatacacatctccgagcccacgagaccgaggctga

SEQ ID NO: 469045 - DNA, 357 bp, Shigella boydii
atgaatattgtgcctcgtgttctggatgacggagaggttttattacaatatggtataaatatatcagctttagttggggctaaaaatgggtttgatgaagttaaggcgggtggcacaactatccagttacctaatgtgcagcagcgtagctttgttcaatccagcttaattcagaatggtaatacgctggtgctggctggttatgagcagcagagaaccgatctacaagataacggtatcggtagcccgaacttcaaattgctgggtggaaatcgttccggaagtaaagagaaaactcttattgttatctgtataactccacgggttttggatctcagctcggagggggaaatatga

SEQ ID NO: 469046 - DNA, 234 bp, Shigella boydii
atgaaatttatttatttaattactcctctgcttttgacatcctgcgctacacatatttatagcgatagtaaaaaagtatttaaatcagattttaataagactgaaaagttatatactctttcctcacatatacaagacatgaaggatacaaaaaaaataaagattgaaaataaaatatatgtaggtataaaaaaactggttatcagcatggtgatttatttccttcatatttag

SEQ ID NO: 469047 - DNA, 657 bp, Shigella boydii
atgaatagatataagttaggtatgcttaatgttgtcatattaacttcattctactgtaatgctgttttttctgatactcttggtcaggttatagaaaaacaaagtgaagctgttagtgacaatacaccagggaaacttgacaaaaccctggtaaagctttctgtagaggaatcaggattgttacagaataagtcgaatagacttatccaaaatacggacgtatctcacaaaaggaacagaattaagtcaaacaaaacaagtaaaaacaatatggtaatttcagaaacaaaaataacagaggcaggtgaaaaaaaaagaaaaaatttaagcgtatcagacattcccaaaattgagtcttatcagacagggggatatatgaataatggtggggggcctggacataataatctgtggcgtgtcgagcgtggaagtagtttgtttaatacattatcacagtgggccgcagatgctggatggtctttagtctggaaagttgatgccacatatcaggtattgtctactgcaacgttttctggtgattttaccagcgctgtaaaacaacttttttcttcatcaggaatgcaggatattaatatatatttaaatttctatatggggaataaagtattgcttgttacaggtgaaccgtcagattaa

SEQ ID NO: 469048 - DNA, 225 bp, Shigella boydii
atgcaggattctgaattaaaaaaacttaaagcaactcaggatgcacttttaacaaaaattgatgaattaacaaaaaatatatatcttagcaatgataaatttggtgaaaagaacggtccgggttatttttacaggttttctaaggctcagagggtaaaacaaacggagaatggtttctattatgtgtgcaacaaaatatccccaaaaaaaaacgaagcgcaataa

SEQ ID NO: 469049 - DNA, 321 bp, Shigella boydii
atggaaataaaaaaattaacgaaatggcttttatgtgctatcgatctgggtatctatatgacggatgcttatggaaatgatttgaaaatattaccattaaaacaaaatgaatctgtagttgataattcaaaagaatcaaataatcctgttactgatagtttacaaaatgagcaaacagtagtacaaaagaatactactggcagcggaagtacggtttctgcagaaattttaggtgaaaaaacggtgctggataatacacctgtcagcggcgctaaaagcaactcactttctgatattgataaagaaattaaaaaaatatga

SEQ ID NO: 469050 - DNA, 573 bp, Shigella boydii
atgtcttttttatctaaaaaatatgaaaaaggtttatcattgatcgaagcatcaatggttctggccctttctgctatagttatttctggtgttatgttctattaccagtctgcatctgacagtaataaaactcaaaatgctatatcagagttaatgagtactgtagctgcaataaatggtttgtatgttggacagtccaattatactggactaaccaccaatgtattggctaagtcatcagccatacctgataattataaaaacggcaatggcatcaataatccatttggaggtaaattacaaattgcccccgttaatggcaataaggaatatacaattgcattgacaggaattcctcaatcggcatgtctgaatatagcttctatgaatttggggacatcccttaagggggtggttgtagggacggtttcggataaaacatttgaaaaagtcacacaggtcggagcagacacaacatatgccctaggtactttatataatttgattactcccgcgggggcttcctccatatgcggagaagcccctaatagtattacttttcttatgcaataa

SEQ ID NO: 469051 - DNA, 1416 bp, Shigella boydii
atgcataagaatattagatgccagagagcattttccttgatcgaaatatcattagttttaattatctttgggattgttatctctagtgggaaaattatttattcccacataaaactatttacatcatctgatgtaatagcaaaacaaattgttcagattgctaatgccatatctgtatatgaatggtccagaccttcggatactgaaccgggaatacgcgaatttgacatcaaaaagctaaaagaacttggtgtagtttcagaaactatgccagataattatgctgttattttagagtgggatgaaaaaaattcattatctataattatctttcttaaggaaaagaataagtttgtttttgaagaacgaggcaaaacaatagctgaattaatggagcattatggatatggaggatggctggaaaaggatcatgatggaaatattgttatccggtctaaagcaaaaatattagccctgaataaaagaggatatatctattcaaaaataaaaaatcttccccaatatacccccttttttataaaggaaatgccttatgatcgtgattttaagcctaacgttaaggaagaaatttttgagtggggtaaacaaaaacggaatgaaaatcttacaaatatgactgagtctggaaaaacaatagactgggctccagcgtacgttgatgatcgagttaaaattagctgggacggtaaaaagccatattgggtaacggcaatagtaaaatattcaaaaaataagataagtaatgttctggaatattctggtgctggggaatcttttcttttaactcccgacccattgtgggtagggaaaaatatcactttatctattcaaattgaaaaatttttctttaaaagacaatatagagttaaaaaagcagaactaccagatggaattaatataagtcctgagtatgattattatagtttaccttctaaagatagtgataacctgactccgataaaaacagatgatgtaaataacataacaataacgaattctcccttgtttgtatgtttatcaggtatacagatctgtatacctgaggctgaggcccaggaaaaagcttgtgatagcaataatagtagaaaattgctaaatccattttcatacaatttttttctgtcttataaaaatccagaatcgcctaaacaaaataaaaaaataatatcattaatatctcaaggagagataatgttcattccttataactacaagcatgccgccagattatttcctttttcgtatgcaaaagcaactgcaactgattgcggtgtagtatccttacctgcgtctgcactaaaaactacattaaattacttatttattgtgaatatgttgaatggtgatgttgttggtagcagaaatttaggagagttaaatgtaacgataaaatga

SEQ ID NO: 469052 - DNA, 396 bp, Shigella boydii
atgcaggccagtgctgctaatcatgtccccgcggaagtgttaacaagtattatttctgttgagggggggaagcatggtatttctgtacataataaaaaccaaacagaagatttaggcattatgcaaattaatacgggggtttggcttcctttggttagtaaaactttttttaacaatgatactatgttagcctatgagcgccttaaaaatgatgattgttttaatattcaagttggtgcatggatcctcgggtattctatatatctggagaaaggaaatatgtggagcggggttggcaggtatcactcgaatacacctgcattaaaaaataactatgaagaaaaggtgaaaaaaagatatattaaattgtttggtatggcttcgttttataaataa

SEQ ID NO: 469053 - DNA, 633 bp, Shigella boydii
atggtaacttttctgcagacgcaccagatgatttttatggttttttcttttattacaggaaccgctgtgacaagcttttcgtgccttgctgctgagcggttacctcaccaattgaaatggagagataatcccaaacccgattataatatcatttatccaccatcttcatgcaacaattgtggggaaagaataaaatcactttatctgataccgattgttggttacttcttaacaaaaggtaaatgcccgaaatgcaattatattataccattacgatatcctgctctggaatttataggtgggataggttgtgtttttatattgtattattttggtttcgatagtaaggggattatagcagctgttttatatttggtgttaatttttttagcactgatagatatatatgaacactggttaccggctatagtcacatatcctgttttttggattggccttattttttctccatttgaatatatttcagaaataagggtggctggggcagctgttagtttttttgtaatgtatatgtcaatgataataactggctttataaagaaagaagatgtctttgccggtggggatgtggctctggttacagcgggggggggcgtggataggcttgtataa

SEQ ID NO: 469054 - DNA, 516 bp, Shigella boydii
gtgaaggaaagcgaccagcgttggtgttccgatggctttgagttcggttgcgatgatggcgaaaaactgcgtgttacgttcgtcctggactgttgcgatcgtgaagccatagactgggccgcaagcacgggagattacgataaagcgacagtgcaggatgtgatgttaggagcgatagaaaaacgctttggcgataaagtaccggaacagtccatccagtggctgacagataacggttcagcgtacagagcgcatgaaacacggcagttcgccagagagttgaatctggagccctgcacaacggcaatcagtagccctcagagtaatggaatggcagaacggttcgtgaaaacgatgaaggaagactacatcgcgttcatgccgaaaccgaatgtaagaacggcattgcataaccttgcagtggcgatcgagcattacaatgaaaaccatccgcatagtgcgttgggttatcgctctccgcgagaatatcgacgtcagcgggtaatgttaacttaa

SEQ ID NO: 469055 - DNA, 246 bp, Shigella boydii
atgaagacgcaataccttcttgaaatctatgaaccagatatgagcgactgtgttgctggccactatgagagtgatactccttttggagcgttgtgtgttggagatgaaataagtggcatgtccttaaatttaagcgagaggcataaaaaccttcgtattgtaaaaatccagcatattttttgggttattgaaggctcccatatgtcacataaaatatgcgtatggaccgaattattgggtaattaa

SEQ ID NO: 469056 - DNA, 564 bp, Shigella boydii
atgcgactttttggttacgcacgggtatcaaccagtcagcagtctctcgatattcagatcaaagcgctcaaagatgcaggtgtaaaagcaaaccgtatctttaccgataaggcatccggcagttctacagacagggatgggttggatctgttgcgggtaaaagtagaagaaggtgatgtcattctggtgaagaagctcgaccgtcttggccgcgataccgccgatatgatccaactgataaaggaatttgacgctcagggtgtcgccgtcagatttattgacgatgggatcagtacagatggtgatatgggacaaatggtagtgaccattctgtcagctgtagctcaggctgaacgtcaacgaatactggagcgtacgaatgaaggtcgacaggaagcgaagttgaaaggtatccggtttggccgcaaacgtagcatcgacagaaatagtgtactggtgcttcatcagcaaggtactggtgccacagcaattgccaggcaactcaacattgcccgttctacggtttacaaagtcattgatgaatcaaaaaaagccaacatgtaa

SEQ ID NO: 469057 - DNA, 411 bp, Shigella boydii
atgaaacatttgatttctctcgtaggggaattacgagagcgagggattaattttcgcagtcttactgacagtattgatacgtcatctccaatggggcgttttttcttccacgttatgggtgccctggctgaaatggaacgagaactaatcatcgagcgaacgatggctggacttgctgccgccagaaataaaggccgtattggtgggcgaccacctaaactaacaaaagcagaatgggagcaggccgggcgtttattagcacaaggaatcccccgcaagcaggtcgcattgatctacgatgtggccctgtcaactctgtataaaaaacaccccgcgaaacgaacgcatatagaaaacgacgatcgaatcaatcaaatcgatcggcaatacagatcgattatgccccaataa

SEQ ID NO: 469058 - DNA, 189 bp, Shigella boydii; identical to SEQ ID NO: 14298

SEQ ID NO: 469059 - DNA, 708 bp, Shigella boydii
gtgggaaaagagaaaaaatcacgcattctgacgaaaccgtgcgttattgagtatgaaggccagattgttggctatggttcaaaggagctgcgcgttgaaaccatatcctgctggctggcccgcacaattattcagacaaagcactattcccgccgttttgtgaataactcttaccttcacctgggggtattcagcggacgcgatctggttggcgttctccagtggggatatgcccttaaccccaactcaggtcgtcgtgtcgtgcttgaaacggataaccggggctatatggagttgaaccgcatgtggctacacgacgacatgccccgcaactctgaatcacgggccatcagctacgcgctgaaagttatcagattactgtatccgtcagtggagtgggttcagtcctttgcagatgaacgctgcggacgcgcaggcgttgtgtatcaggcgtcgaattttgattttattggcagtcatgaaagtacgttctacgagctggatggtgagtggtatcacgagataacgatgaacgcgattaagcgaggtggacaacgaggcgtgtatttacgggctaataaagagcgtgccgtggtgcacaaatttaatcagtatcgctacatcagattcctgaacaagcgagcaaggaagcggctaaataccaagctattcagggttcagccgtaccctaaaagcactcccgattag

SEQ ID NO: 469060 - DNA, 294 bp, Shigella boydii
gtggcgcacgtcttcggtgaacgcactctggccgcactggagcgtcttctgagcctgctgtcggcctttgaggtcgtggtatggatgacggatggctggccgctgtatgaatcacgcctgaagggaaagctgcacgttatcagcaagcgttacactcagcgcattgagcgacataatctgaatctgagacaacatctggcaaggctgggacggaagtcactgtcgttctcaaaatcggtggagctgcatgacaaggtcatcgggcattatctgaacataaaacactatcagtaa

SEQ ID NO: 469061 - DNA, 441 bp, Shigella boydii; identical to SEQ ID NO: 463153

SEQ ID NO: 469062 - DNA, 303 bp, Shigella boydii
atggtaacaggtttttttcagcgggtgagtgactggatcaccttctgggcatcagtcacagccaccacaataggcgtgatgaccatcagtgaaaaaatcgcccttgccgggttgttactcggttctctgtctgcattacatgcctggcgacatcgccgcctgatggaaaccgccatgcagcgtcgcaatgaactcatcgccagtatcctggcgcagtcagacgcacggccacttcacgacagtgagcgtcaggctctgaacattctgcgggataacgatacacatgataaagctgcccgttaa

SEQ ID NO: 469063 - DNA, 549 bp, Shigella boydii
atgataaagctgcccgttaaacgttacgccgtagccgccattgtggcgctggggttctccattgcccctcacaaactccggaccagcccggaagcgcaaatccgcattgccacatgggaggactgtcgcgcaacgccttaccgggatattgccggggtaatgaccgtggggtgcggctcgaccgggcatgtggaaaatcgtctgtacaccgaaacggaagtcgccgggcgctgggttaatgatatgcaacatgcagaaaactgcataaatcagaacttcagcggcaacgccatgccacagtccgcgtttgaggcaatgacagatgccgcctttaatcttggatgcagaaatcttatgtggttcagggataagaaccgtaactaccaccgcaccactatctggaaacatgcacaggcgcacaactggcctgacatgtgcaacagactgactgacttcgtgaacagcggcggcgaacgctcacagggactggttaaccgtcgtactgattttcgtgcatggtgcttacgtgacaccggaggccagtcatga

SEQ ID NO: 469064 - DNA, 474 bp, Shigella boydii
atgaaagtgcgttacatcctgatgatggcactgaccgtcctcacgctgctgaccataacactctggcagacattcagactggggcaggaagacggacacaaccgttatacacaggcgcaactggacgattacagccggaccctgaaagaggccggcaccatcatcagcaccgcatccggtgtactgcgtgacgtcatgacagcgcgccagaaccgacaacaggaaggggaaatccgacgtgaacagctacgcaacgatatcacgacagatgcatgtgcccgcgctgttcctgacgctcgctttactgagcggttgcaccagcacgcagaacgcgtccgcgccgccgccgtcgttccgtttcatcccggaagggctgaccgcccccgtacttcccccgccgtttccggtgacgccatcatggggaaacatcgggatatggagcgacagcctcatggacgcactggaaacctgtaa

SEQ ID NO: 469065 - DNA, 843 bp, Shigella boydii
atgaacattaccccgtttccgacgctttcgccggcaactatagatgccataaatgttatcggacagtggctggcgcaggatgatttctccggtgaggtgccgtatcaggccgattgcgtgatccttgcaggcaatgcggttatgccgactatcgacgcggcatgtaagattgctcgcgatcagcaaattcctttactgattagtggtggtatcggtcactcgacaacttttttgtatagcgccatcgcacagcatccgcactacaacactatccgcaccactggcagagcagaagcgaccatcctggcggatatcgctcatcagttctggcacattccgcatgaaaaaatctggattgaagaccagtcaacaaactgcggtgaaaacgcacgctttagcatcgcgctatttaatcaggccgtagaacgagttcatacggctatcgttgttcaggaccccaccatgcagcggcgcacgatggcgacgttccgccgtatgactggggacaatcccgatgcaccacgctggttaagttatcccggattcgttcctcagttaggaaataacgcagacagtgtaatctttattaatcagttacaaggattatggccggttgagcgttatctctcactactcactggcgagctgccgcgtttacgcgatgatagcgatggctacggtccccgcgggcgagattttatcgttcacgttgattttccggcagaagtcatccatgcatggcaaacgcttaaacacgatgcggtgctcatcgaggcgatggaaagtcgctcgttacgtcaaaaattgcccgtttgtgaaccacttgtttgcaaacgggcatga

SEQ ID NO: 469066 - DNA, 231 bp, Shigella boydii
atggcaaaccgcaaacaacagcgcgcatacgctgcgcgtcgtcacatccagactgaaatcaaccgcagacttttccgcgcatcacgcgtcgcgcaaatcatgcacatcaatatgctgcatgagcgcagccacgcactatcgaacacctattgcgcctctgttttcagctatctggcggatgatctgcacgagcttcagcagctcattcagcagcaaaacaaactccattaa

SEQ ID NO: 469067 - DNA, 147 bp, Shigella boydii
atgcacaaagcctttgaacgatggatgcgccagcgctatggcaaccgctacgacctgacgaaagataccgatggctactactgccgcgaagttgtgaaacgaatgtttgaagtgtggcgctactgccgcagcttatacgttgaataa

SEQ ID NO: 469068 - DNA, 300 bp, Shigella boydii
atgaccattctggactacatcgctgctaatgcgggttgtagcggtggagaaatcgccgctgcactgaataccccaaccacaaccattaatgcggagttacgccgtctctggcgcagcggttcagtcataagaaaagagcgcaaaacaggcggtcgcttttcttatcaggtaaacccgatgccgttcgggtgtagcaacccactaacccagatgttcaaccagttactgaaggaagccagagcatgcacaaagcctttgaacgatggatgcgccagcgctatggcaaccgctacgacctga

SEQ ID NO: 469069 - DNA, 207 bp, Shigella boydii
atgtttagagaatttaccgtcattcgttttactgccaaggggcgcgagtatgaagttgatgaacgcctggtagacctggacagaaccgcgccgtcacgcaccgaacaagacactcatcacatctatctcactgacggcacttacttctgcgccaccaacgaggtgcaggtgaatcttatcagacaggtacaggagtcacgcagatga

SEQ ID NO: 469070 - DNA, 339 bp, Shigella boydii
atgaaaaaactgaaatatctcgtggccctgttgggccacatcgccaggacagcaacaggattttacttccgcccgttcaacaaagtatgggacgaacacctacaacaaatcttggacgaaggtgttcttgagtcaactaacaaacatgccgtcttttggctctacggcgacatatacgaaatctggatcagcaaccgctggtttgcgtacgggttcctgttctgcctgaacggacaatttgtagccccggcagatgcgtaccgcccacgtttccgcaccatgtaccgcctgcatcaaatggtacaggccagcaaggcaaaggagatggggaatgtttag

SEQ ID NO: 469071 - DNA, 411 bp, Shigella boydii
atgctcgaaaaagaagaaggtattatcaaagcactgaaagaaatttcaaagacagaaaacgaagtagcgaaaaaagccgtggcaaatgctcatatgaacgtcgcaacccacacactgatagtcgcaagagtcacggcagaagcagccgaaattatcgcaaaacagaatgctgaactggcagttctcagaacacaaccagtcaccggactggatttgtctaacaccggacgccttatttacacaattgattcggagctaaagccatacatcattctcgccggagtgcaggataaatacctgattaccctttaccccataaaagaatcagaaatcatgaaagacctccgcctgattgagcgcactcacgctgtatttactgatgccgcacaacgcgccgtattaaacgcataa

SEQ ID NO: 469072 - DNA, 243 bp, Shigella boydii
atgggcaaagaatataaaactctcattaacaaagcacttgagcgtttttattttcgcttaaacacatcaggggtccacgccgaacacgcagcccatgattcattagcaagagcaatcagaagtctttatgacgtacccttttatgctgacgatttggatgcaattaacgagctttccgaactcgtctgcgccgcagaatgcggagagcgcattgaaccatataaactggggaatatcgtatga

SEQ ID NO: 469073 - DNA, 255 bp, Shigella boydii
atggcaacaacgacaaaaaacatggtagagatagcctcggcctacactattatcatgcaccggctcatagataataatgcccgtgatgcattaaatacgataaaacctttgtcggaagcaaaaagcgatattatcagcggattaaagtcactacaggaatgcgcacgctatgcaggtgatcacgccgcatacatgaccattaacgatacaattgagcgcattgaatcaggtaaaccattaagagcttttgtttaa

SEQ ID NO: 469074 - DNA, 351 bp, Shigella boydii
atgaaacaacaaagcaattcttcacaacggcgcttccgcaacggcgcagaacgccatgctaaccgtttcgctaccagtgcatcacgtagcagctctcgctacagcctgagcgaaacacacgcaacaccggatggccacgctgtaaaacaaatcggcgagcacacctggctgattgagaaagctggaatcgtggttcacaggtgcccccgcaacccatttaccggaaaccgcatttttgcactgagcagcggcgacaatcagttcggacaggatttcacattgtacgaagcgctacgcacggttgaccgcttaattgcaggacgtagttttcagcatccacgggggaattaa

SEQ ID NO: 469075 - DNA, 180 bp, Shigella boydii
atgaattcacatgaagaagtcattgaacaaatgaaaaaacttctcgatacccttgagcaaacacctgttcaggcggtaagtcaggaacatcctgctgcaacaatccgcgatttggcgttcaaaattctcaacgaaagcaacactaagtatcctgttgggttcagtgtcactattttctga

SEQ ID NO: 469076 - DNA, 411 bp, Shigella boydii
atgaataagcagcaaaaaagcaacaccaataacgcccagctcctagtgcaaccggaggataaaagcctacaggaacagcttaagtacctagatgagctgaaacacgacattatcatctttccggacaatatttgcgctattggactgcaagtatccccattgcaacttgccaatacatatcgccacctgatctctgggcaaatgcaaaacacgacagataacgaagtgccagaagaggcgcgaaagcactttcgtgattcacttggcacagaagggatcgccataaagatacaccctattgcagttcacatttctttttatggcactcagtcccccgaagaggcaatcaaaaacataatcaaaagccaaaacaagatgactgagataaaacggggcgtagcagccccgtag

SEQ ID NO: 469077 - DNA, 207 bp, Shigella boydii
atgaccagccatatcatcagcgccattctaacccttgtgtttattgagataggcgtaatagcgatttatttttttcgcaagttaacgagacatgaagaacgctttattgatctcaatattgagtacgtcgccgcttatgccaaagggctttttccgactgccattggtgcggttctcatagcgtttgttatttggctcattgagtag

SEQ ID NO: 469078 - DNA, 522 bp, Shigella boydii
atgcgggacttcattgccgataaagagttatctgactacccaccacttcaggacagtgatgtactcagcggatccgttgatgccgccaacgacaacgaacacgaagaaaacaagaaaaagcgctcttacaaaaaaggagcgactttacggctggatggtccgatcgccgggctttgctctctggaaaaaggcgcggcatatattgggctaacaaaatctgcactgcgcgtagccattcatcgcggtcaaatgccgggacataaaacgcgcactaacccggaagatgaaaactcagacggcgtatggtggtttaacgccaaagagtgggacaagttggctgatgagctaccagagtgcgaaccaccagaatggcacaactggaaaagttactggacgtatgaccgccagaaaagaaagttctctccagccaacaaagaagactgccagaccgttaacggaaaacgggtttatacaggcagaagctcaaagctggagcgactcaaaagtaaccaggtcaactaa

SEQ ID NO: 469079 - DNA, 342 bp, Shigella boydii
atggttatcttgtcaatagactatgcggaaaagttgcgtcaaatacgtaaggcagaggggctaacacaaaagcagtttgctgatatcacaggactatctttagcagccataaggaactatgaatcagggcaaaaaagcgccagagcaaaaatcgttgagactgttttgcaggtagatcgattcgaaaagtatatgttgtggttattaaaggataagacgttacctgccgccgggcaaattgccccggctctctctcttgatggctccattcagtcggaggacgatcagccttcaatcggcattacccaaaaatcaccccgatcaggccgcaatgttggctga

SEQ ID NO: 469080 - DNA, 993 bp, Shigella boydii
atgtcgattaagcaactcaaagacggacgttatcaggttgatgtaaggccgcagggggcagaaggaaagcggattcgaaaaatctttaccctgaaatcaaaggctcaggagtttgagaaatatgtgttacagaacttccatgacaagccatggcaggctaagccagctgatcagcggcgattatcagagctgcttgatgcgtggtggatgcttgacgggcgtaatcaggtttacggggatagctacagagtcaggctagggaaggttattcgtgaaatgggagatcctcgtgccagtcatatgacgcgaaaatttatgctcgagtataggtcagagaaattacaggccggattaatgccgtccagtattaatcgtgatttatgtgttttgtctaccatgttcacggtgctgattgaagctgaggtctttcacaacgcgaaccctgtacgcggtatacgcaaactgaaagttcagaacacagaaatggcctttctttctgatgatgagattgagcggcttcttgagcgactggagggtgatgcgcgtcgtgttgccattctgtgtctttctactggtgcccgatggcgtgaagcatcagaactacgtggagagcatatcgttggcaaccgggtgacgttctttaacaccaagaatgggaagtctcgctcagttcctgtggctgattcggtcgtgccgctgattaagacccgtcgaacggggttgttgtatcaggttgattatctggagttccgggagattcttcaggaggtgaaaccggatttgccgaaggggcaggctacgcatgtcatgcgtcatacatttgccacacactttatgatgaatggcggaaatattgttacgttacaacgaattcttgggcatgccacgattcaacagacaatgacgtacgctcatttttcgccggacttcttacaggacgcgatcaactttaatccgctggctgaaagtgtccataaactgtccatcgattag

SEQ ID NO: 469081 - DNA, 366 bp, Shigella boydii
atggcccgttcagctaaaccacgcaaacgaaaacctgcacctcaaagaagcaaactcctccactatgtcgtaaaacttcacgaagatgatttttttgacgaagaagaagctgaggttctgcgctttgataattttgacgatgccgttgagtgttgcgcagacctgaatattccgttctttgtggatgccggaaacaaaaaactggtcttctggtttgtacgtgttgatgacgaagggtatccggaaattgcccgctgcacggagcgggaatttgcgacaattcctgccggtatcaacgccgacggcatgtattgccctgaatgcggtacggttcactggccggatggcgttattccgcctttctga

SEQ ID NO: 469082 - DNA, 168 bp, Shigella boydii
atgcatcataacctgctctgccagacggtaacccctcttcagccccgtaaaccgcatctgacctccgcacagctcgcacttcagcgggtcaaccttcagtcactgctgaaaaatatcggcaaaacggggaagcatcagaaaggcggaataacgccatccggccagtga

SEQ ID NO: 469083 - DNA, 720 bp, Shigella boydii
atgatcgattcgaatgccaaactgcgatcgatgcagatgccattttgcatctggttcgcctactcaccggaccatcagggtaaacatccggagcagcaccttcataccctgaatcaatcagagccatccagtttaatcgtcggttccgttcatatgagcaaaagtggtgttgaagaaacatccgttttgtggtgtttttttaatctttttggggttttaattcctatcgatcaagaaaaccataaatatgaaaaggagtccctaatgaccacttttaccgacgaggacaaagaactaattaaagaaatcagagagcgaattggcagcctggacgtgcgagacaatattgagcgccgggcttatgaaattgctctggcatcgctggaagcagaggccgttatgttctgtatatcaggacaaaatgtagattcagaagaacatgtatcaaccagcaaagcggttgttgatgcctgggttgaagaatggaatcaggttgacagaactcctggcgagccactgtacaaaactgtgccactctaccatcaccccgcattgccagcgtcggtagtgcctgaaggactggttaaagcagtgcgtttctatgaacaggtaaagcgtgagaatccgccagtcgaaaccgtagcatggaaagacgctgttgagtgggttatcgaagaggcttgtctggctgtaaaagcatcatcagggaaggatgcatag

SEQ ID NO: 469084 - DNA, 438 bp, Shigella boydii; identical to SEQ ID NO: 22624

SEQ ID NO: 469085 - DNA, 183 bp, Shigella boydii; identical to SEQ ID NO: 22625

SEQ ID NO: 469086 - DNA, 396 bp, Shigella boydii
gtggcgcttatctgtgaacttgatgagcagtggagcttcgttggcagcaaggcgcaacaacactggctctggtacgcgtacaacacaaaaacgggtggcgtactggcctacacttttggtccacgtaccgatgaaacctgtcgtgaattgctggcattgctcacaccctttaatatcggaatgctgaccactgatgagtgggggagctatactagggcgcttccgaaagaaaagcacctgaccggcaagatttttactcagcgcattgagcgcaataacctgacgctgagaacccgaatcaaacggctggcccgcaaaacgctctgtttttcacgttctgttgagctccatgaaaaagtcatcggggcattcatcgaaaaacacatgttctactaa

SEQ ID NO: 469087 - DNA, 210 bp, Shigella boydii
atggacagaatccgaaaggacatgcccggtttcgttgccgtgactgccaccgcgtcttccagctcacttatacttatgaagcccggggttaaagagcagatcaccgtaatggctttcaacggagccggaattcgtgataccgccagaacactgaaggtcggcgtcaacaccgttatccggactttaaaaaactctcaccacgacgagtaa

SEQ ID NO: 469088 - DNA, 558 bp, Shigella boydii
atgatcttttatcaaaaaacataccaaaaaggattatcactcatagaagctagtatggttcttgtcctttcagctgttgttatcgttggtgctatggcttattatcaatctgcatcagataataaaaaaatggataaactatcctcgattttgagccgggttgcatcttctgtgagtgtgttgtatgccaataacaacaatggttacagagggttggatgccactctggttagcaaacttaatccaggtattggtaaaattgattccaaaggaaggcttgtgcttcccactgggaatggattgagggttgttggtaactacgattatcttggccagaaaatctggtattttactgtagatgatatttatcctcagcagtgtgcttccattttgtttgccatgttgcatatgaacaaggcagctaacagtccggtgctttggtatagttataatgggaattggaatgactggacagaaatctccccatctaatgccagagtcgataaaatatgcaatgccgaattcgaaacgataaatatttctatgggttttaattaa

SEQ ID NO: 469089 - DNA, 396 bp, Shigella boydii
gtggcgcttatctgtgaacttgatgagcagtggagcttcgttggcagcaaggcgcaacaacactggctctggtacgcgtacaacacaaaaacgggtggcgtactggcctacacttttggtccacgtaccgatgaaacctgtcgtgaattgctggcattgctcacaccctttaatatcggaatgctgaccactgatgagtgggggagctatactagagcgcttccgaaagaaaagcacctgaccggcaagatttttactcagcgcattgagcgcaataacctgacgctgagaacccgaatcaaatggctggcccgcaaaacgctctgtttttcacgttctgttgagctccatgaaaaagtcatcggggcattcatcgaaaaacacatgttctactaa

SEQ ID NO: 469090 - DNA, 210 bp, Shigella boydii; identical to SEQ ID NO: 469087

SEQ ID NO: 469091 - DNA, 135 bp, Shigella boydii; identical to SEQ ID NO: 22628

SEQ ID NO: 469092 - DNA, 279 bp, Shigella boydii
atgcatttcacaacttttctaaaaaaacatttcgatatagaaaaagtcgttggtacttctgattctggaaatgataccgaatctatttatgtttatgaaaaaggaaatgattgcgaaccgttgtttattctgcatgaatcttggataaatgcagaaattaaaaagtgtggggtatggactattggcgatatatattccacattagaacacggaaaagaatattctgaacaggaactaagaaaaatgattaaggagggtaaagtaatcagcaaatactaa

SEQ ID NO: 469093 - DNA, 288 bp, Shigella boydii
atgaaaatcgaattaacgtatgacgaaatcacggaacaagccacaaaaaccataactgaatttatggagcaggctaaatcagccgatagcaggtattccgctgattttttttatcacgcggcatggggggcaaaaatgttatggctggacttaatagccccagtaaagaatgatcctagttgtaaactagattgctttctagccattaaaaagcaaagtgaaatatttgagcaactggtagacagagaatcagtgcctgcattgaacaatgatcacttgcgcccgtag

SEQ ID NO: 469094 - DNA, 225 bp, Shigella boydii
atgctaactgaaaacacaccagaaaacattaagcgtctgcggcaaaaaattggcctgacacagaaagaatgtgccgaaatattcagcatgagtccgcgtacatggcgtcgcaaagaagaacctgtcggaactgcaagcggtacagcacttacacctgtggagtttaaatatcttctgcttttagctggggaacatcctgaatacgtccttagtaaaagagattga

SEQ ID NO: 469095 - DNA, 261 bp, Shigella boydii
atgaagataagaaaaggtgatagacaatattatctgaataaagaaggtgatacgtttcatctggtgaagcgagtaaaaactttttctaagtctgcgactttaggaaaaacgaaagcaacggtgaaaactgttgctgatcttgtttttcatgaggaggcattcgacactatcgactttgccagcgacggattaagagagaatgataaagaaattgtttctatgatgattcaggaaatgagcgaggaaaaaaatgctaactga

SEQ ID NO: 469096 - DNA, 225 bp, Shigella boydii; identical to SEQ ID NO: 25983

SEQ ID NO: 469097 - DNA, 210 bp, Shigella boydii
atgaaagttcttattggtaatataaatattgataattatcatatgctgtctgcattagctgggattgcgggatttgacaggagcattaagtttacatgtgaaatatcagcaagtatcgaaattatggaggatgatttcgtaaataaagctggtatattaaagatgttagatgaatttattgaaaatgatttttcaataaagctcgtctag

SEQ ID NO: 469098 - DNA, 681 bp, Shigella boydii
atgcctgcacgttcattatgccaaaatttccttaacaacatactggcccctttgcatctttaccgtcaaaaatcactgattgacgcaactaatgctgtaataaatggcgcttccctcacacttaccagtatcgggcgtcatttaaccggtacggcatcagttaaaaacaaaataaagcgggtggatcgactgttggggaatcgacatttgcaaaatgaggtttccaccatttttcagcgaattacccaaaagattacgcggggaatgtctcgtgttgtgatactcattgactggagtgcttatcatgcctctcgttttcagcttttgcgggcaagcctggcatgtgacgggcgttctttaccgttgatgagttgtgtcgttccatcatcacagacagcgaatgcagatgtacatgagcgttttctggaatcgcttgctgagtgcttttcccccgggactgatgtcattgttattacagatgccggttttcaggggcgatggttccaacagctccgctcccgtggctggacctatatttgccgggtactgggcaatcattattacaatgttggtaatggctgggaaaaggtgtcggactcaggcacaaaagcatcaacgacagcaatttatttaggtgaaggcctgctgggtcgagataaaaatgcacaacatgaagggtaa

SEQ ID NO: 469099 - DNA, 582 bp, Shigella boydii
atggaaaatgaacaacgccccacccgtggccgtctttccaaagtggatttactcccggacagcatccgtgagcagttacaccagatgctgcgggaaaagcggcacacgcaggaagaaatccgcgaagccatcaatgccctgattgacgaacataacctgccgggggagatgcagttaagccggacgggcttaaaccgctatgccagccgcatggaaaaagtcggggcaaaaatccgtgcctcccgcgaaatggccgaagtctgggcggcaaagctgggttccgcgccgacgtcagatgtcggcaggctgctgatggagtttgtaaaaacgctggcctttgaaacgtccatgtcgatgacagaagacgacaaacctgttgcaccgaaggcgctggggcaactggcgctggttgcccagcgtctggaagcggcagccatgaccagccataaacgcgaaaaagcaatccgcgatgcgtttgcgcaggaaatggcagagaaaaccgaagagctggtcagagcgggcggtctgtcaggcggtgcggctgacaccatcaaacgtgaaattctggggattagtgtatga

SEQ ID NO: 469100 - DNA, 1536 bp, Shigella boydii; identical to SEQ ID NO: 468978

SEQ ID NO: 469101 - DNA, 1572 bp, Shigella boydii; identical to SEQ ID NO: 468979

SEQ ID NO: 469102 - DNA, 765 bp, Shigella boydii; identical to SEQ ID NO: 468980

SEQ ID NO: 469103 - DNA, 957 bp, Shigella boydii; identical to SEQ ID NO: 468981

SEQ ID NO: 469104 - DNA, 906 bp, Shigella boydii; identical to SEQ ID NO: 468982

SEQ ID NO: 469105 - DNA, 312 bp, Shigella boydii; identical to SEQ ID NO: 468983

SEQ ID NO: 469106 - DNA, 438 bp, Shigella boydii; identical to SEQ ID NO: 468984

SEQ ID NO: 469107 - DNA, 543 bp, Shigella boydii; identical to SEQ ID NO: 468985

SEQ ID NO: 469108 - DNA, 612 bp, Shigella boydii; identical to SEQ ID NO: 468986

SEQ ID NO: 469109 - DNA, 201 bp, Shigella boydii; identical to SEQ ID NO: 468987

SEQ ID NO: 469110 - DNA, 294 bp, Shigella boydii; identical to SEQ ID NO: 25632

SEQ ID NO: 469111 - DNA, 219 bp, Shigella boydii
atgttatattttttgatttatatcactctccccttcattcagcttgtctatttcatttcctctgaaaagaaactaactattcacattgtgcagatgtttcacttgttatcacaggtattctataatctcaaaaagtttttaatgatggatatgctcggagttggagatgcaattatctgtaggataaatatggagagggtaatgctgccaacttactga

SEQ ID NO: 469112 - DNA, 618 bp, Shigella boydii; identical to SEQ ID NO: 462513

SEQ ID NO: 469113 - DNA, 1332 bp, Shigella boydii
gtgaaaaaaaataattttgaaacggggttgactttatttgaggtggggctgtatttaattttgtttacttttattttggtttgtgttcttcacaccaaagatggaatacattacttgtatagtacacttaatttttcagataaaatgctacaatatacaaacggattcaaaaaattcctaataaaaaaaagtcctcttgattttaattatggtgtaacagaaatccctctttcaaagatattcccagcttattatttacaagatgaaggtgctaatctctatgattattctgtgaaattttatgcgattagagaaaaaataaaatcgggtaagactacggataatatatccggccttgttgtggctaatccagttgataaaaaatcatcttttagtaaaacaaaagtagaaactattgaaaaattattgcttcaatatggtggaagtgttgatactaatatagtagaaggtaattttggggggtgggttcttgatcttaataagttgaactttgaccagccacatcaaattgttgcctatattcccactatctttcccttatctggaagggcgtcaacacaagttaaaactataaattatcgtatttgtagtttaggaaaatgtgaaatcctaccactccaggaagaaagcgaaattagctgggctccattgtattttgatgattgcctctcctttttttttcaaaaaatggaatatgttgattattatattattttaataaaaaataaaaatgatgaattaataaaaacaatggctgcaaagtctgtttttgtactggaaccagatgatatatcaaatggagcttttcacgttactataaagccagtatcatcaatgcccggtgaaacattacaaggggtggaatttgaactgaaaaaaatgttacctaatcctagattgccagatttgtggacatcattcgatatatctgttgctattgatggcacttcatctaataactttcaaagcaagactcttcaacaaattaatggaaaaattactgaagctaattttttttccagtcaaaacaaaaaacttttatacgatattaaacttcaattttgcaataatgattttatcttttataaaaattccactctggatgttaattatattaataatacatacgccccatggtttcataacaaggaagatatttcagtctgcgttgatcccagtgcggtgaaaccttatccattcacagatgtccgtatatatgtaaatgaagaacaatctacttttccaatttcgggtgtttctgaaacaccgatagactcatctaatagaatacacataaaataccagacttaa

SEQ ID NO: 469114 - DNA, 516 bp, Shigella boydii
atgttatacgtattgattgcttttttttgtactatttttagtatttcatctgttgatgagtacgtaaatgtcaataatcacttacattctgattcagatatagatgttgcttacgttagttatcttttgcagagacattatttctcttatctttattgtataaacggtaattcctgtgaaacaggtaaattgcaagatgttggtaattatttgccatcatttcttgttgatgctcctttacaaaaaaatatatattcttgcggtaacccggtcagtaatggtggcttcgttgtactaactactttcaaacacactgattcatttaaaaatgttttttttaagaaagcagtaactgacgtgatgattgataatcatttaaatataccaatttctgttttttataatacagcagatatgagaaaagaacttttttttcagttcattaataaatcatgtggaaatatttttcaatcggaaagttcaaatatttattttgttagctatttcccagggtag

SEQ ID NO: 469115 - DNA, 909 bp, Shigella boydii
atgaagtatcataataagcagcagggggttagccttattgaattaataattgcactaacattaactattcctttcattatatttctgcagaatcatataattagcgtagtagatttacatattcaaaaaaatattttgaactctcttaaaatggcaaccactgatgtaagtaatgcatatttagataatggtgagtgttctactgataatgaatataagttaattgatagattgccaaatagtatttcatcatttgaagcaaaatatattaattttagtttttttattaagtataattgtccttatttttctgttttgggattgtatactccgccagaatccattcatatctctaatgaaacggcatatgatattttgggcgcaaatggtggatatttgtcaggggaaaacatcgtgctatttacccattcatttaaaagtattcctgttaaagacattcaaaataaaaaaggacctttttttgcttatttgacaattgcggaaaaattaaatgcaaatgaagaagaaataaaaggagatgtatattttaacggaacgaattatcatgcagatgaaatctatgatatttgttttgacaggagtgttaataattacatgacgctaatctggaagtcagataaaaactatgaaccacaagagggcaggttcaatctgttgttgaaatttgaaaacgaagaaaatccgttgatcattaatgaatctaatcttttgttaaatggtatttattatgcccctgtttctgatttttttaaatacagtactgatactaagaaaggacttcaagcaggagatgtatttggactcgaactacaattactatctaaacaaaaaaagattaaaatttcttttccacaattccgtttctgtcaaaataaatatggtgtttaa

SEQ ID NO: 469116 - DNA, 291 bp, Shigella boydii
atgtctggattcaatgaacccagttcaatagcgttgcagcaggtggtaattaatcctgatgtggcattttccaacttttttaatccgaaactaaaagtgcattttactgcgtttaaaaggaaatccgccgggtataagctgtctcactataccatcatatctcatagggaaaaagatgataatcctcgttatctcattagtgtcatctgtaatccgcgacaaaaacaaaggggaagtgttaaattatgtataaaaactagccattattgtggtcttatggtgcattcataa

SEQ ID NO: 469117 - DNA, 135 bp, Shigella boydii
atgattattttaatggttgcgaaagtatgtatttaccccgcaaaacaaattaagtgtctcaatatcaagttcggtgcagtgtgcctcttgtacaacaagactcttcatgtcatgaaacatgtttatcagcgatag

SEQ ID NO: 469118 - DNA, 984 bp, Shigella boydii
atgctgcacaattgtcatgatggtaagaagatggatagttttagtaaattgaagtttgctgatttattgattggtaataatggttatttcttcaggtatttatatggccaggatattcctgttgtaaaagttcctgaagaatttcattctgaaattaagtcattggaatccgaattactaatatatgcagaaaagggagagaatagtttttttctgtttcatgaacaggctccttaccgagtcagtattgtagatactattgaggggaaaggtttctttctaagaaaactgcaatatccgatacctgaacttcattctttaggatttcaggagggaatattaaaaactttaagatctcttggtcatagcagtcaagggttgatactttttgctggtgccacaggttcaggtaaatcaactagtgtttactctttactgaaagaatatttaattcattatggagatatactcatttcaatagaggatcctccagagattccttcacaaggtacatttggagatggcatctggtttcaaattgatgcaattactgcaggtggttatgaaaaagccatgatctctgcaatgagatataatcctaaatatatttttatgggggaaatccgcacaccagaggctgccagagaagctattcgtgccgctgttaatggccacttggttgtgacaactattcatgcgaactctgttcagggggctatatattcgttgcaacaaatagctgccagcggtagtgatatagagctaattcgctccatacttagtgatggattgctttgtgttattcagcaaaaactggattttgttcaaggaggtggacgtcgtttaagaacggaatttttatatgcaaaagaaacacctgcaattagttctaaaattcggaatggaaaactcgagctattaaatactgaaattgaaatgcagaaaattaaattgtctaaaaatcaatcattattatctgtttag

SEQ ID NO: 469119 - DNA, 1077 bp, Shigella boydii
atgaatatatcagatattgatgctgcattaacgagactactatttacaaccaagttaaggattgctatttatgaaaaactttgtcgatatattgataatggcgttcctttggttgtttctttggaggagatgcatcgctttatttctgatgatggaaaaaaaattaaaaagacttctgcggtggtcgttatgcaatggttaagagcattacgcaatggtgacagtttttcttccgctgttgaaggttgggttcctgctgatgagatatctattatttcgtcaggagaaatttccggcgatcttagagcatctcttaaaagcattattttaatgaatgaaactaagaaaaaaattcgctcagcattatctggggcgttatatccacttgcattactggcaagtacatgtttctttttatatatttttggttcgaaagttgttcctgcatttgctcaagttcttccagttgaacaatggaaaggaacagggcatacgatgtatttattatcagaatttgttcgtgattatttgctcatggttattatccttttctttcttattgtagttactattctttcaacattatctgtctggactggagaaatacgaaaaaaaattgatgttttacctccatggtcaatatataaatctattgctggttgtggttttttactgtcattggcttctttacttaatgcaggaatacccgctcctgaatcaatacggataatattcaaaacagcttcgccatggtataaagaacgcttggttgctataagacaagccttattcaatggagctccaaatataggagaagccctatatttgacaggattcaattttcctactaaaaatatggttatggatatcagaacttatgctgcattagatggttttgaaacaatgcttaataaactttctgttgaatggcaggaagataccgtcaaatttataaatacacagatggatatatttaaaaacgccgccattataattatgggggggggtttcatgtggattgtatctggcatgtttgcattagagcaacaaattagtaatgctgcacaattgtcatga

SEQ ID NO: 469120 - DNA, 126 bp, Shigella boydii
atgcaggaacatgcttggttaaaagttatcagtggtgaaattgatattaatgatgcagtagagaaattttctaatttatcttcattaactgaagaaaggaaacaacaattaattaaatccaattaa

SEQ ID NO: 469121 - DNA, 306 bp, Shigella boydii
atgatgaaatcagacgaacaatatcaggttcccgtgtggatgcgacctctgttgccgttgctctgcaataccggtggtaatgatccggaggaactactgaatgatacagaaaccaccgccagtgcgaatattgtccgttatgtactgatagttgcagtgcggtcgcagattgatctgctgcagctactgtacaggaaaggactgttgcgcacagagatacctggtggcttttcaccggaagaagcgcaggaactcctggataatctggtacgcagccatatcagcgtcaacggagcaccgtattga

SEQ ID NO: 469122 - DNA, 489 bp, Shigella boydii
atgaaaaagaaacttattgcagcagcttttctgtgtatgactggcggcattgctaatgcagcaactctggctaatactgtttctgtagatgctaactttactgttgtcggtggttgctctgtttcaggtaactggaaaggtgacaccatttctgccaaagaatacaccccgcttgctcaatcggttggtactcttggtatcacattaactggttgcagcagccaagtgtattttcttgcgaaggatttgagcgctgatggaatgccacaagctacatcacctagcggcaaaaaagttattttaacgccggatgtcaatgccgttattggtggtatttgggagaaagacaccagtaataatgcaattcataccgtaaatgctcttacggatggacaatcagttgaaattaccttctttaaccgtgaccaatggacagcagaacctggtgatcatacaatggttcttgatgtaggtacctacgctatctaa

SEQ ID NO: 469123 - DNA, 435 bp, Shigella boydii
atgatgagggtggttatatttttattgttttttataattaatcctgtattaatagttaatgcggcagaaatgaatctggaatccaagacggtttcaggtggagaattatctgatggggatgttatcgccacggggagagtattttgcgagaatggtaaagcctccagagtgagtcttttaaatatacaagcaggagacaaaatttacggtaatatatataccctgcagggaaggaatagggcaacaaataaactcatagttagacttgaaggtgatgggtggcattcttcaggtgatgtgatggatggtatttacaaaaaaatgacaaataataatgatcagttctatgtagtggtgaatggtcgtcagaatgtgaattctgatacttataccatcaaaacaagttccacatgctctcactcacaccaagagtag

SEQ ID NO: 469124 - DNA, 2556 bp, Shigella boydii
atgaactgtctgcataataaatataaatcacaaaatttatcagttgtgattctggcgtcattggtcgttttattctcatcatatgcagatgcaaaagattacacatttaatccatccatgctgaaaatggatgggcaggacgtggatctttctgtgttcgaaaatggcgctcagttacctggtgtataccatgtagatatcgtacttaatggtaagttgactgatagaaaagaaatagtattttataataagtacaaagaaagcggtgaacatgcgcttaccccctgccttacacaggatatgctgatacaatatggtatcagaacaggtgactaccctagtatttttattaagagtgccgatggtaaagtctatggtgatgtatcggtcattcccggatcaaacatatattttgatttttataaccaacagttgaatttaagtatacctaatgtagctttttatcctaaatatagaggtatagctccgaagtctctctgggatgatggcattaatgccttcgtgatgaattatcaagcgaatgcaatgagaaatgaatttcgccaacaacagagtaaagatattagctcctactgggcacggattgagcctgggttaaatttgggaccatggaggataagaaatctcacttcattgactaaagagcatggtaaaaccggagatagcgaaagtgtttacacttatgcagagcgcggtattccatccataaaaagccgtattttaatcggagagtcctatactaattccgatatatttgacagtattcctttcagaggtgcaatgctccgttccgatgaaagtatggttccttacagccagtatggttttgctcccgtcatcagaggaattgcccagtctcaggctctgattgaggtccgacagaatggttatctaattcatactgtcagtgtggctcctggtgcctttgctctcgctgacattccggttataggttctggcggtgatttacaggtctccgtcattgaaacaaacgggaaaaatcaggtgtttacagttccttataccactccggttatcgctctgcgtgaaggatatttaaaatacaatataacgggtggagtatatcgctcatcttattctggggtggaagattctgctctggtccagatgacagcaatgtatggtcttccatgggatctgacaacttttgtcggatttcagggagcagaacattatcagtctgcggcaacaggtctcggattatccatgggaaaaatgggggctatatctctcgatggaatatatgctagtgggcacaaaaaagaccagaatactgatgagggatattcatggcgtataagatacagcaagttatttgatacaacaggaaccagttttattgccgctagtcatcagtattcatctagtggctatcatacgctttcggatgttcttgatacatacagtgataaaaattacttttacagcgatcagattgatcgttcccggagaacaagcctgacaatgagtcagtctatggggaaatggggaatgttcagtttgggtggtgtcagggatgaatataggggaggacgaccatcacaggattcagtaaatgcctcatataccacaaactgggagtggggggcattgtctctgaactggagtgaaaataaaaatacacttcattatttgaacaactcaaagagtaaaaaagaaaacatcttcagtatctggatgaatattcctatggatcggttacttgggaataactcgaataatataaatgcaacaactcatgttcaaaagtccaccggacaaaaaacgcagtatgagttcgggctaaacggcagagcatttaaccgtcagttatactgggatattcgtcagcagtttgcaccgggaacggatacttataatgactctagcaggatgaatcttgtatggtatggcacttatggtcaattaaggggaggatacagctacagtgactcactccggcagatgaatgcgggcttgtcaggaaccatggtaatccacaataaaggcatcacttttggacagagtcacggtgaaaccatagctcttgttgaggcgccggcggtggacggagctgaagttattggatggcctggtgttaaaacagatttcaggggctatacaaccctaggccatcttgtaccttatcaggaaaatacggtgtctctgaatcctgcgtcattccctgattacgcagaagtatcacaaacagatacccgtgttatcccgacaaaaggcgctatagtaccagcacgttttatcactcatattggagaaaaggcactgtttaaattaactcgtaatgacggaaaaaaagttccttttggtgcagtagtttcattatccacgaaaaaagataataaacatggagcaggaattgtaaatgagcttggtgaagtgtatatgacaggtcttcctgaaaaaggtgagctgaatgtgagatggaatagtcacggaaaatgtacagcaacttatgagttttcgggaaaaaaaaatgttgcaaacattcatgatgtctctgtaacttgcctgtaa

SEQ ID NO: 469125 - DNA, 783 bp, Shigella boydii
atgtacacccagtcatcgttacagcagtcacatattttaattaaatcaatactgttttttagcagtatgcttccattaagtgtggttgctgcaaagatatctgatgtaacagtttctccccgtgaagttaatgcccagttgtttggtgtagatttgaacctaagccgagttatttataattttggttcctctggtgcaaatattgctgtaaagaacaatcagacatacccgatactcgttcagtcacaggttctggatgaagatgtaaaatcaaaagcgccatttattactactcctcctcttttccgacttgaagggaaacagaccagccgtattcgtattgttcagaccggaggtaattttcccaaagacagggaaaagctacaatggttgtgtgttaaagggatcccacccaaggaagatgataaatgggctgaaactcaggtgccgaaaaaatcctcattgcttgtacaattctccgtgaataattgtatcaaggtttttgtccgtcctgatgcagttaaaggtcaccctgaggatgtcgcggataaagtgacatggacaaaaaaaggttcattgttggaagcagctaatcctactcctttttacattaatattaaagagcttattgtcagcggaaaaagaattaactcactgaattacattcctcctttcgggaaccgaagtttcgatattccgggttcgtcatcgggatccattcagtggaaaattgtaaccgactatggtggtgagagtaagatttatcaggcagaaattaaatga

SEQ ID NO: 469126 - DNA, 585 bp, Shigella boydii
atgaatcatatagttaacagaaaagaaagaagcactgaaaaagaaagtgatttttcttttcctgtgtttcaaaaagaaagcattaaagagcgcctagccatgttaatgcgcgggcgctccaagactgccgtggcgaaggcgtgggggctaccgttctcaacacttaacaactactttgagaaagatgcgacaccatctctacaagtagctagtcagattgcttttgcagaaggggtgagcattgattggcttgtttttggcaaggaggatatagaaccaatatcacctaaaatagatgaaaacgtccaattgcccctagatataacgctacagcgccttcttgctatactaagtgctttagaagcatcagaggcagagcgattatcaaaaatcctcgcgctaaatggagctaagtacttgtcacggttacttgaaccagagaatcaagaactaatccaacttgaaggacgaaaacgtgcagcagctctacttttagatcatttatcggatgaaagagttagagagattttggcagaaattgaaagcgataaactctcaagtagtttagaatcgaaggcgggctaa

SEQ ID NO: 469127 - DNA, 237 bp, Shigella boydii
atgatgtctataaatgaagttgttaaacaggactggcaccccgcgcatgttgtcgcggcggtgcatgtaaaaggttttactttacgctctctgtccattgaagccggtttaaaccaggattctttaaagaatgccctgtaccgcaaatgcccaaaatatgagcgcattattgctgatgctattggtgttgctccggaggagatctggcccagccgttacgctcgtaaggtggcataa

SEQ ID NO: 469128 - DNA, 2094 bp, Shigella boydii
atgtttgtatcagttaatgagcttgtagggctaccaggtatgccgggaactgcgcaaggggtgcggtattccataagaaaactggcctcatctgagcatttcaggcgcaaacgtgcgggttcaaaaaccattgaatacagcatcgactgcctccctccggttacacaacgggcgttacgtgagcgacatgtagctcaactgatggcaagcgccccgcaggagataactacccagcctcctgtaaagcgtgaacgcaaacaaaatgttgtacagcctgttgaggcatatcgcggttcgccacaattggtagaagagcgtctgaatgcgcttacggaaaatcaacgtaaagttgcagaagcgcgcattgctcttgtctgtgaagttctacgaattagccaggagccgggattcagttgtgccagcgctatacgttttattgtgtcgcggttagcacagggtaacctggaagaacgcctggaatctttggtcattactgctaatgcccgtaaaggaaaagagcgaactctgagcgcaattacgctcaaacgttggatagctgcgtttaacaaagcacagaatgccgcagaacgactgctgttactggcaccaggaaagcgcgacgaaataaaaccggaagaaattagctggctgcctgaatttctggcgcagtatcgtcaggctaacggcaggcctatgtctgaagcctatgaggattttgtcgctgattggcagcgtcgccatgcggacgaaccatacatgctggaggtgatgccttcctatgatgttgtccggtatgccatgaaaaaactgccggaagtggtgaaacaaaaagggcgcgttaccggcagtgaataccgtcagcttgaaggattcacccgccgcgactggacagctatgccggtgaattatgtctggattggtgacggtcacggtatgaagctgaaatgtgcgcatccggttcacgggcgtccattttcaccggaagttacgtttgtgatcgacggtggaacccggtttgtggttggctggagtcttgatcttgcggagaacgtgttcgctgttgccggggcgatacaacacggcattcgcaatcatggaaaaccattcctgtattactcggataatggttccggtgaaacggcagatatgctggataaagagatcgtcgggattctgccccgcctagggattaaccaccccaccggtattgcgggaaatccgcagggacgcggcattattgagcgcctgaaccggacgttaccgatgcgtatagcaaggaggtatcgcacctatttcggcaagggggctgaccgggaatcgttgcgagtacttaatcgtgatctgcgttcagcgtttaatgccctgcaacaggacaagccactgagcgcccgccagaaagtcgcaatgcgcgagctgccgtcttggtcagaactgattgaggctatccgtgagggggtggagtggtacaacaaccgcccacattctgaattgccgatgaaaccaaatggaaaacattacagcccggcagagttcagaaaaaaacgcttagcggaagaagacactgaaattgagtggctgagtgatatggagctgcgtgacatgttccgcccgatggtggagcgtccggtaagacgctgcgaaatccagtggctgaacaatatttactacgcgccagagctgcgtgatgaacatggtcgcaaggtacttatcagctatgacattcatgatgccgagcgaattacggtacgccgtaaggacggtagctttatctgtgaggcgatatggaacggcaataaacgcgcagcctttcctgttacggctgaatatcacaaacaacagcagcgtattaaaggaatgcgcaagcgtgctgaggaaaaaatacgtgatgctgaggatgaaggtattcaggttattgaacaaaaaacgacagaaccctggctggataatgtttatcgccctgttggtaatgtggtgaccgttcagccgttgaggtgtgaggaagtgcatgatgatgaatacgaaactgagcgtgatgaatatctgaaccattcactggatattctggaacagaacagacgtaaaaaagccatttaa

SEQ ID NO: 469129 - DNA, 939 bp, Shigella boydii
atgaatatttccgatattcgcgcaggactgcgcacgcttgtagaaaatgaagaaaccacctttaaacaaattgctcttgagagcgggctttctaccggaactatcagtagttttatcaatgataagtacaacggggataacgagcgtgttttacaaatgctgcaacgctggctggaaaaatatcatgcagttgcagagctacctgaaccgccccgctttgtggaaacgcagacggtaaaacaaatctggacaagtatgcgttttgccagcctgactgaaagtattgctgttgtatgtggcaatcctggtgtgggcaaaaccgaagcggcccgtgaatatcgccgcaccaataacaatgtctggatgatcaccattacgccatcctgtgccagcgttctggaatgtcttactgaactggcgtttgagctgggaatgaatgacgcaccacgccgtaaagggccgctctcccgcgccctgcgacgtcgccttgaaggtacacaggggctggttatcatcgacgaagcagatcatcttggtactgaagctctggaagaactccgcctgttacaggaatcaacccatattggccttgtgctgatgggcaatcaccgcgtttattcaaatatgacggggggtaacagaacggttgaatttgcccgtctgttttcccgtattgcaaagcccactgcaattaataaaaccaaaaaagccgatgtaaaagctattgcggatgcctggcatattaacggcgaaaaagaactggagttattacagcagattgcgcagaaacccggtgcgcttcgcattctgaatcattcacttcgccttgccgccatgacagcccatggtaaaggtgagcgtgttaatgaagattatctgcgtcaggctttccgtgaattagacctggacgttgatatttcaacgctgctgcgtaattaa

SEQ ID NO: 469130 - DNA, 228 bp, Shigella boydii
atgatggcccgaaatataaaaatggcaacggatgcgcagaactggttacaggcgcgcgggagtcacgtgaatgaatcatatctcggcgtggcgcgtccgatccttgaaatcacttaccctccggtggaactggtaaaaagcgcggtcagaattatggagcataagtccggggtagcccgttctgtatggacggcccgtcttaatggttgccagattatctggagataa

SEQ ID NO: 469131 - DNA, 231 bp, Shigella boydii
atgtgtactaaagctgaaaaatatattgaatgggttaaacgggtacagaataacaatgtggctctgactgcatttaattgccccaaatgcaaagagcaaattatgacgcaatgctcaccagaaaatgaagtatgggactcctttgcatgttgtccgtggtgcagcgcagttttctttaagcaggtaaaaggcgcgaaggtaaaagccagcgcagttattcagaatcaataa

SEQ ID NO: 469132 - DNA, 264 bp, Shigella boydii
atggcaaaagtaattattgaaattaaaaatacagtatctggaattaaaggacggaatttgcgcaccagcattgcggttgacggtagtgtggaactggacggtgatgaggggacacttgcaggtctggtggcgttactggtgcttaacaaaagccagaaaataattaatgagtcagctcatgaagccattgagattttgaaaaacgatggtgtcatcacaggtggccgtgtcactgaaatggctgttgaaaaaacatgtcactga

SEQ ID NO: 469133 - DNA, 525 bp, Shigella boydii
atgcttccccgttttgccgacatttttcagcagggaaaccgctggcttaactggctggagaaacagccggaaggctcagtacgtccggtagtcattgagtctgtgacaaaaatcatggcgtgcgggaccacgctgatggggtacacgcagtggtgctgctcatcaccggactgttgccatacaaagaaggtctgcttccggtgtaaaagtcgctcctgcccgcactgcggagtgaaggctggcgcacagtggatacagtatctgctgagtctggtccccgactgcccgtggcagcatattgtgttcacacttccctgccagtactggtccctggtgttccacaaccggtggttactggcagatatgagccgcattgcagcggatgtgatactggaaatctgccgtcaggcagatgtggagccggggatattcacggtaatccacacatgggggcgtgaccagcagtggcatccgcatatccatttatcgacaactgccggtggtgtaacgtcgggccacacctag

SEQ ID NO: 469134 - DNA, 348 bp, Shigella boydii
atggcccgttcagctaaacctcgcaaacaaaaatcccgcaaacaatccacccgctcagcccccctgttgcgatggcgggtggtcccctgcaccggaggaacagataatgaagccgggctgttttttcccgacttcgccagcgctgccgattattgtatggagaaagatattccatacctgtttgaagaagatgccaccgggaattatgaaacaactgtatggatagttggtgagcccgacggtaatgtcaccatgctccccatgtcctggaaaaattttctgtccgtgtgcacgatacatccctttatctgtccgcagtgcggcacctcacatcttccccctgcgtaa

SEQ ID NO: 469135 - DNA, 948 bp, Shigella boydii
atgatgaagataaaagaattgtcagctgctcatagcaaaggccttgaagaatggggaaaggttataaaaaaagatttaggttttgcccatgccatagttagtactccagaaggagtggaaactgatttattttcaggtcagatgcaagttgatgagttaaacaacggaaccctttgtgcaaaagtgaattcatcatcacaaagaaccactcttattcataaaaatgtactgaacaaaagtaaaacaaagttcttcattataaattcatgtaatagcattcttattaaaaaccaacaaaacagaaaggtaatcacccctggagacagtataattgttcccgcttgggataaatatatggaagaaagtttttcgggaagaacaagtctatctttaataattgatgtctcatctgttacagattcagtagagttattatccaagctattttggaaaaatgtatcttcattaacatatggatttgaaataaataaactaatttcaaatttttacacatataaaacaaattgcttttgcgaaaaaaataacagcgcacttatgagtatattgagtcttgaagtagaaaaagatacaggagagcaaaacacactcactaatttacaatatgataacagattttcacttattcttaactttattaagaataacataaaaaacccatcactaaatctatccatggtagcaaattatctgggtttatcagaacggatggttcaatatatcctgaacagtaatggagtaaaatttcataaattattatcatgtgaacgctgcctttttttagagagcaaaattagacataataaatttatcgatgtgaatgttacaattttagattctggctttgaatctattgctacggcatgtaggcaatttaaatatttttataacataaccccaaggcaatttcaaaaaagcctgatagattaa

SEQ ID NO: 469136 - DNA, 366 bp, Shigella boydii
atggcaaagcaaaagttcaaaaccaccaactggcccatctacaacaatgccctcagacaacgcggctctctgactgtatggcttgatgagtcaggcattactgcatggactgataacagcgcccctgaacatcgtggccgaccacttcattacacggataccgctatcacgacagtcctgatgatgaaacgcgtgttcaacctgtcactgcgtgcactgcagggcttcgttgattctattttcaccttgatgaagttgccgttacgctgtccggattactctctggtcagtcggcgagccaagaccgtcaatatcaacattaagactccaactcgtggagaaattgcacatctcgtcatagattga

SEQ ID NO: 469137 - DNA, 318 bp, Shigella boydii
atgccactgctggataagctgcgtgagcagtacggggtcggaccgctatgcagcgaactgcatattgccccgtcaacgtattaccactgtcagcaacagcgacatcatccggataaacgcagtgcccgtgcgcagcgcgatgagtggctgaagaaagatatacagcgcgtatacgatgaaaatcacaaggtatacggtgtgcgtaaagtctggcgtcagttgttacgggaaggtatcagagtggccagatgcactgtggcacgtctcatggcggttatgggacttgccggtgtcagcgccaatgatataagacagtaa

SEQ ID NO: 469138 - DNA, 366 bp, Shigella boydii
atgaaagagacgaaaaacatcgataccgaaaacacggtagttactgacactgtgaaagaaaccagtgagcgtggcgtaaaacttacccaacccattgagcgaggcgacgaaaaaatcacgtatgtggagatctccggggctattgagcaggctggttctctgcgagatttgtcgctgtctgatgtgctgaatttgaaagcggaatccatgtttacgctgctgtcacgcgtgacatcaccgcgactggatgaagtgacgatcaaaaaaatggcatcccgtgactttattcagttatgtgtggttgccgtaaattttttgagcggtgcggactctggcgagaagaacgaacaggcgacggaagcctga

SEQ ID NO: 469139 - DNA, 474 bp, Shigella boydii
atggaatatgatgatgtatcagaattgatgattgagcgtgaacacaatattcttattgttgggaattctgcctcccacattgataagttttttaaggagtattctataccaagttctaaatattatgatttcactcagattaacagtgattcagatgtagagagaaatgagaatgctgtctcttttatcagggatgcaatgaatagtgaagagctcacaatcatttttaattgcgttgggtggcctgatttaggtggtggatcagcagtatcacagtttgcaatgatggccagaaaatttggtaaacaacttattgtcgctgtaagtgaaaaggatgccatcaaattaaaagacaactttgatattattgggatgttgtcatatggtaaagaaaattttattgccatgagtcatacgaaaagcgagttaactggagggaaacgtcggtaccggattaaaaatagatgtaaataa

SEQ ID NO: 469140 - DNA, 327 bp, Shigella boydii
atggaaaactacgccaaatttgttgctactgaaattcttaatcaacttggtggaaaccgctttattgctatgacaggcgcaaagaactttgcctgttttgatgaaaatggtgagtgtggtctttgctttcgtttgccttcaaataattttgcaatgaagggaattaatttggttaaaatcaaattaaccttctctgatacatacctggtgacattttcccgtgtccgtggagctacagtaaaagaaatatcaaaatttgataatgtttattgtgatcagcttgaatatttgtttaatgaacaaaccggacttgcaaccagattgtaa

SEQ ID NO: 469141 - DNA, 357 bp, Shigella boydii
atgaaattatacagccgtagaatgcaaattgagcaaaatttcagggatgaaaaaaatcctcgctggggatttggactacggtttggtgccagtcattcatccgggcgggtcacggtattgagtctgatcgcaacattagccagtatcattatgtggttaagcggtttcagcctggaaaacaaagggatacatcataaatatcaggcaaatacagtgaagcacaggcgagtcatctcgttattaaaactggcggagaatgtgattcgacattctccactcatactaaacacactgtcacttgacgcagggctgaaagttctacagcaacggtataccaatatgataatggtttactaa

SEQ ID NO: 469142 - DNA, 642 bp, Shigella boydii
atgcgacgcggaagcgatcttgaatcatggtggtatgtgcaggatggtaaggacgcgtttcagtttcgccctggcaaagtgtgccacctgatgaacccggatattaaccaggaaatctacggcatgccggaatatcttggcgcgttactctcggccagcctgtctcattcggcggacatgttcagaaaactgtattacgacaacggatcccatgccgggtgcatcatctacatcggtgcagcgcaggtaaaccgcgaaagcatggactccctgaaagaaacgctacagggtgcacgtggtggtggtgcgtttaaaaacgtgctcattcatgcgcccaacgggggcaaagagggggtgcaaattttgccgttccagcagatcactgcaaaggatgagttcatgaatgtgaaggcggcatcccgtgatgatgtgctggctgcgcaccgcgttccgccgcaactgatgggggcgatgccgggcgaaaaaagtgcgtttggtgatgtggagaaggccgcgcgggtttacgcaattaacgagctgatgcccgttatggaggccatgaagcacatcaatgactggcttggcgaagaggtgatccgctttaactcttatgctcttcttgatgaaaaaacagccccgtga

SEQ ID NO: 469143 - DNA, 525 bp, Shigella boydii
atggtcattaattacaagcagttacgagaaaaacgagagcaggtaaaggagagttttcgccgcaatgaagatctgaccccgcttgtacgccttgcccagggcattgttgatgcttatgaaatctcgctggatctgccatcacagacatggacggatagcgacggtaatcaccagcattacgtttcatgcggactggaagcggctgacggatttcgcagaatgcctttatcccagatccctgccgctacccccaaagcacggggcagcaatgatgagcgaaaactgacttttagcattgagacagtagttgacgacacacctggcgaagtcgcgttcgtgcatactcctctttcgatcgcaatgtataacgatgaaatacaggttcgcgttaataataatatcgtgccacttaaagaaggtaattcaccatacaccaccgtttgtgaagccattcaatattacgttctctctgaaattgataatctcaagcctgacggcacccagaaaatggttcaactctggtaa

SEQ ID NO: 469144 - DNA, 504 bp, Shigella boydii
atgagccactttaatgatttatgccagatcaatcgtgaagctgaagaaaaacgcgctgaggcagcgcaaattttgcgggatgaagcagcaaggctgattgatttctatgaagaatggctggggcttccatccatgtactgggaagacgatgatggcgacctgcaccgctacgtggagacaggcttgccatgtaagacggcagcggattttagtccgctttcagtccacaatatcgcatctgcaccagacaatatttttcgcatggccgtgcgaacctgggttaagtcatctgattgcagctaccccgtaagcgtggttattgcacttgaattatattcagtggatgcggaacgggtgtctctgagagtccgggtggaagacgatatttctgttcgcgtatttatcaataaacccagtgaagaagcctggggcgatgttgttatgcatatgaaaaagcacatcgctaatcacctgaaaaagcgcgcgccatcagcacttcgttaa

SEQ ID NO: 469145 - DNA, 345 bp, Shigella boydii
atgaaaactgtaactgatgatgaatttcgtgagaacctgagtgaaattctggattacctttcttccggtggcagtgtcgttatcacggcgcagggagggaaggatgttgttcttgctggttctgatcttagtcctgaaatacgggctgtccttggcaaaaccaaaaaactgcgggatcaaataaacaaaatgaagcaaccactcttaataaatgcagtgagagatctggaaaaacgtcatccagctcttgtcgcacagagaaaaaaaggattgtcttttgaagatgcaatgaagcgtacaagagaaaaacatgctgatatcattaaaaagcttgaggataactga

SEQ ID NO: 469146 - DNA, 408 bp, Shigella boydii
atggacatagtgtttttgtcaaaagaacaagtagaacgtatccatgctgaaactttaccccagagcggaaatgccaatgacgggctacttgaaggtgctttaaatcgcgtcaggacactacactactatgaagggggtgatgatattcatgctctggctgctatgtatttgattggtatagccaaggctcatgcctttcatgatgggaataaacgcacagcttttcaggctgcatcaatatttttaatgatgaactcttccgaactttcaaactccctgctgctggttaaattaacggtgttttcagcaatggggatagctacccttgaggaagttacctttgctttgaaattgctgtctgattatggcaatgaattaatcagcgactacgaagaagattatatttaa

SEQ ID NO: 469147 - DNA, 336 bp, Shigella boydii
atgcaacacattgacagagaaaaagcgcagcgactgattgagcggatggaagcgctggcgaaagaagaaaatgtcaacatccaaaaaatagctgaatgtggccagatagttcttcgtcgtgaaaaagacctcaaacaactgatgtctggcgaaaccagcaaaacatggacttcaggcgagaagacggtttattgcagtttctgcaataaatcccagtacgaagtcacaaaggtgattgccggaccgtctgtttacatctgcaatgagtgcgtggatttgtgcaatgaagttatcaggagagaagtgacagaccatgaagaaaaaacgcatgaatga

SEQ ID NO: 469148 - DNA, 456 bp, Shigella boydii
atgattaaatattgccgccagtgcggtcgggagctgcactacaaagagaaattttatttttcagatcacatctgctgccgttgccgtgggctggcgtcgtttgatgatgacggcactgaatctgtcggaagggagagaacgcctgtcgaacgcaccctcttcgagcgttacccggtatggcagctgatgattgagaaagccgaacggcagtggaaagcaacccacccgcaaccactggcggacgtcattactgtaacccggtgcacaaaggtctctgatgaacgcatcactgaaatgctggcgcagtatgacgacttcaggccagttcagattgaagaacgtgagctgatagcccttcttcaggaagtgcgcgaagcgcgacgcagtaccgccttacagaaggaaaaaccaacatcagggcgcatccgccctgatgactttaatccgggaacataa

SEQ ID NO: 469149 - DNA, 489 bp, Shigella boydii
atgccaccgaatgcccctgtcgatgactggctgaggtcactgaaacggcacgaacgccgggcgctgatgcgttcgctccgggaaaaaccagtaaataccagcggcggtgatacatctgaccggatagccgggcataaacaaccaccagacgcaccagtctcaccgacagctgaatggagaaagtcagcaggggaactgggaacagaactgaacgacgaccacatccggcacctggagaaagtcggcgtactgcgcctcaatggtcatgtgctgaatatcaccgacggaaaactgacgcaccgccgcgatcagcgcgcagacaggaaggtaaaccgcatctgggaacgcctgaaccgcaatcatggcatcagcacatccgaaatcaggtacaacccgctcgcatactatgtggatatgctccgggatatcggcgttgaggcgttacctgtaaccacagtacacaagcatcagggggatgagcctcaatga

SEQ ID NO: 469150 - DNA, 408 bp, Shigella boydii
atgctgggagcggtggaacgccgcttcggcaacgatcttccgtcgtctccagtggagtggctgacggataatggttcatgctaccgggctaatgaaacacgccagttcgcccggatgttgggacttgaaccgaagaacacggcggtgcggagtccggagagtaacggaatagcagagagcttcgtgaaaacgataaagcgtgactacatcagtatcatgcccaaaccagacgggttaacggcagcaaagaaccttgcagaggcgttcgaacattataacgaatggcatccgcatagtgcgctgggttatcgctcgccacgggaatatctgcggcagcgggcttgtaatgggttaagtgataacagatgtctggaatataggggcaaatccataacgcctccggattga

SEQ ID NO: 469151 - DNA, 198 bp, Shigella boydii
gtgcctgtcgacaccacgaccatcgcacaaatcacccgcgaactcgacgcgctgggtgtgcagctgcctgacgcagccattatttccgtgagtaacggtgcccgcgttcgcccgggcgacgggcgtatcgcgtactggagcgccacaacccgccgcatcgtcatcacacaggagtcgtcagcggaggtaagatcatga

SEQ ID NO: 469152 - DNA, 432 bp, Shigella boydii
atgacgcgatttcactgcaccatgcagcgtcagcagttcgacgccgttatgcgccagcgcacgccagccatgacactgagaggcgtagccacaagaccacagcccggggacgaactggaaatcacggtggccagccccgatcgcaccaccacaaccaccatcaccgacatacttaacaggcgaccgggcagtgaatatcagagctggatagttgccgttcgtccgcgccgttcaccggaagagccggaaccactcacgccggccgggaaaatcatgcagaagtaccacgaagagcagacccgcaaacacaatgtcgcgctggccagaacgctgactgccgtcaatcgcaaggccgcactgacgcaaagggtctttttaccgcagcgccattcatgcgccagaccggcacaacacaggagagattcacaatga

SEQ ID NO: 469153 - DNA, 333 bp, Shigella boydii
atgagagagcaattaccaggcaccgtgccagcgcaggaaatcaaagaaagtatcaggcaacaacttcacggattttatattacttatgatttgtggctgaaaaacggagcaaatccaggcagaatattttcgcgaaactgtggtttatgcgccagcctctgggattatctcgaattaacgggtgctgataaagaaacagtactggagcaattacacgctgatttcagaagtgccgggctgaatgaggtgttaccgtttaacgagaacaaagctcattaccatgcagaaaaaagacacaacatgtgccatatgaatccggcgcggattgcatag

SEQ ID NO: 469154 - DNA, 1146 bp, Shigella boydii
atgaacattcaacagcgtatagcagaacgcttggttcaggccagaaacgacgcaggaatgagtgcaagcgccgtcgcagatgcgatcggtgttgttcgtcaaacctacagtaagtttgagcaggcgctaggcgtcccaagcgttacccaactcatcatgctctgcaagattttcgataagcctgtcgggtatttttatgagcaagatgatggcgagtttcgttttgcaatgcgagcagatagtccggatttgttggatgccagacttcgcaatgagttgattgaaaagttaaaaaatatcaatgcaattgaggaagctgctgatgctaatttgccagaagatcttcctaactcaatgcctgtttttaccgccaaagcagaagatttgcgaagagtcgaagataaggctatggaagaacgtttccgtcttggtatgggaaacgctacttgcgttggtgacattgtagccattttggaagcatcggatattcgagtgatcccgttcaatcgcgaggaaaccgataaagggatggtattcggattttctgcgttttcgaacaaatacggtaccgcgatttatgtaaatgttcacgacagcatttcaatagaacgtcaaatcttcagtatttgccatgaatatgctcatcttatcttccaccgtgatgagtatgatggccctgctaaaagctataaaactaatggcaaagcaatttcaccggaagaaaaagttgctaatcactttgctgcttgttttttggtaccagaaagcgcgttgcgaaaacaattcgtcatgcaaggtggtggatgggcgtatgaggaaaccgtccttagactaaaaagcattttcagagtatcagccacttgcatcattgagcgtcttagtaaatgtaatttaattaatcagcaaaacactagatacctatgggcaaccgccaatcgtaaaggctggaagagacacgagccaaatcccataagggaagcactaaattataaaggtcgcctaaccgtcttatcgcgtaaagcatgggaagccggttccgcgtcggaaaccttcatatctgaacttttagaattagacagaaaagctctcagcaatcttctggatgaatggtacgacgaacaggaggccggagaggatgccgtttga

SEQ ID NO: 469155 - DNA, 519 bp, Shigella boydii
atgccgtttgaatgccccagatgtgttatcgatacgaatgtactgtctgatttttacgaaggtaaatgcttagatcttatctggcaaatttacccgggtggtgtgtggattgacccctatgtctgcgaggaactaaaagctaaatacaatcttgatgttcaggaacagcttacacgcctgcaacttccatacaatttcaccaatgattacgaacctgaacattttattgaaatggctgagataaaaaatcgcaggagagcattgaagtatgcggacataagctgcgttgttaacgcgagaatacatgatgcaacatgtctttcggcggataatgcggtttataaaacgtgtgcggaacgcggtgtaaaagccgcccgccacggagggctactccaggaggctgtgcgcaggagatttatccacaaacaacaagccttaatgcatttccaatttttcctggatcgtgggttaacgatgaaatcttctgttcgagaacagattcttgccagcttcgaataa

SEQ ID NO: 469156 - DNA, 276 bp, Shigella boydii
atggcgggtgtgatgaaaattgaatgtccggcgtgtcactgccgggcggctatacgcaaaactgcatggcaggatgacgcaaaaacgctggcggtagtttattgcacctgcactaattctgactgcaatatgcgtttttcgctcaatctttccgatcttcgcgtgatttcacccagtgacctgcaaactgatggtgtcgttaaagcattgctccagcgccttaaaccagacgaaaggcaaatggcactggatattctgctcagtgatggcgcgtaa

SEQ ID NO: 469157 - DNA, 768 bp, Shigella boydii
atggaaatggctgtctttgactacctgctgtttggtgatgtggccattctgaaggtccgtaacgggtggggacgggtggtggcgctggcaccattaccgtctttgtatctgcgtcgcagcaagcaacttgattttatcgtgttacaggagggcgagccgctggtctattcgccgtctgatgttgtgtttttacgtatgcatgatccgcgacagcagatttatggactgcctgattatatcggtggtattcattcagcgttactgaacagtgaggcgaccattttcagacgtcgctactatcacaacggtgcgcatatggggttcatcatgtacgcgtccgacccgaatatgtctgttgaggctgaagaagctatacgtaaaaaaatagagagcggtaacgggcttgggaatttccgtaacatgtttatcagtatcccaaaagggcaaccggacgggattaaaattattccggttggggatattcagcaaaaagatgagttttcaaatgtgaagaatatcagcgctcaggatgttcttacggcgcaccgctttccggctggtcttgccggtattatcccgcaaaatgcgagcggacttggcgatcccgataaggcaaggacaacctatggacgggatgaagtgacacctgtctgccgtaaattcatgcaggctgtgaacagcgatcccgaaatccccccgtcgttacaccttaattttacgctggaagatgtggaaaatgtggtgtctgcgctggctgatgaaaaataa

SEQ ID NO: 469158 - DNA, 696 bp, Shigella boydii
atgccaccgaatgcccctgtcgatgactggctgaggtcactgaaacggcacgaacgccgggcgctgatgcgttcgcttcgtgacaaacaggcaaaaaacagcagtgatgaaatgcagagctggacacagagccgcaaacagcagcggcctttgcctgataaccacgaattactcgctaaagaatggcgggagtctgctgaatctctcggcctgcatatcggtgaacaacagatgcagcacctgttacggggcggcagtctgtacgttgacggcagcatcattgcaccgcagggatttgaaattgtacgcaaaccggatacccgcccggacagccgaatcacgcagctctggcagcgcctgagccgtaatcatggcgtaagcagcacggagatccgccataacccggtcgccagctatctgacacagctgggggcatcagaccctgaagccgccgcacgcctggcatccacacttcagcaggaccagaacaccatgaaaacacccgttaccgtgctttctgacatgctgcgcgccatccgcgacgcagagcacgcacagagaatcagtgaaaccactgaacgcgcccgccgcaaagcagacctgctgcggggtggcctgaccagtggaaacaaaaaacagacagaaacgggactcacgaatcccgtaaatgagcaaaaaacgcgcagcgatatatga

SEQ ID NO: 469159 - DNA, 525 bp, Shigella boydii
atgaaaaaatacgaatacatgctaatgaaagaagcactgcgggctggtctggctccctgtcctgtatccgtagaagctgttgttgggaacacgattttccgaacgctgcgaaatcgcgtatccgtgaagatggttcaccaaccacccaaatctaccagcatgatctatctgccgctgcccgaggctatcaaacttatgcgttcgctgaaatttgcgatttggatgcagacacaaatcaacaaagcggtgcaaaacaccttcgttaagagactaataccggagcttgctgccagatgtgcaaaatgtaccagacccgcacttcaatttgatctgtcattgattcaacaagctacggaggcagaactgtaccgcctgtcacctatccgtgatgctcacacggaagcatcagaaatgttccggctcatgtttcaatttaattttgccgttcgacgcacacgcgttcaggtcaatcgcatgatgcaggagcaggaagagttaacacagtacaaagggggcagccagtga

SEQ ID NO: 469160 - DNA, 240 bp, Shigella boydii
gtgagtaattcagcacgactacagcttggtttttcaccgctatcaaaaaccatcgtattggcaaaaatgcgtgacttaggagacggaacaaaacgccgcgtaggaaatgatcgcggtcgcgatgtaaccaacgaggccgctcaactcgtttggcatctagtcatggcagaaggcggtgaaattaattgggagctggatgatggttctcgtatgattttgagggccgagaagagtaaatag

SEQ ID NO: 469161 - DNA, 186 bp, Shigella boydii
atgctaaatgatgatgaagaagagctgcttatgcaggaatggtcgctcggtgattatgataatggtgaaaatgggtgcccgcattgtggccgttatcgtttatgtatctgccagaatggaaaacacagatgtgaaaagtgcaattggtctccggaacttaatgactacgtgccgatcgagtggtag

SEQ ID NO: 469162 - DNA, 459 bp, Shigella boydii
atggacattaaaacattttcagataatacaaaaataattattccttgtatcgctctggtattgctggcacagtttattggtaaaggaatgtcagtagtggacgctctaccaggtgcggcagtaatgttcctggttattatcgcatcaattcaaataaaaatttggttgccaaaaattccacttcctgcgtttgcttgggcaacactgattgccttattactgagcatgccttattcacccgttagtcatatatttatgagtatgaccaataaaatagatttcttggcaacgacaacgccacttcttgcgtttgccggtctgtctgttgggaacagtattgacaaactgaagtcactcagttggaaaatagttattgtatcccttgtggtttttactagcgcattttttggtgcagccgttgtcgcacagttaattctgaagtttcagaatattatttaa

SEQ ID NO: 469163 - DNA, 1170 bp, Shigella boydii
atgaaagattatacaatatcgcaagaattatccctactcgagaaattcagtaaagaagttcgacattatctccatacgatcccagaagcctccggagaagaatataaaacatcagcatactgcaaacaaatgatgcagtcctttggttattcagttgttgagtatccaggatttaccggttttcatgctgacctgaatattgctgacaacataaaaagagttgcttttagagcagacatggatggactggaaatgccggaccagaccgagtctgaataccgttctgtacatgataatatggctcacaactgtggtcatgattcacacatggccatcgcgctcacagcggcacgttttctggctgaaaaccagcatgcattaaaatgtaatgtccggtttatcttccagatggcagaggaagatatgcgcgttcctggtgcggaaaaaatggttgaatgcgggtgtgtagtcggcgttgatgagatttacgcccttcataatgatgcttcaatagaagttggctctataaagatcaatgacgggattatgtcctcctggggggccgcatggactctcgatatcggcggcgtttcagcccatggttcaactccacagaaaggcctagatgctattcgtgaagccgtacgaatcatcgcagatcttgattatattgtagctaaaaaaaccagtccgttcagccctgcggtctttggctgcgggatgatacatggcggtagtgtacccaatgcagttccagactacgttcaggccagaggaaccatccgttcaatggacgaagaaacggattcagtcctgaaaaatcatttctcatccattgtaactgaaagtaagttgcgcggattcagaacaacaatggtttcaactggatatccagccgttgtcaaccataaggaggcatttcagcgagtaatacaaaacgcctcatgttttctgcaacgtattgacagtcactgtaaaccaatgaccgctagtgaagacttcagctatatggttaatgcagtgcctgacaggaagggcgctatgttttttctaggaagtggttgcgcggagaaaggtattaataattatcttcattcaaacccatactaccttgatgatgactgtctgctgataggcgcacaaatttttattaacctcgtcacccattaa

SEQ ID NO: 469164 - DNA, 915 bp, Shigella boydii
atggataaattacctaaaagtaaaagcctgatggtttttcttgaagtcgcccgtagtggtgggatcatgaatgcttcaaaaaaacttaatatcacccagcctactgtcaccagaataatcagagagcttgaaaactatgtaggaacacctttattcgagagaacctgttccggtgttttcctgaatcaggctggtaatgtttttcacggcagggtgttaagttatgttaatggattgcaaaaatctatctctgaaatcagaaaggagtttggaaaggataataagaaattctcattaggatattcatcactggttggttatacggtccttcctgatgtgataaatgagtttcgggaacttaacagggatgtatccataagtatttacgaaggtcagttatctgatctgcttccccttcttaatactggtagccttgactgtgccatcggaacactacttaacgaagaactgccttatgactacagtgctgaattgcttttcaaaagtagtttctctgtattctcatcagtactgagtccatactcgagggcaagaaatttgcaggaactccaagaggcaaagtgggtcttaccggtaacttgttttggatattataataaccttactgaatttcttagaagagcaggagtgaatattgataatgccatcagaacagactccatttcatcaataataaacttggtttcctgtgctgactatgtcacggttctggcgaaacctatgggtgatggcagaaataaaaaactgtctctgcggccaattcgtatcaaggaacaattaccttctgctgattattacctcacttggagtaaaaaatatattccttccagactgttgagtgaatttatgcgtataataaaagcacgttgctctgtgagtgtgtggggaaaataa

SEQ ID NO: 469165 - DNA, 1185 bp, Shigella boydii
gtgtccgttaaactcaggctacctcaggccgaggatgcccgtaaggcaatcgatgcagcagaacgtgcacaaccagaatgggaagcgttgcctgctattgaacgcgccagttggttgcgcaaaatctccgccgggatccgcgaacgcgccagtgaaatcagtgcgctgattgttgaagaagggggcaagatccagcagctggctgaagtcgaagtggcttttactgccgactatatcgattacatggcggagtgggcacggcgttacgagggcgagattattcaaagcgatcgtccaggagaaaatattcttttgtttaaacgtgcgcttggtgtgactaccggcattctgccgtggaacttcccgttcttcctcattgcccgcaaaatggctcccgctcttttgaccggtaataccatcgtcattaaacctagtgaatttacgccaaacaatgcgattgcattcgccaaaatcgtcgatgaaataggccttccgcgcggcgtgtttaaccttgtactggggcgtggtgaaaccgttgggcaagaactggcgggtaacccaaaggtcgcaatggtcagtatgacaggcagcgtctctgcaggtgagaagatcatggcgactgcggcgaaaaacatcaccaaagtgtgtctggaattggggggtaaagcaccagctatcgtaatggacgatgccgatcttgaactggcagtcaaagccatcgttgattcacgcgtcattaatagtgggcaagtgtgtaactgtgcagaacgtgtttatgtacagaaaggcatttatgatcagttcgtcaatcggctgggtgaagcgatgcaggcggttcaatttggtaaccccgctgaacgcaacgacattgcgatggggccgttgattaacgccgcggcgttggaaagggttgagcaaaaagtggcgcgcgcagtagaagaaggggcgagagtggcgttgggtggcaaagcggtagaggggaaaggatattattatccgccgacattgctgctggatgttcgccaggaaatgtcgattatgcatgaggaaacctttggcccggttctgccggtggtcgcatttgacacgctggaagaggctatctcaatggctaatgacagtgattacggcctgacctcatcaaatctatacccaaaatctgaacgtcgcgatgaaagccattaa

SEQ ID NO: 469166 - DNA, 645 bp, Shigella boydii
atgggggattctgtgacacctgaggtggaagtattgagcaacatgattcgacagtacttcagtcaggaacgatctgaagaagagaccatacgagcccttaatcatctgcgcagggtgttgcatgaggtcagcccttttgcacaggagcctgtggactgtgtgttgtgggtgaaagcggatgaggtggtggccaacgattacaatcccaatgtcatgtcttccagtgaaaaaaaactgcttaaacattcactggagcaggatggattcacgcagcctgtggtggtttcggaagagaaggagcattatctggtcgtggatggttttcatcgtcagttgctgggcaggaaagcggatacgagaaaacgtctgaagggctggctgccagtggcctgtattaatccagagagaaagggactggcatcacgtattgccgcgaccatacggcataaccgtgccagggggaaacaccagataacgtcaatgtctgacattgtcagggacctctcgcgtctgggctggacagatgaacgcattggcactgagctgggtatggaccaggatgaagtgctgaggttgaaacaaattagcgggctgacggagttgttccagcaagacgacttcagcccggcatggacagttcgctga

SEQ ID NO: 469167 - DNA, 888 bp, Shigella boydii
atggggtattattttgtccgaaacaccaccagtgtgttatccggtgtgctgcacatgtctgcaaccgagatcggcattatctcctgtgccggttttttatcctatggtatatcaaagtttgtttccggacttatttctgacagaagtaattcaaaagtatttttgtctcttggtttattcctgtccggactggtaaattttctgataggatatattcccgggatcatcacatccgttacgttattttcaacaatgtatttacttaacggctggatccaaggtatgggatatcctcctggtgccaaaacactggtgttctggtatgaacatcgggaaaggatcacctgggccacactgtggaatttatcgcacaatgtcgggggagctctggcccccgttctgattggtttcagttttggttttttcggcgacagtgctctggatcatgcccgggccgcatttatcttcccaggagtactgtgtatggcaatgagtgtgctgatttactttattcaggtggacagacctgtatcagtgggtcttcctcccattgaagaatggaaaggtaacgtcgtttcacacccggctaaaggccgtgaacaaggtccgagactctccattcctgatatcatcagaaaacatatcatccgaaataataaactcatttactgctgtatctatggttcgtttgtttatattctgagatacggtattgtttcctgggctcctaagtttttaagtgacagtctggatgtcggtggtaaggatatgggaaaactggcatcaatgggggggttttctgtttttgaaatcggtggtgtggctggtatgcttcttgccggatacctgtctgtcagactgttcacgtataggaaattgaaaaactaa

SEQ ID NO: 469168 - DNA, 276 bp, Shigella boydii
atgagagacgtacagtggttttgtccgctcacaccagtacatacaggtacggaaataaaaccagtcgaaatgccggtaacgacgattactcctgtctctgatgccggtggactacaagattttatttactggcgtcctgatgcggacaggactggtatggaacctgtttatgtgatacttaatgatcctctggattccgggcgatttacgcgtaaacaactaaataaaaatatcttaaacatgcaagtaattttggtattctcgatacaagaataa

SEQ ID NO: 469169 - DNA, 300 bp, Shigella boydii
atgagttatgaaatagaatggcgaccaggtgcaattgaggatataacggcgctgtttgaatatctggctgagaatgcatctctttgggatgcaaggaacgtgacagagcgtctgatcactgcaaccgatcgcctggcagattaccctcggctgtatgaaactgatgaacgctatggcgaaggggttcgccgcattagcttacttggacaacacgttctttatgaagtgaatgatgaggccagttgtgtcaatatcctggcggttgtaggtcagcgtcagaatccccgattcattctttga

SEQ ID NO: 469170 - DNA, 264 bp, Shigella boydii
atgaatagcaccactcattacgaaaacgccaatttcctgcgcgagctggccgaaagcctgcctcgtattttgccagaaggcagtacagacaagtctgcactattacaacgcctcgcgaatgaagaactggcacgggcggaatacgacgaacaggtacgagcgaaagttgccgctgcccgcgccgataagcggccgggaatgagttccgcgcaactgcgccagcaactacagggacgttatcaggaactgcgcaatgagttatga

SEQ ID NO: 469171 - DNA, 516 bp, Shigella boydii
atggagcagacaaaagaacccgtagcaaagcgtatagatgttcttatcaggcgctatccttcgagaagcgcagccgctagggcatggggcataaataccaacacattaaagagttatttcaggaaaacaggcgataccccagagccacgagaaaatgtattactgcgcattgctgaacatgagaaggtggatcttgattggctaaaaaccggaagagggaaatcacccagcatacccaaatcaaccacaaagggtgaaagtgaccaattaaccgaaatgctctcgtttcttactagtgaagaacgagaggctcttaccagcatgttcgcaaggaaaggcgttgaaacggtactacgcttattggacaaagatactcaagaactgctgcaactagagggtcgtaaacgcctagcagcattgatgttggttgatatgcccgacgagcaagtcagagagattttggaagaaattgaagcaagtattctctcgcacagcgtaaaagcaaaggcaggttga

SEQ ID NO: 469172 - DNA, 369 bp, Shigella boydii
gtggaacgccgcttcggcaacgatcttccgtcgtctccagtggagtggctgacggataatggttcatgctaccgggctaatgaaacacgccagttcgcccggatgttgggacttgaaccgaagaacacggcggtgcggagtccggagagtaacggaatagcagagagcttcgtgaaaacgataaagcgtgactacatcagtatcatgcccaaaccagacgggttaacggcagcaaagaaccttgcagaggcgttcgaacattataacgaatggcatccgcatagtgcgctgggttatcgctcgccacgggaatatctgcggcagcgggcttgtaatgggttaagtgataacagatgtctggaaatatag

SEQ ID NO: 469173 - DNA, 294 bp, Shigella boydii; identical to SEQ ID NO: 25632

SEQ ID NO: 469174 - DNA, 369 bp, Shigella boydii
gtggaacgccgcttcggcaacgatcttccgtcgtctccagtggagtggctgacggataatggttcatgctaccgggctaatgaaacacgccagttcgcccggatgttgggacttgaaccgaagaacacggcggtgcggagtccggagagtaacggaatagcagagagcttcgtgaaaacgataaagcgtgactacatcagtatcatgcccaaaccagacgggttaacggcagcaaagaaccttgcagaggcgttcgagcattataacgaatggcatccgcatagtgcgctgggttatcgctcgccacgtgaatatctgcggcagcgggcttgtaatgggttaagtgataacagatgtctggaaatatag

SEQ ID NO: 469175 - DNA, 537 bp, Shigella boydii
atgacggtgctggactggctgaccaatccgtgggaaccgtacaaacgcgggattatgatcggctttgattccagcatggattacgcatggatatatcgttcgatattggaaagcgtggcgctaacgctgaagaacaattacgacaatatgtgtaatgaaatgaatcactttgcgaagcatgtgatcattactggcggcggttcgaacagcgatctgtttatgcaaatttttgccgacgtgttcaaccttccggcacgccgtaacgccattaacggttgtgcaagtctgggagcagcgattaatacagcggtaggtctggggctatacccggattacgcaacggctgttgataagatggttcgcgtgaaagatatctttataccgattgagagcaatgccaaacgctacgacgcgatgaataaaggcattttcaaagacctaaccaaacatactgatgtgatcctgaaaaaatcgtatgaagtgatgcatggggaattggggaatgtggattcgatccagagctggtcgaatgcgtaa

SEQ ID NO: 469176 - DNA, 372 bp, Shigella boydii
atgtcgatggttcatgatgaactgccaaaatacctgctggcccctgaagtgagcgccctgctccattacgtgccggatctgcgccgcaagatgctgctggccacactgtggaacaccggtgcgcgcattaatgaagcactggcgctgacgcggggggatttttcgcttgcgcctccgtatccgtttgtgcagctggccactctgaagcagcggacagaaaaagccgccaggcaggcaggaagaatgccagccggtcagcagactcaccggctggttccgctttccgacacctggtacgtcagccagctgcagacgatggtggccacactgaaaatccccatggaacggcgtaataaacgtaaggcagtatga

SEQ ID NO: 469177 - DNA, 243 bp, Shigella boydii
atgaaaactttaaagctaatcaagtcatcaggtgtaatattcgttaccgcagggattataactgtaatatcagaaagcattggtgttattaaggtctcagcccttggtgtcaactttagtctattacccatgttatacgccgttatcattggtgttcttgtgacacctgatttaatcggaaaacatatcagaccactgggtaatatacttaatcatgacgcgataaaaaaaccggaaacatag

SEQ ID NO: 469178 - DNA, 882 bp, Shigella boydii
atgaataataagggctccggtctgaccccagctcaggcactggataaactcgacgcgctgtatgagcaatctgtagtcgcattacgcaacgccattggcaactatattacaagtggcgaattacctgatgaaaacgcccgcaaacaaggtctttttgtctatccatcactgaccgtaacctgggacggtagcacaaccaatccccccaaaacgcgcgcatttggtcgttttactcacgcaggcagctacaccaccacgattactcgccctactctctttcgttcgtatctcaatgaacaacttacgttgctgtatcaggattatggtgcgcatatctcggtgcaaccctcgcagcatgaaatcccctatccttatgtcatcgatggctctgaattgacacttgatcgctcaatgagcgctgggttaactcgctacttcccgacaacagaactggcgcaaattggcgatgaaactgcagacggcatttatcatccaactgaattctccccgctatcgcattttgatgcgcgccgcgtcgatttttccctcgcgcggttgcgccattataccggtacgccagttgaacattttcagccgttcgtcttgtttaccaactacacacgttatgtggatgaattcgttcgttggggatgcagccagatcctcgatcctgatagtccctacattgccctttcttgtgctggcgggaactggatcaccgccgaaaccgaagcgccagaagaagccatttccgaccttgcatggaaaaaacatcagatgccagcatggcatttaattaccgccaatggtcagggtattactctggtgaatattggcgtgggaccgtcaaatgctaaaacggtaatgctgccaacttactga

SEQ ID NO: 469179 - DNA, 621 bp, Shigella boydii
atgcgccagaatgcgctgttgcttgagcgaaagcctgctgtaccgccatcgaaacgggcacatacaggcagagtggccgtgaaagaaagcaatcagcgatggtgctctgacgggttcgagttctgctgtgataacggagagagactgcgtgtcacgttcgcgctggactgctgtgatcgtgaggcactgcactgggcggtgactaccggcggcttcaacagtgaaacagtactggacgtcatgctgggagcggtggaacgccgcttcggcaacgatcttccgtcgtctccagtggagtggctgacggataatggttcatgctaccgggctaatgaaacacgccagttcgcccggatgttgggacttgaaccgaagaacacggcggtgcggagtccggagagtaacggaatagcagagagcttcgtgaaaacgataaagcgtgactacatcagtatcatgcccaaaccagacgggttaacggcagcaaagaaccttgcagaggcgttcgagcattataacgaatggcatccgcatagtgcgctgggttatcgctcgccacgtgaatatctgcggcagcgggcttgtaatgggttaagtgataacagatgtctggaaatatag

SEQ ID NO: 469180 - DNA, 303 bp, Shigella boydii; identical to SEQ ID NO: 458125

SEQ ID NO: 469181 - DNA, 294 bp, Shigella boydii; identical to SEQ ID NO: 25632

SEQ ID NO: 469182 - DNA, 528 bp, Shigella boydii
atgatgcacttaaagaacataaaagcgggtaatgctaaaacactggagcagtatgagttaacaaagaagcacggagtcatctggctttacgctgaagacgggaaaaactggtatgaggaagtgaagaactttcagccggatacaataaagattgtttacgacgaaaataatattattgtcgccgtcactaaagatgcctccacgcttaatcctgaaggttttagcgtcgttgaaatccccgatataacagctaaccgtcgtgccgatgattcagggaagtggatgtttaaggacggagcggtggtcaggaggacttatacagcagacgaacagcagcaacaggccgaatcacaaaaggccgcgttactttccgaagctgaatcagtcatccagccgctggaacgcgctgtcaggctgaatatggcgacggatgaggaacacgcacgactggagtcatgggaacgctacagtgttctggtcagccgtgtggatacggcaaatcctgaatggccacaaaagcctgaataa

SEQ ID NO: 469183 - DNA, 282 bp, Shigella boydii
atggataataacggtaactggctttgtggtgcgcaagttattcccggcaattatggcaattttgactccagatatgtgaaagatgtccggcttggctcacagcaatattatggtgtgaataactggcaaacatggaatttccagtgcccttcaggtcatgtattgtctggtattaatgttcaggatacaggcaaaaactctgccgataatatagctggcgtttattacagacccgttcaaaagtatataaatggcacatggtataatgtagcgagcgtttaa

SEQ ID NO: 469184 - DNA, 282 bp, Shigella boydii
atggataataacgggaactggctttgcggctcgcaagttattcccggcaactatggcaattttgattccagatatgtgaaagatgttcgacttggttcacagcaatattatggagtgaacaactggcaaacatggaattttcagtgcccgtcaggctatgtactgacggggattaacgtacaggataccggaaaaaactctgccgataatattgcaggcgttcattacaggccagtgcaaaagtatataaatggcacttggtataatgtggcgagtatttaa

SEQ ID NO: 469185 - DNA, 528 bp, Shigella boydii
atgatgcacttaaagaacataaaagcaggtaatgctaaaacagtggagcagtatgagttaacaaagaagcacggagtcatctggctttactctgaggacggaaaaaactggtatgaggaagtgaagaactttcagccagacacaataaagattgtttacgatgcaaataatattattgtcgccatcaccaaagatgcctccacgcttaaccctgaaggttatagcgtcgttgaggttcctgatattacagctaatcgtcgtgctgatgattccggtaagtggatgtttaaggacggagctgtggttaaacggatttatacggctgacgaacagcaacaacaggccgaatcacaaaaggccgcattgctttccgaagctgaatcagtcatccagccgctggaacgcgctgtcaggctgaatatggcgacggacgaggaacgcacacgactggaagcatgggaacgctacagtgttctggtcagccgtgtggatacggcaaagccagaatggccacaaaagcctgagtaa

SEQ ID NO: 469186 - DNA, 282 bp, Shigella boydii
atggataataacggtaactggctttgtggtgcgcaagttatccccggcaattatggcaattttgactcacgctatgtgaaagatgttcgacttggcacacagcaatatcacggtgtgaataactgggaaacatggaactttcagtgtccgtcaggctatgtactgacggggattaacgtacaggataccggaaaaaactctgccgataatattgcaggcgttcattacaggccagtgcaaaagtatataaatggcacctggtataatgtggcgagtatttaa

SEQ ID NO: 469187 - DNA, 528 bp, Shigella boydii
atgatgcacctgaagaatataaaagcgggtaacgctaaaacaccagaacagtatgagctgacaaagaaacacggagtcatctggctttactctgaagacgataaaaactggtatgaggaagtgaagaactttcagccggacacaataaagattgtttacgacgaaaataatattattgtcgccatcaccaaagatgcctccacgcttaaccctgaaggttatagcgtcgttgaggtccccgatataacagcaaatcgtcgtgccgatgattccgggaagtggatgtttaaggacggagctgtggttaagcggatttatacggcagacgaacagcagcaacaggccgaatcacaaaaagccgcattgctttccgaagctgaatcagtcatccagccgctggagcgctctgtcaggctgaatatggcaacagatgaggaacgcgcacgactggagtcatgggaacgctacagtgttctggtcagccgtgtggatacggcaaagccagaatggccacaaaaaccagagtaa

SEQ ID NO: 469188 - DNA, 369 bp, Shigella boydii; identical to SEQ ID NO: 465353

SEQ ID NO: 469189 - DNA, 327 bp, Shigella boydii; identical to SEQ ID NO: 462700

SEQ ID NO: 469190 - DNA, 156 bp, Shigella boydii
atgctggagaatgagtactctcagagggtggctgaccggctgaaagcatcaggtctgagcggtgatacggatgcggagagggaagccggtgcacaggtgatgcgtgagactgaacagcagatttaccgtcagttgactgacgaggtactggcctga

SEQ ID NO: 469191 - DNA, 186 bp, Shigella boydii
atggaccgggaatacatctgcgcatcagaccctgaagcccgtgaaatgtggcagcgtatctggcgcgattaccggttaatggcaaaaggctgggcgcgctgctgttattcctcgcttgccctgaaagcggttcagttatcgctgcggcatattccggcatcactgcgcgagcctctgttgtactga

SEQ ID NO: 469192 - DNA, 288 bp, Shigella boydii
atgacgtgtaatcgtaaacgctggtcacgcgaagaccgggaatttatcgaagccagtgtcggaaaaatgaccgtcgaggaaatggcgaaaaaactgaaagttgccccaaccgccctacaggcacatgccagaaggcacggaatatcgttgtgtgcataccaggtcagtgagcacgacaaatatttatgccgtgaactttataaagaagggctggctattcatgtgatagcccaaaagatggaattaagcaatcgtgctgtatccggcattgtatacagtgaatattaa

SEQ ID NO: 469193 - DNA, 693 bp, Shigella boydii
ttgtccggtggacttacttttgaaaacgactcaatcctcgcctggattcggaatactgactgggcgaagattggatttaaaaatgatgccgacagcgatactgattcatacatgtggtttgaaacaggtgacaacggcaatgagtatttcaaatggagacaccgcctcgctggcggccgggttaaagacctgatgaatctcaaatgggatacactaaatattctggttaatgccgtcattaatggttgtcttggaattggtacgacgaatgcgttaggtggaagttcaatcgttttaggagataacgataccgggtttaaacaaaatggcgatggtctgcttgatgtttatgccaatagcgtgcatgtgttgcgttttcagagtggcagtatccagagtaataaagctgtaaacgttacaggacgggtaacaccgtcagactacggaaacttcgatgcccgctataaacatcgaactgagggggtacaggatgtgcggtatggttatgaaatgtattacaaccctggcagcaacaccgtttcatggacgtttcgctcaccttcgggacacgggttgtcagggatatcgatatcggataccggccgtaactcagcggataacgtcaacggtgtgtattaccgaccgctgcaaaaactgattaatggcacctggtataacgtagcgagtatttaa

SEQ ID NO: 469194 - DNA, 372 bp, Shigella boydii
gtggtgtgggtcggtaaggatgtgacaggcattgaaccccgtaacgccagtgttattgaagttcctgatattaccgccaaccgccgcattaccgcgccgggttactggttttaccgcaatgatgaatttgtctttgactacagactcaaagcggaagatgagcgtgatgcccttctggctcaggtcagtgcccggacaggggaatgggaagaagacctgctgctggggctaatcagcgacgaagaccgggaaaaactgaaagcgtaccgtatttacgcgaaatcgctgcaggcgatggatttcagcaccatcacagataaagccacatataacgccatcaactggccggagcgtcccgatgccgcagcttaa

SEQ ID NO: 469195 - DNA, 366 bp, Shigella boydii
atgattctcgccaacgactttcttgaatacctgctcaacacagagcgtgatcttgccgctcgcgtgcgtgatcgttatgacatgtacctgaaatccctgcctgtaccgcagctcgctgacggaaagattgttattgatggtcgctacatgattgacagccacgagggaaattacaggctttaccgcattgaaggtggcaccccgtccgttattggcatttaccagcgcccatcctctgcaatcgtcgatgtgattgccgacagcatccgcatcacacatcgccatgccgacacagaagacaccgtgctggaaattcagcggctggctacagtctgccgcgacaccctgaatggcatgacgaagtaa

SEQ ID NO: 469196 - DNA, 348 bp, Shigella boydii
atgactaaaaatactcgtttttcccccgaagtccgtcaacgggcagtccgtatggttctggaaagtcagggcgaatatgactcacaatgggcgacaatttgttccattgctccaaagattggctgtacgccggagactctgcgtgtctgggttcgccagcatgagcgggataccgggggcggtgatggcgggctcaccaccgctgaacgtcagcgtctgaaagagctggagcgtgaaaatcgtgaaccacggcagcctgacggctgcaaattgaaaaccgcccctgttcgtcctgttgttgccgcacgctccgcagaatatgtatgctctgaggacctgttttattaa

SEQ ID NO: 469197 - DNA, 279 bp, Shigella boydii
gtggtcccggctccgctgcctccggcgctggtccctgttgttgcggccagctcccgcccggtggcggaggccatacgctctccagtggcatcagttcctgtaacttcccgtaaccgggagcctgttgcctccggatttggtggtgaaattcatgttcatctgcataacgttgttacgcagaatccccgcgaactggcgaaactggtcggtgaaatggtcagggcagaaatggaacggcgcgcccgtgccgggcgtggcagtttttacgataaagattga

SEQ ID NO: 469198 - DNA, 471 bp, Shigella boydii
atgaaaaaaaattttttttgtttatttgtatttttctttattgaaaatatacatgcagaagtaaattctaatgtaaatagtgaatcactacatcaattacctgctgttacaattgataaatataaaaatgaattattagagtttcagaagttacagcgtgataatgaaaagttaaagttagaagaacaaaacttagcacttaaaaaaaaattacgatcgttaggttttgagaatgttaattcaacaaaagtggtgtctatattttcaatcagaaatgcaaacaatggattggcagcacaaatatataatgcatatgatgggttgaaagttgtaacgcaaggtagctatgttatgagtcattataaagttataaaaattaccccaacagttgttcgattacgagatacacatgaaggttcaaaggaaatagatttaaaccttgttacacttggtgctacttacggaaattaa

SEQ ID NO: 469199 - DNA, 195 bp, Shigella boydii; identical to SEQ ID NO: 464447

SEQ ID NO: 469200 - DNA, 318 bp, Shigella boydii
atgactaaaaatactcgtttttcccccgaagtccgtcagagggcgattcgtatggttctggaaagtcagggcgaatatgactcacagtgggcggcaatttgttccattgccccaaagattggctgtacaccggagactctgcgtgtctgggtacgccagcatgagcgggataccggaggcggtgatggcgggctcaccaccgctgaacgtcagcgtctgaaagagctggaacgtgaaaatcgtgaactgcgccgcagtaacgatatccttcgccaggcttccgcttattttgcgaaggcggagttcgaccgccagtga

SEQ ID NO: 469201 - DNA, 366 bp, Shigella boydii; identical to SEQ ID NO: 461917

SEQ ID NO: 469202 - DNA, 384 bp, Shigella boydii
ttgctttcagaaaatttacatgatgagaggatcattagcactttattggagcagtggcttagttcgttgcgtaatacagtaacagaattaaaagtggttttgcccaagtgtaatttagcactgaggaaaaagttagaacttgatctccataaatatcgctcagatgtcaagattattttaaaatattctgaagggaataattatatattctgtagtggtaatcaagtagtggagtttagtcctcaggatgtaatatcaggtgttaaaatagaacttgcggaaaaattaacaaaaaatgataaaaaatatttcaaagggttagcacataagaaactgagacaaattgcagaagacttgttaaaagagaatcctgttaatgattaa

SEQ ID NO: 469203 - DNA, 549 bp, Shigella boydii
atgaaagcatatgcttattttaaactgagtgacgcagccgctaacggttatacgattcgctggctgaaagatgtttctgttaagcgtgacaaaatcatctgctcattgcagcgtgcgtttggcgcagacggtgtttcccttgtcagtaacagagggtatgaacgggttgaatgtatctggatgaatcaattagcgccggaattatggcgtggtaaatcagacggactgtttattggtggatttcagttttatggcgttgtaccggatataacaacaccggaaggccgaaacaatgcgacgcttattcaggaacatgaagagcaactccggaaatatcccacattcccggtctggttgtgtaatgaactcggggttgatgttgtacccaacatgtttgatctcaaatcagtctggacgatgcaccacagccgtgacggattcggcattttgtttgaggtgtgcctgctggatggtgaggttaagggaccggttcctgccgaatgccagcgcattaaacattctgaatttgtggcactgacggaggaataa

SEQ ID NO: 469204 - DNA, 375 bp, Shigella boydii
atggctacatacggcggtcagtttacgcttactaataaacgaacaggcaggacagagaaagcgcggatctgggaagtgacggacagaacggtcaggacctggattggggaggcggttgccgccgctgccgctgatggtgtgacgttctctgtcccggtcacgccacatacgttccgccattcctatgcgatgcacatgctgtatgccggtataccgctgaaggtcctgcagagcctgatggggcataagtccatcagctcaacggaggtctacacgaaggtgtttgcactggatgtcgcggcgcgccatcgtgtgcagttcgccatgccggaagccgatgcggtagcgctgataaaacaacttgagaggcgttaa

SEQ ID NO: 469205 - DNA, 303 bp, Shigella boydii
atgagcagaaaaaaccaacgttactctaaagagttcaaagccgaagctgtcagaacggttcttgaaaatcaactttcgatcagtgaaggcgcttcccgattatcccttcctgaaggcactttaggacaatgggttaccgccgccagaaaagggctcggtactcctggttcccgcacggtggctgaactggaatctgaaattctgcaactgcgtaaggcgttaaatgaagctcgccttgagcgagatatatttaaaaaagcaacagcgtattttgcacaggagtcgctgaaaaatacgcgttaa

SEQ ID NO: 469206 - DNA, 303 bp, Shigella boydii; identical to SEQ ID NO: 461506

SEQ ID NO: 469207 - DNA, 123 bp, Shigella boydii
atgaaatatacaccggttggcgttgatatcgcaaaacatgtcattcagattcacttcatcaatgagcacacaggtgaagtggttgataaacagttgaaccgccccgggaatcctggagactaa

SEQ ID NO: 469208 - DNA, 231 bp, Shigella boydii; identical to SEQ ID NO: 463702

SEQ ID NO: 469209 - DNA, 378 bp, Shigella boydii
atggacgaacagtggggatacgtcggggctaaatcgcgccagcgctggctgttttacgcgtatgacaggctccggaagacggttgttgcgcacgtattcggtgaacgcactatggcgacgctggggcgtcttatgagcttgctgtcaccctttgacgtggtgatatggatgacggatggctggccactgtatgaatcccgcctgaagggaaagctgcacgttatcagcaagcgatatacgcagcgaattgagcggcataacctgaatctgaggcagcacctggcacggctgggacggaagtcgctgtcgttctcaaaatcggtggagctgcatgacaaagtcatcgggcattatctgaacataaaacactatcaataa

SEQ ID NO: 469210 - DNA, 276 bp, Shigella boydii
gtggcttctgtttctatcagctgtccctcctgttcagctactgacggggtggtgcgtaacggcaaaagcactgccggacatcagcgctatctctgctctcactgccgtaaaacatggcaactgcagttcacttacaccgcctctcaacccggtacgcaccagaaaattattgatatggccatgaatggcgttggatgccgggcaactgcacgcattatgggcgttagcctcaacacgattttacgtcacttaaaaaactcaggccgcagtcggtaa

SEQ ID NO: 469211 - DNA, 276 bp, Shigella boydii; identical to SEQ ID NO: 458859

SEQ ID NO: 469212 - DNA, 321 bp, Shigella boydii; identical to SEQ ID NO: 461765

SEQ ID NO: 469213 - DNA, 378 bp, Shigella boydii
atggacgaacagtggggatacgtcggggctaaatcgcgccagcgctggctgttttacgcgtatgacaggctccggaagacggttgttgcgcacgtattcggtgaacgcactatggcgacgctggggcgtcttatgagcttgctgtcaccctttgacgtggtgatatggatgacggatggctggccactgtatgaatcccgcctgaagggaaagctgcacgtaatcagcaagcgatatacgcagcgaattgagcggcataacctgaatctgagacaacatctggcaaggctgggacggaagtcactgtcgttctcaaaatcggtggagctgcatgacaaggtcatcgggcattatctgaacataaaacactatcaataa

SEQ ID NO: 469214 - DNA, 648 bp, Shigella boydii
atgcttcctgtaaataatccccccctatccactggaaacgtctctttttacagaactacatcaatcgacaatgttcacaataattatctctccgaatgggttgaatggactaaaaacagcatttccggagaaaacagggaaactgcttttacccggctccaattatgtctggagaacagtgaaacatcgttggacttatcttgtttaggtctcagatctctaccacgattgcctgacaatcttgatgaaattaatgtaagcaataaccaactatcaatgctccccgagctaccaagggcattgaaagagctgaatgcaagcagtaatcaattatctgcacttcctgaattaccagtgtcgctggaatatataaatgtgagtgataaccatttgttcgcacttcctgaattacctgcgtcactagaatatattaatgtaagtgacaatcacctgtctgtacttccgaggttaccaatgtcattggaattacttgatgcagccagaaatgctttggaagtaataccagattttccagaaagagatgatcatattataagaatattctggcttaatcagaaccggatcacggcaattccggaaagcatacttggccctgagagatcccctcataatttccccaaagcgtaa

SEQ ID NO: 469215 - DNA, 141 bp, Shigella boydii; identical to SEQ ID NO: 465328

SEQ ID NO: 469216 - DNA, 396 bp, Shigella boydii
atgctgcagggcgtaatcccgcagccggtaatagtggaccgtcatggcataacactccgtacgacaggcatgatgactgtacgtcatcagacaggcagcaataccggcggcttccgggctcatttcagcgcggttgccgttcatggcattgaacagtacccatgtttcgtcatcatcgtcatccggttcgggtgccataaatgccccgccgttgttcagggtatacagattccagataccaccgcagtagtcttcgcaaagacggtccatccagccgaagacacggggctccagggtcacccactgtggaatgaggccaaaatgctgcggccagaagctgatgcgctgttcatcagggacgggagtggcaaccagctgaggtgggttattccctga

SEQ ID NO: 469217 - DNA, 642 bp, Shigella boydii
atgacaacccagactgtctctggtcgccgttatttcacgaaagcgtggctgatggagcagaaatcgcttatcgctctgctggtgctgatcgcgattgtctcgacgttaagcccgaactttttcaccatcaataacttattcaatattctccagcaaacctcggtgaacgccattatggcggtcgggatgacgctggtgatcctgacgtcgggcatcgacttgtctgtaggttctctgttggcgctaaccggcgcagttgctgcatctatcgtcggcattgaagtcaatgcgctggtggctgtcgctgctgctctcgcgttaggtgccgcaattggtgcggtaaccggggtgattgtagcgaaaggtcgcgttcaggcgtttatcgctacgctggttatgatgcttttactgcgcggcgtgaccatggtttataccaacggtagcccagtgaataccggctttactgagaacgccgatctgtttggctggtttggtattggtcgtccgctgggcgtaccgacgccagtctggatcatggggattgtcttcctcgcggcctggtacatgctgcatcacacgcgtctggggcgttacatctatgcgctgggcggcaacgcgtctttctggtatcaacgtcaataa

SEQ ID NO: 469218 - DNA, 1119 bp, Shigella boydii
atggaagcattacttcagcttaaaggcatcgataaagccttcccgggcgtaaaagccctctcgggcgctgcgttaaatgtctatccgggccgcgtgatggcgctggtgggcgaaaacggcgcgggtaaatccaccatgatgaaagtgcttactggtatctatgctcgcgatgccggcacgcttttatggctggggaaagaaacgacatttaccgggccgaaatcttcccaggaagccgggatagggattatccatcaggaactgaacctgatcccgcagttgaccattgccgaaaacattttcctcggtcgtgagtttgttaatcgctttggcaaaattgactggaaaaccatgtatgccgaagcggataaattgctggctaaacttaacctgcgctttaaaagcgacaagctggtgggcgatctttccatcggtgaccagcaaatggttgaaatcgccaaagtgctgagctttgagtcgaaagtcatcattatggatgaaccgaccgatgcgctgaccgataccgaaacagaatccctgttccgcgtcatccgcgaactaaaatcgcaaggccgcggtattgtctatatctcccaccgcatgaaagaaatcttcgagatttgcgatgccgttaccgtttttcgtgacgggcaatttattgctgagcgcgaagtggcatcactgaccgaagattcgctgattgagatgatggtgggtcgcaagctggaagatcaatatccacacctggacaaagcgccgggagatatccgcctgaaagtcgataatctctgcggacctggcgttaacgatgtctcttttactttacgcaaaggcgaaattcttggcgtctctggtttgatgggcgcaggtcgtaccgaactgatgaaagtgctctacggcgcactaccgcgcaccagcggttacgtcaccctggatgggcatgaagtcgttacccgttcaccgcaggatggcctggcaaacggcattgtgtatatctccgaagaccgtaaacgtgacggtttagtgttgggcatgtcagtaaaagagaacatgtcgctgacagcgctgcgctacttcagccgcgctggcggcagtttgaagcatgccgatgaacagtag

SEQ ID NO: 469219 - DNA, 327 bp, Shigella boydii; identical to SEQ ID NO: 5975

SEQ ID NO: 469220 - DNA, 171 bp, Shigella boydii; identical to SEQ ID NO: 463748

SEQ ID NO: 469221 - DNA, 528 bp, Shigella boydii
gtgagcttaagagcgcaacttactgaagcaaaatataaccttgagcagactgtcattcgcgcgccgagcaatggctacgttactcaggtactgatccgcccaggtacatacgcagctgccttgccgctgcgtccggtgatggtcttcatccccgagcaaaaacggcaaattgtcgcccaatttcggcaaaactcgctgttacgtctgaaacccggcgatgatgcggaagtggtgtttaacgcgctacctaggcaggtgtttcacggcaaactgactagtattttacctgtcgtgccaggcggttcttatcaggcgcaggggggattgcaatcattaacggtcgtgcccggcacggacggtgtgctgggaaccattgaactggaccctaacgatgatatcgatgccttactcgacggcatctacgcccaggtggcggtttactccgaccatttcagccatgtttcggtgatgcggaaagtgctgctaagaatgaccagctggatgcattatctttatttggatcattga

SEQ ID NO: 469222 - DNA, 267 bp, Shigella boydii; identical to SEQ ID NO: 462029

SEQ ID NO: 469223 - DNA, 153 bp, Shigella boydii
atgaatatcgcaattgtgacaataaatcaggagaatgccgcaatagcaagctggctggcggcgcaggatttcagtggttgtaccctggcgcactggcagattgaacctcagcctgtagtggcggaacaggtgctggatgcgttggtggaatag

SEQ ID NO: 469224 - DNA, 267 bp, Shigella boydii
atggcgacgctggggcgtcttatgagcttgctgtcaccctttgacgtggtgatatggatgacggatggctggccactgtatgaatcccgcctgaagggaaagctgcacgttatcagcaagcgatatacgcagcgaattgagcggcataacctgaatctgaggcagcacctggcacggctgggacggaagtcgctgtcgttctcaaaatcggtggagctgcatgacaaagtcatcgggcattatctgaacataaaacactatcaataa

SEQ ID NO: 469225 - DNA, 294 bp, Shigella boydii; identical to SEQ ID NO: 460208

SEQ ID NO: 469226 - DNA, 510 bp, Shigella boydii; identical to SEQ ID NO: 465339

SEQ ID NO: 469227 - DNA, 267 bp, Shigella boydii; identical to SEQ ID NO: 462029

SEQ ID NO: 469228 - DNA, 357 bp, Shigella boydii
atgctcacctcagaacaacacaggtgctccaatgaaaaaagaaattttagcgcagagtttaaacgcgaatccgctcaactggttgttgaccagaaatacacggtggcagatgccgccaaagctatggatgttggcctttccacaatgacaagatgggtcaaacaactgcgtgatgagcgtcagggcaaaacaccaaaagcctctccgataacaccagaacaaatcgaaatacgtaagctgaggaaaaagctacaacgcattgaaatggagaatgaaatattaaaaaaggctaccgcgctcttgatgtctgaaccgccccgggaatcctggagactaaactccctgagaaagaggtaa

SEQ ID NO: 469229 - DNA, 621 bp, Shigella boydii; identical to SEQ ID NO: 465338

SEQ ID NO: 469230 - DNA, 543 bp, Shigella boydii; identical to SEQ ID NO: 468145

SEQ ID NO: 469231 - DNA, 267 bp, Shigella boydii; identical to SEQ ID NO: 462917

SEQ ID NO: 469232 - DNA, 378 bp, Shigella boydii; identical to SEQ ID NO: 460256

SEQ ID NO: 469233 - DNA, 300 bp, Shigella boydii
atgaaaccaacgacactactgtttattttcacttttttcgctatgccaggcatcgtatacgccgagtcgccttttagctcactgcagtccgcaaaagagaaaaccacggtattacaagatttacgtaaaatttgcacgccacaggcgtcattatcagatgaagcgtgggaaaagttaatgttgtcagatgaaaacaataaacaacatatacgcgaggccggtaatgactccaacttattgatagtgttttatgttcagataatgcccgatgactttgtcatgcagctccaccgattttga

SEQ ID NO: 469234 - DNA, 1761 bp, Shigella boydii; identical to SEQ ID NO: 461901

SEQ ID NO: 469235 - DNA, 381 bp, Shigella boydii; identical to SEQ ID NO: 463706

SEQ ID NO: 469236 - DNA, 327 bp, Shigella boydii; identical to SEQ ID NO: 5975

SEQ ID NO: 469237 - DNA, 318 bp, Shigella boydii
  misc_feature (291)..(300): n is a, c, g, or t
atgatcctagatgccagttatacattattagtcgcatgtatcgcgctactcataggaatgtttgtcgtaaaatttaccccgttcctacaaaaaaaccacataccagaagccgtcgttggtggctttattgttgcaattgttctgttaattattgataaaacatcaggttattcgtttacttttgatgcttcattgcaaagtttattaatgctcacattcttttcctctatcgggctaagttctgacttttctcgactgattaaaggaggaaagccgttagttctattaacnnnnnnnnnnaacaggtggtcatggtaa

SEQ ID NO: 469238 - DNA, 1176 bp, Shigella boydii
atgtccggcagtgcttttgccgttacgcaccacgccttcagtagcggagcaggaaggacatctgatggaaatggaagccacgcaagcaccttaaaatcaccatcatacactaaatcagtaagttggcagcattaccaaagattactctcaattgcaaacacggtgccgtattttcaattatcagtcagggatacaggtattgatacctacgtgttgattgtgggggagtctgtacgtgtcgacaatatgtctttgtatggatatacacgctctacgacaccgcaagttgaagcacaaagaaaacagatcaaactgtttaatcaagcaataagcggcgcaccttacactgcgctgtcggttcccctttctttaactgctgattctgttttgagtcatgacattcataattaccccgacaacattattaatatggctaatcaagcaggatttcagactttctggctaagctcgcaatccgcttttcggcagaatggtacagcagttaccagtatcgccatgcgcgccatggaaacagtttatgtcagaggatttgatgaattgttgttgccgcatttatcgcaagcattacagcaaaatacgcagcaaaagaaactgattgttcttcatttaaatggaagccatgaaccggcttgtagcgcctatccgcaatccagcgccgtgtttcaaccgcaggacgatcaggatgcctgctatgacaactccattcattacacagatagtttgctaggtcaggtttttgaattattaaaagatcgccgcgcctcggtcatgtattttgccgaccacggcctggaacgtgaccctacgaagaagaacgtctattttcatggaggcagggaggctagccagcaggcatatcatgtcccgatgtttatctggtatagccccgttcttggggatggcgtggatcgcacaacggaaaacaacatcttttcgacagcttacaataattaccttattaatgcgtggatgggggtaacaaagccggaacagccgcaaacgcttgaggaagtgattgcacactataaaggagactcacgggttgtggatgcaaaccatgatgttttcgattatgtgatgttcagaaaggagtttacagaggataagcaaggtaaccccgttactttattcgtaccccttataatggggtgttag

SEQ ID NO: 469239 - DNA, 549 bp, Shigella boydii
atgttctatttcccgttcatcttcttcgatcttttcttcggcgcgggccagtgcagagcgcaggaaggcctccgtctcttcaaccagactcagttgctggtctttctgacggagctggcattccagttctgcaatgcgaatgaggtatttttgattcatggccgtttttataatccggccatgacatttttacaacattgtcagtgcgttaaggcgggatgtttttggctgacgccagtccagcttatcgaggagcattgccagttgcgagcgggtaatggataccttgccgtcacgcacagcaggccagataaactggccttcctccaggcgtctggtgaacaggcacagaccatcagcatcagcccacaggattttaatcatgtcaccccgtcggccacggaagatgaacaggtgaccggagaagggattatcattcagcacatgctgtacctgttcacccagcccgttgaaagacttacgcatatcggttatcccagcaacgagccagatgcgggtgtgaaccgccccgggaatcctggagactaa

SEQ ID NO: 469240 - DNA, 378 bp, Shigella boydii
atggacgaacagtggggatacgtcggggctaaatcgcgccagcgctggctgttttacgcgtatgacaggctccggaagacggttgttgcgcacgtattcggtgaacgcactatggcgacgctggggcgtcttatgagcttgctgtcaccctttgacgtggtgatatggatgacggatggctggccactgtatgaatcccgcctgaagggaaagctgcacgtaatcagcaagcgatatacgcagcgaattgagcggcataacctgaatctgaggcagcacctggcacggctgggacggaagtcgctgtcgttctcaaaatcggtggagctgcatgacaaggtcatcgggcattatctgaacataaaacactatcaataa

SEQ ID NO: 469241 - DNA, 657 bp, Shigella boydii
atgcctgcgatcaatgccaaacgtgtttaccggatcatgcgccagaatgcgctgttgcttgagcgaaaacctgctgtaccgccatcgaaacgggcacatacaggcagagtggccgtgaaagaaagcaatcagcgatggtgctctgacgggttcgagttctgctgtgataacggagagagactgcgtgtcacgttcgcgctggactgctgttatcgtgaggcactgcactgggcggtgactaccggcggcttcaacagtgaaacagtacaggacgtcatgctgggtgcggtggaacgccgcttcggcaacgatcttccgtcgtctccagtggagtggctgacggataatggttcatgctaccgggctaatgaaacacgccagttcgcccggatgttgggacttgaaccgaagaacacggcggtgcggagtccggagagtaacggaatagcagagagcttcgtgaaaacgataaagcgtgactacatcagtatcatgcccaaaccagacgggttaacggcagcaaagaaccttgcagaggcgttcgagcattataacgaatggcatccgcatagtgcgctgggttatcgctcgccacgggaatatctgcggcagcgggcttgtaatgggttaagtgataacagatgtctggaaatatag

SEQ ID NO: 469242 - DNA, 399 bp, Shigella boydii; identical to SEQ ID NO: 465355

SEQ ID NO: 469243 - DNA, 378 bp, Shigella boydii
atggacgaacagtggggatacgtcggggctaaatcgcgccagcgctggctgttttacgcgtatgacaggctccggaagacggttgttgcgcacgtattcggtgaacgcactatggcgacgctgggtcgtcttatgagcttgctgtcaccctttgacgtggtgatatggatgacggatggctggccactgtatgaatcccgcctgaagggaaagctgcacgtaatcagcaagcgatatacgcagcgaattgagcggcataacctgaatctgaggcagcacctggcacggctgggacggaagtcgctgtcgttctcaaaatcggtggagctgcatgacaaagtcatcgggcattatctgaacataaaacactatcaataa

SEQ ID NO: 469244 - DNA, 378 bp, Shigella boydii; identical to SEQ ID NO: 460256

SEQ ID NO: 469245 - DNA, 228 bp, Shigella boydii; identical to SEQ ID NO: 463805

SEQ ID NO: 469246 - DNA, 327 bp, Shigella boydii; identical to SEQ ID NO: 462700

SEQ ID NO: 469247 - DNA, 327 bp, Shigella boydii
atgactaaaaatactcgtttttcccccgaagtccgtcaacgggcagtccgtatggttctggaaagtcagggcgaatatgactcacaatgggcgacaatttgttccattgctccaaagattggctgtacgccggagactctgcgtgtctgggttcgccagcatgagcgggataccgggggcggtgatggagggctcaccaccgctgaacgtcagcgtctgaaagagctggagcgtgaaaatcgtgaactgcgccgcagtaacgatatccttcgccaggcttccgcttattttgcgaaggcggagttcgaccgcctctggaaaaagtga

SEQ ID NO: 469248 - DNA, 378 bp, Shigella boydii
atggacgaacagtggggatacgtcggggctaaatcgcgccagcgctggctattttacgcgtatgacaggctccggaagacggttgttgcgcacgtattcggtgaacgcactatggcgacgctggggcgtcttatgagcttgctgtcaccctttgacgtggtgatatggatgacggatggctggccactgtatgaatcccgcctgaagggaaagctgcacgtaatcagcaagcgatatacgcagcgaattgagcggcataacctgaatctgaggcagcacctggcacggctgggacggaagtcgctgtcgttctcaaaatcggtggagctgcatgacaaagtcatcgggcattatctgaacataaaacactatcaataa

SEQ ID NO: 469249 - DNA, 525 bp, Shigella boydii; identical to SEQ ID NO: 462998

SEQ ID NO: 469250 - DNA, 135 bp, Shigella boydii
atgttgtctcagattcagattatgtcgctcaatgcgctgagtgtaacgcttgctgataacgtgcagctttcccttcaggcgggattcatacagtggccagccatccgtcatccatatcaccacgtcaaagggtga

SEQ ID NO: 469251 - DNA, 258 bp, Shigella boydii; identical to SEQ ID NO: 461679

SEQ ID NO: 469252 - DNA, 258 bp, Shigella boydii; identical to SEQ ID NO: 461678

SEQ ID NO: 469253 - DNA, 210 bp, Shigella boydii
atgactgataaaaccattgcgttttcgctactcgatctggcccccattcccgaaggttcttcagcgcgagaagcattctcccactctctcgatctcgcccgtctggctgaaaagcgcggctatcatcgctactggctggcagaacaccacaatatgactggcattgccagtgctgccacgtcggtattgattggctatctggcggcgtga

SEQ ID NO: 469254 - DNA, 1185 bp, Shigella boydii; identical to SEQ ID NO: 304362

SEQ ID NO: 469255 - DNA, 939 bp, Shigella boydii
atgagtatcctgacccggtggttgcttatcccgccggtcaacgcgcggcttatcgggcgttatcgcgattatcgtcgtcacggtgcgtcggctttcagcgcgacgctcggctgtttctggatgatcctggcctggatttttattccgctggagcacccgcgctggcagcgtattcgcgcagaacataaaaacctgtatccgcatatcaacgcctcgcgtccgcgtccgctggacccggtccgttatctcattcaaacatgctggttactgatcggtacatcgcgcaaagaaacgccgaaaccgcgcaggcgggcattttcaggtctgcagaatattcgtggacgttaccatcaatggatgaacgagctgcctgagcgcgttagccataaaacacagcatcttgatgagaaaaaagagctcggtcatttgagtgccggggcgcggcggttgatcctcggtatcatcgtcaccttctcgctgattctggcgttaatctgcgttactcaaccgtttaacccgctggcgcagtttatcttcctgatgctgctgtggggtgtagcgctgatcgtacggcggatgccggggcgcttctcggcgctaatgttgattgtgctgtcgctgaccgtttcttgccgttatatctggtggcgttacacctctacgctgaactgggacgatccggtcagcctggtgtgcgggcttattctgctcttcgctgaaacgtacgcgtggattgtgctggtgctcggctacttccaggtcgtatggccgctgaatcgtcagccggtgccattgccgaaagatatgtcgctgtggccgtcggtggatatcctttgtcccgacttacaacgaagatctcaacgtggtgaaaaataccatttacgcttcgctgggtatcgactggccgaaagacaaactgaacatctggatcctcgatga

SEQ ID NO: 469256 - DNA, 645 bp, Shigella boydii; identical to SEQ ID NO: 464492

SEQ ID NO: 469257 - DNA, 261 bp, Shigella boydii; identical to SEQ ID NO: 468448

SEQ ID NO: 469258 - DNA, 375 bp, Shigella boydii; identical to SEQ ID NO: 459802

SEQ ID NO: 469259 - DNA, 141 bp, Shigella boydii; identical to SEQ ID NO: 465328

SEQ ID NO: 469260 - DNA, 342 bp, Shigella boydii; identical to SEQ ID NO: 460954

SEQ ID NO: 469261 - DNA, 171 bp, Shigella boydii; identical to SEQ ID NO: 463748

SEQ ID NO: 469262 - DNA, 210 bp, Shigella boydii; identical to SEQ ID NO: 468385

SEQ ID NO: 469263 - DNA, 159 bp, Shigella boydii; identical to SEQ ID NO: 460731

SEQ ID NO: 469264 - DNA, 312 bp, Shigella boydii; identical to SEQ ID NO: 463367

SEQ ID NO: 469265 - DNA, 279 bp, Shigella boydii; identical to SEQ ID NO: 24918

SEQ ID NO: 469266 - DNA, 375 bp, Shigella boydii; identical to SEQ ID NO: 461623

SEQ ID NO: 469267 - DNA, 423 bp, Shigella boydii; identical to SEQ ID NO: 461182

SEQ ID NO: 469268 - DNA, 267 bp, Shigella boydii; identical to SEQ ID NO: 27347

SEQ ID NO: 469269 - DNA, 405 bp, Shigella boydii; identical to SEQ ID NO: 27346

SEQ ID NO: 469270 - DNA, 204 bp, Shigella boydii; identical to SEQ ID NO: 31953

SEQ ID NO: 469271 - DNA, 738 bp, Shigella boydii; identical to SEQ ID NO: 293095

SEQ ID NO: 469272 - DNA, 618 bp, Shigella boydii; identical to SEQ ID NO: 463365

SEQ ID NO: 469273 - DNA, 282 bp, Shigella boydii; identical to SEQ ID NO: 468803

SEQ ID NO: 469274 - DNA, 1062 bp, Shigella boydii; identical to SEQ ID NO: 468584

SEQ ID NO: 469275 - DNA, 342 bp, Shigella boydii; identical to SEQ ID NO: 460954

SEQ ID NO: 469276 - DNA, 177 bp, Shigella boydii; identical to SEQ ID NO: 468487

SEQ ID NO: 469277 - DNA, 432 bp, Shigella boydii; identical to SEQ ID NO: 462987

SEQ ID NO: 469278 - DNA, 153 bp, Shigella boydii; identical to SEQ ID NO: 464194

SEQ ID NO: 469279 - DNA, 426 bp, Shigella boydii; identical to SEQ ID NO: 461631

SEQ ID NO: 469280 - DNA, 288 bp, Shigella boydii; identical to SEQ ID NO: 462736

SEQ ID NO: 469281 - DNA, 153 bp, Shigella boydii; identical to SEQ ID NO: 464194

SEQ ID NO: 469282 - DNA, 135 bp, Shigella boydii
atggcagtttcagcaaagtacgacgaatttaatcactggtgggcaacagagggcgactgggttgaagagcctaactatcgccgtaatggtatgagcggggttgaagtggtcaacaaaaactggccaccgagttag

SEQ ID NO: 469283 - DNA, 681 bp, Shigella boydii
gtgcgtgaagatggcactatcgactttgatgatggttcaaaaaccgagaacacccgcgtttcttatccaatctatcacatcgataacatcgttaagccggtttccaaagcgggccacgcgactaaggttatcttcctgactgctgatgctttcggcgtgttgccgccggtttctcgcctgactgccgatcaaacccagtatcacttcctctctggcttcaccgccaaactggccggtactgagcgtggcatcaccgaaccgacgccaaccttctccgcttgcttcggcgcggcattcctgtcgctgcacccgactcagtacgcagaagtgctggtgaaacgtatgcaggcggcgggcgcgcaggcttatctggttaacactggctggaacggcacaggcaaacgtatctcgattaaagatacccgcgccattatcgacgccatcctcaacggttcgctggataatgcagaaaccttcactctgccgatgtttaacctggcgatcccaaccgaactgccgggcgtagacacgaagattctcgatccgcgtaacacctacgcttctccggaacagtggcaggaaaaagccgaaaccctggcgaaactgtttatcgacaacttcgataaatacaccgacacccctgcgggtgccgcgctggtagcggctggtccgaaactgtaa

SEQ ID NO: 469284 - DNA, 261 bp, Shigella boydii; identical to SEQ ID NO: 468448

SEQ ID NO: 469285 - DNA, 339 bp, Shigella boydii; identical to SEQ ID NO: 459960

SEQ ID NO: 469286 - DNA, 327 bp, Shigella boydii; identical to SEQ ID NO: 5975

SEQ ID NO: 469287 - DNA, 279 bp, Shigella boydii; identical to SEQ ID NO: 468349

SEQ ID NO: 469288 - DNA, 927 bp, Shigella boydii; identical to SEQ ID NO: 460216

SEQ ID NO: 469289 - DNA, 1224 bp, Shigella boydii; identical to SEQ ID NO: 460415

SEQ ID NO: 469290 - DNA, 255 bp, Shigella boydii; identical to SEQ ID NO: 460515

SEQ ID NO: 469291 - DNA, 357 bp, Shigella boydii; identical to SEQ ID NO: 463749

SEQ ID NO: 469292 - DNA, 1992 bp, Shigella boydii; identical to SEQ ID NO: 468463

SEQ ID NO: 469293 - DNA, 441 bp, Shigella boydii; identical to SEQ ID NO: 468393

SEQ ID NO: 469294 - DNA, 312 bp, Shigella boydii; identical to SEQ ID NO: 463367

SEQ ID NO: 469295 - DNA, 591 bp, Shigella boydii; identical to SEQ ID NO: 464517

SEQ ID NO: 469296 - DNA, 147 bp, Shigella boydii; identical to SEQ ID NO: 465857

SEQ ID NO: 469297 - DNA, 135 bp, Shigella boydii; identical to SEQ ID NO: 461398

SEQ ID NO: 469298 - DNA, 279 bp, Shigella boydii; identical to SEQ ID NO: 461434

SEQ ID NO: 469299 - DNA, 495 bp, Shigella boydii; identical to SEQ ID NO: 461605

SEQ ID NO: 469300 - DNA, 591 bp, Shigella boydii
atgtccttccggtgctgcatcatcgcctctttcaccccttcccggtgttttttcagcgattcctccgtcgaggccgtaaactgggctatagcgcctttgattttcgtctcgtttgaggtcacagcctcgcttacagattcgccgagcttcctgaattcgtcgttcagcattttctctgtagattcggctctctctttcagctttttctcgaactccgcgcccgtctgtaaaagattgctcataaaacgctcctttcagtctgatgttcctcccgccgttcgggtctgcaatgctgatactgcttcgcgtcaccctgaccacttcaagccccgcctctgtgagcgcctgaatcacatcctgacggccttttatctctccggcatggtaaagtgcgtctatcccacgagtaacgccctcagcaagcacctgtttcgtttccggcaggttatcagggagtgtcagcgtccggcgattctccggggcgttcgggtcatgcagcccgtaatggtgattcaccagcgtctgccaggcatcaattctcggcctgtctgcccggtcgtagtacggctgaaggcgttttccggtctgtag

SEQ ID NO: 469301 - DNA, 279 bp, Shigella boydii; identical to SEQ ID NO: 463003

SEQ ID NO: 469302 - DNA, 327 bp, Shigella boydii; identical to SEQ ID NO: 462700

SEQ ID NO: 469303 - DNA, 303 bp, Shigella boydii; identical to SEQ ID NO: 461506

SEQ ID NO: 469304 - DNA, 1524 bp, Shigella boydii; identical to SEQ ID NO: 463688

SEQ ID NO: 469305 - DNA, 663 bp, Shigella boydii; identical to SEQ ID NO: 461715

SEQ ID NO: 469306 - DNA, 231 bp, Shigella boydii; identical to SEQ ID NO: 463702

SEQ ID NO: 469307 - DNA, 420 bp, Shigella boydii; identical to SEQ ID NO: 462828

SEQ ID NO: 469308 - DNA, 726 bp, Shigella boydii; identical to SEQ ID NO: 463717

SEQ ID NO: 469309 - DNA, 771 bp, Shigella boydii
atgcggtacctgaagaacaggttgatccgcgcaaagccgccatcgaagccgctattgcccgagccaaagcgcgcaaactggaacagcaacaggctaatgcggagccagaagaacaggttgatccgcgcaaagctgccgtcgaagcggctattgcacgcgccaaagcacgcaagctggaacagcaacaggctaatgcggtacctgaagaacaggttgatccgcgcaaagccgccatcgaagccgctattgcccgagccaaagcgcgcaaactggaacagcaacaggctaatgcggagccagaagaacaggttgatccgcgcaaagctgccgtcgaagcggctattgcacgcgccaaagcacgcaagctggaacagcaacaggctaatgcggtacctgaagaacaggttgatccgcgcaaagccgccgtcgaagccgctattgcccgtgccaaagcgcgcaagctggaacagcaacaggctaatgcggtacctgaagaacaggtcgatccgcgcaaagccgccgtcgaagccgctattgcccgtgccaaagcgcgcaagctggaacagcaacaggctaatgcggtacctgaagaacaggttgatccgcgcaaagccgccgtcgaagccgctattgcccgtgccaaagcgcgcaagctggaacagcaacagactaacgcagaaccagaagaacaggttgatccgcgcaaagcggcagttgccgcggctattgcccgcgctcaggccaaaaaagccgcccagcaaaaggttgtaa

SEQ ID NO: 469310 - DNA, 1233 bp, Shigella boydii
atggccttcgtcagtctgaaaccgtgggaagagcgtaatggtgatgaaaacagtgcggaagcggtaatccatcgtgccaaaatggaattgggcaagatccgcgacggttttgtcattccattcaatatgccagccattgttgaactgggcacggcaacgggtttcgactttgagttaattgatcaggctgggctgggtcacgatgccctaacccaggcccgtaaccagttgcttggtatggcggcgcaacatcctgccagcttagtcagcgtgcgtcctaatggcctggaagacaccgcgcagtttaaactggaagttgaccaggaaaaggcgcaggcattaagtgtttcactttctgacatcaatcagaccatttcaacggcgttgggtgggacttacgttaacgacttcatcgaccgtggtcgcgtgaaaaaggtgtatgttcaggcggatgccaaattccgtatgctgccagaagatgtcgataaactttatgtccgcagcgccaacggcgaaatggtgccattctcggcctttaccacttcacattgggtgtatggctctccgcgactggaacactacaacggtctgccgtcaatggagattcagggggaagccgcgccaggaaccagttccggcgatgccatggcgttgatggaaaaccttgcgtcaaaattacctgcgggcattggttatgactggacgggtatgtcgtatcaggaacgcttatcgggaaaccaggctcccgctctggtagcaatttcctttgtggttgttttcctgtgccttgctgcactctatgaaagctggtcaattcctgtctcggttatgttggtcgtgccgttagggattgtcggcgtgctgctggcggcgacactctttaatcaaaaaaatgacgtctactttatggtgggcttgctaacgacaattggcttgtcggccaaaaacgctattttgattgttgagttcgctaaagatctcatggagaaagagggtaaaggtgttgttgaagcgacactaatggcagtacgtatgcgtctgcgtcctatcctgatgacctctctcgcctttattctcggcgtattaccgctagctatcagtaacggtgcaggcagtggcgcgcagaacgcagtgggtatcggggtaatgggcggaatggtctctgcaacgttgctggcaatcttcttcgtaccggtgttctttgtggtgatccgccgttgctttaaaggataa

SEQ ID NO: 469311 - DNA, 294 bp, Shigella boydii; identical to SEQ ID NO: 460244

SEQ ID NO: 469312 - DNA, 873 bp, Shigella boydii
gtgatcggcgtgaccgaccagaaaggcgaaaaaatcctcctagataccacaggaccgattgcgcgcacgaataccagttatgacggcacaaaacgccgtaacccgaataacgtggttgatctgaaaaaccgcaaatatcagtgtgaacaggtgaactacgacacgtttatttcgtatccgcagcttgatgcctggtcggcacaccctgattttcagtcccgcatcagcgcacagattgcccgacaggtggcgcttgaccgcatcatgatcggtttcaacggcacgtctcacgcggatgagtccaacttcagcaccaacaagctgcttcaggacgttaacgtgggctggctggagcacatcagaaccgacgccagcgaacgcgttatgaatgacgtgacgctgacctcccgcaacatggacaacaccgtggcgcacgcgggtaagtatgcgaacgctgatgcactggtacaggacgcgcgttcatccctgctggatgaatggcacaaggaagctgacgacctcgtggtgattatggggcgcaacctgtttaactcgctgcgtctgcccgtgctgaacagcatcagcggccagaatcccaatgcggaattactcgccgggcagctcatcctgtcatcgcgcaccattggcgggctgggcgtgttccttgcgccgttcttcccggatgcaacgatgctgatcacctcgttcaacaacctgtcgatttactggcagaaaggttcaatgcgtcgcctgatgaaagacgagccggaatacaaccgcatcgccacctaccagtccatcaatgacgcttatgtcgttgaagactatggcaagtgcgcgatggttactggcctgaagttcgccgacagctaa

SEQ ID NO: 469313 - DNA, 294 bp, Shigella boydii; identical to SEQ ID NO: 25632

SEQ ID NO: 469314 - DNA, 171 bp, Shigella boydii; identical to SEQ ID NO: 463748

SEQ ID NO: 469315 - DNA, 183 bp, Shigella boydii; identical to SEQ ID NO: 460595

SEQ ID NO: 469316 - DNA, 615 bp, Shigella boydii; identical to SEQ ID NO: 463750

SEQ ID NO: 469317 - DNA, 273 bp, Shigella boydii; identical to SEQ ID NO: 468617

SEQ ID NO: 469318 - DNA, 276 bp, Shigella boydii
gtggcttccatttccatcagatgtccttcctgctccgctactgaaggcgtggtgcgtaacggcaaaagcactgccggacatcagcgctatctctgctctcattgccgtaaaacatggcaactgcagttcacttacaccgcctctcagcccggtacgcaccagaaaatcattgatatggccatgaatggcgtcggatgtcgcgccagtgcacgcattatgggcgttggcctcaacacggttttccgtcacttaaaaaactcaggccgcagtcggtaa

SEQ ID NO: 469319 - DNA, 510 bp, Shigella boydii; identical to SEQ ID NO: 465339

SEQ ID NO: 469320 - DNA, 1761 bp, Shigella boydii; identical to SEQ ID NO: 461901

SEQ ID NO: 469321 - DNA, 291 bp, Shigella boydii; identical to SEQ ID NO: 463785

SEQ ID NO: 469322 - DNA, 657 bp, Shigella boydii; identical to SEQ ID NO: 463703

SEQ ID NO: 469323 - DNA, 399 bp, Shigella boydii; identical to SEQ ID NO: 465355

SEQ ID NO: 469324 - DNA, 1119 bp, Shigella boydii
atgagcagctcacttcctgacgatatcaatgcactgaaacgtctccttgccgaacaggaggcgctgaaccgtgccctgctggaaaagctgaacgagcgtgaacgcgaaatagaccatctgcaggcacagctggataagctgcgccggatgaacttcggcagccgctccgaaaaagtctcccgtcgtatcgcacagatggaagctgacctgaaggcacttcagaaagaaagtgatacccttaccggtcgggttgacgacccggccgtgcagcgcccgctgcgtcaaacccgcacccgcaaaccgttccccgaatcactcccccgcgatgaaaaacggctgctgccggcagcgtcatgctgcccggaatgtggaggctcactgagctatctgggtgaggatgccgccgaacagctggagttgatgcgcagcgtcttccgggttatccggactgtacgtgaaaagcatgcctgtactcagtgcgatgccatcgtgcaggcccccgcgccttcacggcccatcgagcggggtatcgcaggaccggggctgctggcccgcgtgctgatctcaaagtatgcagagcacaccccgctgtaccgccagtctgaaatgtacggccgccagggcgtggagctgagtcgttcactgctgtcgggctgggtggatgcatgctgccggctactgtcaccgctggaagaagcgcttcaggactatgtgctgactgacggtaagctccatgctgatgacacgcctgtcccggtgctgttgccaggcaataagaaaacgaagaccgggcggttatggacctacgttcgtgacgaccgtaacgccgggtcaacgctggcgccggcggtgtggttcgcttacagcccggacagaaaaggcatccatccgcagacccatcttgcggggttcagtggtgtactgcaggcggatgcatacgccgggttcaacgagctgtaccgggatggccggataacggaagccgcctgttgggctcacgcccgccgtaaaatccacgatgtgcacgttcgcaccccgtcagccctgacggaggaagcgctgaaacggatcggcgaactgtacgccatcgaggcagagataaggggaatgacggcgtag

SEQ ID NO: 469325 - DNA, 657 bp, Shigella boydii; identical to SEQ ID NO: 463839

SEQ ID NO: 469326 - DNA, 369 bp, Shigella boydii; identical to SEQ ID NO: 465353

SEQ ID NO: 469327 - DNA, 468 bp, Shigella boydii; identical to SEQ ID NO: 461580

SEQ ID NO: 469328 - DNA, 234 bp, Shigella boydii
atgactagtctaaaaactagtattaagactatcacttatttaagtgatactggttgtctggagattcagggggccagtctagtggctgctcttactccgtctttatctactcagactacagttagtgccagctcctgcaaggtggagttccgtcacggtaacatgacgctggaaaatccttcaccagagctgctcacagtgttgatccgtgaactgaccgggaggggacgatga

SEQ ID NO: 469329 - DNA, 195 bp, Shigella boydii
atgattgatgtcttagggccggagaaacgcagacggcgtaccacacaggaaaagatcgcaattgttcagcagagctttgaaccggggatgacggtctccctcgttgcccggcaacatggtgtagcagccagttatttctctggcgtaagcaataccaggaaggaagtgaaccgccccgggaatcctggagactaa

SEQ ID NO: 469330 - DNA, 276 bp, Shigella boydii
gtggcttctgtttctatcagctgtccctcctgttcagctactgacggggtggtgcgtaacggcaaaagcactgccggacatcagcgctatctctgctctcactgccgtaaaacatggcaactgcagttcacttacaccgcttctcaacccggtacgcaccagaaaattattgatatggccatgaatggcgttggatgccgggcaactgcacgcattatgggcgttggcctcaacacgattttacgtcacttaaaaaactcaggccgcagtcggtaa

SEQ ID NO: 469331 - DNA, 552 bp, Shigella boydii
atgacgctctaccagataaaaccgctctttcagtcgctgttaaggccgacgatgttttggctttataagcaccacgttacagcgaatcacatcactcttacggcactggcgctttctctttttaccggattgctgttggtgttggtggcacaacccatcctctttttgctattgcccatcgtgctttttatccgtatggcgctcaatgcgctggatggcatgttggcgcgtgagtgcaatcagcaaacacgtctgggggcgattttgaatgaaactggcgatgttatttccgatattgcgctctatttaccgtttttatttttaccggaaagtaacgcatcactcgtaatactcatgttattttgcaccatattgactgagttttgcggtttactcgcgcagacgattaacggtattcgtagttatgccggtccattcggcaaaagcgatcgcgcgttaatatttggtctgtgggggctagccgttgccatttatccacagtggatgcaatggaataatcttttatggagcattgcttcaattctgcggtga

SEQ ID NO: 469332 - DNA, 405 bp, Shigella boydii
atgaagaagatattgctcgtaaataaatactatcatccagacattggtggcgtagaaactgttgtacaacagcatgctcaattattgaagtatgaatatagtgtaacagtgttgtgtattagcaaagaattctcatggtatacaaaaaatgaattcattaatggagttaaagtaatacgctgttcttcattgggaacttatttttctatgccgttatcaattactttttttttgcattacttcattaattatttaaaatcagacgtgattattaatcacgttccgtttccattaatggatttagcattttttatcattgatagattagtcaaaagaaaaaatatattattttggcacagtgatatagctgtctcttatacacatctccgagcccacgagacgtag

SEQ ID NO: 469333 - DNA, 657 bp, Shigella boydii
atgcctgcgatcaatgccaaacgtgtttaccggatcatgcgccagaatgcgctgttgcttgagcgaaaacctgctgtaccgccatcgaaacgggcacatacaggcagagtggccgtgaaagaaagcaatcagcgatggtgctctgacgggttcgagttctgctgtgataacggagagagactgcgtgccacgttcgcgctggactgctgtgatcgtgaggcactgcactgggcggtgactaccggcggcttcaacagtgaaacagtacaggacgtcatgctgggagcggtggaacgccgcttcggcaacgatcttccgtcgtctccagtggagtggctgacggataatggttcatgctaccgggctaatgaaacacgccagttcgcccggatgttgggacttgaaccgaagaacacggcggtgcggagtccggagagtaacggaatagcagagagcttcgtgaaaacgataaagcgtgactacatcagtatcatgcccaaaccagacgggttaacggcagcaaagaaccttgcagaggcgttcgagcattataacgaatggcatccgcatagtgcgctgggttatcgctcgccacgggaatatctgcggcagcgggcttgtaatgggttaagtgataacagatgtctggaaatatag

SEQ ID NO: 469334 - DNA, 489 bp, Shigella boydii
atgagtcttttgaatgaagttcagaaattcattgaagcccatccggggtgtacttccggagacattgcggatgcttttgcaggttactcacggcagcgcgttctgcagtcagcaagcaagttacgtcagagtgggcgtgtggctcaccgttgtgaaggggatacacgcagacattttccgcgccagataaagatatcgccggaggcggaacggcaaccagttcgtgaaaccagacctgtgcgcaatttctatgtcggcactaacgacccgcgggagattttatgcctgacccgccaggctgaagaactggagtccaggggcttataccgtcgtgctgcaacggtgtggatggcggcattccgtgaaagccactcccagccagaacgaaacaattttctggcgcgtcgtgagcagtgtttacggaaaagcagtaagcgcgctgtatcgggtgatgagtggtatctgtcagggaattacgtgggggcttaa

SEQ ID NO: 469335 - DNA, 657 bp, Shigella boydii; identical to SEQ ID NO: 463703

SEQ ID NO: 469336 - DNA, 411 bp, Shigella boydii; identical to SEQ ID NO: 463834

SEQ ID NO: 469337 - DNA, 294 bp, Shigella boydii; identical to SEQ ID NO: 460208

SEQ ID NO: 469338 - DNA, 294 bp, Shigella boydii; identical to SEQ ID NO: 460208

SEQ ID NO: 469339 - DNA, 210 bp, Shigella boydii; identical to SEQ ID NO: 462041

SEQ ID NO: 469340 - DNA, 258 bp, Shigella boydii; identical to SEQ ID NO: 461679

SEQ ID NO: 469341 - DNA, 561 bp, Shigella boydii
ttgaatcgtgatatcagtcaacttgaagctttaattgaagagctgctgacttatgcccgactcgatcgcccacaaaacgagcttcatcttagcgaaccagacctgccgttgtggctgtcaacgcatctggcagatattcaggcagtaacgcccgataaaacggtacggataaaaacgctcgtgcaaggccattatgcggcgttggatatgcgcttaatggagcgcgtgctggataatttgctcaataacgccctgcggtactgccattcaacggttgaaaccagcctgctactgtcggggaatagagcgacattaattgttgaggatgatggcccagggattgccccagaaaaccgcgaacatatctttgaaccttttgttcgcctcgatcccagccgggatcgctcaaccggcggctgcgggctggggctggcaattgtccactctatagcactggcaatgggcggtacggttaattgtgacaccagcgaactgggtggtgctcgcttctcgtttagctggccgttatggcataacatcccgcaatttacctctgcctga

SEQ ID NO: 469342 - DNA, 222 bp, Shigella boydii; identical to SEQ ID NO: 459051

SEQ ID NO: 469343 - DNA, 195 bp, Shigella boydii; identical to SEQ ID NO: 464489

SEQ ID NO: 469344 - DNA, 288 bp, Shigella boydii; identical to SEQ ID NO: 462736

SEQ ID NO: 469345 - DNA, 342 bp, Shigella boydii
atggtgattatgctggcaatcccgttcctggcccgcaatgagttcggcgcagctattagcatggtggtgtggggcgcagcaacctttgcggtcgtaccgccgttacagatgcgcgtgatgcgtgtcgccagtgaagcgccaggtctgtcttcatcagtcaatattggtgcctttaatcttggaaatgcgctgggagcagctgctggtggtgcggtaatttccgctgggctgggatacagctttgtgccggtgatgggagcgattgtcgcgggactggcattattgctggtgtttatgtcagccagaaaacaacctgaaacagtttgcgttgctaacagctaa

SEQ ID NO: 469346 - DNA, 1752 bp, Shigella boydii
atgaaactgaatgcaacttatataaaaatacgtgataaatggtgggggcttccgctattcctgccttttttaatcttgcccattttcgcccacattaatactttcgcgcatatttcttccggtgaggtttttctcttttatctgcctctggcactgatgatcagcatgatgatgtttttcagctgggcggcattgccagggatcgccttagggatttttgtccgcaaatatgcagagctgggtttttacgaaacgctatcattaacggctaattttattatcattatcattctctgttggggcggttacagggtctttactccccggcgtaacaacgtttcacatggtgatacccgtttaatttcccagcgtatattctggcagattgtgtttcctgcaacgctgtttctgatacttttccagtttgctgcatttgtaggattactggcgagcagagaaaatctggtcggtgtcatgccttttaacctcgggactttaatcaattatcaggccttactggtgggtaatctgatcggtgtcccgctgtgctacttcatcattcgggtagtgcgaaatccattttatttacgtagctattattcgcaattaaaacagcaggttgatgccaaagtcaccaaaaaagagttcgcgctctggctactggcattaggtgctttattgttgctgttatgcatgccgttaaatgaaaaaagcacaatttttagcaccaattataccttatcattattgctgcccctgatgatgtggggagcgatgcgctatggttataagctgatttctctgctctgggcggtcgtgttgatgatcagcatccacagctatcaaaattacattcccatttatcctagctataccacgcagctgaccataacctcctccagttatctggtattctcttttattgtcaattatatggctgtactggcaacccgtcagagagcggtagtcagacgcattcagcggcttgcgtatgtggacccggtggttcatctgccaaatgttcgcgccctgaattgcgcgttgcgtgatgccccctggtctgcgctttgttatttacgcatccctggcatggaaatgctggttaagaactatggcatcatgctgcggattcaatacaagcaaaaactttctcactggctgtcacccttgctggaaccgggtgaagatgtttatcagctttcgggtaacgatctcgcgctgcgactgaatacagaatcgcaccaggagcgcattaccgcactggatagccatctcaagcaatttcgtttcttttgggatggcatgccgatgcaaccgcagattggcgtcagttactgctatgtgcgctcgccagtgaatcatatctacctgctgctgggagagctaaatacggtcgccgaactttccatcgtgaccaacgccccggaaaatatgcagcgtcgcggggcaatgtatttgcaacgcgaattgaaagataaagtcgcgatgatgaatcgactacagcaggcgctggaacacaaccattttttcctgatggcccagccgattaccggtatgcgtggtgatgtttaccatgaaattcttctgcgcatgaaaggtgagaatgatgaactgatcagccccgatagcttcttgccggtcgcgcacgaatttggtttatcgtcgagtatcgacatgtgggtcattgagcatacgctgcaatttatggctgaaaacagagcgaagatgcccgctcaccgtttttgctattaa

SEQ ID NO: 469347 - DNA, 189 bp, Shigella boydii; identical to SEQ ID NO: 463227

SEQ ID NO: 469348 - DNA, 471 bp, Shigella boydii
atgactgccatttatatcctgctatcaaaggccaatttgatagacacatatactgggttgcttctggtttatgtaaccggttcattgcccttcatgacgtggttggtaaaaggttattttgatgctattctaacttctttggatgaggccgataaaatagatggagcagggcatctgactatttttattcagataatattgccattggctaagccgattctcgttttcattggattagtttcgttcactggaccatggatggacttcattttgccaacgttggtgcttcgtagtgaggataaaatgaccctggcgattggcatttttagttggattgcttctaattcagcagagaattatacgctttttgctgctggggcgcttttagttgcagtacctatcacattgttatttgtattcacacagaagcatataactactggacttgttagcggtgccgttaaggaataa

SEQ ID NO: 469349 - DNA, 279 bp, Shigella boydii; identical to SEQ ID NO: 461434

SEQ ID NO: 469350 - DNA, 1239 bp, Shigella boydii; identical to SEQ ID NO: 459659

SEQ ID NO: 469351 - DNA, 720 bp, Shigella boydii
atgctcccctggctgggcgttttgttagtctcagtagtcggaggtgagtactggtggatagtcattatacccgttggcgcgcatatcagtttttcgctggggtacggccggccaaccagacatcctttaaccggtacatccgggctacgttgccgtaattccctcctgtttatccttctcatgcttggttttgtcgctggttatcagggttatttatataaacagctcaatcccggcgtcggtgtgcgcgaaaatattgatacctgggcctggcgacccgataaactcaataatcaactgacaccactgcgtggtaaaccgcaaattcagtttacgcaaaactggctgcgactcgatggtgctacggcggcgtacccaatttatgcctctgcattttatgctttaagcgttataccggaagattttcacaccagggaatatccggagagctctcgtacccccgatgcgtataacaggattgttaaaggtgatgctgatattatttttgtggcgcaaccttccggtgggcagaaaaaacgcgctgaggaatcgggcattactttgctgtacacgccttttgcccgtgaagcgtttgttttcatcgtcaatgcggataatccggttaattccctgactgaacaacaggtgcgtgacatcttcagtggtgcaattaccaactggcgtactgttggcggtaacgatcaggagatccagacctag

SEQ ID NO: 469352 - DNA, 1128 bp, Shigella boydii; identical to SEQ ID NO: 461541

SEQ ID NO: 469353 - DNA, 189 bp, Shigella boydii; identical to SEQ ID NO: 463227

SEQ ID NO: 469354 - DNA, 189 bp, Shigella boydii
atggaaagcttctggggaacgctgaaaaatgagagcctgagccactatcgttttaataaccgggatgaagcaatctcagtaatacgggaatacattgagattttctacaatcgtcagcgtcgtcactctcgtctggggaatatctccccggcagccttcagggaaaaatatcatcagatggctgcttaa

SEQ ID NO: 469355 - DNA, 252 bp, Shigella boydii
ttgctgattgtcatttcgggcagtttattttccgcttgtcaatttgcttataaagatgcaaaaaataaaaaaacgttcagtccatatatactagcgtcgcgatttgctacctatacgccgtttttcaatctcaactattttgctttagcagcgaaaaagcatcaaagattaggtaatgactccaacttactgatagtgttttatgttcagataatgcccgatgaccttgtcatgcagctccaccgattttga

SEQ ID NO: 469356 - DNA, 324 bp, Shigella boydii; identical to SEQ ID NO: 465528

SEQ ID NO: 469357 - DNA, 420 bp, Shigella boydii; identical to SEQ ID NO: 459063

SEQ ID NO: 469358 - DNA, 2118 bp, Shigella boydii
atgcgtcgccgtgtctacaatccggaccgcctgaaatatccgatgaaacgagtcggggcgcgcggtgaaggcaaattcgagcgcattagctgggaagaagcctacgacatcatcgcgaccaatatgcagcgcctgatcaaagagtacggcaacgagtctatctatctgaactatggcaccggtacgctgggcggcaccatgacccgctcctggccgccgggaaataccctggtcgcgcggctgatgaactgctgcggcggctatctgaaccattacggcgactactcctccgcgcaaattgcggaaggtttgaactatacctacggcggctgggcagatggcaacagcccgtcggatatcgaaaacagtaagctggtagtgctgtttggtaataaccctggcgaaacgcgaatgagtggcagtggggtgacttactatcttgaacaggcacgccagaaatctaatgcccgcatgatcatcatcgatccgcgctataccgacaccggtgccgggcgcgaagatgagtggatccctattcgtccgggaacagatgccgcactggttaacggtctggcgtacgtcatgatcactgaaaacctggtggatcaggcattcctcgataaatattgcgttggctacgatgagaaaaccctgccagccagtgcgccgaaaaatggccactataaagcttatattctgggtgaagggccagatggcgtggctaaaacaccggaatgggcctcacaaatcaccggtgttccggcagacaaaatcatcaaactggctcgtgaaatcggcagtaccaaaccggcgtttatcagccagggatggggcccgcagcgtcacgctaacggtgaaatcgcaacccgtgctatctcgatgctggcgattctgaccggtaacgttggtattaacggaggcaacagcggcgcgcgtgaaggttcatacagcttaccgtttgtccgtatgccgaccttggaaaacccgatccagaccagcatttcgatgtttatgtggaccgatgccattgaacgtggcccggaaatgacggcgctgcgtgatggtgtacgcgggaaagataagctggatgtgccgatcaaaatgatctggaactatgccggtaactgcctgattaaccagcattctgaaatcaaccgtacccatgaaatccttcaggatgataagaagtgcgagctgattgtggttatcgactgccacatgacctcatcggcgaaatatgctgacatcctgctgcctgactgcaccgcttccgaacagatggactttgcgctggatgcatcctgcgggaatatgtcttacgtggttttcaacgatcaggtgattaaaccgcgctttgaatgtaagaccatctatgaaatgaccagcgaactggcaaaacgtcttggcgttgagcaacagtttactgaaggccgtacacaggaagagtggatgcggcatctgtatgcccagtcgcgggaagcgattcctgaactaccaacgtttgaagagttccgcaagcaggggatctttaaaaagcgcgacccacaagggcaccacgttgcttataaagctttccgtgaagatcctcaggcaaattcactgaccacgccatcgggcaaaattgagatttattcgcaggcgctggctgacattgccgctacctgggaattgccagaaggagatgtgatcgatccactgccgatctacacgccgggctttgaaagttatcaggatccgttgaacaaacagtatccgctgcagcttacgggtttccactataaatctcgcgttcactcaacttacggcgacgttgatgtgctgaaagcagcttgccgtcaggaaatgtggatcaacccgcttgatgcgcaaaaacgcggtatcaacaacggcgataaagtcaggatctttaacgatcttggtgaggttcatattgaggcgaaagtgacgccacgaatgatgccgggtgtggtcgcactgggtgaaggtgcctggtatgacccggatacaaaacgtgtcgataagggcggttgtatcaacgtactgaccactcaacgtccgtctcctctcgctaaggggaatccgtcacatacaaaccttgttcaggttgaaaaggtgtaa

SEQ ID NO: 469359 - DNA, 906 bp, Shigella boydii
atgagtaaatctatagcaagcatagccatagaaaaacaggatacgatggctgaaattagctatatgcgcaccattcggactccggatgaatatgagcgtccgatcttcaaatgggtaggcggtaaattctcagagttgcctacagtgcttgagcatctaccacacggcaagcggttaatagaaccgttcgttggtggcggttctgtatttacgaatgcaggatttcgccacaacctgcttaatgatattaacggtgacctgattaacttctatcagacattgcagcgagaaggacattcgctcgtcacgctgtcatatagttttttccaaaattacaacaacgctgacggttacctcgaagtgcgtgaggcatttaacagaggaaagtatgaccagctacatcatgctgccgcctttttgtaccttaatcggcactgttttaatggcgtaacgcggtacaaccaaaatggcgagttcaacgtggggtatggcaaatacaaagcgccctacttcccacatgcagagatggaggcatttttggctgatgacgtactcaaaaacacgtcctttgtatcaggtgactttgctggcgtcatcgaggcggctggtgaaggcgatgtgattttttgcgatccgccgtatgaaccgctgccggatacagaagggtttaccagttattcaggaaatagcttccgtttcgacgaacagaaacggctggtatctctattggtggaagcccaccagcgcggcgctaaggtagtgattacaaatagtggtgcgccaaacatccgtgaactatatgaaggaaaagggtttaaagtacatcatatggcagccagacggtcggtttcctgcaaggcgtcaacacgtgtagttgctaacgatataattgcaataatgaagtaa

SEQ ID NO: 469360 - DNA, 681 bp, Shigella boydii
gtgaagcagaacgataataaccgaccgcttgttgtgagtctttgtgattttacgggggcaatggttgccccctggctggaatacggtgtcgatgccgctatcgtcgatccacagcacttatcgaccagtgacgagcggatgcaatcaggtgccgttctgacgcgtattagtgcgatcatcgatagcgatgaagtatacgcttttctccgtaagaatttgcagcgcatcgtgtttctggccgggttcccaccgtgtactgacctggctgtttccggcgcgcgctggttttcggacaaggctaataaagatccggttttccagttcaaagcaatgcaggttgtctggcagtgttatgacattgcaaagatgatcggttgtccgtacatgattgaaaatccggtcagcaaaatatcgacattctggcgtaagccagatcacatctttcacccttacttcttcactgcatattgtcaggaagataactacaccaaaaaaacatgcctctggagcggccagggctttgtcatgcctgatgccctaatggacgaatcattaggcaagccagataacagaatccatgccgcgccaccagggcctgacagggctaattttcgaagtgctactccacatggattcgcaaaggcagttttcgaagcgaataagggggtgctctatgagtaa

SEQ ID NO: 469361 - DNA, 906 bp, Shigella boydii
atgagatcagtcgctttcaaaaatatcttcatctatcgtctttcacgcgaagttaactgggataccgcagaagtaaatgcagcccttagcaagtttgtgtttaccccatgcggttctcaggatatggctaaagctggttggaccccaattcttggcgacaacctcacccatgaataccagggttttcttctgatgcagcataaacgagaggaaaaaatcctgccttctcaagtactcaaagaagagttacagaaaaaaatcctgaaacttgaagaagagcaagacagaaagctgaagaagaccgaaaaagattcgctgaaggatgaagtgcttcactctcttcttcctcgtgctttcacgagaaaatcactcgcaaaaatcctgatcgaccgcagcaaccatctggtattcgttgaggcaagcagcgccaaaaaggcagaggaccagctggctttattgcgaaaatcgctcggcagcctgcctgtcattccattcacaccacgcgaaccgctggaaattacaatgaccgagtggtttaaaaacggcttccctgccggatttacagcaggtgaagacgccacattaaagggtctgctcgataatggtggtgccgttcgctgcaacaaagttgatctacagtccgacgagattatgtctcacattgaggcggggaaagtagctacgaccgttgcaattaactggatggaccgcgcgtcgttcagagtcaacgatgatatgagtatcaaagccctgacattctgtgatgatctctatgaccagaacgacgatatcgaccgggaggatgtagcacaacgatttgatgctgatttcgtgctctttacgggcgaattatctgcactgtttaacgcgctggtggaggctattggcggtgaagcagaacgataa

SEQ ID NO: 469362 - DNA, 654 bp, Shigella boydii
atgaagcgtagagcgcaaattgttggaactgtgcacccggcagggcttatgcgtgctcaagtccgtgttttacctgactggaatggcgttcctgatgacgatctaccctgggcggaatacctgttacccatcgggaacgcttttgtacctacagtcaaaggtgaccttgtctgggtagagtttccttatttagatgttaacggtcgaatagacaccagacgcccaatgatagttggcgcggctcaggatgcgcctggcggagttccaaacgtcgcgccggaggcatcaggcaatggtagcggctggacgccgccggaagtagatggagcacctccccgcccccaaatctcagcaacgaaagacttcgttattcaccgcaacaatattcttgaagtacgaactgctggtggcggctatgaaattgccaatacggcagcaggctcaaggattggcatgaatgagtccgggcagatatatatcattggtccggctgatgtaatcgtgaatgcaggagggagtgttaacgtcaaatcagccaacaacatcaatgttaatggggaaaatattgctgtcaccgctaacggggacatagctttcaaggcagggggaacctttcaggccactgctggcaacttcgatttcaagaaaggatag

SEQ ID NO: 469363 - DNA, 981 bp, Shigella boydii
gtggcccaggagttacaacaatattttctacagtcagtgctcattaacgataacaaagtgccacgagactggatttttaccgcagtatatgtagaaaaaaccagcctcaaagcccctttgctgaaactggaaattcatgacgctaccggcaccgtaattgatgactggaaagccaaatacggtgcatcgctggtggctgaaatgggcgatccaaacggtaatgctggcacttttaaaacagatttctttgttacgtctgcaatgctggctggtgatgttgttaccgttattgctgtcagtgaagacgtgcgcaggtttaagatcccctccccgcgcacaaatttacataccaacaaaacaccagacgctatattcaaggcatattccggcaaacttaaaattaccagcagcgtgctaaaacgcgcagttacatatcatctgaatgccggtgacaaaccgtcaaaaatgctttcggagatagcgcgagacaaaggtgcattgtgttgggtatgtcggggggaatttaacttttacaccctggctgatctgatgaagcaaacgccatcatttacctacgaggggaataaccctaaagcagaatacactttgtcaaaaatgcgcctactccaacaggaacatgcgacaacagcaaagaatcaatatcgttttgttgggtattccatgaccgatggctacgtcgaatatggcgatagctcactcccagtgcgttatatatccgactctgatatggaaactcttcgcaatatgcagctgtctctcgtccccaaaatggatatagaagtcgcaggcaatcctgatataaaaccggggatggtaatagagattatcgtataccgctatgaccaggaaaaccgcattgatgaatcaatgccccgtaagctgatagtaaaaaatgttgcgcactttgaggaccgcgtaggctacacaacacgaatgatattgggagtgcctaacaaatga

SEQ ID NO: 469364 - DNA, 768 bp, Shigella boydii
atgacttcaaataaaaccctcctggcgcgaaccggtgaatggcaaaccttacgcacaggaaaattccagaccacgggctttgaaaacgtggataacgcgtttgcgacgctaatcagcaacattttttctgatatcttactggtggcccccgcgccggaagaaaaacgctttgcgtcattcctgaatcgtccaccagcagagcgtgtctatatggcccgtttcgacaatgcgatcgagtttcttaaagcagttcgtcgcgcaaatgccgggcaagggagaaaacctgaaaaccagaacattaaccgggatgctctccccctggtcaatatctcacgcactatggatatcaattatatcaacgatgatcagcagattgaccgcaaaaaagtagccagtttttgcgaaccagataccggaacgcctttagcagaactggaatacacccaggccattctgacgtatgacgttacgttaatggcaactgataaagcgaccatgagtctgatgtgtaattcgctgggcgcacggcttcgcctgatgacaggtacacaatttgaagcaaccactcaccttgttcgtgtcccggtcccgctgatttgctcgatacaggatgccaaagaagtcggctttacggatgtttcagcaccaattggagaagagcgtatttatgccacacaagcgccgataagtgtgattgcagacgtgatcacagcatgggagttggacgcaaaacgtattattaccgaaacctcgatatctatggggtga

SEQ ID NO: 469365 - DNA, 792 bp, Shigella boydii
atgggccgttttgacgaatggtttgctgacgatgcaaacctggcaagtaaggagtcagaacatgacagcacgcagagagaaacgccagcgacggttgaagcggatgcaggaagcgcgccggaacatggcaatgccggaccggattcattcagcattctggaagagcaatccaccgccgaagctgatagccatgataattttgctgatagcaacggtggccttactccggatgctggcgaatcagatatagccatacttccatcttccctggctggcagagaaccgactccacagttaaaagcacgctataacgggcataaagcctttaacgaccaaatccgcgcagactggatgctgattattgaatccagcccagacgcgtttcaggctctcttatatcgacctgatgttggcacatttggggtagtcagcgacgaaacaggagaagagtcattcactgaactggataacaaccagcgtgaactgacctatcaggaacctgaaattgtttatgtgctggataaccctgacgggcgtgactctttccatgcaattgacgcagacggtgagcaggatggcttaaccgatgatgttctgattctgcgtattgcagcaaataacgtccccgtcggctcaattcttgaatggaatgaagagatggtaaacggcgtagcccgccgctggtggtacgtgcaccgtatttttagctacggcacacagcatgttggttcgctttactactgcatacctgccaggaattttgatacgactcaaaacggggtgatcgaatga

SEQ ID NO: 469366 - DNA, 303 bp, Shigella boydii
atgaaaataatttcggtaaaaacactaagggatttctgggcgaagaatcccgatgcagaacagccattaaaggcatgggttgatgaagcaacaaatgctgactggaaaaatccggctgaaatcaaagaacagtaccggacagccagcatccttaaaaacaggcgcgtggtgttcaatattaagggaaatgattacaggttaattgtcgcaattgcttatcagcgaggatggatgttcgttaagtttattggaacacataaggaatacgatgccattgaagcggatacaatagaactggagtaa

SEQ ID NO: 469367 - DNA, 360 bp, Shigella boydii
atgaacattaaacctatccgtacagaacaagattatgaggccgcactgcgtgcggtcgaaccgatgttcgataacgaaccggaaatgaacacaccggaaggcgatttctttgaagtaatgtgcctgctcattgaagagtacgagaaaaagcattacccaattgagccaccatcacctattgaagccattaaattccgtatggaacagcaagggctgaccgtgaaggatctggaaccggcgattggtaagtcaaatcgtgtttacgaagtgctaaatgggacacgaaatttaacgttacctatgattcgtcgtttacattcccagtttggcattcctcttgaaagcctggttggtgtatga

SEQ ID NO: 469368 - DNA, 1197 bp, Shigella boydii
atgcctgatttcctgaaaaaccaggacgggcgctatatcactgacggcctgtcctctaaggacttcacgcgtttattcgagattatcaggaaagaacaaacccgtaagcgccgacaagctcaccggacgctgacgccaggtagactgaggaacaaatccgccgaagatattctcaagttagggaagaaaaaaggcggcacgttcttcacgcgagacgacctgaaaggtttcgaaaagctacggagtaaaacgcgcgaaaaatatgacagcaagacggctggcatcacatacgcccagctggtggcatccagccaggcaatcgatattaagcgtgcaaataacgccgtggatgacggatctggtatcaaaagagctacccccgtatctcttcgccacaatgtgattaatatccgcgtagaagcatcggatatatccgtccaccagcaccatatcgtccggatacgctttgaagaatgggatcagatggttgatgacatcgcagaagacgataaatcagctctcaaaatcactaaatcactgtgcgccgggcgagtgtctttcgattgtgactgtggtcgtcatcaatactggtatcgttacatcgccactgcgggtaactttgccctggcaccgccaaaagaatacgcctatccaaaagttcgcaacccgaagctgcaaggcgtcgcctgtaaacacgtgatccactcaatgacgcggttacagtccgccagttggcaaatgagtattgctcgtgcgctacaaaaggctgcaacgcaaattgcatttggtgacgatcgccgccgtacaactaaacacttctcaaaagaagacgagaaggagtttaatcgcaatcgtagcagtaaaacgaacgttgaagccgccaaacgcgaatggaggctctatcagaaacgccaggccgctttaagcacaaaactggcaaaggacaacgggaagattgacaagctacgtgaccagctgaccagggccagaaagttgtccgatgcacagaaaaaacgggcagcagcaaaagaagcagccttgcaacgtgagaaacagaaaaacaaggagcttcagcaacgccttgccgatcaattcgcactgaagaagcaagcgttcattgatgcactggtcatggcaggaacgtcacctgagcaagctgaaaaaatgtttatggagtacgtgaagaaaggttcttga

SEQ ID NO: 469369 - DNA, 330 bp, Shigella boydii
atgggctatagcagactcgacgataggtacattgaagacgatatttttcgtgcgctgtttcaccaggaaatgattaagcgggtatcggagtatcactctgataatttccagtacacgataaagattgatgaagtatatcgttcagaccttgcagcctacagggcgtatggcaatgcagatttgcgctgggtattccgggtgctggtgggccatgagtcagaaatggaagaaatgcccgccgggaccacgttaactcttcctgatgtggcatggctgaggaacaagatccgtgattacgcgagcgcggaaccggagatagaaaatgcctga

SEQ ID NO: 469370 - DNA, 135 bp, Shigella boydii; identical to SEQ ID NO: 26785

SEQ ID NO: 469371 - DNA, 654 bp, Shigella boydii
atggaaaagatcgcaatattcagcctgaccaccagcaagcctcaaatgctcactgcaatactgaaagacggtgctctcattattaacgaagtaaaaccccttcccgcgtcagcattggagcaaaagcaaaaaattcctccagctatagcagccctgcggaaaagcaaatttaaggtactggtagacgaaattacgccaacgatctccgctggcaccggagcaagccaggtgactctcaagacccgtcatgccgatggcagagcagcaatcatcgtcgggatggaaagatacagagagttaaaactccagaagctattatccctgccgcaaaataacaaaggtgctttcgaaatccctgactccatcgttgacaccgaatacaacggtaacggagaagaagtctaccgggtgaactggcaggatatcaggccggagcatattttgatgatcctgtgttgctacgcgaccgtataccacaatgtagccagtgcggattacgtagagcagatgaccggtacagtcgagaaagagcaaaaaacaggcatactcgcttcgttcctgtccattattgggcatgaaaaagttaaagcaggcacctcccagccaaagacactgactgggaaagaagttgatgaagataccgtgatactttga

SEQ ID NO: 469372 - DNA, 609 bp, Shigella boydii
gtgaagttaagggctttaggggccgcgctcgcggctatgttgggatgcgtatctgctaatactgccaatgcaactgcgttacctgcacaattcagggcagggcagcaggttatgaataacgctggtggagatcattcacaagcggccattatggacttttgcaagagggagggcattccattacggcctgttggaactcagtttattggtaaaactgacttttgcgtttttgcatatacagcatatctgacggacaaagctataacaaaaacaggttattcaaccaaagatactctttccagattaagtcagggatggcagcaattcgaagtgtatcgccagcaaggattaggtgagttattgcaacctctttttatgcttgcgttggtgccagaggggcagcaatttttggttaaaaagggaatgcttcgccaaagtgatattgccgggttcgatagcatgatggcttatgagcgcaaactaaccgagcagcgaaataaaaaaccatctgcttcatgtgtgcaaagtaaaacagcagaatacagtgcagtagccgggcctttagccaaacaaatggcagagcaatggtgtaaaaaatacgggcaataa

SEQ ID NO: 469373 - DNA, 393 bp, Shigella boydii
ttgaaaagattggctattgctttactggcgtctttccctttgatcgcgagcgccggaaatttacaagttaagtgcggtcggtttgatataaaaatctatccagatgccatatttctgaatgggaataaggttgataacgcgcaccgaaaaactgaatctgacgtaatgagctatgtgttccaggagtatgcggagatggggggaacttacacgctgtactcgctggatgttccttctcgcggtgatatgacattatcccatcaatggcagaacgccgatggcgaagctctgcgcgaggttaaaacagaaaaatgtggcactttccattcttttaaagggaaagcgccaaatgttaaatctgtgcttgaaaaacagcgcgcaggtgagctttaa

SEQ ID NO: 469374 - DNA, 168 bp, Shigella boydii
atgaccgttcgctacctcaactttcaaatccagaacatcactggcggttgctatgactggtttgtcactctcggaaaagaagtgatcaccgggaagctggatgaagtgaaagctaaagcaatggcctacgcctgcaagcaagcccggaagaaatccgccaaagcataa

SEQ ID NO: 469375 - DNA, 537 bp, Shigella boydii
atgcaaaaattggctgacccagcctggcgagaggaacaaagggcaaagcgccttcaacaagctcaacgccagcagcagcgagcgagagaaaaagccgcatcgcctgaatatcggcaaaagaaaattgaaaaagcaaagcaatatgaacagcggagaaaagataaagcggtatccgctccgcccaaaaaaacacgcacgtcacgcggcctgaagggcagatcactcacagccgatgaacgccggatacagaccgctatcggtactctcccctgcattgcctgccatattcacgggcaacatagcccagtggtatccctgcaccatatcttcgggagaacggcagagaacgcgcataaatatgtcctccctttgtgtaaatggcaccaccagtacgcagcgccagccgaggtccgagaacaatatccctggctggtccctgttcatgctgacgggaaaataggcggaaaagcagatttcatgcggcgcaatgccgatgaaatgacgttgtatcagatggcgattgaattgatgaattag

SEQ ID NO: 469376 - DNA, 153 bp, Shigella boydii
atgcttgtcgcaataagtgcaatccaccagcaatccggtacagaaattgggttgctatatgccctgtttttcactgtcctggcgttgtttgagctgggcattgaactctttgctcttatcaacttttgcgtaacgttcctggggaaactttga

SEQ ID NO: 469377 - DNA, 612 bp, Shigella boydii
atgtcaaaacgcattatgaaaatttacatcgcggggccgatgactggttatcccgactacaaccgcacagcgtttttttcgaaagcaaaagagctgatggaggtagggcatattgttctgaatccggcgctgttacctgctggcctctgccagagcgaatacatggatatttgccttgcaatggtgcgttcggctaatgcggtctatttgctcaaggggtgggaggaatcagttggcgctcgtgcagagcacgagctggctcaaaagctggggctgaatgtaatttatgagtcaccaaccaacattgaatgccaggttgctccgcatatttaccgggaactggtcaatgcactgcgtgatatcgctgctgtatatcacggcacagaacagcttcgtgagcgtttagcccataccatttcctattacctttctttatctcatgagcacaagctccgccagaaggtaatgatcaaatttatcatgaggttatcgaaatccctggcaaacgccgatccaaagaatccattaccgaaagaggcaatgaattacctgaagtcctgcaacgttgtttctgaagatggcgttcttttggttagaaggagttctgcgtga

SEQ ID NO: 469378 - DNA, 318 bp, Shigella boydii
gtgagctggcggggatggggaagggcagaaatcatgatactccgccagtgcgccggaactatgacggtcgagagtattgggaagctgatcggtcgtaccggtgatgccgtcaggactaaagcgcgggagttggggatcagcatgattctgaaaggagactttcatccgtcagccaaataccggcagagcgatatagaactggcacggcagcttcatcagtgtggtgttccccgccgtgagatcgcggaaaaactcgaaatgcccctgggcatgattaatcagtacgtttatttcgaaaggagagtgtatgaagtctga

SEQ ID NO: 469379 - DNA, 363 bp, Shigella boydii
atgaagtctgaaggtttaacgcccgcacaactggcagagcgtaacgctgaattacccaggattacccaggaaaaagccttccacatactcgaacgattagaaacgctcgctacggaggagaagatatccccggagatgctggtcgagtgcagccgtgtgatattgcgtcgcaagaacgacatcgcgcggctgacatctggcgcaccatccgtatcagccagtccaacgctttattgcagcttctgcaacaaatcccagcacaccgttaaaaagttaattgccggggacaacgttttcatctgcaacgagtgcgtgaaagattgcaacaacattatccaggaagagcaaagggaatcagcatga

SEQ ID NO: 469380 - DNA, 696 bp, Shigella boydii
atgaaattttccaaattttctgagttggtgaatcgtattttgtccaacaaccacagccatcgtcgcgatatggatgtaacgatcgttgttcattcgcctggtcgcatcggttcaacaccttcagttgaggttcagtcaattcacgctggttttgattgggattccgggcaagtgctgattttcccagcacagccactgaccacgctaacaccagaacagattactgatattactgatagtgtgcgcaaaggtcagtcctggcacgcatatcaggaatacaagaagcataaagagcagttggaaaaattatcgattgaacttgatgccgcaaaacagcgcattgcagagctggagggtaattgcgcggcgctggcggcggagaatgcgggaataaagtctgcaattccagaatcacgggatattgaggatgacaatgacaatatggatgacgtatctctcgcggaagacttcgggttcaatcatgcaatagaacggatgaggagacagatacctgaaacgccaaccactgatgctttcctggctgaagtccgggcgcagggattggagatgtttgcacagaaatgtaactcaaaatccgaacagtcgcttgcatctgatatacgcgataactggaaactactcggtgaacatgcaactgactttgccgatgagcttcgaagaggaagcagcaagtga

SEQ ID NO: 469381 - DNA, 276 bp, Shigella boydii
gtgaatatcgacacgacaataacgatcgatatggccctaaataccggtctggcacttctcggttggctttacatcatgtcccgtacatggcgatggctgggttccattttcctgaaacagtggaaaaaacggcgcaaacaggaactacgccagaaggcattagaagcgttctatgacgcatttgaacttggcagcattgaaccaggcacaacagcgaggatagcgacaaaaggcgacctgatgatagtgatgttcagacaggagaaaaccaaatga

SEQ ID NO: 469382 - DNA, 225 bp, Shigella boydii
atgacagaacagacgatgacaaatcgcgaacttgttgatgccgcgattgaacttgctggcgatttttattccatgatggggtacgagcatcgacctggttttaagtattgggagtcaccgcatccgcaagaacaacaggtgtttgaaatggcctgccgtgcttttgaggttattcgcggttctgatgtgatggatgccgttgccgacttggaggatgaagagtga

SEQ ID NO: 469383 - DNA, 312 bp, Shigella boydii
gtgagcatcattaaagaaatgccggtagaacgtgatgaatatggctgctggacacatccggagtatgaaaagttttgcgcaggtcgtgaatatatatccactgaggaatttgacgcctggatgaaggaaaataatcttcagtggactattcgcagtatggatgaagatcattttaatctggacgcagatggtcccgatattgccgcctgggaaccagagcgaccagagggcgaaggatggtttgttggctctattcatgacactgaagatggcccggtttgtatctggctgcgggagaaggatgccgcatga

SEQ ID NO: 469384 - DNA, 693 bp, Shigella boydii
atgaatcaggcgctgcatgaagtgaatttatatagccgtattgatggttcaggctacagaaacatatgggttgttggtgatttgcacggttgctgcaccctacttatgaatgaactccatcgtgtggattttgacccgacacaggatttactggtatcggttggcgaccttatcgatcgcggcaccgaaaatgttgaatgcctggagctattgcagatgccctggtttcggtcggttatgggaaaccacgagcgattaatgatcgatgcgttaagtcccgcaggcaatgtgaataactggctaatgaatggcggtcaatggttcttcatgctggacactgatcaggaaatattagcctgggcgctggtggagctggtaaagcgtctgccctatatcattgagctgaacaccgggcatgaaactatcgttatagcccatgccgactatccaggtggagagtaccagttcggtaaggatgtgtcgctttttgatgttgtctggtcgcgcagtcgcgtcggtgattcgatagatggcattggtggagaaatcacaggcgcagatcgctttatctttgggcacacaccggtacgaagaccaaaagcatactggaatcagcactacatagacacgggcgcggttttttgcggaaatctgacgctaatgcaggtgaagggagggcagcttaaagtctga

SEQ ID NO: 469385 - DNA, 954 bp, Shigella boydii
gtggctgtctttccggtagacaagcccaccagcaactacattggcgcaggtcgccgtttcattatctccccacttccgcgtgaacaggctgaaaacacgccagatggcgtagtggatctgaattattcgctggttgccaaccagtctctgaaaccgttttttcaaagcgagcgcgtatttaacgcgttgggcggtgaagattcgcttgttcattgggtaagttccaatatccacgattgccaggcgcacgataagcgcgattgcagccaccagctaaccactcatttctataacggctctgccgttcgcctgtgctggaagcatgatgcggaatacatgatgaaggggtacggcaagctggatgaccagttatccctgaatcgtgccaactgggttatgaactgggctgcgagcgagttaaaactaccgtcagaacgcgatctgagcatggttgaactcactttttgggccattcgccggaatctgaaagacgagctgccagatgaagccggtcgcattgcattttgtcagccaaaacaggaaatccctaccggcacactgaaagaatcggatatcacctgggagcacagcacccgtgagctggtggacataaccgcagagcagatcgtcaacctgtctgtagatgaggattccggcctgctttatatgcgccgaccaaaagcggtcctcggtaaaagcccggcttatctccggtttgtggtttctcgtccgtgcatcggatgcggtggcaaagttaaccacccgttcatgtaccgcgcccgctcgttaaacgaacacgaccgctgggctgttcctctttgcgatgactgcgccagaagcgcagaaaacgatgtccgggcatgggaaaaagcacatggcatacgcctttacgtagccgctaaccagctttttgacttcgccatcgagcgcggagtgatcactttcaataactga

SEQ ID NO: 469386 - DNA, 690 bp, Shigella boydii
atgaaagaacgcgggatgatttttaacgatgagatggtcagggccatcctcgaaggaaggaagacgcagactcgccgacctgtaaaaaatgtcagggccgataactgcctggttatccgtaaaccgacaaagaaacgcaatggtgtctatacccacgttatggatgcacctgaacatggtttatgcccgttcggtaacgttggtgatcgcatatgggtccgtgaggcgtgggcgatattaggcaatgaagatggttgcagtgtggactggaacgacaacctttgtcgtggcgatgagaagaacgcagcaaggatttatcgggccagttgtgagcaaaagcctggtgattacggtttatggtcgatacccgatgatgccgactggaaacctcacactgtgaatgaaaagtttgatggtgggtggcgtccatcaattcacatgccgcgctgggcatcgcgcattcttctggaaattaccaacgtgcgcgttgagcggttgaacgatatcagcgaatgcgatgcaagggctgagggcgcaccaacagaatcgaccctcattggcgataagcattacccaggtttccgtagcctatggaaatcaatttatggcgaagatagttggaacgctaatccctgggtgtgggtaatcgagtttaagcgtattcagggggcaaccagtgagcaaaattaa

SEQ ID NO: 469387 - DNA, 699 bp, Shigella boydii
gtgagcaaaattaactatcaagaactgcgcgaggcggcggaacaggcaacgcaagatgaatgggtagcatatattttgccgggtcataacggcatttatcctgcgcgcacgtctgagggtaggcattgcggatactttattgactggcctggcattgatggacaaaggaatgctggtgctaatgcccgttatatcgcggctatcccaccaaaagttgcgctggcactcctgggcgaaattaagcgcctggaggacacaaatattgatgctatgtgccgaatagcaccgcttgagactaagctcgcggctctggtggcagagaacgccgggctgaaactcgcaatggctgtaactcttaatcatgtgtcggtcacggatgcagggcaggccggagttgctgcaatgataatcaacgatgctctgcaccacagcgaaaccccagccaccgatgcttttctggctgaagggaagactgaagcacgcaaggaaggcgcttattttgtggcgaacagaatgttggcagcctggaaagctggttttattgatgatactgcgaagaacgccgcggatattgcccggatgatccttacctctactgagtttatggctaatgcgccggaaggcgattttgatcgctcattctctgatggcgttctcgaagatatcgccgaacagcttcgtaaaggagtcatccaatga

SEQ ID NO: 469388 - DNA, 447 bp, Shigella boydii
atgagcaagattgattatcaaaagcttcgtgaaatcgctgaaaaaacaaaaattgctggtgaagcacctgtaatgcctttcgatcagcgaattaatgcgcttaacgattttatgaagcacttttcgccagatatcgcgctggcattgttggatgaatgggaaagaaaccagcaatacataaaacgccgcgatcaggagaacgaggatattgcgctaacggttgggaagctgcgcgttgagcttgaggcagaaaaacagcgggcaaaggatctatttatggaaaatgcccggcttaagtcaggtatagccggtctgatacacctcggtattcgatatgcagatgttgaggttatgagaattgctggagatgcccagctttctaccccatgcactgacagcatcataaacagcattgcaacaggcattcgcatcaaaggaggtgagtaa

SEQ ID NO: 469389 - DNA, 177 bp, Shigella boydii
atgcgtgtggcatgtatcggcttgttaccgtacccgactcgtttttgggcttctgcgctaattgcaaagccgcatgtcctgatggctgacaacatcatcccggcaccaaagcgccgccataccggtattgcatcggcacgacgagcagcaaagaaacgcaggagagcaaaacgatga

SEQ ID NO: 469390 - DNA, 189 bp, Shigella boydii
atgaaaaaccgtaaagcaaagattctgttagttcgtagaaacgctcctggcgtctggcagtgggtgagactcagcaaccgacgggtggggttaatgaaacattacgggatgatggattgtggtttttgcaaaaagcccagcgcggcgcaaaaccgctggaaaaaccacttgcgtactaaaggagagtga

SEQ ID NO: 469391 - DNA, 702 bp, Shigella boydii
atgaccactattaccagagaacaagctctgaaaattattgaggcagccgatgaggttattagtgcgcttgccggaactaacgaggatgttcaccctggtagcgataacatgctacgcctgtgggatgacctgaatgaccgttacgcgccgccggaagttgtgcgtgagctggcacggattgcactggcatcgctggaagcagagcctattggtgaagtttcagagaagcgacacggccttgttatggatggaacggtagaccttggcgggaaatcaacttatcgcatcattaagggagaaaaagcgatgaagttgttgccgttggggacgaagttttatatcgcaccgccagcgccggtaatacaggctgatgtcgcgcaatcaattgaaaatctcaagcagaaattagtggaatgcaatcgctataactactgcgcagatgcagttaagggcgtcgaggatgcctgccgcgcagtcatgcttcagtccggaaactttcgggaaagcgacgttattacaccagatcatcataaacaagccgagaaaagtggcctggaaaggtgtcaccttgagacggcattaaacattaagccggggcatacgcttggcattattgatgcactattggttcataagatggccagggctttattgccgctggtggctgaaaagcatgaggcggaccatgccaacgaaagctga

SEQ ID NO: 469392 - DNA, 285 bp, Shigella boydii
atgccaacgaaagctgaattacaggtgcgcgtagatgagcttgaaaaagagaacgcgagcctcaaaaaaatgctgtcgcgggcggaaagggaattatcaggcaaattattgccagaagaactgccaccagcagatatacctgatcgagtgtcctggtggatgaagtatttccgtgcaccgtgggaggcgttttggtgctacgaccatcgcagatggtgtgatgaacttgatagcagttttccctactttgcggaagggaacacctgccctcaatgcaggggatag

SEQ ID NO: 469393 - DNA, 351 bp, Shigella boydii; identical to SEQ ID NO: 167682

SEQ ID NO: 469394 - DNA, 252 bp, Shigella boydii
gtgtcagatcgaaatatagcagctaaaagccaggaagagcgagacaaggtgaacgtagaccttgccgccagcggcgttgcttacaaagaacggctgaatatacctgtgattgcagagcaggtggcccgtgagcaaccggaaaacctgcgcgcctatttcatggaacggctacggcactaccggcagttaagcctccagttgccaaaagggagcgatccggtgtatcagaaagaagatatagccaaaaaataa

SEQ ID NO: 469395 - DNA, 390 bp, Shigella boydii
atgggcttcccttctcctgcggcggattatgctgagagccgtatttctcttgatcagcaactaatcaggcatccatcagcaacctacttcatgcgggcagctgatagccatcaccgtgagggaatattgcagggtgctttgctggtggttgattcctcgcttactccggttgatggttctctgcttgtgtgcgctatggagggtgaatatcgcataaagagatacaggaagtatccgcgccagcacctggaggatttaagcaccgggaggaaagaggcgttaccagtggatgacgatggatgcacggggagtaatgctgtttttggtgtgatcactcatgtcatcaatgatgtccgaagtggggaatttgatgattgtccggtgatttaa

SEQ ID NO: 469396 - DNA, 801 bp, Shigella boydii
gtggaaaatactaaagcaattcaataccgcttgcgtaatggcctgctggtggctgttaacgccgacatgtcactgccgtttgacacgattgaacgtactatcatgacgtatctcggctttaatgaagagctgaatgaagagcatggcgtagctatatggagtgatgcagaaagcggcgttcatcgttacatcaccgccaggggcaaagactactctctggaagaactgtttacccttgcacagtctttcgaatgtgtagcattagacatgtttaatgatcctgctatagcgcaacgacttatacgcgagcttgggctatccgttacaccaattatctttaagaatggcagcctgactggcacatggcgcgtagaacgcatctcaaactaccttccatataaccgacagttaaatggagtaatctccggcgttaatcagcccgtagcgtgtgaaaatgtaaacctggttgccgctgttttggcaaccgcatgtcgtgttatcggtttggctaaacaggcttttattcatttcccaaatggtgcagaaggtagcgcagagattatcgcgtgtgatttcgaatttacctggatgctacgcgaatatctggaccaaacagtgttccgcgccgaagaactggatatgtatatcacgtcaatgattcctgatgatgtgcgtgctgaagcaatcgccacagcaagggccaaatgccgtgcggcgattgcagagcaggccaaagaagaaccgtccgatgaagccgtggctgatgttgaagcagaggtagcggaggatgctgacgcctaa

SEQ ID NO: 469397 - DNA, 663 bp, Shigella boydii
atggtcagcacttttcaggtgttccccaaatacaaatgccacagcatcattcgggcatcgaaaatcaaagatattgttattgtcggcaaagcttatgcgcccatttttggcagtatcgaagtcgttgagccaaaaggaatgacgcttcgtgttgatggtgtgttcttggaaaaattccgaccgcaaataggaggatatctcgtcactgctgaaaatggctatctggtctatgtgccagagaaagcatttgaaaaatgctatagccgggttaacgacgcctccgaaaatggggtatcgctcagcattgaaggtcacaatggggtgacattcattacagccagggacgtaactatttctgctggcggtatcgctactctacaagaagaaatcgaccttgaagcagccgacttttctgacgcgctgatgtggctgaaggatggcaagaaagttgcccggcgcgggtggaacggcgaaaaccaattctgctggctggttcctgaaggacagtacccggcacgaatggaagccattaagggatatttccccggcgatctcgttccgtatggtgcttatttcgccttaaaaaatgcacaaggtgtagttgttccgtggttgccttctgtaggcgacttactggcatgtgactggtttgtagtggagtga

SEQ ID NO: 469398 - DNA, 495 bp, Shigella boydii
atgatttacgtaaaagtgaaacgcctacatccggcagcaaaacttccagcttatgccacctccggatcggcggcgatggattttgaggctgttgaaataaaaccatgtgtcgatagcaatggtgcaatttcctcaagctggtgggtgtacaccggactggctatggagatcccgcccggctggtgtctgaaactctatccgcgttccggattgggctgcaaaaaacatactcgcctggctaactgcgtaggaattatcgactccgattatcgcggtgaaatcatggcaaaactgattacagatcccggtggtgaaggcgtttgcctcaagccaggaatggcggtcatgcaaggcatttttgagcgtgttgaaccggtatcgctggtagaagttgatgaactcgatgaaacagagcgaggcgctggtggctttggtagcacatcggaagaccgcgttgaaatcaagcgtacaccgcttcagtacgcaaagttttaa

SEQ ID NO: 469399 - DNA, 477 bp, Shigella boydii
gtgaaaacttattacccatctctgaattgttacccgtcttcctatccaggattgtccgggaagctgttagctctattagctaaagcacctacggaatggtttaagccagtcgttatcaatccacacttcctggattacggatctgttcgcactcgtaacgaactcaaaaacctactggcgcatggattcattcgacaccgtgccggtaaaggctatcagttatcgattgcgccagaagaggccgtgcggctattcgcatatcgtgacagccagacaaaagcccgggtaatagctcaaatacttcataacggcagcacctatgcccgccagtttggcggcgacacgtcgcagttcttgcgggcggtgcgatcgctggaggagcaaggagttattgaaagttcctgtattcctgttcctaccgttccacatatcaaacgtcgggtttacaccttcacgcagagagctaaaaaacaatga

SEQ ID NO: 469400 - DNA, 345 bp, Shigella boydii
ttgcagagtcaaatcacggaatcaagacgcttcacggtggatggttacaccgtaaccttcgccgctggtgttaagaacagtcatgctctcgttgtattcggcatcatgaccgggcttgaggccgtccctgtgtttaccctcgaaaaaaactggcgaaatctggaggaagcagaaagctacgtccggaaagtaaccatcattgccgccgaaaaactcctggcccactatcaggaaaattatcgcactatggtcgagaagattaatctcgctttcactcgccccactaccggctttattgcaccggatactaatgcaggtcgatatccggcaagggggcgtcggtga

SEQ ID NO: 469401 - DNA, 1029 bp, Shigella boydii
atgagtgagttgattatctctggcagttccggtggttttctgcgcaacattggcaaagagtaccaggaagccgcagaaaactttatgcggttcatgaatgaccagggggcttatgcgccgaatactctgcgcgacctccggttggtgtttcattcctgggcgcgctggtgtcacgctcgccagcttgcctggtttccgatctcaccagaaatggcccgcgagtattttcttcagttgcatgatgccgatctggcttcgaccaccattgataagcactatgccatgcttaacatgctgctttcgcaatgtggcctcccgccgctgtcggacgataaaagtgtgtctctggccatgcggcgcatccggcgcgaagcggcaacgggaaaaggcgagcgaacaggccaggctataccgttgcggtgggacgacctgaaactgctcgacgtcctgctgtccaggtcagaacggctggtggaccagcgcaaccgggcttttctctttgttgcatacaatacgctgatgcgtatgtcggaaatctcgcgtattcgtgtaggagatctggaccaaacaggtgacactgtcacgctacatatttcacacacgaagacaataacgaccgccgccgggcttgataaggtgctttcccgtcgcactactgctgtgctgaatgactggctggatgtttccgggcttcgtgaacatcctgacgcggtgctgttcccgccgatacaccgtagcaataaggccaggattacgacaacgccccttactgcacctgcaatggagaaaatattcagcgacgcctgggggttgctgaataaaagggatgctacgccaaacaaaggaagataccggacgtggaccgggcatagtgcacgcgtcggggccgctattgatatggctgaaaagcaggtgtctatggtggagatcatgcaggaaggaacctggaagaaaccggaaacacttatgcggtatctgcgccgtggcggtgtgtctgtgggggctaatagccgcttgatggattcgtaa

SEQ ID NO: 469402 - DNA, 1032 bp, Shigella boydii
atgaagtcgatcgagaaagagtacaaacggttcctgcaaaccgcagaacggtggaaagagctggtggtcgcaaactctgttttccatgataccagttatgctggtgaggaattccgccatgttgcattaacgcatgaccaaaacatattagaagaagctgaaaaatgtcttgctgaatggaaagccttcgttgacatgtgccgcgatgccgacggcaaagcgtcgaacattgttgagtccgtatattctccgatcccattcatcattgaggacaccaatcaaagcacgcatgtcgttgtgcaaagcgctacaacaacacgtgcatttacacgtgaacaattgctaaaaaaatacgacaaaatcataaagaaaagcctgaaaaatagggttttttctcaaatcgtaggtgctcttgaagaagaacagcgcttctttgaagctgagcctgaaggcgagatctaccgggcgcgtaaagaggcatatacagatgttgtgctgacaacaaacatcgaaggcagtaatgccctttctcgctttagagttggcgcacatggcgcattggttttcgcaagactaccgaagacaacgatccccgttgtcaataatgttggtgaacgccggagcattacaatttattctggcgtcgaatcggtaccttgcagccttctcggcgattttaacttatatcgtgttcgtgacctggaaaaacaccagccaagctacgttgcgaagtcgtatatcttaaggaacatcgatattcgcaatgaaagccttaagcagaaatccgctaagatgctggaggatgccgatccggctattcgccatatcattgagcgtaagatacgtacatcacgtgaagcaatggcaaggctggataaaatggatctggaattgttagacgtaatgatggcctctggagacgacctgaccggcattaaactgaatgaagctcgtaaaaaatacggcaaagcaatcgaagaacgttacggatacacattcccccaaacgcagtacgccgcgaagctctggtaa

SEQ ID NO: 469403 - DNA, 1509 bp, Shigella boydii
atggctggcgggcgcaaggttaaatgcgtcaccagagatccacgctggcgcgatatggtaatcaaataccgctacaactttacccaggctgttgtcgatatttttgggatgttcccctccccgcagcagcagcagatcattcagtccgtacaggaaacggggagtaggactaccgtcacgtccggacacggaacggggaagtcgtcccttaccgcgatgttgctgttgatttttatgatcctgttccccgatgcccgtgtcatcattgttgctaacaagataggccaggtaaaaacaggcgtattcaaatacgttaaacagtattgggcgaatgcagttaagcgtcatgggtggttgcagacctattttgtcctctctgacaccatgttttatgagcgctcccgtaaggggatttgggaagttctctgcaaaggttatcgactcggcaacgaagaagcgctggcgggggaacacgcggcacatttgcttctaattctggatgaagcatctggtatatctgataaggcgatcggcgtaatgaccggtgctcttactgaagaagataaccggatgttgatgctatcccagccaacaaggccaagtggttatttctacgattcgcaccattctcgagcaaaaaccccagacaacccgaaagggatctggacagcaattgttcttaactcggaagaatcaccgttcgtcactccacaattcatcaaggagaagcttctggaatatggcgggcgcgattctattgagtacatggtcaaggtgcttggtcagttcccacgagaaattaacggctatttgcttggtcgtgatgaatgcgatcgctctgctcgccgcaaggtgttgttggagaaaaactggggatgggtggcaacggctgacgttggtaatgggcgagataagtcggtcctcaacatctgcaaggtatcaggtcacagggataagcggcgcgttgttaactttaaggtaatggagatgcctggcactatggacccattggcctttgctgacttcatatataacgaatgtacgccggaaaaatacccgaatataacaatcgcggttgatgctgatggttttggttctgatacgtgtgcgcagttggtgcgtcgtggtgcgaacccggtacgtattcggtggggaaaacccatgtttgcgaacaaagacagggagcgatttgttaatcagcgtgcctacgcaaatatcatggcgcgtgatgccataaagtcagggcgtatgcggatagacagtgaccctaaaacggcagagcaagcgtcaaaaatcccctttttaatgaatgaagaagggaaaatggcgatgatgcgcaaagagcacatgcggcaaaagctaaacatcaaatcgcctgaccgatgggatacctactgcttcactatgctggtggactatgtgcctgctaatgaagatattggtgccgaaatggcaactttccgagatcaggttctggcggatatcgaaatgccggatctggatatataa

SEQ ID NO: 469404 - DNA, 1365 bp, Shigella boydii
atgagtctggttaattgggaggagcaccgcgcccgctttatagcgttgcgtgaagaaaaagggatcactgtaaaggaatactgtgaggagcatggccttagcttcaatacagccagaaagcatctcaatatgaaaaaaaatgaggtgcggtcgcaggtaaagacaacaaaaaaaagcaccaaatcacctgaaaaaaaacgggcaggaagagcaacaaaaaagcaggaagagggtgcagaaaaaacaaaatttacagaaattgacaattcgcagggcgcaggttctttccggagtatgccgagaaagaaaacttcggatcatgaaaataattcaaataataacaatgagataaaagaatccgtcaggagatcattgcgcgaaaaaatggcgaaaatgatccccgaagaagataaaagcgccccaaaaattgagggatcttctgcaatgatccctgacggtgctgtgcagcgtgccacattgccaactacgaatgttgctcgcgatatgatgaagaacggcgcagaagaacacctgcggttagcaattcaaatggcgcaagagcgcgcacttcagtatcaaagcattgttgatcaggaggccgaacgtctacaggcggaaatagacaccttgggcgataaagagccagaaggaatgcaccctgggcagcgccttctcggtctaatcagtgacgcggcctactacatgaatgattttatcagtaggttggctgctatatatcagtccgaacaaaagctgcgacagggggatgaaaagcttcgtcagagcgctcgccagcaagcattcaaagaggctgaggccagagaaaaactcgaattagcacgcctacaggccgaacagcgtggcaaagagattgaatatcgcattggcgctgacgcacgcgcagccagagttatcgccgccgctatacgtatgcgtgagcgcgaggaactggatgatatcggtgttgctgaatacatcgagcgccagggggtcagcgtcccggctatcctcgcggcgcgcgcggcgaaagctatcactcttctcgaaccacctgtttctgacgtcaatgatgttgatgatgaacagctggacaaagaggcaagggagtttgcaacgcttcaggctaaccatccgcaatggctggcagagcgccgggcggatgtggcaaccattgttgaagaattggggtgcggagattatgaccgcaatggcgagcgtaaagctggagaattcgaggccaacgacgaagagctggatattgacccttcggcaacggctgaaatttacggtgattatgatgcatctgatgcagggtatgacgccggagatgatgatatcgcgatagaaccgccggaggatgattaa

SEQ ID NO: 469405 - DNA, 393 bp, Shigella boydii
atggaacaaatcagcagcgcagaaattgcggatatcatgattagggctgactgctatctgacagtcactgaaattaccattctcgccaaagaaaaataccctcatctccatgtctcacgagtaagtgtaactaacatcattcgtcattttgttcgttcaagcagggcaatctgtgagcttgatgatcgcgtttacccacgaaaatactggttgcatggcctgaacggatatcagttcaaggtgcgtgggcgaacccctgaatacggcagtttactggttaaaaactgtagcaggaaatcagtcgaacaggcgcgaaaagagcaacgagagctggtggacatggcgaataagctgtggaatgccgccgttaaaaagcgtggtgttgctttatga

SEQ ID NO: 469406 - DNA, 393 bp, Shigella boydii
atgtacgggactaccaaattaagcactcagcaggccaccaatatggagtggtctatcgctaactgtaagatcgtgtcatgcaatgccacgcgtactgatgtgggccataaaagcactataacaggctatctggtaatgaccaccagggggatgagggttagctttcgctggaaagcagagcaagtaacgccattcagagagccatcaatgccgctgcaggttgagcaggattatctatgtttaccagaaatagatggcggaatgctggtggagtctgatggtagtaaggctgattttgaagccaatttgaagctggcacaggccgtaatcaatagttgtcgcggaaagtggatcgcaaaagtgaaacatgttgttcgtttgtctcgctggtag

SEQ ID NO: 469407 - DNA, 576 bp, Shigella boydii
atgttaatggcgaacgataacgcatatgcagaagaagatctcattttgagtgacttcatagggaagcgggaacgctggacccaaaagcgagaggaactttacgcctcattagttcgcaaaggcgtcaatatcgaaaccgcacagagcggcgatatgacagtggtaagcgttggattgcacggtgtaagcgtgtcagcaatcaatcatgagccatacgttgcgttatccgagtcaatggtaaggttagttaagttcctgaagtacacagaagcgaataatgtaatcattggcaaaaagaatatccctttttcctcggctttttactggatgatgaaagggcttgatgcccggcggacatcatggcctaaagggagctatatatcgatgttccgtggcagcattggcagcaaagaaaagctcttcgaattcttgccggaagaggcattcgatattgtggaagggtgcgatgtgatggtgatgcctcgcctggtaatgatgaatggtgatttacaggcgcagacagactggtttgcaactggtgtggatattatcgcgactgactgggaggctttctga

SEQ ID NO: 469408 - DNA, 129 bp, Shigella boydii
atggaattttggacgtttgccgacaagaacccttggtggacatttttatttctgctggtggttgcatatggggtcgagcaagcagcaaaagccttacgcggccctggcaaaaagcgtaagcggaattaa

SEQ ID NO: 469409 - DNA, 828 bp, Shigella boydii
atgaaaaaaacgttgattagtgcagcgattatttttggttctttatgtctgaccggatgcgaccgggtagaaccaggcaatgtagggatcaaagtaaataagctgggggatgataaaggtgtcggcgaagtagttggcgttggtcgctactggacaggctggaacacagaagtttatatcttcccgacctttaagcaaatgaagacctacgatgatccgttcagcttccaaatgagcgacgggacaacaattggttaccacattggtgtagcttacaaggttgatccggcaaaagtcacaactgtatttcagacctaccgcaaaggcgtggatgacattaccgacaccgacctgcgccagaagattgccgacgcacttaaccgactggccagcaaaatgaccaccgacaaatttatcgacggtggcaagtctgaactactggatgcagctcttaaagacatccaggaagaaatgacgcccatcggtattcaggtaatgagcctctcatatgtgggcaagccggagtacccgccaaccgttatcgacagcattaatgccaaagtcacggcgaaccagaaaactctgcaacgcgagcaggaagtcaagcaacgcgaagcagaagccaacatgctgcgcgcagaagctgccggacaggccgatgccattcgcacaaaagcccaggctgaagctgatgccattcgtttacgcggtgaagctctgcgccagaaccccggcgttatggagttggaagcgatcaacaaatggaacggaacgctaccgcagtatatgaccagtaataccgctgtaccgtttgttccggtgaaataa

SEQ ID NO: 469410 - DNA, 237 bp, Shigella boydii
atgcagaacaatccgaacaaatgtcgaacgctatgggtgcggctatatatttatgccgtcctctgtttgattgtgtcactggttctgtatgtttggcttttgccaaatatgatctcatctgacagcacaatacttgtattgttgggagtccttctcgcgctcatttacccggcttttgcagtagtcttttttcgtgaaaaaaccaggaaattgattaatgaaaaaaacgttgattag

SEQ ID NO: 469411 - DNA, 1209 bp, Shigella boydii
atgagtcaacacactgatacttctaatctggaaattatctcgacagcaattgaaacgctgcgcacacaaatcgctcttatacagaaacggaatccgggtgatgacctgtcaaagcgactgcacgagagtgtcattgccactacagataacctggtggcggaaatcaacaagctgcttgatgatggggcagttgattacaataagctggtggatcagtttgaggaataccaacaagccgttaatgatggcttgatccgtttttcacaagtcacaggcgtatcagcgacagttgaaagcctgggtgatgcagttaatcaatttgccgtgaatatgcgtaatgagatcggcaatctggaagcgcgtcttgaacaggcaaatacactgcgtaaatctgccgaagccgatttgaaccgttacaaaaaagactatccgcccagcctgacaaagcggctggatgttgcggagaaggataaccgcacgctgaaaagagagcgccgggaactaaaagagcgtttaaccaagctcaatcagcaatgcattgattatcaaggcgaaggcgtcacactgcgtaaaaagttggctacagcacagagcattatcgaaacattaaagcgagagtgctcacagcttggtcacgatctgaaccgtgcttgtggcatgggacaaagaccagagacatttccacttatgtatgatgggcgggatgccattgcctacatccatgagtatccgcacggcctggttgcggaaactgggcagcgtggcgaagcactgctgacggctaattaccatcaacaaatcagaaccaatcgcctgttaacgatggatgtgatcccatcggtatggggaacgccgctttactatcgcctgccgggcttcgaaaaggactggaataccgacatagacgaatgtctcgcagataaaattatggcgtacctggagacggattttccgcgcttatatcgccggattatggactctaaggatgcgccaatcgatgaattaaaaatgcgtccggagacgctggaggcaatcaagcagacggagtttgatactgtattcagtgtggcctgcattccaagctgtttccatgaaagcattccgttcatgcaaggagatcgtcgtcaggaaatcattgacgcttgccgggtatgggcgaacgaatgggataagaagaatgggggtgtagaagatctttacgggaaataa

SEQ ID NO: 469412 - DNA, 300 bp, Shigella boydii
ttgagcaaaaaatattatgtgagtctggcgttcgctgacgatgcggggaggacgcggagtatcacgttgagcacaccggttaaggctgtgacagcgccgttaatccgtgaagcgctcagagagctggaattgggtgaaaactcggcactgttgtcggttagttggttagggaaaatgtcagagaaacaatacgtggatggagttaccccaataacagtaatgaggctactttcattgctggaatgggccatcgtacctgtatttatctcgtatcttatttatcaggctgcaacacagtaa

SEQ ID NO: 469413 - DNA, 201 bp, Shigella boydii
ttgcgtttacttaacgtggcagaacttatccctgcaggaactaatgctattgctcgtcgtcgctcatggcagcaggctctatgtattgagatctcgaaacgtatcaatggaagttttgaagctcgcaatattgttactggcgataaggttcacataaccccggaaagtgcaagcgctgatgattgggagtttgtacattga

SEQ ID NO: 469414 - DNA, 225 bp, Shigella boydii
atggtggcagagggccaaaagaagggatatcccgatctttctatagaccttgcttgcgggggataccacggaatgcgcattgagatgaaacatgggagaaatcgcctgactcccgaacaactcgtctggatgacgcgcctcacagaagccggttactactgctttgaggcgcgcagtgccgctgaagccataaaagctatcacggagtatgtttgtcttgattaa

SEQ ID NO: 469415 - DNA, 435 bp, Shigella boydii
atgacaacattgatcgacacagtaaaaccaacggaatcctaccttgaggacattttgccgcaggcgctcaatggcaggagtgaagaggcatttctggatgcatatctgaatggcatggtggaaaggctgaaacgagatccacagctttatcacctttatgggccgtggtggcctgcgcttaaaacgttattgctggagcgcggcgacatatcatttggacaagttgtagatagtgatgtggcagagatctacaaaatgagtcgcccggcgcttacggttttggctgggcatctgtattcgagcgatcgcctggaaaatgacgcggtatacaatcctgttcatgctctggaagtcgcaccttatgccgatgatacagagccatacgtgtacacaagttacgacgagtctgtagagaaatatcgaatcatggggtag

SEQ ID NO: 469416 - DNA, 6843 bp, Shigella boydii
ttggataaactacttcattcagtcagtgaagcctccagcttaggcgaactgattgagattgttagccggttgcataaattacgtgctgttgcgacctttggcgttaagaaagtcgatggtgtcagcattcaaaaaacacggcgggcagcaaacaacgccgcagtagagcttcttaattcccttccgcccggcttcgatggggcgaaattaactgacgaacagcgtcagattcttgccgggtataccggtgaaggcggcctgacagatggtgagggcagccaatacgaatactacacgccacagtttatggctgaaggtatatgggatctgtttgctgactacggtattgatggcgggcacgtactggaaccatcagcgggcacaggtattttccaggagacaaaacgacagggcatgataatgaccagcgccgaactgtctccgatttccggtcgaataaaccagcttttgcacccggaagacgatgtgaatatcggggcgtttgaggcgctggcggcgaaagacgcaatgtatgatcacgctgttggtaacgtaccgtttggtgaagggcgttccggtgtcgccgggcttgatccggcatatgcaaacgagaagaacgttggcaattactttgtgctgcgcacgatcgacaaggttaagcctggtgggcttatcgtattggtggtgccgaatggcatgaccgatggtacgaaatataaaaaattgcgcgataaagtcagccgtaaagcggaatttttgggcgcacatcgtatgccttccggtacgttcagcgaatccggtacagataccgtggtggacgtatgggtattgcgtaaacacccggaaaccttcctggagatgatccccgacacggatgattcaacactcaaatcggcaaacgtcctttgggataccttcctcaaaggaaaatggtttacaaccgaagggaagcgatttgtttacggcgacatggaacgtaccagcttccgcaatactctggtggtgaaaaaggacggtcgtgtatccaatgagtcgatgaaaaccgctctatcacgccgctttgaaagccgcattaattgggatttgcttggcgtaactactcaggcatggcagggcgccaaagtaggagacaagcgccttgtaggtggcatctggcacgagtttgatggcctgcaatgggttaaagatgcgacaaccaaatcctccgtacttgatgtaagccgatatggtgtttcgacattcggtgatctgcaaacaacgttccaatcaacaaacggcattctggctctgtcatgggggcagatatccgcgatcgcttccgactatccatcggttatcagtgatgaagtagcggcaatgattcgctttgctgggaaacaacgcgaaaaagaccgtgagcgcattatgcgcggtgcgctgatcgggcaacttatcaataaagcgctggataagcgtaaccttggtgaaaacgtcgatgatgaactggctgatgccgcacgtctgacggctgccgaagttgctaaatatggcccaccacacgccattaagctaaacgacattaccgaagcgggcgcgaagaactggctgacatttaccgggaacgtcaatcaggacggtgaagcatccgatctgctgtccggacggcttgatgttagcaaaggggctgctggtattgatttcactcgtccggaacaggttgtgacacaccttttcagcgatgttgcccttaatcctatcaatcttgatgacttccgcgaggcgtttaaaggcgaactgccagaagacgacgatcaagcactggaatacctggcgaaattcgacgatatcgctattgatggatatggttgcctgctaccgatgggccgtgccaccagcggtgatattaaatcaaaagtggcactgctggtgggctggcgagacgcgtccacaggagagcggaaggccaactttgagcgccagctttcaaaaatcgaagagaaacgcacgtttacaccgctgaacaaagtcacggtaaaccttaacgcacggtggttggatcgccgcctgataaaagagttcctggcagagcagggctatgacgagtttaagtatacagaacccgaccttaaggttgagaacggcattctggtatccccggacgattacgaaggtaaggacggggtatttactggctatcaactacgaaccgtaaacggcaaaaacgggaacgagttcaagaaagcgaataacaaagatggcttcctgaatcagcttgagaactacctgaacggtgttaaaccgcgcggacagaacgctaacgagtacctggacaaaatcgcccagcttgagacgagttttaacgactggttaagaactcacccgcaggcagaccagatcgcccgcgattataacgacgcctttaacggttatattccatttacccattcagacgcacccctggggcttgaaggcatcagcgggaaacgtataccgctttcttaccagaacgaagaagttcgtcgtctgtcggaagatgggcgcgggattatgggattcggaactggtttgggtaaaacgacgaccgcgctggcactggaagcctataactttgaaaccgggcgaaccaaacgtacctgtatcgttgttccaaaggccgtataccagaactggtatcacgaggcacagagcttctacagtgcagatgccttcgccaatatgatgtttatcggtctggacgaagtgcgcgatggtgacggaaatattcagactgccccagtgctcgaccaggacggcaccccgcgacttgataacgacggcaatccgatcacccgtaatgttgttaaagaatccgccagtgccgttatcgctcaacgcatgaacatgatcccatcgtcgaactggcgaacggtcatcatgacaaaagagcagttcgcatctatcccgttgcgcgatgaaaccatcggagaaaactcacagcaggctgtctttaatgccgccgaaatggggcgtcttgacctggcgtcaggcaagcaccgtgatgcgcagaagaagaacaagattaaggaccaggccgcgaataccggtacagcgaagaagcagaatatcccgtactttgaggatatgaacttcgatagcgtaattgccgacgaagggcacaactaccgcaactcctttggtgccgggcgtgaagcggggcaactggcatatttacctaatccggcggtatccaaaatggcccgtgacatggctgtaaaagctgcgtacatgatgaaacgtcacaatgggcgcggcgtcgtaatgctgacagcaactccgctggttaatagccctattgacgccttcaacatgctgtcaacggtgatccctcagcacgagtggatgcacatggggattattacccctgacgactttgtgcgagtgttcggtaaaacagccactgttcaggtccagaaaatttctggcgaagtggaagagaaacaggggctggtgggcttccagaaccttgatggtctgcgtggcattttccaccgctggacaacgcttaaaacggcttccgatgttggtgcaacggtaaaaatcccggatatcgtcgaaaacaccttgcagatcccaatgactccagagcagcaagcagcttatgaagagcttcgtaaacgcgcgcaggagttaagtcgtggtgatgacgtcactgtcgatgatgaaggcaatatcactcgcgggaaaccggatgatttcattttctctatcattcgcgacatggataaggtcgctatcgacccggatctttacgccagcgctatcacattccagttccctgtagagcttactgaacaggtgaagtctatagctaataacctaccaaaagtggctggtgggaaagcggcagacgatgcagaagaagcagaggaggatgcgaccggaggcctggtcagtacccgtaccagcaaggttgtagctacaacatttagtgagcatccaaatcacgtcgaattgcgtgccagcattgacctggaggctgaaatactcaaggcaattgctgatgcaggcatcgacatgaaacaggtgtcacacccgatcccgcctaagtatgccgcacttatcgagaaccttcgtgaagggcttaagaacggtaagcaaattatctttatcgacgagaaagcccagcaccagaaactacgtcgcatcattgccagtgcgttgcaaatgtcagagcaggagataggcattatcaatgctacgactgttagccaggctggtggtgttaagctgaaaaaggtcaaaaaaccgaccgaaccgacgccaaacaaagacggtgaatacaaagaaggcgcatgggaaacctactacagtaaactggcccaatatgaggattatctctctgctaaaaatgatgctggccttgaggggatggaaggtattgctgccgactataacgaagggcgcacgcggatcattatctgtaacaagaaagccgaagtaggtatcaacctgcatattggaacgaccgatattcaccacctgacactaccctggactcctgccagtatcgaccaacgaaatgggcgcggtgcgcgcgtaggttctccgcaagagaaggttaatgttcactattattgtggcaaaggcacattcgatgacttccgtctggatacgcttaaacgtaagaaagactggatcaagatggtgatgacctccgatatgtcagagatcgccaatggtgatgcggatgacgctgatgaacgcgccattatgctggcggcaaatccggaagaacgacgcgcaattatggctcgtcagtcgaaagaacgtgaggaacgcctgcgacttaaagcgcaacgcgaagccaataatgctctcgataactacctgaaagcggcgaatgctgccgggaaggatatcggcatgatggaggcagaactgaaaagcgcgatggagcaggcgcaacgataccagagtgatctggatggactgattaagagcggcaccaacaaaaacggacagaaatatacgctttcagcactaagcaaagctaaaaaaagagtgcgtgaattgcgatttgcaatcaccagggcgaaggacgcggatactgttatgaaacgctctcgtggtgatgtggagcgtgctattaagtctggtgtgctggatatcagtatcgatgttattcagaacccgcaggagtatatgcgcactggcaagaacatcctgttgcataaaggtagttactaccgtgcagtcattgatgctgaatacgagacaacggcgattgtacgcgtgacacaaattgagggcgaaaaagcgcaatacacctgccgcgtcgcctggctggatagagcaagtcgccactctcgttctcctggctcaaccatgacattaccgtttgactcagtggttgaagcggtaacatttgaagagggggtggctgaatcacgagaaatagcggcacgtggtgttcaaagccaccagctttcaacctctctttctcgcgatcaattctatgacgctattcgtagcggtgttatgcgggtaactgggagagatcgtggcggttggcaaggagcaccggatgtaaactattgggcttatcgtaacgccaatggtcagattcaaatggcctttacctatggcgggatgattggtcaaaaaattagcgcatctggaagtgacgagatagcacctgaacaatggatttatcctgatgtaaacgacgaagcattaaaacgcgaagtcgcgaaaatccagacaggtgataacccacttcgtatttcagaggcagaaggttttctccgtgcattgtttggcttcgattatgagcaaggtatggaggcatggggcgctcaggccactatggatgatgtggtcaaggcgttcgatggctggatggcagggcgcgatctctccgggcgttcacttgaaaaagtgactcaggaagatgtccgcagcttgttccgcaagccaaatggagaaggcctggaaacgtactggcgaggcgtgctttctttccgcgatttccaggggcgcatgaaagccttcaccaatggttcggagatttcgcagatgttcgaacaactacgaacgtccaaaatcacaaccaaaattgagaaaacacgcatggcgctaaatgcatggcgtgatgcgctgtttgatcagtacaaaatgcaaagtgatgcagatggttgggcgtcacttgcctcgttggcagatcagtcagtttacagtgcgcaactaagcatttctaatgccgataatccgcttgaaacatctgcaacagtctggattaaagcgggggcgttaattcatgcatttgaggataaaagcattacccgtgatgatttcgcagatgcagatagcttgaatcgtcttgtcgggatggctatacgccatgctaacgccttaaaagcgggcgggtatgtggaagagttgcctgatgctctgaaatctgcaacgtgggatgactttgtgtcgcttaaaaatagtggcgctacggagtcagagattgctgaacgtcttgcggcggctaagactgaacgggaagaacaggctgatgctgctgagaacaaggctgacgaggcagcaaatgatgattacattatcgtggtaaacgataagcctattcgcgccaaagcacgtgtccgcggtcgctggtggagcgtaagtgaagacgctggtgctgtttatctcattgcagatatgcccgggtcttcatctattcgcaacgcaaaagatgccatcaagaaaatcggtgggcgtttctggaacttcgaagttaacccggttgccgatgtggactttgaccgtccggcctggatggtatcgacgcgctattcaattgatgaagtgcgtaaaatcattgaagcggcggcttaa

SEQ ID NO: 469417 - DNA, 486 bp, Shigella boydii
atggcaaacattgaacctcgctggctaattgaagcacgtaagcacattggcctgactgaaataaaaggcgctaaacacaaccctgaaatcgttcagttttggcgcgacatcaagcgcggcggaattaaagacgatgaaacgccgtggtgcgcagcatttgtcggtgcaatgctggaacgtgtaggcatccgctcaacaagatttgagtcggcaaaatcctatctggattggggcgagaaattagatacaccggcatacggatgtatcgttgtatttacccgcgtaggcggtgggcacgtaggcttcgttgtcggacgccgcgccaatggcgatctgcttgtcctgggtgggaaccagggggatgcggttaatattcgcgcattcccaacatcaagagtgtctggctatcgctggcctgctggcgaaccacgcaataccgctctgttaccagtcggagacgcagcaacctcaactaatgaggcatga

SEQ ID NO: 469418 - DNA, 225 bp, Shigella boydii
atggttaatgccaatccttgctcacgtccagaattcatctggcgtttccactccctgcaaaaacactgcgatcacttcgcaattgccgcaaccgaaaaagaagcccgttctctgatccctgatcagtatggtgttcttactggtcgtttctctacttccccacaaccaaacactaatccctggtatcgcaatattaccaatcccagcattgcggaggcacactga

SEQ ID NO: 469419 - DNA, 963 bp, Shigella boydii
atgaatattttaaattcagtttcagtaactttcaacacttctgagtataaaaacaacactgaataccacaaaaaaatcaaaggtcatcagttgagtttttttgctcgtcatagcggtcttctttccccttcacatagcgctattattgccgagttcgccaacctggcaggggctaccgatgaatacatgatccgtcgctcatatgctgatatgtccgagattacaggacgcagtatttctactgtacgccgggcatttgctgaagcgacgaagtgcggaatgcttgttaggcaacatcaggtagcgaataacaatgcccaggtgtgtaacgtatatcggtttacgacacaatttctccacttcattcatgcagcaatggagatagggggtaagcagggcatcaaatttgccaacgccacaaaactggttaagcagttgatttcaaaggttcgttatttttttgaaactgggaaccccctgttcattttgaacaagtccccccatgttcaaaatgaacagccaatagaaaataagagtcactctatagcaaaaagaagagaaagatcatgcgcggttcagccaaaggcttcaccagcagatagttctcaagcggataatggggtgctggataaaaaaccagtaatcagggaagaacataccaaccgctgcctggcggcggcaaaagcgagagctgcaaagcgtcgttcagacgaggggcacgcaaaacggcaggctctgtatcgtaccgctgaaaagctggcaaaaaaatttgcatggatacgtagtgccgctaccgcagtgaataagcctaaacaatccagtgccctggatttctcaatggattattctggctcccaggggtgtgcaaccattggtgaagcctttgacctgatgaaacagcgtggctatcggtctgaatttgaccgggaggattggtcaatccctgcgggatttaggggatga

SEQ ID NO: 469420 - DNA, 999 bp, Shigella boydii
atgcaatcactgaacactgttacggatcgcttctccctggtagagaaaatccgcaaacacacaccgcagaacaaccgaaattacgttattcagtcggtgcgagacacattcaactcgccagaaacaaaagagcgtatcgcacttggtgagatgtatggctattacggtcatggtcgccgggcgatgcactataacaaaacgaaaagcctgaacctgccggaagtctctgttgtgatggttgatgggaaacctgttgtattggagaacgtgccatcaaacaggactatcgacatttcgattgacgacaacggcattgttacccatacgcaggaaatactggatacagacaccgggcgtattgtacagggaatgattaattcaggtgctggtggttggtcatgggctacatctggcccagattcatctgtatccctggtaaagtcttttcacggctttgattacgtaactgtgcctaactatatcagtctggacaagaaaagcctgatgctggaatcagcagaagagcgcgacgcggctattcatgcggcacttatcgaacaaggttttaccgataacgcggctacggatcttgttcaccacttttcagcaatgaagaatcagcaggctattttcgagtcagcacagcgtgaagcccttgagtcagaattgatgctccttgaagtggaaaacatacagcttcgagataagctgcgcactcaaacagcgatgatggaaagccagggggaaaatgcaaagcaatgccgccggattttgcgtgacgctatccaggaaatgcctgtttttattagcgcagaacagcgccgggcgctctgccgtatgcagtctgaagatgatgctcgcatagtggctgcgatgcttgaatcactgggggcaaatgcgacttatggcttgccgatatcaggcaagaaagagccggagttatcgccgaaggagagcaaaaatactaccccattactcttcgtttcacgacgggcataa

SEQ ID NO: 469421 - DNA, 1683 bp, Shigella boydii
atggcaacgaaagacaaaaacaaaggctttctgtcagcattgaagaaagccttcaacggtggtgatgttacgcccgccgatccggtcgtttttacgagcggacatagtgtcgttgctcgttccggcctgtctgctttacgtccaggcatcctggggagcaatagcgatggcatgacgagtgaggcagattcaatttctttatccgctgaactgcccggcgagcgcctgcaaaagtacaacatcctggaaacgatggctaaaagcccgactatctcgacggctttaaacattcacattgcacatgcgcttgcgccttcaaaaaaaaacggacaggcattcatcctttcgccaaaggatggttccgatgccgaggcagtaagtagatgtgaagagttaaccgctgatttgggggcgatgattaatgacggacttccttcatgggccatgatcatggcgatctttggggtgtcttatgtccgaccttatgctgaacagggcagggggataacaggcattgagtccagttattacactctgccacatttcgtccaggaattttatcgcggcagccagctggttggattcagtggtgattacatcctggatacgcatagtttgcgcagagtaataaccgaaccgtggaatctggtttccatgaaaaatccctattggacgccacagcataaagttattccggttagctacggcacaaaagggtactcactgttaagtgatcaagctgataagccgttaatggagacgcagaattacggaacttcattcctggaatacagctatgaaccttaccttaatttatgtgcttcgctcgccgcgctgaaatcaacgcgaaataatgcagccaaaattgaccgcctgattgctcttacgacgaacacacttgacccggttaatgcggcgaactatacgcgtggcgtcagccaggcattgaagcgtcatagtgacctggtggcgcaaaggtcgattaatgccaacgctattccaactgtgcttaaccatctgatacccgtcatgggggatgggaagaacgggatcaccattgatacgcaatctatacccgcagatatcagtggtatcgaagacgttatgtttcatctccgacagctcgcggcaagcctcggtattgacgcaacaatgcttggctgggctgatcagatgagtggtggacttggagaaggcggttggcagcaaacagctatccaggccgccttacgcgcgaactggatcagacaggccgcccagcgaactatttatcggcttctggacattcacctcgcttataaatacggcaaggtttacaccgaaaaaaaccgcccttatgacgtgcaattcaactcaatgaacactgctattcaggaagaggaaaaccgggaactggatgcacgcgccaactttgttgctgtcatctcccaaattatggaccagatccagaacaacccgaaactggctggtagtgacgcgtttatgcgttatctgttcaccgagcagttgcacatcgacgatgacactctcaacaccatgatcaaagagtttaaggcgaatgaatcagagcaaaacaacgagcatggtatgtacgaatccgcgccgttgtcgtccggtgacgatccggaaaactggacgccagaacagttaataaactttgcaaaatttgtgatgagcaattaa

SEQ ID NO: 469422 - DNA, 1386 bp, Shigella boydii
ttgaacaaatcagttacttctgcgctttccgaggccgcagatattaacagcgtcattgctctggtttcttcattagagaggaaagaaacacgcatggggcgaagtagctacgtagtcaccagcaaaggcgcagaggtaaagacggcttttaaggtcgttgatgccagcagtctaatcatttcgaacaaccttgacggtacgattaacccggccttcccggaagaactccaaccacgagatcgtacccggctatccagcaaactccaggttaaccgtattgcctccgatttacgcccggcacaattaacggattccggtatgagcagccatggagcgccgatagttggtccggacaacgttgttgaatccggcaacggaaggagtatgggtatctggcgtgcctatgagcaaggacaggcggatgactatcgccagtacctgatcgaccatgcgaaagagtttggtctgaatcctgatgaaatttcgcaaatgtctatgcccgtactggtgcgagaaagactcacagatgtagaccgcgctcaatttgcccgcgattcaaacattagtgatctgcaagagatggcagcaagtgaaaaagcgtatgcggatgcgcaatttcttactgagagcgtcatggcgctatttaatccttcagatgatggaaatctgctggcgcggtccaatgatgcgtttattcgtgcgtttttgcgcgaaattggcgatacagcgacggcaggcttgcttactgccgatgggcgccccacgaaacagcttatcgatcgcatccagaatgcaatttttgccaaagcgtacaaggatgaaaggcttgttcggctggtgtcggaagagccagatccggaaatgcgtaatatccttaccgcattaaatacggcagccagcgattttgcgcaaatgcagtcgctgtctggcgacgctcaccatgacgcagtaacaggcttagtggacggtatagagcaggttaatggcctggatacacaggcgatagcagcactccaggaagcaattaatcttgtacgtgaagccaaagacaacggtcaggccgttgaagaagtgatcgcccaaagggggttattcggcgacagtacaccggaagctgaggcattggcgctattcatcgtagcaaataatcgcagtgcgaagcgtatgggggcagcattcaaaaaaatggcgcaaaaaatcaacgacgagctgactcataaacaacaggcattgggcgatatgttcggcggtggcgatgttgatctgcgtagtattttgtctgctgtatctgatgaaattgagggtgaatttggcgaagggaaaggtctgaactttgctatgtttgaaaattctacagttccaaataattgccgtacagaaaactaa

SEQ ID NO: 469423 - DNA, 369 bp, Shigella boydii
atgaccatctctgttttagaccgcctgaaattaggtaaagagctatcagatctaatgcaggcgcagaaaactgcgccagtattgcaacgcgtcaccattggtaagcagattgttgatgtgatgctgaaattgggcctggggactgccgcgcaaccggcagcggaaccgcaacaacagactgatcctgttgtagatgaagtccctaagatagtgactgacttcctgggcggtgtgttcacaaagtccacacaaatggaatttattgatgcgctgcgtgggatctcaaactatgttggcgagttccttacgttggagcaggctaaagaacagaccataagctgggtgaaagccaacggttatgccgggtaa

SEQ ID NO: 469424 - DNA, 1926 bp, Shigella boydii
atgattaacaatcctttacgaattaatattcagtctacttttgctgatacgatccctggctatatgccaggtcgctggtcttcagaagaattaagcgaagatgacctgatttttgaggcggcgaccttagaagatattgagcttgcctatatgggcaatgaaattctggttgtgtctgacgaagctatgtttgagtccataactacaaccagaattcggttagctcaaacaatgcgagctttcgtccgtgcgctgaatcgtggcctgaatggtacgaatattatggcagggactgatgaagccgggaccgatgaaaatggacgtaattgtattggtggtgcgattatcggtcgtgtacgtcgggtagctaatatccctgttttgaccgcgcagataccgcttactgacgggcagagtacaagcataattttccactctccaacagctgacggggcaaaaataaagagtaacgacgagcttgttgcatttcagtttttacttaataagcgtaacgtaactcacgttgtcgccccgattggtgggagagatgtttctttaagccaggtatgccaggcgctatctaatttgattgagcgtaacagcgaaaaatttaagaaagcaaaagagcgccaggacaaaatgaaggcagatattgagagttatctcaatgaagcagataaactggcagaagaacggtcaataacaattgatcaggtggacgttgcgcaacgtgggctgactgaaaagcgtgctgctcttacggagatgcaaaaaaaacttgatgcccagaaagccatcaacgaggaattacaagaaaaacgcgataaattgttgtctgctaaaggtgaaaaaacgaaggagcgagcgtttagtgaccagctgcgacatgtaaaacataatcttgccattgacggaaaaacagtgctggataatggcgctgaagttaattatgtcacgtccggcagtgacaatttcgttacgatagtagcacctgaaggtaaattcagtattgatgccagtgctgtcaaaggaggcagtttggcagatgctgcaaccaaattacttaaagcctaccgagagcataacgcagataaatataaagttgatgtgttaccaggccagcaggaagactccgaaccaccacagacagcccccgagacgaacccagtatcacaaccagagagccaagatgtaggtaaataccactatgcacttcaatctcgcccggctggtgttggtgctgtgccggatggaaataaagccgtgcttgatcgtcctgaccaggctgatcagtattacggatatgctcgtcacggtatcattacgtatgaccgtaaactgacagataaagaagtcagccagtacgagttgctctatcttcctgatgaagatgagctgaaagattttgcaggccaattggttgtgtccagcatgtctaaacatattgatggctatgtggacctgtttggcagtgacctgaaaacattcaaggcgcaagtgaaaattcttttccgcaaagcgtttccaaacgtggcgtatccacttggtgatggggagaaccttttcattatggacgtgtataacgcccttcaaaattattcaagcgaagtaaaaacagagcatgtggttgagccagaatcacaaccacaaccagcaccagaacaggagccggagccagaagaagcgggtgaatcagcaagtgaagctgatcaggaggcagataaagcgctggagtacctgaaatccgtgccggagcagtttacatcccgcgatctgacggtcatcagtactgaacttgatcatgtacaggaagcagcaaatgctctaatcagtgcaggtcgatacgacgagaacgaagccactgtgggtgcagcagttgactacctgatcaacattctggctgaaattcagcagggaggtgcttaa

SEQ ID NO: 469425 - DNA, 621 bp, Shigella boydii
atgtcaaataagaataattatgttcttcttaattatgatgagttaaacgaaaaggggctggcaaaactcgtcaaagaaatcagcaaaggtggttacaagatagcgagggtggtccctgcaagtaatggcaggaagaaagatgggatcatgacgcgcacgtttacccttattggtcttgatgaacagacaatggaagttcaggttaacgataccggtgatatatctgggatcaaactgaatggtaaaacagtaccgttcaagccagtaaaaacaatgtcggctttggggcaatctcttgcggctttatttaatcgcggagcaacttctttccagaagtcattagctcgaaaacttgctcgtgcagcaaaaaatattgatgacgaaaataagaagcggcagggagttaaatccaacgctcagagattagctgaagcgaaagaatcacgtgatgcactccgtgaagatatcgctaatgctaacgacaaactgtctaaactccagagcaagtcagacaaagtaatgcaagatacgggtaacgttaaagctgccttgtctcaggaagtagctaagacacgtgctcttaaagaagaaatcgcgcgcctggaggatgagcatgattaa

SEQ ID NO: 469426 - DNA, 447 bp, Shigella boydii
atgggtaactttgggaattatttcatttttatcatggcatttgttgccatcattgaccgtttcatttttcgtcgcaagagtgttgagattttgagtattggtgacgctgtagtgaaagaatccgctatagcatttcctgtttcgctacgtgttaagcgaagctgggtcagcaatgctcaaatcgaatattggttgcaagacctgaaaaatccatctgtggttatttcagggaaaacgcgaccagttgacgcctcaaaacgcggtgagagagaagagtatttgctcatcgatacgaaatatcttgagccaacgaagtgggatctgaaagtcacattgactaacggtaactgccgactgaatccgctttatcgcattttccctatcaatgactgcatagagcgccagtttacgatcgaaaagcgtgaaggagactgggatgtcaaataa

SEQ ID NO: 469427 - DNA, 327 bp, Shigella boydii
atgtttgcagattatgaaaatctggctgtagtagtcataacatccctactaagtggaaccggcgtattccttctcggagttagagacgggcgcatttctgcgtccctgctcaatcttgcgagtgaattgtttactgcggtaacagccgggcttgcggggtatggggtggcggttagccaggaatggcctgaaggtatcattttctgcgttgttctgattgccagtaacaacggaagagaaattttacagggcttgaagtccagagctagtaacgtcttgaatctcttaagcgtaatagcgaatgggggaaaaggtggagagaaataa

SEQ ID NO: 469428 - DNA, 561 bp, Shigella boydii
atgcttattggatacattcgcgtatcaactaatgaccaaaacacagctttacaacgaaacgcccttgaaagcgcaggatgtgagctaatttttgaggataaggcgagcggcaaaaaggctgaacgccctgggttaaaaaaggttctccgtatgctttccagaggtgacaccctagtcgtatggaagttagatcgtcttgggcgcagtatgcgtcacttggttgtgctggtggaagagcttcgtgacataggcattaacttccggagtctcactgactccatcgacaccagtacaccaatggggcgctttttctttcacgtaatgggggcgctggcagaaatggaacgtgagcttatcgttgaacgtacacgcgctggacttgatgcagctcgcgcagaaggtcgtataggtgggcgtcggcctaaataccaagaagaaacatggcagcaaatgcggcgattgctggagaagggcatcccccgtaagcaggttgcaatcatctatgatgtggctgtttccacgctttataagaagtttccggcgtcatcatttcaatcctaa

SEQ ID NO: 469429 - DNA, 273 bp, Shigella boydii
atgctggcggcgttatcgcaggcttcgctgatccacattaaaggcgagtatgacgaagaggcgtttaacgaagcctttatgatgcataccaccacctcgcccagttatcccattgttgcttcggttgagacggcggcggcgatgctgcgtggtaatccgggcaaacggctgattaaccgttcggtggagcgggcgctgcattttcgcaaagaggtccagcggttgcgggaagagtctgacggttggtttttcgatatctggcaaccgccgtag

SEQ ID NO: 469430 - DNA, 288 bp, Shigella boydii
gtgattaagcctcgtaaatcggtaaaagcccccgaagtaaaagacctcgatcttgaacgccgaattgaggcttttgccagcaaagctgatttggtgccgggtgagcaaccagaagacaacaaagtgctcgataaggacgccccacgtgattttaaatccattcgtgttggcttcaatgaatacgagtaccaggtacttgatgcgttaagcaaaaagcataatcgcagcaaattgaatatgatccgccatgctatcctcatgttagcggagtctgaggaagcaaaataa

SEQ ID NO: 469431 - DNA, 642 bp, Shigella boydii
atgattatattggtagccagccaaaaaggtggctgtggcaaatcaaccaccagcgtaaatatttgtgcggagcttgcccgcgcaaataaggacgtagttctacttgatgcagataagcaaggaacatctgcccgttgggcatcggaccgtaatgcggcagaggtttctccagtaattcattgcgtccagaagtttgggaatattcgtgaaacacttcttgatctggacaagcgttatgaatttgtggttgttgataccgctggtcgtgatagcaaagaaatgcgcaccggtattactgcggcggatgttttgcttgttccattcaggccatctcagccagatttagacacgctggcgcattttgttgaagtctttgaagaggctttggatctgatgcctaatcctagcattaaggcgtgcgcagtcttaacaatggccccatccaatccggttgtgaatgaagccaatgaggccaaagagtacctggctgaatatccgcaactgaagttgctgaaaaccatcattcgcgatcgcaaggtttaccgcgattgtatggctgaagggaagggcgttgttgagatggacaacgggaaagctaaaggtgaaatccagatgttggttaaggagttattaagtgattaa

SEQ ID NO: 469432 - DNA, 339 bp, Shigella boydii
atgtctcaggaacgtaagaaagtgatgatttatcttcgcccagaggcttatgccaatgaaaaggcggcgagcgagaagataaaaaaacatagcgatatggcaagaaccgcattgttggcagggcttgcgctgggagaagtcgatagcaggcttccaggattactggcttccctgctgaccgaagataataatccggagctgatccgaaaaatgctggcatccttcctggaactaccagctgcggctgaggagcgccctgcctccattgagccagcgaaggagcaagttgttgccaaaagcgcgtcggcgcgcaatctggctgactctctacctgattga

SEQ ID NO: 469433 - DNA, 957 bp, Shigella boydii
atgcgcatttttatcgatgatggttcaaccaatatcaaaatgctgtgggagcacgacggggaaactcgcactcacatcagccctaacagctttaagcgcggatggtcagcaacatttggtgctggcaagccgtttaactatgtcattgacgacgaaaagtattcgtatgatttgatctcgccagatgttctgccgacgaataacgtggaatggcaatacagcccgcttaacgtcctggctgttcaccatgccctgctgacaagtggcattgagccgcaggaagtagaaattgtggtcacgctgcctctggcggagttttacgacgacgacgcgcaatacaatctcgataacatcgagcgcaagaaagccagtcttatgcgccccgtcacgctgaataaaggcaatgtgttcacgattaagaaagttacggtacgaccggagtctattccggcaggaattggcctgtgcgacaatctgaaccctgcccattctgttcttatcgtcgatttgggtggaactacccttgatgtttcaatggtcgccgggcaaatgacggcagtttcccgtgtttttggcgattcgaatcttggtgtatcactggtcaccagggaagtaaggcaagcacttgcaagggccaataccgaaacgtcaaattacaatgtcgatcagctcattattaaccgccacgatgaagattatctgaacgacaatatcaatgacccatcagcgattgatgatgtgaaaaaggccattgccgcaagcattgaccgtttgtgtacccgcgttcttgatgtgattggcgactttaaaggatatacgcatgtcatggtgatcggtggtggcgcaccgctggtggcagatgcaattcgcgagcaagttaatattcgtgatgaccgtttcttcgtggcggatgacccgcaacttgctcttgttcatggcctgaaagcaatcggttaa

SEQ ID NO: 469434 - DNA, 285 bp, Shigella boydii; identical to SEQ ID NO: 26828

SEQ ID NO: 469435 - DNA, 804 bp, Shigella boydii
atgcttgattcaataggtgaagttaaagccttcaaaattctgtcagatgccggtatctctacaccagaatctataaccataagccgggcagcgtctgtaaaagcctcatcactcgccagcgccatacagggaatagttcacgccgataaaacctatcctgattctgtttcggcctggactactcaattgcttagcttttctgaacagctcaatgaggccagcaaagcgtcttcattactggctgattctctttccccatacaccaagccatcagagctgttacagatgaagattggctgggaatgctacgtaaaaggtaacgagctgacccccatacctgctttcgcccttgttgaggggatggggaatgtttccattccgcaatctctaacggacgcattgacggcgctaaaacttgatgctctgaaaactgccatgaacgccattaacgcaaaaatagaagctgctggaagtgctggtggtgatagcaatagtggacagggtggtgctgggggcgctcaggctccggtcattactcaggatgaaattgatgctctacgggaagcagtgacagccgccgaagttttactctccgaaattaactcagcaagtgagagtgtcgtagcccttacaggtcgcattaaaacgtcaaccactcaggcaaccaaaggtttagagaacgctgtcgccatcacgttaactggttctctactggatgatgcagtaatgagtccggcaatcagtttaatcatgccacaaggcgttatcgatgcgctccaaaagaacaccaaaaaggaacaatag

SEQ ID NO: 469436 - DNA, 333 bp, Shigella boydii
atgaaatcactcgtcttgaaaatgcgttacgccgtgctgggattaacgatgtacgtgtgcctgatgacgttatcaggatgcagcgggaacgggcaaaagccatcaaccagcgtgccagtgaaaattaccgtagaagccaccagcaggccgcaggcaaatctgattgactactccccttgtttagtgccagaagacacgccagtgctgttaaacaagtatccgacatacgctgaacagttattcagcacgatcgacgaatgcaaccaacgaaacgcactgaataaccaaaaaaacagggagatttgggaagggaagggggatcaaggctcctga

SEQ ID NO: 469437 - DNA, 459 bp, Shigella boydii
atgagtcacgttaacccctcaaaaacacaatatcgcttaatgctggcgatcgcgtcagctataccaaccagcctgaatcccccgacaggctatcccgctgttgttgatgattgttttcagtattacggagaagacatcctgagccagtcaaaagcgctcaagcagttatgtaaggcaggtattcttcactgtatcggagatccggacgattttgttgttatgctggcggatcgtgactcttttctactgtcctggaaagctggtgcgcgcgaagcacgtttggggaatggtattggttacatagactatagcgattgtccgctggcatttgctggtggatatatgcattggcatgagcgaaataggggccgtcagcgtcagtatcgtttgagtgactttaacgtctgtcacggtttcgaagaagctgacagccaggacatctggcttcaggagccttga

SEQ ID NO: 469438 - DNA, 435 bp, Shigella boydii
atgtgttttaattttaattttctaacacaaaacattagagttatggcgtatcgaatctttgtttcgtataaaaatggcgctaagagccactctctgaacacaacaagtcgctttcttgttgaggcgcagttggcatcaattcttgccgaaagtgagatactctcgctcgctgaacggatcgttatccagttttctggtagagatatactcaatgtccccaccctcaccccggcatccgaagttatggaatcaattaaatggcctgtatgcggatgtcctgccagggttgaagagccggtaactgcaacgctctacatgccgaaagctgtaagagattggcttgctatggttggcaatgggaaagtcagtgctggacttcgcaagttaattgaaatggcagatattcctgagttaaaaaatgcatggcgacaatga

SEQ ID NO: 469439 - DNA, 1698 bp, Shigella boydii
gtgaataaaaacattcagccagctcgtgatcgcgagcgcgagattatgaatcgggcggcaagcgtcatggctatgaccgtcgatccgaccaccgatgcagcaggcaacatgattgctgaccaggcagtaatgatggaaaacctggataaagcaatccagaaagtgcctatgtttgaaggcgtaaatccagaggtcgctcgtcagatcactggtgggtgggctatgtctctgcatgagtataaacgtcaacatggtcattacccggcaagtgacatcctggcgaacgcacacatggctcttgaacgcctgatgactgaatgtgccagtgatacccatgaaggcacgggtaaggcaatgtttgagtctgtcgcgcaatcaatgcgtagctctgacggcgtaatgaaagttgctcaatatgctgctctaattctgcctgcttctctgggcgctgctaccagtgatgcctgtacttttgttccttgtgatcgtgacgagtcaaatatttatgaactggtcaacgtagcaggcacaaaattcggcaccttcaaccaaggtgacgaactgaatatgcagtcagctggtgtttattctcaaatgaagcgcctgtatgccctttccactaaaggggatggcagcaccaaaaccttccagttcaacatccaacaatttgagggacaatcctgcccgcttcgcgctggttataacaaactgctgatcaaccgcaaaccgtccaaagttgacgacggcgatggcaacctttatttcaatgctaaagacagcaaaggtaatactttctcagcgactgccaaagttgcctatgacactggtgtcattgacattacatttacccaggctccgccagtaggtactgaaattgctgttcaggtcgaaattaacatcgagcgcaatccaagcctgattccggtgatcaaccaggctatgcgtaagtacgaagttcgtccgtcccagtacgtacttgcttccgaacacacggtaatgtccgcatccgatttaagccgtgagcacggccttgaattagcggcacttcagttctccgcgatgcgtaactggatctcccatgaaaccgacatcatgcgtctgcgcaccctggtattccataccgtttatggtcgtgaatttgatgtggctctgccggaagctcaaaactatgagtcctgggtcggcctcctgcgtcacgcagtaaacgctctgtctcaagaaatggcaaatcgtaccctgacaacgggtattcgtggcggctttgctggtagtgacgccgcgaacttcctgcgctctctgcctccacagcacttccagatcgcaccaggttacgttcagtcgccgtatgtacagtacatcggcaccctgtttggcacgattcgtatttacgaagtgccgcaacctgtctgtgagcaattcaaggcacagggatatgacttcggactggatgacatcttcttctatgggcgtggcgaaggcatcggtaaagccgggctgattgctggtgatgcagtcccagcaatcccttacgttcacgaaaccaatccgtctctcgttaaccgtaccactctctggggcagtgccatcaacgaagtacatcctcgcaacggtgaaaactacttcacccgcctgcgtctgactcgtgccaaagaaggtgctatcgacatgctgacaggcaaggttaacgaaaaaaagtga

SEQ ID NO: 469440 - DNA, 279 bp, Shigella boydii
atgtcaaacattcaagtaactatcacgccacctgacgcaacagacaaatctttcactgttgagtcagatcaccctgatattgtccaggttgatggcactacatgtaccgctcttaaggccgggcaggcagtgctgacaatcaaaacaaatgacggcaataaaaccgcacagtgcacagtcactgttagggaggcacataaaagcgtaaccgccgtcagtgttgaaccaactacgaaagaagtaaccgtaggcgataacttcacggtaagcgaatcctga

SEQ ID NO: 469441 - DNA, 1659 bp, Shigella boydii
atgaataagattagtttttcggtagggcaggcagctggcgttgctgtaatgtcagtaaatgctgacgcaaccctcaccaataccagcggtggcgcatccgtctttgctgggcttgtaatatcgcgtcgtggcgcaccgggtaaggtactgaaagttgacgatacgacttatcaaagcgtattaggttcaccgattcaccctcgcctgggcgcggcatttgaaccatatcgccacgtggagcgtgcagtaaaaggcggctctggatatgtcgttcgagtttgcgctaaagacatgaaggtgccgggtatttctgtttccgttgtgggcaaagcaaaagcggcaaaggcgagcaaagaactttccgttgaacctactgaaaccacagcaaatccaggtgacacattaagcgttggtgttgctccaactgcaacgactcaatcagtgaccttcacacccaaagagacgccccagattaaaggtggagagaaggcattattcttcatcaaagatggtgatgcatctcaaaatcgcacgttatcactaactcgcgatgatgaagaaagcgaactctttacgctgacgctgaaagaaaaaaaaaccgatgggtccattgaggtgctggaaagccaccaagtgtctttcaatccagaaggcaccaacgacatgggccaaccagcatggattccgacactgcttgaaagccagtccactcgcattggtgccgtactggcagataatgcagaagcatccgctgctcaactcatttttgaggatgtggcttttgaaggtggtactgatggaaatctgtccgaaattgccgctgcagactatctggaagcattaaaggttctcgaagcttcagaggttaattacaccgcattgctgtcattgggttgttatgacgcatccgccttagccgcaatcaaaaagctggctgaagatgttcgcgtagacatgttctatgacctgaagggcaaccagacacctgaaaacgctatttcagaagcgaaaagccatagttttggcggctcacatcaaccaagccgttactacttcccgctctcctgccgagatactttcactggaatgaatgtcgtctatggcattagctgcgacgcattcgtagcgaaggcaaaaggagtggcgctggtaccggatgttggtggttggcattacgcaccggcaggtatatcacgcgcgattattgatcgacagaacattgcccgaattccaaatatcggtgcagttgatcgtgaagcgttcgttcttgcgcgcattaatccagtttcagttgctgctgacgggtccgtttacattgacgactctttaacaacttacagcaaaaacaactatctgcgattccagcacgtatcgtccctgatgaacgctatcgcacgcaatttctacgaagttgctcaggcgattaagcacgaaccggatggcattaccaaagaagcgctaatgaaagcaatgactgaattgcttgaccgttacgttgcagccggtgcgctggttactccacgtgacaagtcccagggtgaagatccatatgttgttcaggttgtccaaaaggacatcgatctgtgggaagtggcctggtctgtttgtccgaccggtacagctcgccgaatcgtcggtaagccaattctgatgcgctga

SEQ ID NO: 469442 - DNA, 735 bp, Shigella boydii
atgaaaaattatactgctgatccgtttatgcgtgcgattttcggttctggctgctttgaaagcggtgataaatccactcaggacaataatgataacgccatgctggaaagcgcaggacagaaaggaaaggacactcaaccaaagcccaaagacgacattgaaaccgcgatgatggaagcggttgaatcccgtgcacaaggtgatatgcgcagcctggcagcgtccatgcttgctggttgggttgaagatggtgatccggaggctgactcatttgatgcattagcaatcactatggctggcctggctgatatcgatgaaggcaccgatttcaccgatgaacaaatcgatgcttataacgatgctctcgcagctcttgctgatgcagctgttgcgcttggcgctgatcaggacgatgtaaccgaaatgatcgacgatgaagatgactcagctgccgaacgtgtttttgacgctctttccgaaagcgacaccgacatgatggaaacagctattgccatttacaccgttgctggtggtgatagcgcaatgctggaagcggtacgtaaaaaagtggttcgtgatggcaaggttaccatcatccgtaaacgcccgcgtcctcgccgcatgacgtcattgcaaaaacaggcgctgaaaaaagcacgccgcaaagcacatacatccgtagcgaatatcaaccgcaaaaaatcaatgcgcattcgcaaaaaacgcggtttgtaa

SEQ ID NO: 469443 - DNA, 549 bp, Shigella boydii; identical to SEQ ID NO: 26820

SEQ ID NO: 469444 - DNA, 492 bp, Shigella boydii; identical to SEQ ID NO: 26819

SEQ ID NO: 469445 - DNA, 552 bp, Shigella boydii
atgacaccaaccgaattattagaaagcgttaaaacgcgatttaacccactgcttgtgcgtgaagaagacacgctgaaagccttcctgattaaagcgctgaccacgtatcaggacagggccggggtagtgaagacactaaaactcgaaaaagctggtggcaccgcaatcccattgccggaagattatctatcccttgttcacgtcaccgacagcaatggccttttggtctattcggatgaactatccggctttattgaattagagctgacaggttcagaacgatggccttttcggatgctgtatctggttaatctccgcgacagaaaactggacgaatggcaagtgccgcctgcaatcattggtatgttggaagaatacctggaggcgcttatcaatgtcagaaatgtcgcccgccagcgtcgagcgtccatcgacgggaaatttgactactcagatctacctgatgaagccacgttatatgcccgcgttcaggagattgaagaaaaaatgtcctcaaaccgggcgattattccgggggctaccattttttaa

SEQ ID NO: 469446 - DNA, 708 bp, Shigella boydii; identical to SEQ ID NO: 26818

SEQ ID NO: 469447 - DNA, 756 bp, Shigella boydii
atgaacagagcggaattaacagcaaaagccgtcagcctgattgagtcagcgacacctattagtcgtagtctggcacaagccaatgagatcacggaggctgcttatcacctgactcgcgaccaaaagcgactgttgtttattgtggtgggaagacttcgctatgcttctaaggatggcgttcttggttcaggtgcctgtgagttgacggtcaacgaatatgcagagatgtataatttgccctctgctgaagccagcaaggatattcgtaaggccatttcagggcttagcgagaagaaagttacgatatataaccctgatgaatcgaccgaatcagaagacagttatgagtcttatccctggatgattaaggatgcctattcaccacggcgcgggacttacattattcatcttaatccatatctcatgccgttttttactctgcttgataagagattcacaaggctgaattttaccgaagtatctcgccttacaaatccttattctatgcggctttatgagtccttatgccagtacaggaaggatgatggaagcggctttgccatacttggcgtcgaatggatgcgggagcgttatgggttaccaaaaagctatcagcggtatgccgaatttaagagaagttttttaacgaaggctgtagcagagattgaaaaaaatacaaaaatgaaaatagtcttctcagaggtgacggaaggcggcaaagttaccaggataaaatttacctatcagcagtcttaa

SEQ ID NO: 469448 - DNA, 822 bp, Shigella boydii
ttgaacattccaaaattcccattgccttcccgtcctgagacagaaattcagttccacgcccctaccgtgaaggatgcgctgaaatattctgacctgaacccggcagaagatgaggcaacgactacagagtaccttaactctatgcaggatggtgaaattaacgacagtgctaactggacagttcaggaccgcagaactgctctttggtggatatttgttaattcgcgccccgatgcagtaatgacctactcctatgagtgcagtcactgcggtaatacgcatcatgccgatattaacctgagcgacctggcccaaacagtagaaatactcactgtacctccttacgtgaaaaccaacgtaccagtaaatggagtaccaactgactggatacttaaaccattaaccgggaaaggcgcggaactccttgaacgaatgcgagcgtcacttcctgatatgaaaagtcccgaatacagtgctggcgtagcacggatgcgaattgctgaactcgctttatgcacggcgcttaaagacgatccggaggacttcacgcaggccgctaaccgacgctttgacatcattgaaagcatggcgcttgaaaccgaatttaccccgcttgtggctcgcatacagcttatgcaaaaagacctacgccacggcctgaaaatgtctattgagagaggctcaagccgactgatcctgcctccgcaacattgcaaaaacgctaaggagggtgcagatgtgacaaccacactgtacgtcccctttctcaatagagagtttatcccatcaattagatctgaatggatggctaaccattattaa

SEQ ID NO: 469449 - DNA, 3888 bp, Shigella boydii
ttgaaagagaataaagaccgtatcgcaataattgacgctattcagggggcgagcacaaacgaacttaacgctcttgctgagatcaaagacgccattctctctggtagagggtctataactcaacttggtgaaaatcaaggtaaagtaagtcaaagactatcccgtagactcatagcaagcgaaccctatgtctctgatgatgccaagaatacccaagctaacccatatataaaacgccttccgatgaaaaaagggaggacgcaggtcaacaacggagaagaacgtctcattgttgcaaccaacacatcagagcgcgttcattttgcgtcatcacgccagtcagcccaaaagttgaaaggttctgtgccattagccgctaattctgctcctcttgaaccacaatccccccaaagccaaaaaggaccgcttcgggatagtaacggacgctttgtatcccagaaaaacaacgaagatatagccagaaaaaaagaatggcagaaagcacataaggccgacgccaaactacaagaaggcttcctccggaaattaggctccattataggggtagatggcaatcagtcttccagtgaagagtctttaacagatgccgcaggtgttggcgctggtggtccgttgtggatggctgctcgcggcatgtacgacattactaaagagatcacaggtaaagcagaatctcttaaagaatgggtagaaaaggggaaaggtgaggcttcaccttcgaaagcgacatctccagctatcacttatccggcggtggttaatactcaaaaagcaacctctgcaacagcatttaataatgctgttgagacaaaatcagcacaagcagtagaagagcaaacaaaaattcttcagaccaatgacaacaaaataattgatggtctggaaaatgtctccgacgaagtagttaagctacgcaaatcagtatcttctgggaataagttcggcttaagtgatctctggagaaatcgagcaagcagaagaaataaaatcaatattggcgatcaggctggtaaaaataaacggaacaaaccgaaaaggaaaggtcgcaatctggggaaaaaagccctttctgttggtgaaaaagccgctgccggaaccgctgctgctggagctggtgctggagctgcaaagactgttaaaacaaaggttagtaaagccaaagacatcagcaccacaagcgacgcatctaagggtattgctaaagaaacaaaaaacacagcaaaggcagttaagccagcaggtgttgttgccgaagaggccacagttaaaacaggtgaaactgttgcaaagaaaaaaaccgaatccgtagccctcaaaagtgctgcaaaaataggtgttaaatcagctgcttctacagctgcaagagctatccctatcatcggttcgctggctatggcgggatatgacgctatagatggttacactgatacagatgcgcaaaaggcagcctttggattaagtgacgatgatgctgtagccgaacagcaaaaaacggcttacgcaacagctaatgtgctcgatatggggggcttggtgtcgggcgcaacgaacttgatagggaaaggaatttctgcgctaggatttgaaagagcaggtgaaaaacttcagaattttgataccggagatattgctcgtggtgttaacggcgcggtagatgtcaccaaatctgtttttggtagccttaaggatacatttttatccactgacgaaaacacgaaacaagtaaaaaaagctgttgaagacggcaccaaaaaaactgtcgatgcgattcattctctaggtgaacaattacaaggtgggcgtaatggcgaggatggagttggtgagcacgggtatacttctccaactgaatttagttcacctgccaacaacaccattgcagcggatctgaatattggcggcagcaacgctaaaaaccgcaattaccgaaataataatctcggcaatcttgtttttgccaaccaggaaggggcgacgctggaatcgccaaatgcaaaaggtgaacaacgttttgcgcgatttaacacacctgaagaagggatcagggcactggcaaaccaggtttccagctattacaacggcaccagtgccgcagcgggatatcagaagttacagacggtatccagcatcatttcaaaatgggcaccgccaaatgagaacaatactaaccaatatattgataacgtcagtaaatatcttggtgtatcgcctaatgaaaaaatagatgtcagcaaaccagaggttatgacgcaattagttcgtgcaattgcgacgaaagaaggtggaaatccggcagttaataatgagttcattaagaacgcacttggagcatttaacacaaacactggtcgatgggagggacaattctctgacgaaacattggcgcggattaataaaattcagaaagaaaatggtggtcagctaattgcccgcgattcgcaatatagtgttggtcgcaaggtaaaatatgctaatggaaaatctccagctcaaccagttttgaatgccgttccgacagcaacacaacagccaattgaggttgcacaacatgcccaggcagtcaaaaagccacaaaaaacaggtaaccaaccacaaccgattaatccagagaacgctgatgttaataccggctctccatcgagtttgcttgagcggttaatcgcaataaatgaaagcggaatcagtggtgcaagtaatttatttggcggcgcggctaccagccttgctggaacaagtctggacctggtaaaggattttgcgttggctacttcgtttggttctatatcttcgctttccgaaaaagcgaaaggaatggatcaggctcttactgaaaagatatccggcttaaccggtaaatcttttggatttaaaaaagcttctcaagtggctgatatcgcaacagccatacaacaaaaacgcactgttaatcacgatacagaaatcattgatctacttccgggagatcaagtatccccttctactccgaaaactccacagcaggagcaggctctagcaatcagccaggctatggagggcttttcatctgcagcgccagcaccgaaaaccccacagcaggagcaggctctagcaatcagccaggctatggcgggcttttcgtctgcagcgccagcaccgaaaaccccacagcaggagcaggctctagcaatcaaccaggctatggcgggagctgcgccagtagttacctctggaaaacgaactatcacggcaccaagtgatgtgcagatttatgacaacggctacaaggtggttacaggtgaggataagagcttctttggttcgctatttgattccacggtgtcagggcttaaacagacaggaaccgcagtaattcctgccgttggcgataacctttcacgacttgttggggggattgatagtacagggatattgaacgatcttgtaatgcagtctactgggcagaatagtgcgattgcgcgagctattagcccattaacaagaaatgttggagactggctgaatggggggattcaacaaaccgctaatagcattaggggaatagcaactggtgccaataacgccatatttggctctgcttcagctgtgcaagaaccttttcttgctatgccgccacaactccctactgtaaccgatctcgcacgaagcggaataagacaaccattaactactgacactataaataacgatcctgctatgttgaaggcgctggataacatctgctctatcctgaacgatctgctgaatgtgaacaagaacaatacaaaaggcgatccggataatgttgtcaaaacatcgcagccgcagccgcgaccacgtgcgagcacaactattaatgaccagtcgctggatgctctgcttgaggattaa

SEQ ID NO: 469450 - DNA, 375 bp, Shigella boydii
atgctttacgaaatagacgcaagacttcaaacgaatgagagcggtgtcattattgcagaaggaagtaccgcagcatggatggcccgacttgacgagtggctacgaacccctgaagggagtgtttatggtttaccctcttgggggagtccaatggaagaatttaagcatgaaccattcggctctgaaacttcgcacatagttgaagtggctattgaagggagaatgatgaaaaaactacgacaagacttgccaggtttggatgtgcaggggattcgttgcacatcaatttctgaagattctttattaattagtttttatgcgaaaggtgggagcatggatattgttatgcagaaatcaagtggggtgggcgcgtga

SEQ ID NO: 469451 - DNA, 1431 bp, Shigella boydii
gtgacgattacagaattactggacaaatttaacgccaagttaaatgaaaacacatggtggtcacgatttgtaaatagtcagtttgtgcagatgcacgctatattcggatcgcagcttatttatattgcccgtacatttgcaagccgcggcctcactgagggacttatttcaacggcaacgcgtcgctcaagtattttagcggttgctgaagaccgtagctacgtagggcgatttgttagtgcttcatacggaacaacgtctataaccaataaaactgatcgggatattacgttaccagccggggctgaattgcttgccaatgaccaaacacctttggcaattattaacagtgttgtaattcctgctggaggaactgtttctggcgtagaaactaaacagcatgaagctgttagcattacatttgatattgagaaggaaactttatttctgacattgttgctttccagagagttaacaaaagaagtctctagcctggatgtttatgttattacagatggagtagaagaaaaatggacatataacccattatttagaatgtccagagacaagagtaagcactattcattggcatataaacctacagaacaacttggagtcaagtttggtgatggttctatgggtatgatgcctccagcaggctgtcaggttcgaatcgatgttatggctagccttggcgactatactttggctgaaggacaaaagttagaaccggctggaaatatcgctcaatatgtggagtcactagagtttaaaactgattcgatcattaccggtggtagtggtatggaaactacagaagaaactcgaaatcgtgctcagtattatgttgcatacgatgaacaagtggtatggggcggtgattatcgccaattcattcagaatgttgttcatggaacttcatggttgaacgtttggggcgaagcgttacaagagaaaataactgggtttgacgttcgaaacatcaacaaaattttcttttgcggacataagccgggtgtaagccaggctcagctaaaatcagaaatactgaaagccctggagaatgtgccaaatgaattgaacaagcggttcgagtatgtagatacaaatgaacagccatttactataaattttataggtattgtacgtaaaaatgttctgatagacgatgctcaaaatgctattaaagcagcgttggaagataattttggccgtgattcgtcatcattcagcttattactacagagtgatgatgattcccaacaatgttatgcacaggtaaaagttaaagatatttggcgagtaatagagtctctggatatgtttctgtcttacgacataacaatacaaaatatgaaagatgctgtttactttaatgacttcatttatcttaacgtaaaatcttcaacgttcagcatttcttacccgtaa

SEQ ID NO: 469452 - DNA, 846 bp, Shigella boydii
atgaaagataattggcttaaggaacgattaactaaagtaaaacaggattcacatctctggagtgcatttatagacgctttacaggatgtctggaatgaggcagtagaaccaatattaacaagaataagtaacagaaaatccttcttcactatggacagtgaggatatggatgcccgcattgctgaatacgggcgttttttcgttatcactgaaaaagataaggaccgtaggccaatgctgctggcgcaacgtttagatgaagtgcactttaaaggcactatcttgcctattgagcagacattctggcgtgaattcggttgtattcctgttagttgggaaccgctgtatgcacctgtaaatatagaaaaacacccctatggttcatattttgcgaccgaaatagaaatacctacggcacaggctcaattcggtgagttcttcctgacatcaagggggctggtcgttgttgatcagaacaagctatatcgctcatatggagagcaggataaagaagccgctgtgcagaaattgttatctgacttcgaaacagtaatagcccctttgttgccattgcatattgtttttgatggcgtctcgtttcggcttagtgctgtattccctgaagtggcagaaatactaaattgcttgtctacggatgtttcggtaattgaaggtgtttatgttactgagagtatggctgatatgctatcccatagtgatacctccagccaggtagacaatatttctcttaacgccataccgaaccgaacggcagaaaagcaattacatcttgatgtaaccccactcgatgcgtggcctttggattaccaccttcaacctgtttaa

SEQ ID NO: 469453 - DNA, 447 bp, Shigella boydii
atggctgaaaatttaaaggtaagagatggtaaccgcctgtataaggcgcaattgctttcctactattattcacgccgcgctgagtcggcgatcggcaaaggtgcgcgttttgttatctctaaggcgtattggtgcaaatctagtctggtaactgctaatggtgcaggaggctggaatatagcggacattccactcaattttaaattgagtaacgctcaacagtttgctgtgtccgatctgatattgtccagtgtggatgggattatcactatcaatgcagccttccctcaagaaaaaatgccggataacacgccttacgactttaacacgcttgtgcttgttgatgctgaggaacaggcttttgctgtgctttgcacccagcaagacaccctctataaaggtaaacgttacagtattctcatgacaatcgagcaagttgagggttga

SEQ ID NO: 469454 - DNA, 144 bp, Shigella boydii
atgtcctggattatcttagttattgctggtctgctggaagtggtatgggccgttggcctgaaatatacccacggctttagtcgtttgacgccgagtgttattaccgtgacggcgatgattgtcagtatggcgctacttgcctag

SEQ ID NO: 469455 - DNA, 393 bp, Shigella boydii
atgagtaaagtgaaaagtatcacccgagaatcctggatcctgagcactttcccggagtggggtagctggctgaatgaagaaattgaacaagagcaggtcgcccctggcacatttgcgatgtggtggctaggctgcaccgggatctggttgaaatcagaaggtggcaccaacgtttgcgttgatttctggtgcggcactggcaaacaaagtcacggtaacccgttaatgaaacagggtcaccagatgcagcgcatggctggcgtgaaaaaactgcagccaaacctacgcaccccccgtttgttcttgatccgtttgcgattcgccagatcgacgcggtactggcgactcacgatcacaacgatcatatcgacgttaacgtcgctgctgccgtga

SEQ ID NO: 469456 - DNA, 459 bp, Shigella boydii
atgattgaaatagaatcacgcgagctggcagatattcccgttcttcatgcttatcctgtcgggcaaaaagataccccgttaccgtgcgtaattttttatcacggctttacttcatccagcctggtgtatagctattttgccgttgcgctggcgcaggctggtttgcgggtgatcatgccggatgcgcccgatcacggtagccgttttagtagcgacgaagcgcggcggttaaatcaattctggcaaatcttgctacaaagtatgcaggaattcactactttacgtgcggcaatagccgaagaaaactggctgcttgatgaccgtctggcagtcgatgggcgcgatgacggcactgggaattaccgctcgccaccccacggtgaaatgtaccgccagcatgatgggatcgggctattttacatcgctcgcccgttcactgtttccaccgctgatacctga

SEQ ID NO: 469457 - DNA, 174 bp, Shigella boydii
atgaaaaaaagaaattttagcgcagagtttaaacgcgaatccgctcaactggttgttgaccagaaatacacggtggcagatgccgccaaagctatggatgttggcctttccacaatgacaagatgggtcaaacaactgcgtgatgagcgtcagggcaaaaatcgaaatacgtaa

SEQ ID NO: 469458 - DNA, 231 bp, Shigella boydii
atgttgaagcgcctactaaaaagaccctctttgaatttactcgcctggctattgttggccgctttttatatctctatctgcctgaatattgccttttttaaacaggtgttgcaggcgctgccgctggattcgctgcataacgtactggttttcttgtcgatgccggtcgtcgctttcagcgtgattaatattgtcctgacactaagctctttcttatggcttaatcggtaa

SEQ ID NO: 469459 - DNA, 306 bp, Shigella boydii; identical to SEQ ID NO: 459937

SEQ ID NO: 469460 - DNA, 927 bp, Shigella boydii; identical to SEQ ID NO: 467061

SEQ ID NO: 469461 - DNA, 153 bp, Shigella boydii; identical to SEQ ID NO: 463099

SEQ ID NO: 469462 - DNA, 348 bp, Shigella boydii
atggacggcagccagaagttaccgcagcgtctgctggacccggtgcgtctgcacctgcaaaatggcggcagctggcgtcacctggcgctgggcgtggctggctggatgcgttacacccagggcgtggatgagcagggtaatgccattgacgtggtcgacccgatgctggccgagttccagaagattaacgcgcagtatcagggcgcagaccgcgtgaaagcgctgctgggcctgagcggtatttttgccgatgatctgccgcagaatgccgactttgttggcgcggtgacggcggcatatcagcagctgtgcgaacgcggtgcgcgcgagtgtgtggctgcgctgtaa

SEQ ID NO: 469463 - DNA, 831 bp, Shigella boydii
atgtctatgccattaagcaatgcccttcagagtcaaattattacagataatcacttccttcatcatccaaaagtcgacaataagttaacacgtgaatatgaatatacacgcatggatacggaaaatatctatcttctgcctcttactcgtggaaataaccataattacgatggaaaaagcgttgtcgaaattagaaaacttaatattggcaaacagtcctggccatttaattatgcgacagatacatgcagagaattcaatggtattacaacaacaggacgtatgctctatcgaaacttgaaaatcacctcagctttagacgaaatatatggtggcatatgtaaaaaggcgcatgctgctacagagttagcagaaggtttacggctaaatttatttatgaagagccctttcgatcctgttgaggactatacagttcatgaaataacattaggccctggttacaatgttcctggttatgccggaaccacgataggatatatttcaacccttccagcttctcaggcaaaaagatggaccaatgagcagccaagaattgatatctatattgatcagataataactgtctcaggggtggcaaattcttccggattcgcccttgccgcattacttaatgctaatattggaatgggaaatgacccaataattggtatagaagcctatcctggtaccgcggagatccatgcaaaaatgggatataacgttatccccggtgatgaagatgcgccactcaaacgcatgactctgcaaccgtcatctcttccagaactgtttgaattaaaaaatggtgaatggaattatattggcaaataa

SEQ ID NO: 469464 - DNA, 3474 bp, Shigella boydii; identical to SEQ ID NO: 463131

SEQ ID NO: 469465 - DNA, 315 bp, Shigella boydii; identical to SEQ ID NO: 463533

SEQ ID NO: 469466 - DNA, 378 bp, Shigella boydii; identical to SEQ ID NO: 465226

SEQ ID NO: 469467 - DNA, 528 bp, Shigella boydii
atgcagcatttaaaaaatattaagtcaggaaatccaaaaacaaaagagcaatatcaattaacaaagaattttgatgttatctggttatggtccgaagacggaaaaaactggtatgaggaagtgaaaaactttcagccagacacaataaagattgtttacgatgcaaataatattattgtcgccatcaccaaagatgcctccacgcttaaccctgaaggttatagcgtcgttgaggttccagatattacagccaaccgccgcgctgatgattccggtaagtggatgtttagggacggagctgtggttaaacggatttatacggcagacgagcaacaacaacaggccgaatcacaaaaggccgcattgctttccgaagctgaatcagtcatccagccgctggaacgcgctgtcaggctgaatatggcaacagacgaggagcgcacacgactggaagcatgggaacgctacagcgttcttgtaagccgcgtggatacggcaaagccagaatggccacaaaaacctgagtaa

SEQ ID NO: 469468 - DNA, 534 bp, Shigella boydii
atgcagcatttaaaaaacatcagatcaggtaatccaaaaactgttgaacaatatgaattgacgcgacaatttggtgttgtctggttgtattctgaagacggtaaaaactggtatgaggaacaaaagaacttccaggatgacactataaaaattgcttacacatcagatggagttattgtggctataaataaagacgtatctacaataaatccagaaggtttaagtgtggttgaggttgctgacattaccgcaaatcgccgtgctgacatttctggtaaatggatgttcaaagatggcgtagtgataaagcgaacttataccgaggaagaacagaggcaacaagctgaaaatgaaaagcaaagcctattgcaacttgtcagggataaaacccaactgtgggactcacagctacggctgggcatcatttccgatgagaataaacagaaattaaccgcgtggatgctatatgcgcagaaagtagaatctacagatacctccatcctgccagtaacgtttcccgaacaaccagaatga

SEQ ID NO: 469469 - DNA, 906 bp, Shigella boydii
atgatctggcagcctgagttcacagataaaacactctccaggaaacccggggcggttcagtatgacgtcctgcgccagtatgtgctgatgcccggtaaagttcatgcggatgatatccccgttccggtccaggagccgggcagtggtaaaacaagaactgcccggctgtgggtctatgtccgtgatgaccgtaacgccggttcacagatgcccccggcggtctggttcgcgtacagcccggaccggaaaggtatccatccacagaatcacctggctggttacagcggtgtgcttcaggcagatgcttacggtggttaccgggcgttatacgaatccggcagaataacggaagccgcgtgtatggcccatgcccggagaaaaatccacgatgtgcatgcaagagtgccaaccgacatcaccacggaagccctgcagcgtatcggtgaactgtataccatcgaggcagaagtccggggatgttcagcagaacagcgtctggcggcaagaaaagcaagagccgcgccactgatgcagtcactgtatgaccggatacagcaacagatgaaaacactgtcgcgtcactcggatacggcaaaagcgttcgcatacctactgaaacagtggaaggccctgaacgtgtactgcagtaatggctgggtggaaatcgacaacaacatcgcagagaacgccttacggggagtggccgtaggccggaaaaactggctcttcgcgggttccgacagcggtggcgaacatgcggtggtgttgtactcgctgatcggcacatgccgtctgaacaatgtagagccagaaaaatggctgcgttacgttattgagcatctccaggactggccggcaaaccgggtacgcgatctgttgccctggaatgaggtgtactggcaatag

SEQ ID NO: 469470 - DNA, 1455 bp, Shigella boydii; identical to SEQ ID NO: 465244

SEQ ID NO: 469471 - DNA, 252 bp, Shigella boydii; identical to SEQ ID NO: 462650

SEQ ID NO: 469472 - DNA, 267 bp, Shigella boydii; identical to SEQ ID NO: 463950

SEQ ID NO: 469473 - DNA, 843 bp, Shigella boydii
atggttcggcatggtgaccatttcaccttcgccctgatagttttcgataaccagtttcaccggatcgataaccgccattgcgcgcggggcgttttcgttgagatcttcacggatgcaggattccagcgacgccatctcaatggtgttgtcctgcttggtcacgccgatgcgtttgcagaactcacgaatagaagccgcagtgtaaccacgacgacgcagaccggaaatggtcggcatacgcgggtcatcccagccttcaacgtgcttgtcggtcaccagcaggttcagcttacgcttggacatcacagtgtattccagattcaggcgcgagaattcgtactggcgcgggtgaacaggaatggtgatgttgtccagcacccagtcgtacaggcgacggttgtcctggaactcaagcgtacacagagagtgcgtaataccttccagcgcatcgctgatgcagtgggtgaagtcgtacatcgggtagatgcaccacttgttgccagtctggtggtgttcagcaaacttaatgcggtacagcaccggatcgcgcatcacgataaacggcgacgccatgtcgattttcgcacgcaggcaggctttaccttcttcaaaaccaccggcacgcattttttcgaacagcgccaggttctcttcaacgctgcgatcgcggtacgggctgtttttacccggctgcgtcagggtgccgcggtattcgcggatctgttccggcgtcagttcgtcaacatacgccaggcctttgttgatcagttcaacagcataggtgtggagctgatcaaaataatcggaggagtaacggacgttaccagaccagtgaaaacctaa

SEQ ID NO: 469474 - DNA, 672 bp, Shigella boydii; identical to SEQ ID NO: 465269

SEQ ID NO: 469475 - DNA, 147 bp, Shigella boydii
atgacgctgtgggcgctggaaaatatcgcgacctatcagcaatatggttccgtcgaagcggcgctggcagccggtaagaccttccatatctgggccaagccgatgctggactcctttattttccttggggcagtggtgcgactttag

SEQ ID NO: 469476 - DNA, 447 bp, Shigella boydii
gtggcgttcattattgatgtgtttgccggatacatcgtggggtggcgggtctcatcgtccatggaaacgacattcgtgctggatgctctggagcaggcgttatgggcccgtcgaccgtccggcacggtccatcacagtgataaaggttctcagtatgtatcgctggcctacacacagcggcttaaggaagccggattactggcatcaacaggaagtacaggcgactcgtatgacaacgcgatggcggagagcatcaatggtctttacaaagcggaggtaatacaccgtaagagctggaaaaaccgtgcagaagtggaactggccacactcacgtgggtggactggtataataatcgacgattgctggaaaggctgggccacatccctccggcagaagcagaaaaagcttattatgcttctatcggaaacgatgatctggcagcctga

SEQ ID NO: 469477 - DNA, 366 bp, Shigella boydii; identical to SEQ ID NO: 461917

SEQ ID NO: 469478 - DNA, 180 bp, Shigella boydii; identical to SEQ ID NO: 461173

SEQ ID NO: 469479 - DNA, 447 bp, Shigella boydii; identical to SEQ ID NO: 462775

SEQ ID NO: 469480 - DNA, 447 bp, Shigella boydii; identical to SEQ ID NO: 462775

SEQ ID NO: 469481 - DNA, 267 bp, Shigella boydii; identical to SEQ ID NO: 462029

SEQ ID NO: 469482 - DNA, 624 bp, Shigella boydii
atgccatctttatggtatgcaattactgattcattaagatttggaggcgtgttttctgttattaccattatttattggattacaaatcaaggtttctttatattctttcatgacagaatgcctgcagcagagttggtagaaattagagttacgcagaatgtgtttggtgtagttacaatgctaattgcattgtacgactctatgtttttaaagaaaaacatagagaataaaaataaaatatttgattggcgatcttattttaaattccttgtaatttcaattgttttgattacatttaattttattttattatatatattatcaataacaatatataaacatttggatgtttttaaatattcgatatgtcttgcactggcccaatttttttatctttccgcaaggatgcctgtacttattttgaaattgcgctatagtttaagtattattctgtggttatacgtgtgttcgctttttttgtcctcgtgttacttattcttgaaacataatgattatgattttcaatatatagtgcaatctataacattatctaacttctttatttttctattttcattattaatagtgttttacaaagagaggatttatgggaagaattattga

SEQ ID NO: 469483 - DNA, 174 bp, Shigella boydii; identical to SEQ ID NO: 459318

SEQ ID NO: 469484 - DNA, 657 bp, Shigella boydii; identical to SEQ ID NO: 469241

SEQ ID NO: 469485 - DNA, 1866 bp, Shigella boydii; identical to SEQ ID NO: 459907

SEQ ID NO: 469486 - DNA, 141 bp, Shigella boydii; identical to SEQ ID NO: 465328

SEQ ID NO: 469487 - DNA, 471 bp, Shigella boydii
  misc_feature (364)..(373): n is a, c, g, or t
atgtttgttaatgcacccgcgatcaatagcataaaatacggtgcccctacccaaacacaaacggcaattactgttatttttgcatttaatggaaccgacagaaaatcaactgaattcattccgatactgttcagaaacgagttaaccggaccaattccatttaaaagaagacgcaaaataagtaacgttacaaatgtgggtatggcatatggcagtataaatatcaatcgccagacttttgcgaaacgtatattttttttagccagtgctaaagccagaataaagccaaaactgaaggtaaaaaccgtcgcgcaaattgcccaaataaatgtccagagagcgacacctagaaacgtatcagacnnnnnnnnnntttttaatcccaacccaatcaaccaggttctttggtgggatgtgatttggcgcagcatagtttgtaaacgatacaagaactgtaattacaataggtaa

SEQ ID NO: 469488 - DNA, 471 bp, Shigella boydii; identical to SEQ ID NO: 468462

SEQ ID NO: 469489 - DNA, 1695 bp, Shigella boydii; identical to SEQ ID NO: 461132

SEQ ID NO: 469490 - DNA, 618 bp, Shigella boydii; identical to SEQ ID NO: 463365

SEQ ID NO: 469491 - DNA, 546 bp, Shigella boydii; identical to SEQ ID NO: 461973

SEQ ID NO: 469492 - DNA, 1080 bp, Shigella boydii; identical to SEQ ID NO: 461493

SEQ ID NO: 469493 - DNA, 1062 bp, Shigella boydii; identical to SEQ ID NO: 468584

SEQ ID NO: 469494 - DNA, 489 bp, Shigella boydii; identical to SEQ ID NO: 461547

SEQ ID NO: 469495 - DNA, 657 bp, Shigella boydii
atgcctgcgatcaatgccaaacgtgtttaccggatcatgcgccagaatgcgctgttgcttgagcgaaaacctgctgtaccgccatcgaaacgggcacatacaggcagagtggccgtgaaagaaagcaatcagcaatggtgctctgacgggttcgagttctgctgtgataacggagagagactgcgtgtcacgttcgcgctggactgctgttatcgtgaggcactgcactgggcggtgactaccggcggcttcaacagtgaaacagtacaggacgtcatgctgggtgcggtggaacgccgcttcggcaacgatcttccgtcgtctccagtggagtggctgacggataatggttcatgctaccgggctaatgaaacacgccagttcgcccggatgttgggacttgaaccgaagaacacggcggtgcggagtccggagagtaacggaatagcagagagcttcgtgaaaacgataaagcgtgactacatcagtatcatgcccaaaccagacgggttaacggcagcaaagaaccttgcagaggcgttcgagcattataacgaatggcatccgcatagtgcgctgggttatcgctcgccacgggaatatctgcggcagcgggcttgtaatgggttaagtgataacagatgtctggaaatatag

SEQ ID NO: 469496 - DNA, 372 bp, Shigella boydii; identical to SEQ ID NO: 11381

SEQ ID NO: 469497 - DNA, 312 bp, Shigella boydii; identical to SEQ ID NO: 457798

SEQ ID NO: 469498 - DNA, 420 bp, Shigella boydii; identical to SEQ ID NO: 459063

SEQ ID NO: 469499 - DNA, 303 bp, Shigella boydii; identical to SEQ ID NO: 458125

SEQ ID NO: 469500 - DNA, 174 bp, Shigella boydii; identical to SEQ ID NO: 459318

SEQ ID NO: 469501 - DNA, 153 bp, Shigella boydii; identical to SEQ ID NO: 464494

SEQ ID NO: 469502 - DNA, 231 bp, Shigella boydii; identical to SEQ ID NO: 468350

SEQ ID NO: 469503 - DNA, 279 bp, Shigella boydii; identical to SEQ ID NO: 468349

SEQ ID NO: 469504 - DNA, 369 bp, Shigella boydii; identical to SEQ ID NO: 462861

SEQ ID NO: 469505 - DNA, 141 bp, Shigella boydii; identical to SEQ ID NO: 465328

SEQ ID NO: 469506 - DNA, 255 bp, Shigella boydii; identical to SEQ ID NO: 460515

SEQ ID NO: 469507 - DNA, 492 bp, Shigella boydii; identical to SEQ ID NO: 461815

SEQ ID NO: 469508 - DNA, 1284 bp, Shigella boydii
atgacctggtttattgaccggcgtctgaacggcaaaaacaaaagcatggtgaatcgccagcgttttttacgccgttataaagcgcaaattaaacagtcgatctccgaggccatgaataagcgttcggtgactgacgtagacagcggcgaatccgtatccattcccacggaagatattagcgaaccgatgtttcatcaggggcgtggcggcctgcgccaccgcgtacatccgggcaatgaccatttcgtccagaacgaccgaattgaacgtccccagggtggcggcggaggttccggcagtggtcagggccaggccagccaggatggtgaaggtcaggatgaatttgtctttcagatttcgaaagatgagtatcttgatctgctctttgaagatttggccttaccgaatctgaaacaaaaccaacaacgccagctgaccgaatataaaacgcatcgggcgggttataccgctaacggcgttccagccaatatcagcgttgtgcgttccttgcagaactcactggcgcgacgcacagccatgacggcgggcaagcgacgggaacttcatgcgctggaagagaatttggccatcatcagcaacagtgaacctgcgcaactgctggaagaggaacgtctgcgcaaagaaattgcagaattacgtgccaaaattgaacgcgtcccttttattgacaccttcgatttacgttacaagaactacgagaagcggcccgatccctccagccaggcagtgatgttttgcctgatggacgtttccggttcaatggatcaatccactaaagatatggctaagcgtttttatattctgctgtatctgttcctcagcagaacgtataagaacgtggaagtcgtatacatccgccatcatacccaagcgaaagaagtcgatgaacatgagtttttctactcgcaggaaacaggcggcaccattgtttccagcgccctgaaactgatggatgaggtagtgaaagagcgttataacccggcacagtggaatatttacgctgcacaagcatcggacggcgataactgggccgatgactctccgctttgccatgaaatcctggcgaaaaaattattacctgttgttcgttattacagctatatcgaaattacccgtcgtgcacatcagacattgtggcgagaatatgagcatctgcaatctactttcgacaactttgcgatgcagcacatccgcgaccaggatgatatttatccggtgttccgtgaactgtttcataaacaaaatgcaacagctaaagactaa

SEQ ID NO: 469509 - DNA, 618 bp, Shigella boydii; identical to SEQ ID NO: 468381

SEQ ID NO: 469510 - DNA, 210 bp, Shigella boydii; identical to SEQ ID NO: 468385

SEQ ID NO: 469511 - DNA, 261 bp, Shigella boydii
atgattaaaatggcggaacatctgaaaggttactggccaaatcaactgagtttctcagaatcatgcggaatggtgatgagaatgctgatgacattgcagggcgcttcaccgggacgtataccggagctgatgcgcgatcttgcaagtatgggacaacttgtgaaattaccgacgagaaggggaagggccttcccgagagtggtaaaggagaggccctggaaataccccacagccccgaaaaagagccagtcagttgcttaa

SEQ ID NO: 469512 - DNA, 618 bp, Shigella boydii; identical to SEQ ID NO: 463365

SEQ ID NO: 469513 - DNA, 261 bp, Shigella boydii; identical to SEQ ID NO: 461695

SEQ ID NO: 469514 - DNA, 276 bp, Shigella boydii; identical to SEQ ID NO: 458859

SEQ ID NO: 469515 - DNA, 135 bp, Shigella boydii; identical to SEQ ID NO: 461398

SEQ ID NO: 469516 - DNA, 1761 bp, Shigella boydii; identical to SEQ ID NO: 461901

SEQ ID NO: 469517 - DNA, 372 bp, Shigella boydii; identical to SEQ ID NO: 11381

SEQ ID NO: 469518 - DNA, 261 bp, Shigella boydii; identical to SEQ ID NO: 461695

SEQ ID NO: 469519 - DNA, 351 bp, Shigella boydii
  misc_feature (336)..(345): n is a, c, g, or t
atgcaaaaaggcactttaccggtatccagacatcatgcctatgatggtgttgttataaagagaattgaaaaggaattatgtaaaaccataaaagatagagacactgagagtaagaagaaagcaatttgtattataaaggatgctacgaaaaaagctgaatcactgcgtatagatgctgtatgcgatggttatcaaattggtatacagactgcttttgagcatattattgactatatttgtgaatggaagttaaagcaaaatgaaaacagaagaaatattgaggactatataactagtttgctttcagaaaatttacatgatgagaggatcattagnnnnnnnnnngtgtaa

SEQ ID NO: 469520 - DNA, 702 bp, Shigella boydii; identical to SEQ ID NO: 468484

SEQ ID NO: 469521 - DNA, 159 bp, Shigella boydii; identical to SEQ ID NO: 461620

SEQ ID NO: 469522 - DNA, 246 bp, Shigella boydii; identical to SEQ ID NO: 460696

SEQ ID NO: 469523 - DNA, 381 bp, Shigella boydii; identical to SEQ ID NO: 458903

SEQ ID NO: 469524 - DNA, 381 bp, Shigella boydii; identical to SEQ ID NO: 458903

SEQ ID NO: 469525 - DNA, 381 bp, Shigella boydii; identical to SEQ ID NO: 458155

SEQ ID NO: 469526 - DNA, 261 bp, Shigella boydii; identical to SEQ ID NO: 468448

SEQ ID NO: 469527 - DNA, 153 bp, Shigella boydii; identical to SEQ ID NO: 464494

SEQ ID NO: 469528 - DNA, 639 bp, Shigella boydii; identical to SEQ ID NO: 468780

SEQ ID NO: 469529 - DNA, 906 bp, Shigella boydii
atgattacgctcattctttctgcaccagtaacagaaatggctgaagcatttaagcgggtattcgcaaatgcagataatgtgaatattgtcggaaagccatttgaaacaatcagggaatttgactgcatggtaagtgcggcaaacagtttcggcctgatggatggcggtgttgatgtcgccattaccgcattcttcggtactcagttacagtcccgcgttcagaatcatattcttcgtgaatatctcggcgagcagcctgtaggttctgcatttgttattgaaacggggcataatcatcatccctggtggctggtacatgcgccaacaatgcgtgttccgctgacaattgacggaacagacgctgtatataacgcaacctgggccgctctgcttgccatctttcagcacaataaacacgcaacgacagacaggaaaataaaaacggtggcattccctgcaatgggagccggatgtggtcaggtgccgtttgaaagtgttgcccggcagatgaagcaggcatgggataactttaataaaaaaacagaatcaattaactgggaatacgcacaatcccgccagtcggcagtatttggcacatatgcatactgtccgggtaattctgtttgccgttatgcggatactaaatatattggatgcggcgattatcggacgtattgctcacgttccgggcaggtctgtattaaccctgaacatcaggctgatgatgtactgatacaacatcaggctaataaccggtttcgccctggttcgcatatacaccggattaatccagaaaatcccgtaggtaatgtcatctctggcgcacatagccacggaagtagcatcgttattggtgctcacacccatacgctcaataaacaatattctgtctctgatattaagtag

SEQ ID NO: 469530 - DNA, 492 bp, Shigella boydii
atgagcgataaaaagaagcgtagtatggcgggtttgccgtggatcgcggcgatggccttcttcatgcaggcacttgatgccactattctgaataccgccttacccgcaatcgctcatagccttaatcgttctcctctcgcaatgcaatcagccatcatcagttatacgctgacggtggcgatgtttattccggtaagcggatggctagccgatcgcttcggtacgcgtcgcatttttacccttgccgtgagtctgttcacgttgggttctctggcctgcgcactttctaattcgctaccacagctggttgtcttccgggttattcaggggataggcggcgcaatgatgatgcctgttgctcggctggccttactgcgtgcttatcctcgtaatgaacttcttcctgtattgaattttgtcgccatgccgggtctggtggggccaattttaggccccgttcttggcggcgtgctggtcacctgggcaacctag

SEQ ID NO: 469531 - DNA, 210 bp, Shigella boydii; identical to SEQ ID NO: 468385

SEQ ID NO: 469532 - DNA, 1002 bp, Shigella boydii; identical to SEQ ID NO: 468464

SEQ ID NO: 469533 - DNA, 276 bp, Shigella boydii; identical to SEQ ID NO: 458859

SEQ ID NO: 469534 - DNA, 639 bp, Shigella boydii
atgaagatgaaaaacatgtctgaagtgttgacccaagaaaagcttatttttgttgcccagagactaaaggccctcgcgcagtcaggcctgacctattcaaaagacgtctttgacaaggaacgctatgaagccttgcgtgaaattgccgctggactgctgagttcgcagtttgatattagccgcaatgatttgtttcatgtatcggaaacgggttacgcgacgcccaaaacagatgtgcgtgcgtttatcctgcgtaataatcgtattctgatggtgaaagaggctgcagatggattatggagtcttcctggcggatgggcagatgttggagatacaccttctgaagctgtgcgtcgagaggtcgaagaagaaaccggattaaaagtcagagtgactaaactattgggagtttgggatcgtaatcttcacggccatccgcctttaccctggcatgtttacaagctgatttttctctgtgaagaagtaggtggcagcctgtcaatcagccatgagtcactcgatgctgatttttttgatgtcaacgacctgcctgaattgtcgctttcaagaattgtgcctgagcagattgctgtcagcctgagagtagcgaaaggtgatgaaaaaacatggtttgattaa

SEQ ID NO: 469535 - DNA, 639 bp, Shigella boydii
atgatattcaacgctaagggttttttattcgatatggacggtacgctggttgattcaacagccgtagtggaaagcgtctggagagatttttgtgcagaatacggtcttgatactcaggctgtgattgcttacgcacacgggcggcaaacgattgatacactgacgcattttattggtgcaggtgagaaaaccaataaaatcgcggcctcactcgaagaggttgaaatcaacacgacagaaggcgttactgaagtaaaaggggccgctgcactcttatcaaaactgccaccggatagctgggcacttgtcacttctgcaggcagaatgcttgccgaaaacaggatgaaagcggctaatctccccttacccatagtaatggtgtgtgcagaagatgtaatgacgggaaaaccaagtcccgagggttacatcaaagcagctttggctttgggccttgagcctggtgaatgcgtggtatttgaggatgcatctgcgggtataaaagcagggctggcaagtggagcttcggtaatagctgttcagcctgacgctctgggagcatctgaagcccatgccgtcagcgaactgtctgacattatggtcaagatttccggagaacgtttcaatatcatctgtggttaa

SEQ ID NO: 469536 - DNA, 507 bp, Shigella boydii
gtgcggaattttgacaccgcccagtgtcacgttattcgtgtcataccagctggagaacttctccagaatattaataagcggattatccttctgctcctgtggcgcgccggcgatatattcaaaggccttttcggtatcaagttcactttcaatcgtcgctgcatacatcgccttcactatggccgactgaagctgtgttgcctgcagggaatcgagcatcttcagccgttccatgacgctgtaaaactgattagccccacgggtctgcccgtcctccaccggctcgaaaatatgcagcatggccggacgtccggtgggaagttcacgcgggatccgttcccatcgtccactaccagagaacggaaaatcatcctcacaaatatggtacgcgacggcacggccatatcgatcgacctccacaccggcccgcagaaaacggttccccataccgtgtccaggcgtgtccacccgtttcggactcacggctttaaaacgcgtacggaataa

SEQ ID NO: 469537 - DNA, 624 bp, Shigella boydii
atgcggcatttatacgcaacgatattattgtttactaccctgctggcaggaattgcctttcctgcacaggctgaaagcggacacggtgcattttccgtgggatatgctcaggttcacccgggcggcgtaccggcattgtccggtaccggtgcgcgtgcaggtgatttaaaagggattaatgtgaaataccgttatgagttcacggatcacctgggcggcattgtcgcgctgagttatgcatcggtgaagaaaagtgacacgatgaagacgggtgaaaataccttccattatgaaagcctgcgcggtcgttatgtcagtctgatggccggccctgtctggcagctcagtgagcgggtcagtctctatggcatggccgggatggcgtacacccgctggtctgacagtgttcaggattaccggcgtgatgaagtgaaaccggggtatgtgaaggagaccaccaccgccagtgatggtcatactgcgcgtcatctgtcgccggcctggaatgccgggattcagttcagtcccgtagagacggtggttattgaccttgcttatgaaggttccggcagtggcgactggcgcactgacggtttcatcgtgggtgtcggctataaattctga

SEQ ID NO: 469538 - DNA, 312 bp, Shigella boydii; identical to SEQ ID NO: 463367

SEQ ID NO: 469539 - DNA, 1854 bp, Shigella boydii
atggcatttaaacactatgatgttgtcagggcggcgtcgccgtcagaccttgcggaaaagctgacacacaaactgaaagagggctggcagccatatggcggaccggttgccattacgccgtacacactgatgcaggcggtggctattgaaggagatccacaggtcggcccttcatctgagccggactggttctacgtggttgtgcttgccggacagtccaacggcatggcctacggtgaagggcttccgttaccggattcttacgatgctccggatccgcgcattaaacagctggcgcgccgcagcacggtaactccgggtggagagagttgtacgtataacgacatcatcccggctgaccactgtctgcatgatgtgcaggatatgagtacgctgaatcatccgaaggcagacctgagcaaagggcagtacggctgtgtcggccagggcttacatattgccaaaaaactgctcccgtatatcccgaataacgcggggatcctgctggtaccatgctgtcgtggtggttcggcattcacccagggcgcggaggggacattcagtgcggacgcgggggccagccaggattcggcgcgctggggggtgggtaaaccgttatatcaggacctgattgcgcgcactaaagctgcattacagaagaacccgaaaaatgtgttgctggcggtgtgctggatgcagggagagtttgacatgagcgccgccacctacgcacagcaacctgcgctgtttacagccatgctgaagcagtttcgtgctgacctcactgtgtttaacgcgcagtgtcatggtggcagtgctgcagatgtgccgtggatttgtggtgacacgacgtattactggaaaaatacatacgctacccagtacgacactgtgtacggcgggtataaaaacagggagagtgagggcgtttattttgtgcccttcatgacagacggtaacggcgtcaataccgccactaacgcgccggcagaagatccggatattccggcatcaggatattacggtgcggcatcgagaacgaatggaaaccaggtatcatcaaaccgcccgacacatttcagttcatgggcgcgcaggagcattattccggatcgtctggcaaccgctattctgaacgcagccgggcgcacctcagccttcatcagtggtaaggcaccggaaatcaaaccctcgcccggcggcaacacgccatcgggtccgtctgcagatacgtccgttcgcacaatctccctgctgccggcagccggagaggctgctgcgcagggctggagcattaaggatggcggaattcagttgtcagatggtgtatttaagattgccaagcagagcaataaaacctggtccctgacgcatccggtggatgacgcaattaccctgctgacacagggcggcagactgacctgtaagttccgcctgtcaggcgcactgaccaacaatcagttcgggctggggatttatctgtatacggacgctcccgttcctgatggtgtggcgatgacgggtaccggtaatccgttcctgatgtcgtacttcactcagaccactgacggcagagtgaatctgatgcatcacaggaaagccggaaacacgaagctgggggagttcggcgattacgataacgactggcagacgctggagctggtgttcaccgccggcagtgccacggttactccgaaactgaatggagtggctggcccggcattccaggttataaaagacagtctgacactgggactgaatgcgctgacgctgacggatgttacaaaaaatgcagcgtatggcgttgagatagaaagtctggtgctggagataaatgcaccggcatcatcataa

SEQ ID NO: 469540 - DNA, 303 bp, Shigella boydii
atgaaaaaaagaaattttagcgcagagtttaaacgcgaatccgctcaactggttgttgaccagaaatacacggtggcagatgccgccaaagctatggatgttggcctttccacaatgacaagatgggtcaaacaactgcgtgatgagcgtcagggcaaaacaccaaaagcttctccgataacaccagaacaaatcgaaatacgtaagctgaggaaaaagctacaacgcattgaaatggagaatgaaatattaaaaaaggctaccgcgctcttgatgtcagactccctgaacagttctcgataa

SEQ ID NO: 469541 - DNA, 648 bp, Shigella boydii
atgtgttttcccgatttctcctttgaaaaaatccaggtaaccttccacatcatcgctcgcccgaccgacagcctccacgaatgccgatttgccaacagtattcacactgcggatataaaaataataatcatggcccggtttgatattgatactggcagctatccagtacagcgccgagccaagatagcgggctgcggtttcaacctgcctgatatccgcaatccgcttttccgagaaccagaactcaaactgtaccgtcgggtcataaacggcaagatgtggcgttgcggttatctgaaaatagcccggcgtcagttcaatggtggcgggttttgctggcgcgttaatccggaaggtggtggtggccggttcgccctgctggccataactgttaattgccctgactgtcagggtgtattccccgagcggcagaccactgaaacgatgctctgtatccgcagtgatagcggtggtcaccagacggctgtcttctccgcttccgctggtcagtcgcagactgaagcgcacccccttcaccacccgcggcgtgtcccatttcgcctgtgccagatactggccgtcagctgcgctcacctccaccgtcaggtgctgcactgccggtgggatgacgctgttcggggagcctga

SEQ ID NO: 469542 - DNA, 270 bp, Shigella boydii
atgagcggttggtttgacctgaccttaaatcagcgtgtttataatcaggacggtaaaacggcaaatgcggtcgttacctatgatggcaacgtgggtgagcagtataacgatgcctggtttggtgacagtgccaatgaaaatatcatgcagttcagcgatatttacctgacaacgcgaggtttttacccttcgcaccagaggcagacttctgggtcggcaaacataaactcccgcaatatgagatccagatgctggactggaaaaccttaa

SEQ ID NO: 469543 - DNA, 450 bp, Shigella boydii; identical to SEQ ID NO: 461614

SEQ ID NO: 469544 - DNA, 240 bp, Shigella boydii; identical to SEQ ID NO: 463853

SEQ ID NO: 469545 - DNA, 315 bp, Shigella boydii
atgggctttgcgtcgataggttatgtaccggaagatggttggtatgcaggcacggaagcgcgttatatgggcgatattatggcagatgatgaaaatacggcaaaagcgccgtcttatactctcgtcggcttattcaccgggtataaatacaattaccacaatttaactgtggatttatttggtcgtgtcgataatttattcgataaagaatacgttggttctgtcattgtcaatgagtcaaacgggcgatattacgaaccttcgcccggacgaaattatggtgtcggcatgaatattgcgtggagatttgagtaa

SEQ ID NO: 469546 - DNA, 486 bp, Shigella boydii
atggtgccgcactggttcagtgccagtcagtggcagctaccgaacgaaagcgattatctgaaattacagtcgctgtttgcccgggtggcagaagagaaacatcagcggagagaactggaaaagtcccattaccaactggtcagcacatacagtgagctgagccggcagtatatggaactgctgagtgaatataaaaatttgcggaggtatttcggtgtgacggtgcaggtgccgtacaccgatgtgtggacgtataaaccggtgcagtactatccagggaaacatccgtgcgaaaaaccggcagaaatgttgcagcagataatcaacgcgagcagtcgtccgggagaccaggttgcagatttttttatgggctcaggttcaacggtaaaagcggcactggcgctcgggcgtcgtgcgattggcgttgaactggagaccggacgttttgagcagacagtcagggaagttcaggatttaatcgtttga

SEQ ID NO: 469547 - DNA, 276 bp, Shigella boydii; identical to SEQ ID NO: 461658

SEQ ID NO: 469548 - DNA, 276 bp, Shigella boydii
gtggcttctgtttctatcagctgtccctcctgttcagctactgacggggtggtgcgtaacggcaaaagcactgccggacatcagcgctatctctgctctcactgccgtaaaacatggcaactgcagttcacttacaccgcttctcaacccggtacgcaccagaaaattattgatatggccatgaatggcgtcggatgtcgcgccagtgcacgcattatgggcgttggcctcaacacggttttacgtcacttaaaaaactcaggccgcagtcggtaa

SEQ ID NO: 469549 - DNA, 372 bp, Shigella boydii
gtggtgtgggtcggtaaggatgtgacaggcattgaaccccgtaacgccagtgttattgaagttcctgatattaccgccaaccgccgcattaccgcgccgggttactggttttaccgcaatgatgaatttgtctttgactacagactcaaagcggaagatgagcgtgatgcccttctggctcaggtcagtgcccggacaggggaatgggaagaagacctgctgctggggctaatcagcgacgaagaccgggaaaaactgaaagcgtaccgtatttacgcgaaatcgctgcaggcgatggatttcagcgccatcactgataaatcctcatacaacgccattgaatggcccgtctctccggaaggttcttcctga

SEQ ID NO: 469550 - DNA, 171 bp, Shigella boydii; identical to SEQ ID NO: 468657

SEQ ID NO: 469551 - DNA, 366 bp, Shigella boydii; identical to SEQ ID NO: 468667

SEQ ID NO: 469552 - DNA, 315 bp, Shigella boydii; identical to SEQ ID NO: 468669

SEQ ID NO: 469553 - DNA, 378 bp, Shigella boydii; identical to SEQ ID NO: 468687

SEQ ID NO: 469554 - DNA, 378 bp, Shigella boydii; identical to SEQ ID NO: 468760

SEQ ID NO: 469555 - DNA, 345 bp, Shigella boydii; identical to SEQ ID NO: 468678

SEQ ID NO: 469556 - DNA, 378 bp, Shigella boydii; identical to SEQ ID NO: 465904

SEQ ID NO: 469557 - DNA, 1560 bp, Shigella boydii; identical to SEQ ID NO: 468680

SEQ ID NO: 469558 - DNA, 654 bp, Shigella boydii; identical to SEQ ID NO: 468682

SEQ ID NO: 469559 - DNA, 378 bp, Shigella boydii
atggacgaacagtggggctacgtcggtgctaaatcacgtcagcgctggctgttttacgcgtatgacaggatacggaggacggttgtggcgcacgtcttcggtgaacgcactctggccacactggagcgtcttctgagcctgctgtcggcctttgaggtcgtggtatggatgacggatggctggccgctgtatgaatcacgcctgaagggaaagctgcacgttatcagcaagcgttacactcagcgcattgagcgacataatctgaatctgagacaacatctggcaaggctgggacggaagtcactgtcgttctcaaaatcggtggaactgcatgacaaggtcatcgggcattatctgaacataaaacactatcagtaa

SEQ ID NO: 469560 - DNA, 324 bp, Shigella boydii; identical to SEQ ID NO: 462444

SEQ ID NO: 469561 - DNA, 1143 bp, Shigella boydii; identical to SEQ ID NO: 468689

SEQ ID NO: 469562 - DNA, 378 bp, Shigella boydii; identical to SEQ ID NO: 468717

SEQ ID NO: 469563 - DNA, 1392 bp, Shigella boydii; identical to SEQ ID NO: 468691

SEQ ID NO: 469564 - DNA, 381 bp, Shigella boydii; identical to SEQ ID NO: 468694

SEQ ID NO: 469565 - DNA, 516 bp, Shigella boydii; identical to SEQ ID NO: 466253

SEQ ID NO: 469566 - DNA, 150 bp, Shigella boydii; identical to SEQ ID NO: 468695

SEQ ID NO: 469567 - DNA, 378 bp, Shigella boydii; identical to SEQ ID NO: 465880

SEQ ID NO: 469568 - DNA, 318 bp, Shigella boydii
gtgcgattatttgctcaattaagctggtatttccgtcgggaatggcgtcgctatctcggggctgtcgccttgcttgtcattatcgcgatgctgcaactggttccgccaaaagtggttggtattgttgtcgatggcgtgacagaacaacactttactaccgggcagatcctgatgtggatcgccaccatggtgctgattgccgttgtggtttatttcctgcgttacgtctggcgggtattgctgtttggtgcgtcttatcaactggctgttgaactgcgtgaagattattaccggtcagctaagccggcagcatcctga

SEQ ID NO: 469569 - DNA, 1356 bp, Shigella boydii; identical to SEQ ID NO: 468699

SEQ ID NO: 469570 - DNA, 558 bp, Shigella boydii
gtgcgccataccgggtgtgaaatgccgcacagatgcgtaaggagaaaatgcacgtccagccgcttttccgcttcctcgctcactgactcgctacgctcggtcgttcgactgcggcgagcggtatctactcactcaaaaacgaaatgctgttatccacagaatcaggggataacaccggaaaaaacatgtgagcaaaagaccaggaacaggaagaaggccgcgccgctggcgtttttccataggctccgcccccctgacgagcatcacaaaaatcgacgctcaagtcagaggtggcgaaacccgacaggacttaaagataccaggcgtttccccccggaagctccctcgtgcgctctcctgttccgaccttaccgtttaccggatacctgtccgcctttctcccttcgggaagcgtggcgctttctcatagctcacgctgtaggtatctcagttcggtgtaggtcgttcgctccaagctgggctgtgtgcacgaaccccccgttcagcccgaccgctgcgccttatccggtaactatcgtcttgagtccaacccggtaa

SEQ ID NO: 469571 - DNA, 171 bp, Shigella boydii; identical to SEQ ID NO: 468718

SEQ ID NO: 469572 - DNA, 711 bp, Shigella boydii; identical to SEQ ID NO: 468716

SEQ ID NO: 469573 - DNA, 378 bp, Shigella boydii; identical to SEQ ID NO: 468717

SEQ ID NO: 469574 - DNA, 123 bp, Shigella boydii; identical to SEQ ID NO: 463918

SEQ ID NO: 469575 - DNA, 378 bp, Shigella boydii; identical to SEQ ID NO: 465880

SEQ ID NO: 469576 - DNA, 378 bp, Shigella boydii; identical to SEQ ID NO: 465880

SEQ ID NO: 469577 - DNA, 378 bp, Shigella boydii; identical to SEQ ID NO: 465880

SEQ ID NO: 469578 - DNA, 648 bp, Shigella boydii
atgggttttccctatctctcctttgaaaaaatccagatagccggatgcatcatcactcggctggccaacagcctccacaaatgccgatttgccaacagtattcacactgcggatataaaaataataatcatggcccggtttgatattgatactggcagctatccagtacagcgccgagccaagatagcgggctgcggtttcaacctgcctgatatccgcaatccgcttttccgagaaccagaactcaaactgtaccgtcgggtcataaacggcaagatgcggcgtggcggttatctgaaaatagcccggcgtcagctcaatccgcgacggtgctgccggtgcggcaatccggaaggtggtggtggcaggttcaccctgctggccatagctgtttatcgcccgcaccgtcagggtgtattccccgagcggcaggccgctgaaacggtgctccgtgtctgcggtgatggcggtggtcaccagtctggcatccgttcccttaccactggtcaggcgcagactgaagcgcacgcccttcaccacccgcggcgtgtcccatttagcctgcgccagatactggccgtcagctgcgctcacctccaccgtcaggtgctgtactgccggtgggatgacgctgttcagggagcctga

SEQ ID NO: 469579 - DNA, 162 bp, Shigella boydii; identical to SEQ ID NO: 463053

SEQ ID NO: 469580 - DNA, 288 bp, Shigella boydii; identical to SEQ ID NO: 468729

SEQ ID NO: 469581 - DNA, 189 bp, Shigella boydii; identical to SEQ ID NO: 467093

SEQ ID NO: 469582 - DNA, 738 bp, Shigella boydii
atggccattgggatggggactgttttctttatctcgacaaagatgctacatgccaatagttcaagtagtgttattatatctgtggttctgatggcaatagttggtattgtttccattggtatttttaatggtactttatatagcctggtaatgagttttctctggagcaataccagtttcggtatacatcgtttcaaggtgaaattagatactgcgtattgtataaaatatgccatcctcgcatttttagctttattaccttttctcgctgttgctggttatattatcttcgaacaaatattaaatgcgtatgatagttctgtgtatgcaaatgatgatattgagaatttacagcaatttatggaaatgcaacgtaaaatgataatcgcgcagttaatctattattttgggattgctgttagcaccagttatttaacggtgtcgttgcgaaatcattttatgagtaacctgtcactgaatgatgggcgtattcgttttcgctcaactttaacgtaccacggtatgctttatcgcatgtgtgcgttggtagtgatatccgggattacgggcggtctggcttatccactgctgaaaatatggatgattgactggcaggcaaaaaatacgtatttgctgggcgatttggatgaccttcctggtaatgactccaacttactgatagtgttttatgttcagataatgcccgatgaccttgtcatgcagctccaccgattttga

SEQ ID NO: 469583 - DNA, 378 bp, Shigella boydii; identical to SEQ ID NO: 465880

SEQ ID NO: 469584 - DNA, 1074 bp, Shigella boydii
atgctgcggattcaatacaagcaaaaactttctcactggctgtcacccttgctggaaccgggtgaagatgtttatcagctttcgggtaacgatctcgcgctgcgactgaatacagaatcgcaccaggagcgcattaccgcactggatagccatctcaagcaatttcgtttcttttgggatggcatgccgatgcaaccgcagattggcgtcagttactgctatgtgcgctcgccagtgaatcatatctacctgctgctgggagagctaaatacggtcgccgaactttccatcgtgaccaacgccccggaaaatatgcagcgtcgcggggcaatgtatttgcaatgcgaattgaaagataaagtcgcgatgatgaatcgactacagcaggcgctggaacacaaccattttttcctgatggcccagccgattaccggtatgcgtggtgatgtttaccatgaaattcttctgcgcatgaaaggtgagaatgatgaactgatcagccccgatagcttcttgccggtcgcgcacgaatttggtttatcgtcgagtatcgacatgtgggtcattgagcatacgctgcaatttatggctgaaaacagagcgaagatgcccgctcaccgttttgctattaatctgtctccaacctcggtatgtcaggctcgttttccttttgaagtcagtcagttgctggctaaatatcagattgaagcgtggcaacttatttttgaagtcaccgaaagtaatgctctgaccaatgttaagcaggcgcaaatcaccttgcagcatcttcaggaattaggctgccagattgcgattgatgatttcggcaccggctacgctagctatgcacggcttaaaaatgtgaatgccgatctgcttaaaattgacggcagttttatccgcaatattgtgtcaaatagtctggattatcagatagtggcatcgatttgccacctggcgcgaatgaagaaaatgcgggtagtggcagagtacgttgaaaacgaagagatccgcgaggcggtgctctctttggggatcgattatatgcagggttatcttattggtaagccgtag

SEQ ID NO: 469585 - DNA, 126 bp, Shigella boydii
atgtctctggcgcaatgcccgggctttttattcgcacatcgtgaggaatgcaccgtggaaattaaaaaaatcattaatccccgttataccgaaagtggcgcagtagactgtgacgtttttttttga

SEQ ID NO: 469586 - DNA, 369 bp, Shigella boydii
atgtctggaaatataggggcaaatccagcgcgcccgtgggtagattctggcaaagtgcaattaagaacattgttggttggggttatcaagccagaaagcccggcgacagtagcggcaattcttgtctccaaagatcccgcaaaaacctggcaacaatataaagcctctggtggcaagcttaagctaaacgtgcctgcaaacgtaagtacagagcaaatgaaagtgttaagtgacaatgagaaactgatggacgatctgggggcaaatgtcacgccggctatctattacatgagtaaggaaaatacgctacaacaggccgtggggttgcccgatcagaaaacgcttaatatcattatggggaataaataa

SEQ ID NO: 469587 - DNA, 714 bp, Shigella boydii
ttggagtcattacctgaactgacacaaccgctatttatcgccgcgaaaaataaatcgcccgtggaagcgacattgcgattcgcgtttggtggctcattctctacgacattagatgttgcccctgcagagtatggaaagttttcttttggtgagggccagtttacttttaatggtgatggtagttcattgtctaacctggatattgaaggcaaagtcgaagatattgttctgcaattatcaccaatgaacaaagtaacggcaaaaagttttaccattgattctctgacacgattagaagaaaagaaatttccggttggtgaaagcgagtcgaaatttaatcaggttaatattatcaatcagggggaagacgttgcccaaatcgatgctttcgttgcaaaaaccaggctggatcgcgttaaagacaaagattatatcaatgtcaatctgacctacgaacttgataagttaacaaaagggaatcagcaactcggtagtggtgagtggtcattgattgctgaatctattgatccctcagcagtgcgccaatttatcatccagtataacattgcgatgcagaagcagcttgctgcacaccctgagttagcaaacgatgaagttgctctgaagtggcacactgaatttggccacctgaacagaggtgatatgctcacctcagaacaacacaggtgctccaatgaaaaaaagaaattttag

SEQ ID NO: 469588 - DNA, 912 bp, Shigella boydii
atgatcaccggtgctgctcagatggacggcgcgatcctggtagttgctgcgactgacggcccgatgccgcagactcgtgagcacatcctgctgggtcgtcaggtaggcgttccgtacatcatcgtgttcctgaacaaatgcgacatggttgatgacgaagagctgctggaactggttgaaatggaagttcgtgaacttctgtctcagtacgacttcccgggcgacgacactccgatcgttcgtggttctgctctgaaagcgctggaaggcgacgcagagtgggaagcgaaaatcctggaactggctggcttcctggattcttacattccggaaccagagcgtgcgattgacaagccgttcctgctgccgatcgaagacgtattctccatctccggtcgtggtaccgttgttaccggtcgtgtagaacgcggtatcatcaaagttggtgaagaagttgaaatcgttggtatcaaagagactcagaagtctacctgtactggcgttgaaatgttccgcaaactgctggacgaaggccgtgctggtgagaacgtaggtgttctgctgcgtggtatcaaacgtgaagaaatcgaacgtggtcaggtactggctaagccgggcaccatcaagccgcacaccaagttcgaatctgaagtgtacattctgtccaaagatgaaggcggccgtcatactccgttcttcaaaggctaccgtccgcagttctacttccgtactactgacgtgactggtaccatcgaactgccggaaggcgtagagatggtaatgccgggcgacaacatcaaaatggttgttaccctgatccacccgatcgcgatggacgacggtctgcgtttcgcaatccgtgaaggcggccgtaccgttggcgcgggcgttgttgctaaagttctgagctaa

SEQ ID NO: 469589 - DNA, 378 bp, Shigella boydii; identical to SEQ ID NO: 468717

SEQ ID NO: 469590 - DNA, 303 bp, Shigella boydii; identical to SEQ ID NO: 458125

SEQ ID NO: 469591 - DNA, 378 bp, Shigella boydii; identical to SEQ ID NO: 465880

SEQ ID NO: 469592 - DNA, 378 bp, Shigella boydii; identical to SEQ ID NO: 465904

SEQ ID NO: 469593 - DNA, 195 bp, Shigella boydii
atgctggagaatgagtaccctcagagggtggctgaccggctgaaagcatcaggtctgagcggtgatgcggatgcggagagggaagccggtgcacaggtgatgcgtgaaactgaacagcagatttaccgtcagctgactgacgaggtactggccctgcgattgtctgaaaacggctcacaactgcaccattcataa

SEQ ID NO: 469594 - DNA, 324 bp, Shigella boydii
atgtcgaacgagatggcgggcgttacaacagagcaagttgagcgtattgccgcgatcgttgctcgggaggttgttggcaaattaggtaaagagctacgtgaagaaattggccaggaggtcaatgatcagctgaaaacctactttggtgatatgaccccggcgcaacatagtattcaacactccaatctggacaaactccttaaccggttagattccatctcaagtgggttctttggcggcattgtttctaaaataacgtcgttcattattaccgcactgcttttggggttagccgcgtatggcgtaaaaagtggactgcaataa

SEQ ID NO: 469595 - DNA, 693 bp, Shigella boydii
atgaagactccgagaggcattcgtaataataaccccggtaatcttgataaaggatcaccgtggcaaggtctggttgcgaatccagacgaaccgcgcttttgcacgtttaaagaccctgtttgggggattcgtgcgctggcggtgactctaattacctaccacgataaacgtcgcgcaaaagacggcacaagtatcgataccattcgtgaagttattgaacgctgggcaccgccgaatgaaaacaatactgacgcctacattaatgaggtgtctaaagccgttggtgtaaccgcagacatgatcatcgatctgcatgattacgacatccttcgacctttggttgaggcaatcattcgccacgagaatggccgaggcccgctaaaaacgctgaacacctggtatgcggcagaagttattgaggaaggtctgcgtcgagctggcgttgttaagccggtgaaaaccgtgaaggctgttcctgtaactaaagaaaccgcaggcgcaactgttacagcaggtattggtctggcgcagctggccgatgttatgccgcaggtttccgctgctatggataaagcacaaggtcatatctctagcggggatacagtacgcatcatcttcggtattgccactattgttgtggcaggattcattgcctggtcgcaggtaagaaaacaccagaaagggatggtctaa

SEQ ID NO: 469596 - DNA, 252 bp, Shigella boydii
atgctaggcagcctgatgacaaagctaaaagttgctttgattacgctggctgccgttcttttcgttcttgtcggcgcttacacgatgggcgggaatgcggcgcgacgagcaatggaagagaaggcaaaacaggaagacagaaaacgacttcaaaacacagtgaaagtggtgaatgagacgagcagtaaaatacgtcagaaagatgcttctgccgttcatcgtgagttgtatgataagtgggtgcgtcattaa

SEQ ID NO: 469597 - DNA, 522 bp, Shigella boydii; identical to SEQ ID NO: 12112

SEQ ID NO: 469598 - DNA, 306 bp, Shigella boydii; identical to SEQ ID NO: 12113

SEQ ID NO: 469599 - DNA, 669 bp, Shigella boydii; identical to SEQ ID NO: 12114

SEQ ID NO: 469600 - DNA, 360 bp, Shigella boydii
atgtccatgaaaatgggtgacctagcaaagcgcaaagagcctgatgcaccggctaagaacacaactcctttgcgccaaccagtcagaccacagggacgcccgactcgtggcaaagagaaaattaaaagccgcacaatgtcactggaggacgaatacttcgaactgctggagatgatgaagttcatccctcgcttcgagaagttcactcgttctgacgtgattcgagcagccattttccatctggcagagaagtcaccgcaggaaatcgaggacatcgtgaagcttaacgaggcgatcacagctgccgacgttacgatgcgtaccgatgaaattaaacgagagttgatgaagaaaggttga

SEQ ID NO: 469601 - DNA, 1695 bp, Shigella boydii
atggaatcgatagaatcatttctaaaaaattttctagtttcagatcatcgggttgccgtcataaaaggagattggggcgttggtaaaactcattattggaatagtttttatactaagcattctgaaggattagattttaatgcatattcgtatgtttctttgtttggggttaactctattggtgatattaaaaaagctctttatcattgtgccacaccaattaatgaaaagaaatataaagaactaattttatctgaaacggatcgaactatgattcgttatagaaatgggtttttgggatggttgaaatacaactccttgtcaaaatttttaatacatttcggaaagaacgatttttttgggttcaaaacagataacctgctgtcatctcttgagtataaatttgttaataattatttggtttgtattgatgatgttgaaagaaaaggtaattcgctagaagttaaagaaattatgggggtaattgatgaattggcaagaagaaaaggctgcaaagttgttctaattttaaatgaagataatttacatgatgaaactgcaaaaaaacagtttttagagtacagagaaaaagtaattgatgtcgaaataaaatacgatcctacgcctgagaagaacttacgtaaagttttttatgaaactgattctgattttcttttgttaaaagtcttagcaaatgacttaggcattaaaaatatccgtatattaaataaaataaaaacatctctggttaatcttaggaatgagctaagcttggcagaggataaggttagagaaagttttatcaatagattggttctgttttcagtggtttactattctggtgttccaggtgttgattatgccttgtttaaagaatcaattaaaaacatacatgtatttgattacatgttagatgataaaaaggatgattctgtatattcatttattaatagtcttgatattatttatgaacgagcggaaattgctttcgatgatgacatagatttttatctcaagaatggttatctttctactgaaagcaatattcgaggtataatagaagaaaaaaataaacaatataaagaacacaaggctttatgtgaggttaacaatgtttgggatatttttagtgactcattcaaggacaatgaatctgagtttatttctaagataaaatgtgtaattaacgacaatctttcacacatacctgttgctcacttcataggcttgattgatatcttaaatagattggagattgattgtgatagttatatagaggcatatgcagatgcctttgttagccaagatgatgcttatactgcttttcggaatttgtatgtagagatatttggtaacgaaaagttaggtctgctaattcaaaaaaaattgatggataagaagcctgaagagactaatttagagaatgttttatacaaaataattgaaggcaaatttaatcatagtgacatagcatatcttaacagtttctctgaagatgattatttaaagtggatattatcccgcaatcaggatgctttggatttagtgagaaaggggttgctcagattcaaaagtatgcaagaactaacagaagaacagcaaaaaatcacgaataaagcaataggtgcattaacgaaactggcctctagatcaagtcttaacaaactacgtgtgagcagattgcttaataattaa

SEQ ID NO: 469602 - DNA, 741 bp, Shigella boydii
atgagccaaatctttttcgacaccatcgacaacgaccagtacgacttcatgacagagtggaataccgctgttatggataagtgggttgctgaaaacattggtttgtcgcgctgcaaagacgaggctgaactcttcgatacgaagtggtttgattaccgcgacatgcatcctcttatggccacctgtctgtttacggaggcatacaaacgtcagtactcaaatatcatgctgacgcacggtcgcgaacactttgaaacagctccgttcaccaccgggttaaaacgcctgccttatcaggagttgtcgactgccaataaaacgtcgctatggaaagcacgccagtttgctgaccgctattgctgctcatacgactactttatctccaccgttctttccgcagctgcacgacgtctgtgggacaagctgcctcgcccacagcatttgtggcagccagaactgattgagatatttgaagagaaattagccagacgcgcaacaacccgtctggatgactctctggttagctttaagcatataggagacatgcagttcaacccgatccaggaaagctattttgagtggattctggagcgtttacgcaccatcccccgcagcaagcgcatacgcgcaattttctccgctatctggctaatggaaatcgttccagagcgccttatttccgcccactttccagaagaactggaagaagcacggcggtttattgatcccctatctaattaa

SEQ ID NO: 469603 - DNA, 1341 bp, Shigella boydii
atgaccgaactttgccatacaggacgcgggctgtccgaagagtttgatgaagatttccagaacagactgacggcatatttttgtcgtgatcacgagtttcttactcgtgcgggagatctggttgtgcctagccaatttgccaatgcggccaatgccatattggttaatatggtttcgggctattaccgtatgtacaagagcgcgccctcttcatctgcaattctggatatgcttaagcgtgcgaaacgcgataagactatccgtgaggaactattcgccgatgttgttgctgcgtttaagcgcatccttgcagaaaaattgtccgatacctcgtacatggttgaccaggtatcaaccttcgcaaaaagcgtagcgtttgatgatgctctgattaaggctgctgaactgaaagagaaaggcgactttcagggggcgatggcaatcatggccaaggttcagcagattggatcgaacgaagcgaccggaatctatgactactacacctccgcaagtgagcgattgaaagcgcgtgaatatgaggcttcagaggagtatgtaccaaacagtattacaacaggactccctcttctcgataggttgctgtaccaaaaaggctgggcaaagcgcgaaatggtgcttttcatggggttcgctaaatccggtaaatcgaccgcaatgggtgagttttccataaacgcaacgcttgctggctacaatgttctgtatctctcgctggaggttcacaccaacattttgtccgaccgctttgatgcaagattgtcggagacggaaatgtccaagctggtggaacggcgcgatgaagttcatcgtaagttggcagagttgggagccactaaggggattggtagtttgtgggttgttgagcgtccgtcaggaagtatgtcaccggcagatctggaccgtatgcttaacagcatgaaagccaatggcatggtgcctgacatgcttgttgtcgactacgcagatttgatgcgtgccagttatgaccttcgtgatgatcgcgccaacattcgtagtatctacaccgatttacgtgctctttatgacaaacacaacgttgctggtatcacagcatcgcaaacaaaccgtgaaggtggcgcgtcagaagttgccacaatgatgcacgctgccgacaacatcgaaaaagtacgtattgctgacctggtaataacgatcaacaaaaccgaagaagaagaagcgaaaggagaggctcgtctctactttgctggttcgcgtaaccagcagggagggatcagcattcgcgttaaacaaaacctcgaacaaatgcgcttcattgagcgaatcttagacgttacctaa

SEQ ID NO: 469604 - DNA, 1116 bp, Shigella boydii
gtgagcgagctgaaagagctaattgccgaattagattttgaacaatggttggatactgaaggtatcgtttatcgacgtggaggcgtgagtgctcgcggtcgtgaagtgaatatcaaagagtgtccggtatgcggcagctccaactggaaggtatatttcaatctgaccagtggcgtcggtaaatgcttcgctggtgatcatcccgaagagattcagttcaataagctggtcttcctcaagcactacagcggcaaatcacgacgacagttcgaggaatatgtgcagaacgcccttctttcccaggggtgggcaccaaagaaagaagagctagtgcttgcaagcacagtcgagttagaggggccagttgcactccctcgtcattacgagcttcctatagatggccgtcttccagactatctggttgaacgaaacatatcacctgaaatggcaaagtattttgacctacgatactgcgtcgaaggcaagcacgcttatgtagatccgtatacagatcaggtaaaagggcagatattcgatatgcgaatactgataccggtttacgatctggatggggtaatgaagacatttcagggacgagacattaccggtacagcagaacgccgctacctctttcctatgcagcttccagcttcaggtaagtttctctacaacggccataatgcagtcggcaaacagactgtagttgtctgtgagggggcgttcgatgttatgggggttaaacgagctatttttgacgaagaaacattacgtgattacgtggaaccaataggaacgttcgggatgcatctatctggtaacaccactcaggatgcagaagatcagttaggcgcgttcctgacgctcaaggcgcgtgggttacgtaatgtgatcatgatgtgggatagtgaaaagcaagctatacgcaacactatggccgcagccaggcgactgagcagtattggtcttaatgtgaaaattgcatgtttgggcgaggaaggactcgaccccggcgatgcgaccccggggcagattatcaaagcctactattgcgcaaaaccttactcacgacagcttgaactcttaagcaaggtgaaaggcattgcagcactagtttga

SEQ ID NO: 469605 - DNA, 1146 bp, Shigella boydii
atgaaatacataaaatcttcatcgttgctggcattaactttgctttttaactctggattcgttaacgcagacaataaacaaacgctgatagaagccgctaccgcaggggataccgcagcacaaagtgagttaggtacaaattattttgatggtgtcaatggttttgataaggatgtagttgaggccaagaagtggattgatctagctgcagaaaagggagataaagtagcatattatgcacttggagttatgtacacatttggcgagggtgtagataaagacctaaataaagctgttgagtactacaaacttgcgggggatgctcgtgaaggtagagcctacaacaatcttggtgctatttatcaaaaggggatgcttggtaaagtagatcatgcactcgccattaaatacttcaaactagcctctgatgccgggtatgttaaagcaacttcagttcttggggcgtattaccaatatggtaaaggcgttaaaaagaattataaaaaggcttttacttattacaaaaaggcggcagaccaaggcagttcagaagctatgataggattaggaatactatacgatgatgggttaggcgttaaacgcaatgatgcagaagcagttaagtggtataaaaaggcagcggaacttggaaacgccgacgccataatcaatcttggcattatgtatgagaatggggaaggtgtaaaaaaggactataaaaaagcagccgacctttatcagactgcttgcgataaaggagaaaaaagaggctgcgattacattgcagaactgaaagaaagcggcaaatatcgagcgccggcttccaaagccaaaacaaaatccgccacccagcgacttattgctaaatccattgataagggcgttaacgctacatttacctggcagggtgatgatgctaccttcaccgctaatgatggcaaagttgactgcaccttcctgaaggatttttcagagaaaggaggcaatctggctacctcgtttgtttgcaccgataacgttcaaatcatcctgaagcaattcagagataccaagaatgcctacctcgcggtaatgactgacaacttcaatacagaagttaaatcattttcggtcaatgtgtatgtgactaatactggttcaaactag

SEQ ID NO: 469606 - DNA, 414 bp, Shigella boydii
atgagcaaaaataagctgattttaacaggagctttattgtctttgtttgctttagtggggtgtaagcctacagacgagaaggctattgctctgggccaacaagcaattgcggatgatatgaaagatcccacgtcggtgatgtttaggaaagataagtttgtcaggactgatcatgacgatgggagtgtgacaggctttgtgtgtggtgaattaaacgccaaaaatggctttggtgcatacgtgggctatcactcatatgttgttgaactcgaaatgaagccaaagggcatgttttcaaaaggggtggtatacaaaatcctatcgaagtcgttggcacctaatgatcctcatgatttacagcgttataagcaggtctacagaaagatgtgcaacagtgaggctgtagctcattaa

SEQ ID NO: 469607 - DNA, 783 bp, Shigella boydii
atgaaagaagaaattaagagattagcctgcaacatcattgataaaactggtttagaaatcagcgagagcaatcggctagacatcattgaaaaagccgtcaatacggcaatggatcatatcgccactcgtttggtcgagatccctctaccggggctaccttatctgaaggttaagttgtgcgtatggggcgaacctgcacatgcacgacgttctgcattagttgtttttgtacgcaaagaaaacttacgaactctaaaagtgcaggttggggcgtggtttgatggcagagtcatctatacagataccattatctgtcctccaggtgacgaacatattgaagccgttattcgagaatcaattcgagctatgcgtagtttagctttgctggaagacaagcaaaactttgaagattacttgctgtcggtaaaagctgaaccaacattgtctctgaaagccgatttcgtcaccccgacaaatctgttggaggttttgattaataaaggggctaatgatgctgtaaacctaatcagggagagcgaatattcgactctttgggacatgtgcaaaagccagttggatcttgtgcatatcattgttgatgcgggtaaggcgtgtgatggcgtaatggcggaatttgctgggaagatggtcaggattgctaacgaattaccgatgatagagcaagaggccaaatcatacgccaccaatcatgtcacagagcttcttgccccctatcgcttagaaagcgatcagcgcaagatgattagctggggaagttggtaa

SEQ ID NO: 469608 - DNA, 258 bp, Shigella boydii
atgatggttgaagagattcgtaaaggagaatctctgtatttcgaagatatgaccgcactcattaaggaggttgaagaacggaataaacaagccagaactataaaacgaaaacgtgacagtgtaacgattaatagcatggttaagaagagcgccacatcacaaacagcgatcactgacgtgtatgcggcgttgattgaagaaacaacaaaagaaacacatgagcaaatcgatcaacatatggaggcaaaacaacaatga

SEQ ID NO: 469609 - DNA, 1323 bp, Shigella boydii
atgaaaaagttgatcgcacttaagcataagctggacgaaatgaaagctatgggaaccaatgcaaaaaaagaggcattggccaacatggatgactttgaacaaagcatggtttcattgatgctcaaccctttcatccgttttggggtaaagaaatacaaagtggcagagccgcttagtgagtccgtcccaagtgacgaaaaagccattgatgtactgaataagctggcctctcgcgagctgacggggaacgcagcaatagctgctgttgagtctatcgtggcgtcaatgtgcgccgatgggcaggacgtgttccgtcgtttcctcttaaaagacccgaaagcgggtgttgggattagcctatgcaacaaggtttttgaaaatcccattccgaaattcgaggtgcagctggcgtcaccgtataaagaaaaaggcgacaaataccccttcaagccaaaccctaaagcaaaatggccgatgattggcagtcttaagctcgatggtttgcgagtaatttgcgaggttattgttgacgaggaagaggttaacttcctttctcgtactggtaatccaatcacgtctctcgatcacctaaagccagcaatgctcgaattaggcaaactttcaggccacaaacacatcttcttcgatggtgaaggaacagccggttcatttaaccagtccgtatctgcattgcgcaaaaagaacgtgcaggcaattggcgctatttatcatgttttcgacttcttcctaccggaatggcgagcacaggctaaatccaaagagtatgcaaagacatgtatgaagctgaaagagcgcctggctatgctcgtggcgttgttcaaaaacgatcgcagtgaaggctacgcacaagacattcacctgcatccgttctacatcatccatagccacgaagacttcatcgaacgcttcatgaaacgcctggacgataacgaagaaggggagatgggcaaagatccgaactctgtttacgagtttaaacgtacccgcagctggtggaagttaaaagacgaagattcagaagatggtgaaattatcgattttgagccgggcgacccggactctggttttgccaacacgcttggaaaaattgttattcgtcttgaaaacggcgtcatcgttcgtgcgagcggcattaagcataaatatctggacgagatctggaacaacaaagagaagtaccgtggtcgtattgtcgaggttcattgtcacgagaaaacacctgatggcagcttacgccacccacgactgaaatggcctcgttgcttacgcgataccgaagatcgaatcggagataaagaatga

SEQ ID NO: 469610 - DNA, 216 bp, Shigella boydii
atgatcgtattaagtaaacgggagaaagaaacgcttcatgaaataagtaagtggccggagttccctgagtactggaagcctaaaacgcgagctaagttagagcgtttagggttggttgcaaacgtttctgaaacgtggtgctcggccaactaccagttaactgataaagggaaattattgctacagcaattagtagaatcaggagcgttaaaatga

SEQ ID NO: 469611 - DNA, 153 bp, Shigella boydii; identical to SEQ ID NO: 12125

SEQ ID NO: 469612 - DNA, 291 bp, Shigella boydii
atgagcaatttaacttcttgggactggtggttggccacctattgcttagcggccggagtcgcattcgccttttacgtaggtcagttagtcgtaaaactgttgctgataaaatttgctagtcataaacgtatcgatgatggtctgtggcgtcttggcaccctggtggaaactcgctacgggcaacttaaggagaacgaaaccattactatccaagcgaaacgattcactgccaccatcacaagaacacctagtcgtagagtggccttgatcaaaaaagtcacaaccgaataa

SEQ ID NO: 469613 - DNA, 1197 bp, Shigella boydii
atgattattttctgggataccgtcaaggaaaacgtagaggtcataggtacacttgccacttcacttgcatttttcgccacagcatgggccgcttacgaggcaaggcatagtgcaaaggcagcaatgagggccactaggctgacggcagcttcactccttgaaatgaaaaaagcctcttttaaggaatggtacggcatattacttgaacagcataatagattacttgaggatgttaacaagaccttgcaggatgatagggaacttaatgcaaaactgggaacgaatctcatcaaggctatttattaccatgtaaccaaaaactccgtttacattaaatatattaaccacatagttttaattcttgattatttagataaagacttctattcgccgtcatcagccgattatgaaaagagagcttacatagaacagctgcgcaacagcattagtcctaatgtaagcctgctgatagctacattcggccttaatattgacactaataaaacctatgacgcaaagaggctttacagcctgctaagcaagtataacttcttcgaaggccaacttttttttgaagaagcaatatcgaaagttcattatttggactcttatgctgctgtgatatttgataacgaataccgaaaagatgtagagttttatgttgaagaaatggttcgaggtcgtgagacccctaaaatcgattcaagatatcgtcatttaagggctacgttcgcaattctgtggtcttacaacaacccctgccgacaacatttgcttcaaagatttaatgacctacctatgcatatgcgaaacagcattgagctgaggatggaaaatgcagccgataaagtagctgagttcaactctttgttacttggttttataggctgggagcttagaatcgcaggtaataaagtgagggtgatcaaggatgaaaaacatttaaagaggctaataaaactcaacgataagtatcctattcccccccgagagaaaggtattctgttaaccaatggtttcaccaatagattcgctgatgagattaaaaatagtctgtctatgtataagttagaaaatgcctatttagcactcaactctaatcaacacaaagaaaaggtgattgatgaaattgttgttgaagttgagaaaattgtcgataaatttaaagcagaacttgattctttggatttcaactaa

SEQ ID NO: 469614 - DNA, 126 bp, Shigella boydii
atgggaaacaaacgtaaacaggcgcgtcgcgcagctcgtcaggcagtgaagccaaagccacgcatccacggctacgaaattgacacaatcatcgttaatgaacagcagttgcacgaggtgaagtga

SEQ ID NO: 469615 - DNA, 246 bp, Shigella boydii
atgaaagtcgttatctacggacgagataactgctcatactgcaaacgtgcggttgagctggcgaagcaactaaagggacatggctacggtgattatgagtacatcgacatcaccactgccggtatcgacaaggaaaaactaagtgaaattgttgataaaccggtagagactatcccccaggtgctgatcgatggccagccgattggcggatacacagaactggctgcatacgtcagcaccctctga

SEQ ID NO: 469616 - DNA, 1104 bp, Shigella boydii
atgaaaaatagctttgacagagcacgcgctgcggagaacacctcaaaagaggcgatagagtatctcgaaagagcatctcaaatgcaggccgttatgatctcccaggtcagcaatgacatgagattctcggacgcattcatgttattcactcgcttatctctgctgataaccagacgtcggccagagatcgctgttcattgtattttgatacatgttttgccgcacattgccgatgtaaaagtaagtgacattaataggttcatggtgaaccaactggtcaacccactaatactggatggcaaaattgttatgggccgccgcgttttctctctgatgaagcagttccttagctggtgcgccttccaggggatgatagacgtgtcaccgttaaacgatatgtcacttaacaaagttgccggtggcgcaaagcccacacctcgcgagcggaagctgaccgacgcagaggtatgggtgttctggaatatatgggactacttcaatgtgtgtgctggtacaaaatgggcggccaggctatgtcttgtatccgcaagacgacctgacgaagtactgcgggctaaaaaaagtgagttcaatcttaagcgtggggtttggaatcaaggcaagaggaacaaatctgcccgtgagcattctctgcctttaagctcattaatgcgcacttgtattgaagagttgttcgaatatggtaaagacagccagtggctcgtgccttcgaataaaaaaatcgggaaagaccttcctatgtctaaagtggcaatagcccaggcattacgtcgtattctggaacgaccagaactgatggagcttgagccatttacaccccgagatttgcgccgtactgcgcgtagttacttcccagcattaggcataagccaggaggtatcacgtaaaatcatgaaccacagtcttgaggggatagatcgggtctacgaccggcacgattatatggacgagatgcgagacgccttagaaagtttctcgacgtacatcgcatcaatcgtagagcaaccggatttagacgaaattgaccacaaatttaagggagatcgtctatcaacagagcttattcgtgtaaatttttcatag

SEQ ID NO: 469617 - DNA, 387 bp, Shigella boydii
atgtctgataacaagattgaatttatagaaagtcgctacgctgcttttatcgcagggttgattgaatcctcacctatgagccaggcccagatagccaaaacaattgggtataaaaacgccaacaacctttctttaattaaaagcggcaaaattcctttgcctatcgataaggttcgtccgctggcgctggcactgggcattgagccaagtcgtcttatgatgatggtgctggaagaacgccaacccgaactcgcagcatttttatacaaagaaggcactgctcctcttaacgaggacgaaaaacaggttcttgctgcatataacgagcgattcggtaaagagaaaggcgcatcacaaaaggttgttgaggccataaagtctctatga

SEQ ID NO: 469618 - DNA, 213 bp, Shigella boydii
atgaacaccactatttccagcctaatcgctcttgagatcggacacgtacagaaattagctgatgagtgtgtagctgacatcctcaccgatctaccgaatgagcagattcaggttggtgtgaatgacacaactggctttatattcgaacttaacaacaaacgcttcacgcttctcaataccggctcctggtctttagccgtcagaatctgttaa

SEQ ID NO: 469619 - DNA, 2109 bp, Shigella boydii
atgtctaaaacacgttccatcaaagaggttcaggacttccgtgacagtgtaaaacgagtagtcgctctcctttcaggtaaaaacatccctgttgcagaacgaggggacgacgcttatgtacgctataacgatgatggagagccaattctcgtaaacatcccatcaatcccggataacgcaacaccggcattgatgaatgctgtgcgcggatttctcgatcatgaggttgctcacattttgtttaccgatattcgtgtgtccaacaaaatgagagaaaaaggacgcgttccttcctggtcgctatggaatgccttagaagacgtgttcatcgagcgaaaaatgggtcaggtctttaacggaacaagacgtaatctgatggcaactcagcgccttataatcgaaaaagtctttaaaccaaaggcttcagaggctattgcttattgtggcaaagatcagcgcgcgctttttctaaacttctttctctgtccggttgtaagagcctgggatggccaagcaccgttcgtagatttcatggatgaatattggcctgtcattgagaaaccaatttcattattaaaagaacatggtatcgatgtggccgtgcgtaacatgtcttgcaccgaggattgtgtaaaggtggctgcgaccatagctaagatcctcaaagacactgaaagtgaaagcaaaggtaaggagtcagctccgggaaaaacttccgatccttcagacgctgaccagacggatgcctctggagaaaacaatgaagacaacgaagatcatgagacaccctcagcgttagataatcacaaatctatcaaatcagaatcacacagtaagcacaaacatgataataacgacagtgatgattcagataattctgaatcatcagaaacaatattcgatgatacagaaaatgataaagaggtatcagattctggtgcttctgataacgcggcgtcagaatcatttaccactgaccacgaaaaaagaaaatcgacagaagacggctcttcagacattccaactccgtcaaaaatgagtctggaagaggctttagaggagttggatagcatggaagatgaagtcggaggcatgacagaagatgcgctatccgaaacgattaaaagcgagttaacagaaagctcgaaaagcgaatacaggccatacaatcgctcatacgacttcatcggctcgattgatcaggcagaagcccatatcaaacggcttattaaaacattctccgatattgatttaggtggatatccaatcagccgttatcgcatcgttcctgaaggcaaccaactcttcgacaaatatattgaaaagcacctttcgtcaggtgtttcgtcgacgctggcaaaagacctggaacgtgcaatagcaagcagaaacagagttcagtttatacctggccagcgtcgggggcgcattcatggttcaagtatctacagattaacaatgaatgatgatcgcgtgtttcgtaaaaaagaagaatctaaagccgttaacgcctgtgttcaacaagtgattgatttatcgggttcaatgagtggcgaaacgataaaactagctcttgcaagtgcatataccatcgccgatgcacttgatcgaataaatgttcccaacattatcaccggcttcactacatttggtagtcatatggcggcaggagaacttaaggctgtcaagtatgagttctctcgctttgaatctttaatgctacctatcatcaaaaattggaatgaaaaggtaaattctcgcgaagttcgctcacgtatggggtgcgtaggctacacattcccacttcttaataacgtggatggtgaaagcatagccagccttgcatcgttattttccggtcgcatggaggacaggaagatcatgcttgttctgagtgatggcgcgccgtgggctgttgggagaggttttgacgctcatttgcgttcagttgcgaagcaaattgaaacgcagactgatattgatttgatggcaattggcatcatgactgacgcaccggagagattttactcaaatcatgccctggtaacgagcgttgatagtcttggttcatctgtagttactgaactatctcgtatcattttaaagtga

SEQ ID NO: 469620 - DNA, 1236 bp, Shigella boydii
atgactactactgcactgcaaaatgaaaaaaatccttctgattaccttgtttgcaagtggtgcggaaaatcatttcactattttaagtcccatgtagccaatggtaattgcgagggcattcctgagtcagtaaaagatgccgatcctgacaccgtactgaaaatgtacacaacacagtttccagatgagccaacgctatcgaaaaaggcacttgatgcaattcaagctaaacgtgccgagcaaaaaagcgaaatggccaaatcatctggcgtgaccagtagcccaggctacacaggcacagttgagtacaagacagatctggtcgcagctcacgaactgctaaatgtaacggtgaaagaactcggaacaaaacgtaggacgccgctcatggttagcgtcaacgtcaatacgccgtttccagagttcgttccagaagtgaagaagggatacgtatatggcgacttcgaactgatcaaagacattttcatgatgcttgaacttggcatacctggctatttgtggggtcatgcaggaacaggcaaatcttcattgcctacacaactatgtgctttgctcaatcgtccgttaatccgtgcccaacatacagcatcaatggaagaggctcatgttacgggacaaattctggcgcgtgatggctctacgtatttcgagcctggcttgcttgcgctcgcaatgaagcatggctgggtttacctcgcggatgaatacgactttgcgtttccacagattcttggcgtgtatcagccagtgctggaaggtgaagcgttggtcatcaaagaggcgactccagaatggcgtcgcattactccgcatgaacggtttgctttcattggcactggcaacacgaacggatctggtgatgaaaccggcttgtaccagggtacaaacatccagaacgccgcgaacttttcgcgttttggcatcgtttcgaatgtgaaatacatgagcaaagaggcagagatcaacatgttgataaatgccggtatcgtggatgaatacgcagaaaagatgattaagtttgccggtatcgttcgcgatggatacgaagaacaccttatcagtcagccaattggccctcgtgaacttttgttgtcggccaagattggaatgatgcgaggcgactttgtgacaggtattgagcgttctttcattaacaaactcccttcagcttctgcacaagcggctcgtgaagttgttcaaaaaatatttggttaa

SEQ ID NO: 469621 - DNA, 3519 bp, Shigella boydii
atgaaggcactgatggttcgaactgacttctcacttggggagtcggctctaaaagcagaaaacgcggtgaagattgccagagaagctggctacaccgctgtaatttcagcagatagcatgaatattgcgagcgttattccactacaacgtgccgctggtgacgacatggcggttatttgtggtgtgaaactaaacattgttgatgatcccacatacgagcaccgggctaaacttgctaaagaatctatgagatgtatggaatcattagagcggggacgtaactactcgtttaccgctctaattaaaaatgagcaaggatatcgcgacatctgcgaactaatgacggcggccaacacacgagaacagttctactttgtaccgcgtctctcgctcgaacagttggtttctacatatgccaaaggcaacatcatcctgcttacttccgacatcggtagcgtgttccaacgcaacgattttgcaaaaatcataagcacactgattacagcgggtggaaaagacaacttctatagtgtggtttatccgcaccctaccccattctacgaccagattaacgtccgggcgatgaaagtcgccagcgcattgaaaatagagccagtggcgttctatcccgcttattacgaatcgatcgacgatgcagacattaaagacattgcgcacatggttacgaacaacatcaaaatcgaccagccgcatcgtctgcgtatcccccaccagcgagataacgccgtcaatggtcgccgccatctccttgaggcgcttaaagccttctccgttcgcatggatgtgccggtaacagctgcaatggcctcaacaacgcaggataccattatcgatgcctgcacatggcgctggcatgaattgccgccagcactgccaaagatggcagacgacgagcctgcaacgcttatgaaactggctgttgcagggctgcgtaaacgtcttaccacaaaagagtttggctacacaccacctgcttctgagaacagggtttatgttgagcggctaaagtacgaaatggacacgctgactcgcctgggattttgtggttacttcctgatggtacgcgatctgatgaatcatagtcgtgaaactggcattcccgttgggcctggtcgtggttcctctgccggttctctggtggcgtggtgcataggcataaccaacgtcgacccaatccgtcacggtcttctgtttgagcgtttcatcaaccctgagcgtctcgacttgccggatgcggacttggacttcagccaggcacgtcgccatgaggtgatcgagtatctgaatgaacgctacggcgaagattacgttgcgggtattccgaacttcacctacctgggcgcagcctctgcactacgtgataccgctcgtatttatggtgtggagtccgcagatatggcggtatcaaaagaactgaagaacgtcgaggatgatagccttccattggaagagctgcgcgaacaactggcaagtctcgacaaatacgcaacaaaatatcctgatgcattcaatgcagcctgcaagttacaaagccttatgcgtggctttggtagacatgcggcagggatgatcgtagcaggtgttcctctgacagaacgtacaccggttgagcgccgtggtgacgcgcgttgtatcgcatttgacaagcgttactgcgaggctatgggcctaattaagctggacgtgcttggcctggcaactctcgatttgctcgatagtgcaaaacgctacataaaagagaacacaggtgaagatatcaatcttgatgccatttctcttgaagatcgcaaggtgctggatggttttgctgctgggtacactcaaggtgttttccagcttgaatcaggcccaatgcgcaagctgcttaaagatttaggtggtggaattgagccaatgagctttaaaacggtcgtcgctacaactgcgctcttccggccggggccaattcaatcaggcatgttggatgactatgtttctgtcgccaaaggctttatgacgccggaatcattacaccccgttcttgatgaacttaccgcggaaacaaatggcgtgattctctatcaggaacagacgatgaacgcgactcgattgcttgccggcttcacaatggctgaagctgacgctgtgcgttccgcaatcggtaagaagaacatggaaaaaatgaagagcatgggcgagaagttcatcgttcaggctcaagctggctggatagacgttgagctggaagatggcactacacagcgcattcaccgtgcggaacattttaaatgcgaagacggaactctgaaaactgtcgaagaggcacttgagcacggcgcaaaactacctataaacgcagtacgcgttacagcgtcacatccagggctatcagagatgaaagcgaaggagatctggaccgcatttgagaaaaacggagcctatcagttcaataaatcacactccgttgcttattctttaatcagttatcagtctatgtggctaaagacgcactaccctgctgagttcttcgcagctgcgctcaccattctgggcgaggataagcatcaggggctggtgaaggatgcgctgacctatggcattcgcgtattgccaccagacgttaatgtgtcatctaaccgaattgagatccgcacactcgaagacggcagtcaggcactgtatgcgccattctctgctgtgaaaggctgttctgaaaatggttgtcaggcaattatgcgtgcgcgtgagaaagttggtggcaaattcgagtcagtggcacaattcgatgaagcggtcgagaagcgtgcatgtaacagtcgtgtacgcgagtcgcttcataaagtaggggcttttgcgtcaattgagccaggcagtctgccagcaactgatcctgaacgactgcgcgaccaggctgagctgatgggcaatctcatcattgacgctgttaaagcatcacgtccgttcgaaatgaatcctaagcgttctgccgaaatcaacgtactcatgacacgtatggcggctgaaatgggcttgggtgaggagttgatacgcccgactattggtattaaacccaaaatcatgatcattctggacaatgcgaacggcaatgacgctcgtaccggctacttcatggagaacggatacgacgactttaaggcaaaactactgacagttggagatctgcgcatgggcgatctttatgtcacgggtgtttgtaagaaggttaaggacaaagagaaagactataccaaagacgagataggccagttcacagactttatgcgggaagaaattaatcttgtacgaccaacctacattttgacgtgtggtagtcgttcaaccgcactatttaacaataagagtaaaccatcagatctgattggtcgtaaggagtacttcccagagcttgatgcaaccgtcttctacggatttaacccgaatatcctgtacttccgaccggaagaaggagagcgactggaggccattctggctgatatcgcggagacaataaataagtaa

SEQ ID NO: 469622 - DNA, 216 bp, Shigella boydii; identical to SEQ ID NO: 12135

SEQ ID NO: 469623 - DNA, 564 bp, Shigella boydii; identical to SEQ ID NO: 12136

SEQ ID NO: 469624 - DNA, 225 bp, Shigella boydii; identical to SEQ ID NO: 12137

SEQ ID NO: 469625 - DNA, 432 bp, Shigella boydii; identical to SEQ ID NO: 12138

SEQ ID NO: 469626 - DNA, 1029 bp, Shigella boydii
atgtctaagacattacttgatttgcttaacaaaactcgtgaagacattgccgccaaacgtggcaacaacgttgatctgactcgcttaaaagacggcgtcaactatatccgcatcttcccgaataaagacgacccaaacggtaagttcttccagactttcggtatgcactacgttaagtatcagaacgaggaaggtaaagaagcaaccaacgcttatatttgtgagcaacatactcacggtcgcgcttgtcagctatgcgaaatggttatggaaggtcgcgctcgtcacaagggtaacaaagcaatggaagaacgcatcggtcaaatgcgtgccactcctcgctacctggtcaacggcattctttctgctcgtgaggatttcgcagatgctgagaaatgccagttaatcgagctgccgtctactgtattcgatgatatctgcaaagcaatcaccgaagacatcgctgatgatatcggcaatccactgagcaaagaggaaggctacgcattcctgattaaacgtactggctctggtcgcgataccaaatatgacgtctcgcctaagcgtaaagtctacaaaggcgatatcgaagataaattctggaacacccagcatgatctgatcgcatacgcaaatcaggctgatgaaactcgtcttctgtcgacagttcgcactatgggtcgtctgattggcatcgctgcaccaactgccgcagcatctgcaccagcaatttcctcaaccgcgaaaacatcggctgcggcactacctggatttggctctgtcactggtcatacagaaggagcgacggctgtagcaaccgcgcacacaccggcttctgaaccaaccagtctggttgatgaagaaatcctccgtgccgttgaaactgaatttaaaccagaggcaagttccgctgccgttgccgtatcagtcaaagagtctgaagcagtcgcagcgacatctgtagcaaccgcatctgcgacggaagatgaaggtctggatgacctactgagagagctggactctctgtaa

SEQ ID NO: 469627 - DNA, 945 bp, Shigella boydii; identical to SEQ ID NO: 12140

SEQ ID NO: 469628 - DNA, 267 bp, Shigella boydii; identical to SEQ ID NO: 12141

SEQ ID NO: 469629 - DNA, 1074 bp, Shigella boydii; identical to SEQ ID NO: 12142

SEQ ID NO: 469630 - DNA, 201 bp, Shigella boydii; identical to SEQ ID NO: 12143

SEQ ID NO: 469631 - DNA, 831 bp, Shigella boydii; identical to SEQ ID NO: 12144

SEQ ID NO: 469632 - DNA, 426 bp, Shigella boydii; identical to SEQ ID NO: 12145

SEQ ID NO: 469633 - DNA, 276 bp, Shigella boydii; identical to SEQ ID NO: 12146

SEQ ID NO: 469634 - DNA, 180 bp, Shigella boydii
atgaagatttttattgaatacttgttactcatcgtttcaatagcttttgtcatcgactgcattttcaccggtgtcattcgtaaagtcttttccccggtgaacgacgtagtcataaacgctttggctatcgtgctcgtatttaattcagcatttgatgtaatcaaagaggtggcagcatga

SEQ ID NO: 469635 - DNA, 336 bp, Shigella boydii; identical to SEQ ID NO: 12147

SEQ ID NO: 469636 - DNA, 213 bp, Shigella boydii; identical to SEQ ID NO: 12148

SEQ ID NO: 469637 - DNA, 1095 bp, Shigella boydii; identical to SEQ ID NO: 12149

SEQ ID NO: 469638 - DNA, 645 bp, Shigella boydii; identical to SEQ ID NO: 12150

SEQ ID NO: 469639 - DNA, 1086 bp, Shigella boydii
atgactttgccatacggcgtcatttctgactgccactaccacaaatgggatgcgttctccacgacgaacgctgaggggcttaactccagacttgaaatacagttggaagcaacgaaagaagcagccatcgccatgaagaaggccggttgtaagtacatgttggttgccggtgatacatttcacgtccgaggaactgtgtccccttctgttttgcattacgtaactgaaacgtacaagtggattatcaacgagcttgatctgacagtagtaatgctggccggtaatcacgatcttgaaaccaacgattcagtatatagcgccaacgcagcagcatcgctgagttctatcggcgtggtaatcgtatgtggcaagcgcccacactcaataaaaattggtgatgtgactgtccacctgattagctggcgtaacaatcatgcggagcttatcagcgatctgaaagcattacgtaagagcgtagaaggtgataatcatgacgttgttatccatacatccattaacaaagccattccaacaatgcctgacgtcggtatcgatgcgcaggagttaaaggatatcggctttcgtctcgtgcttagtgggcattaccacaaccacaaagaggtcattcctggagttatcagtgtcggtgcactgactcatcaaaattggggagatgttggatctctggctggctacatgatcgtaaacccggacggcagtttcagtcactacgaaaccagtgcgcctaaattcattaacctggaagatgatgttgctgatgaccaaattcgcggcaactacgtgcgtttccgcgccgtaattgagaacgatgaagaaggcattaagtaccagaacatcctcaaaacaatgggtgcaaaaggtgtcgtgtgcaacttcatccgtaagtcatcaatgatggaagggacagccagcacaactgaaaccagcaaaatcgatagcctgggagagtcggtatctgcttattgcaagattgtccacgatactgacggcggatttgatctgagcaaattggatattttgtgtcaggaaatcctcaccgaagcggagagttcggaggctgtgtga

SEQ ID NO: 469640 - DNA, 1917 bp, Shigella boydii; identical to SEQ ID NO: 12152

SEQ ID NO: 469641 - DNA, 744 bp, Shigella boydii
atgtcgtttaaattaagccgctcgcagtttttgcaggtatttgcagtgatgcagtcgataaaactgatcaatgggcatacttccaatggtgcggctccacgtattctgtggggcagcaacaatattgacggagtacaattcgccgcgttgcttggtctaatatccgagacgccattgatgcaaagtttgaaatcactaccacctggatgtattgcgccgatcctgattaatccttttgttgaggggggatatcttcccaacgtcgggcctgggtttattgcatcccatgaaactgaagatcttaacattaatagcgaaggggtctttaggggaatgggtgcgcatcactgtatggctttcacgaaccttattcgacttgccaataagcgggtggatagtttggcatcgccaggtgatgcttttactggtttccttatccaaaggagggataaaaagtacagtgcggacaaactacagtttgttggtaagtatggagaaatggtagaaatcgaacttcagctccctcatgttttagcaaacgatagtgcagacagtcggaggctattgggcatcatgcgtcatttcatagcaagtggtgttaaacatgccgcagataaacgtgtcacgcaggaaaatgagtattcagactttgcaaactatccccaaccaacgttgcaaacggcaatagtagccaattcgttggaggcgagattattggaaaaccctatatggggaacatggtaa

SEQ ID NO: 469642 - DNA, 570 bp, Shigella boydii; identical to SEQ ID NO: 12154

SEQ ID NO: 469643 - DNA, 2316 bp, Shigella boydii; identical to SEQ ID NO: 12155

SEQ ID NO: 469644 - DNA, 1143 bp, Shigella boydii; identical to SEQ ID NO: 12156

SEQ ID NO: 469645 - DNA, 870 bp, Shigella boydii; identical to SEQ ID NO: 12157

SEQ ID NO: 469646 - DNA, 1104 bp, Shigella boydii
gtgtcactccttttgaatcgtgagcatacgaacggtcaggtaacaaacgcatcgtatgcaaaagttattgagacggtgcttaaaagcggcgtgcaggctgatgatcgcacaggcactggtactttaagcacctgctacgttccctcttactacatgcttactggtgggactgtgccgcttatttctggaaaggcggtaaatcttaagccactgcttgtcgaacttgagtggtatctgaaaggcacgggcaacatccaatttctcaaggataacggcgttaagatttgggatgcatggaccgatgagaatggcgatttggggccggtttacggtaagcagtggcgtcgatgggaagatacccgcatcgtgagccatagtgaatatctgagcaagatcgctactttccgtgaacgcgggtacaaagtcgagggatacctgggtatcagtgaagatcgcgtagtgctgtcccgtgaaatcgatcagctacagcgtattgtcgatacactgcgcacgaaccctaccgatcgtcgcatcatgcttaacgcatggaacgtaggcgagcttgaggatatgaaactgccaccttgccactttgtcttctctttgtggagtcgtgagctggattttgaaacccgtttaacgatggcaactgacattggtcttcaacacagtcgcctcggttacgagtctatctacaccaagatgctatacgatctggagatggacggcagtgttactgaagctgaactggatgaacttggaatccccaaacgcatcctcaactcctgcctcgtacagcgtagcgtagacacttttgttggtatgccattcaatattgctggctatggcattctcactcattttctcgcgaagattacgggtcacatggccggtgcatttgtgcattttggctttgacgtgcatttgtacaacaaccacatggaaggtgtgtgtgagctaatgaaacgacaggctccagagcattcagatccggtcgttattttccctcatgaatggtcagagttggatgatttcaaatgggacgaggttttaattcttggctatgaccctctatcgtggatcaaggttccagtggcggtgtga

SEQ ID NO: 469647 - DNA, 414 bp, Shigella boydii; identical to SEQ ID NO: 12159

SEQ ID NO: 469648 - DNA, 477 bp, Shigella boydii; identical to SEQ ID NO: 12160

SEQ ID NO: 469649 - DNA, 645 bp, Shigella boydii; identical to SEQ ID NO: 12161

SEQ ID NO: 469650 - DNA, 420 bp, Shigella boydii; identical to SEQ ID NO: 12162

SEQ ID NO: 469651 - DNA, 558 bp, Shigella boydii; identical to SEQ ID NO: 12163

SEQ ID NO: 469652 - DNA, 810 bp, Shigella boydii; identical to SEQ ID NO: 12164

SEQ ID NO: 469653 - DNA, 594 bp, Shigella boydii; identical to SEQ ID NO: 12165

SEQ ID NO: 469654 - DNA, 231 bp, Shigella boydii; identical to SEQ ID NO: 12166

SEQ ID NO: 469655 - DNA, 594 bp, Shigella boydii; identical to SEQ ID NO: 12167

SEQ ID NO: 469656 - DNA, 495 bp, Shigella boydii; identical to SEQ ID NO: 12168

SEQ ID NO: 469657 - DNA, 198 bp, Shigella boydii; identical to SEQ ID NO: 12169

SEQ ID NO: 469658 - DNA, 426 bp, Shigella boydii; identical to SEQ ID NO: 12170

SEQ ID NO: 469659 - DNA, 159 bp, Shigella boydii; identical to SEQ ID NO: 12171

SEQ ID NO: 469660 - DNA, 570 bp, Shigella boydii; identical to SEQ ID NO: 12172

SEQ ID NO: 469661 - DNA, 282 bp, Shigella boydii; identical to SEQ ID NO: 12173

SEQ ID NO: 469662 - DNA, 615 bp, Shigella boydii
atgttcgggatgtcaattactcaatcagatggaagtttgtggatgagtccagaatttactccgcaaaatctgattaataaagggacaatgtctacatctaaaggttctgtttttcaaacatcaatcccatcaaacaaatcatgctttttcttcataaaaagcagtaataaggcgaacatgatgtttattcatgagcatagtaacggatacaatgctctcagattgcatcaggtaaatggtagccccggaacaataacagtttatgctttttctgatatggtgttaccacattctggctatggcattgccatgtataacagcgcaggcgcaatggtgtatcacggtgagatgatgccccttgatgcgaaacttatcactatttctgaccctcaatttacaatagatatggggtatccatgtgcggtaatgcctgctatggttggggtatataactatagacgaaccgattacgacagacctgtctatgtaacaatgacaggtgcaactggaaaccaagtatataacggtcaatggtattccggtaatgtcacatgggatattaagaagatttatacaaacaaaattctggtgataaatacctccaagtatgattag

SEQ ID NO: 469663 - DNA, 1686 bp, Shigella boydii; identical to SEQ ID NO: 12175

SEQ ID NO: 469664 - DNA, 705 bp, Shigella boydii; identical to SEQ ID NO: 12176

SEQ ID NO: 469665 - DNA, 381 bp, Shigella boydii; identical to SEQ ID NO: 12177

SEQ ID NO: 469666 - DNA, 642 bp, Shigella boydii; identical to SEQ ID NO: 12178

SEQ ID NO: 469667 - DNA, 543 bp, Shigella boydii
atgaaggtcgaaaaaatagatgttctttcctttgtgctgacggatctggaacgcctcgatccggttcgagtgatgattgaaaactacgaacctggtaagggaagaatcaccatcatctgctacggaaaagcgtggactgcggcttggtttgctatgggcggtgatgatgtgcagacgttcattaagcgggtcagcaacgagtatctaatcggctatttcgactctcaactgcgaagcacggtcgacgatgacaacgatgcaaatctgcttttcgtgaagtcagaaatcataaagttacgaagagagagagaaatcgacgccgtactggctcgtgaaatgtgggacgaggcggaaaacaccgatgacgtaaaagaaagctgctgttgtttcggcgtcggtaacaaactgctgaatctctttggtgatgatccgtggtatgccgactggccaacggtaccaaacccgaaataccagtatctggaacgcattgtgaacgcggtacgtgaagggctgaaagagttagataagttagaggcatcgtaa

SEQ ID NO: 469668 - DNA, 501 bp, Shigella boydii
atgagagagaaaatcaagaacccggtcgtcgtattgtataaacgggaaaccagcgattcttatgcggtatccatcactgatggaagccagaacatgcacgatggtctgctaatggcctccgtatctcctgatgattctgactaccctttcgccactttcgctatggttggttactacatggctgccgaaattgagaagttgcgagcgcagagagacgcattagcggcggagaatgcagccctgaaagaatctgagcgagcattcgatgcgatgtgtgccgaggaacacggagataattgggttagcgaattaacggagactccagccaccgatgcttttctggctgaagtacgtgcgcagggcgtggatatggctcgtaacgcgatgattgattttgttgatggtgaagttgggccaaacaagaacgttccggggctgattagaggcgcagagatatgcgtaagtattgctgaacagcttcgtaaaggagtcatccagtga

SEQ ID NO: 469669 - DNA, 402 bp, Shigella boydii
gtgagcaagattgactatcaggcactgcgtgaggcggcagagcgtgcaattccggcaatggaacgcctgttaatgttgccagttgatgatgatctgatatgcgaacaggaacttaaagatagcggtgttgatattgatgccctcaacgccttcaaatttttggccggaccagaaaccgtgctggcactactggatgagatcaacgcattagaggaaacgcgtatcaacgatgtttgccgtattgcggaactaacaaaacaactggagttggcaaaatcaaaactcaacgagcagcgtgagtattacgagggcgttatctcggatggaagtaagcgcatagccgctcttcttcgcaaggacaatcttgccagcgccacgaacattgaaggtgaaagaaaatga

SEQ ID NO: 469670 - DNA, 324 bp, Shigella boydii
atgaccacatcgcactctgctattacccaagaaaaagccttcaacatactcgaacgactagagacgctcgctacggaggaggagatatccccggagaaactggttgagttcagccgtgtgatattgcgtcgcaagaacgatatggagcggctgacatctggcgctccatccttatcagtcaggcgaacactttgttgcagcttctgcaacaaatcccagtacgccgtcaaaaagttaattgctggggacgccgttttcatctgcgacgagtgtgtggatgtgtgcaacagaattatccggggagagaaagagagatcagcatga

SEQ ID NO: 469671 - DNA, 531 bp, Shigella boydii; identical to SEQ ID NO: 12180

SEQ ID NO: 469672 - DNA, 186 bp, Shigella boydii; identical to SEQ ID NO: 12181

SEQ ID NO: 469673 - DNA, 654 bp, Shigella boydii; identical to SEQ ID NO: 12182

SEQ ID NO: 469674 - DNA, 384 bp, Shigella boydii; identical to SEQ ID NO: 12183

SEQ ID NO: 469675 - DNA, 627 bp, Shigella boydii; identical to SEQ ID NO: 36489

SEQ ID NO: 469676 - DNA, 1101 bp, Shigella boydii
atgagcgagtccaaatcgccggatgccctgagagcaatggtagccggtacgctggctaattttcagcacccaaccctgaaacacaacctgactacgcttaaagcgttacaccatgttgcgttgatggatgacacactgcatgtcgaactaatcatgcctttcgtgtggaataagccttttgaagacctgaaagagcaatgtagtggtgatctgctccgtatcactggcgcaaaggctattgactggaagctgtcgtacaacattgccacgcttaagcgcgtcaaaaaccaaccaggcattaatggcgttaagaacattatcgccgtcagctcaggcaagggcggcgtgggtaaatcctccacggcggtaaacctggcactggcgttggctgctgaaggtgcgaaagttggtattttggatgccgatatctatggtccatcaattccaaccatgctgggcgcggaaaaccaacgtccaacctcacctgacggtactcacatggcacctatcatgtctcatggcctggcaaccaactctattggttatctggtcaccgacgacaatgcaatggtgtggcgtggaccgatggccagcaaggcgctgatgcagatgttgcaggaaactctatggcctgatctggactatctcgttctcgatatgccgccgggcactggtgatattcagttgacgctggcgcagaacattcctgtaactggtgcggttgtggtaactacgccgcaagacatcgcgctgatcgatgcgaagaaaggcattgtgatgttcgaaaaagtcgaagtgccggtactgggtatcgtcgaaaacatgagtgtgcatatttgcagtaactgcggtcatcacgagccaatttttggcaccggtggcgcacagaaactggccgagaaatacaacacgcagttgttaggccaaatgccacttcatatctctcttcgtgaagatctggataacggaacaccaaccgttattagtcgtccagatagcgaatttacggctatttatcgtgacctcgcagatcgcgttgctgcccaaatgtattggcaaggtgaagtaatacctggcgaaatcgcattccgcgcagtgtga

SEQ ID NO: 469677 - DNA, 690 bp, Shigella boydii
atgctcggcctggatgcgctgatcctgctgcgcgataaaaacttcctcgtctttttcttctgttcattcctgtttgcgatgccactggcgttctattacatctttgccaacggttatctgaccgaagttggcatgaaaaacgccaccggctggatgacgctcggccagttctctgaaatcttctttatgctggcattgccgtttttcactaaacgctttggtatcaaaaaggtgttattgcttggtctggtcaccgctgcgatccgctatggcttctttatttacggtagtgcggatgaatatttcacctacgcgttactgttcctcggtattttgcttcacggcgtaagttacgatttttactacgttaccgcttacatctatgtcgataaaaaagcccccgtgcatatgcgtaccgctgcgcaggggctgatcacgctctgctgccagggcttcggcagtttgctcggctatcgtcttggcggtgtgatgatggaaaagatgttcgcttatcaggaaccggtaaacggactgactttcaactggtccgggatgtggactttcggcgcggtgatgattgccattatcgccgtgctgttcatgatttttttccgcgaatccgacaacgaaattacggctatcaaggtcgatgatcgcgatattgcgttgacacaaggggaagttaaatga

SEQ ID NO: 469678 - DNA, 609 bp, Shigella boydii
atgaaaacaacagcaaagctgtcgttcatgatgtttgttgaatggtttatctggggcgcgtggtttgtgccattgtggttgtggttaagtaaaagcggttttagtgccggagaaattggctggtcgtatgcctgtaccgccattgcggcgatcctgtcgccaattctggttggctccatcactgaccgctttttctcggcgcagaaagtgctggcggtattgatgttcgcaggcgcgctgctgatgtatttcgctgcgcaacagaccacttttgccgggttcttcccgttactgctggcctactcgctaacctatatgccgaccattgcgctgactaacagcatcgcttttgccaacgtgccggatgttgagcgtgatttcccgcgcattcgtgtgatgggcactatcggctggattgcctccggtctggcatgtggtttcttgccgcaaatactggggtatgccgatatctcaccgactaacatcccgctgctgattaccgccggaagttctgctctgctcggtgtgtttgcgtttttcctgcccgacacgccacaaaaagcaccggcaaaatggatattaaagtcatgctcggcctggatgcgctga

SEQ ID NO: 469679 - DNA, 813 bp, Shigella boydii
gtgctggcaagcgaactggctgacccgcaactgtacaaaacctttactgatgccgctgaagtgattggcgaagcatgggaaagccgcgaatttggtaaagctatccgtgaaatcatggcattggctgacctggctaaccgctatgtcgatgaacaggctccgtgggtggtggcgaagcaggaaggacgcgatgccgatctgcaggcgatttgctctatgggcattaacctgttccgcgtgctgatgacgtacctgaagccggtactgccgaaactgactgaacgtgcagaagcattcctgaatacagaactgacctgggatggtatccagcaaccgctgctgggccataaagtgaatccgttcaaggcactgtataaccgcatcgatatgaagcaggttgaagcactggtggaagcatccaaagaagaagtgaaagccacagccgcaccggtaactggcccactggctgacgacccgattcaggaaactatcacctttgacgacttcgccaaagttgacctgcgcgtggcgctgattgaaaacgcagagtttgtagaaggttctgacaaactgcttcgcctgacgctggatctcggtggtgaaaagcgtaatgtcttctcaggcatccgttccgcttatccagatccacaggcactgattggtcgtcacaccattatggtggctaacctggcaccacgtaaaatgcgcttcggtatctctgaaggcatggtgatggctgctggccccggcgggaaagatatcttcctgttaagcccggatgctggtgctaaacctggccaccaggttaagtaa

SEQ ID NO: 469680 - DNA, 300 bp, Shigella boydii; identical to SEQ ID NO: 12067

SEQ ID NO: 469681 - DNA, 186 bp, Shigella boydii; identical to SEQ ID NO: 12068

SEQ ID NO: 469682 - DNA, 561 bp, Shigella boydii; identical to SEQ ID NO: 12069

SEQ ID NO: 469683 - DNA, 330 bp, Shigella boydii
atgtttgcaaatatcgacatcaaccaaatcaagaaattaactcaaaaagagtttgatcagttttatgagttagaaggttggtcttccactctgatcaattcgcggtgggtgcttgagctgatgactcgtgatgacgcacctgctttgatgatttgcgacatgggtgaagatgctgactttatggatatgagcgaattttgtgtggacacatacaaccgcagccagaagtactacttcacatgcgatagcgaaaatgacgtgatttctaaggtctatcttcacctcgtccagcattgggacgttcaggagtttcttgaagtattcgagtaa

SEQ ID NO: 469684 - DNA, 312 bp, Shigella boydii
atgaaaaaatcattggttcttggtctggacaaagaccagaagagaaaagagaagcctgcactggttgctcaattaactttgctagacatcgttgccaatggaacttctattcgtctgttccgtgaaacagcggtgtctttcgataaaaacacctttactcgttatgtaatgaatgttcgtcgccagcgtggaaaaggatgggtggcatttcaaagaatgtggccggaacatcagctcgaactggccttgatggaagttaaccgcgtggcccagcaagaaattcagagagcatcagtgatggcaatagcctga

SEQ ID NO: 469685 - DNA, 171 bp, Shigella boydii
atgaccgttaaacgcgaaaaactgacagttgatgtttactatgcctctgaaaccgccgaaggtaagaatgtggcaaaaatcaccgttgttacgtacaacaccgaaactggtgccgaagtccaggccagtacggtctgcgcattacctctggcattcctgccgacaccttaa

SEQ ID NO: 469686 - DNA, 375 bp, Shigella boydii
atgggacttgatatctatatcgagacacagcctaaaaacgatctgaataacgaggcatccagaaagcaggttgcttacttccgtaagttcaatgcgctcgttgggtggatggagcgcaacgtaggtgaagtcgaaaattgtgagcttttagaattaacgatgaatgacatttgtcttctgaaagctcatttgatgcacataaacgaaagcaattgcgaagagtacttgcctactcgggaaggttttttcttcggcagtcaggagtacgacgaaggttactggcatgacgtggataagctgaaaaaacttgtggaagacctgatcaggaaccacgactttcacaataacagactgaccttctgcgcctggtggtaa

SEQ ID NO: 469687 - DNA, 483 bp, Shigella boydii
atgaattttatcgctactgtaaacgcacccgcacatggcaatatcgctgtaacgttctctgacattgaaaaacgagtacttggtgcatggcgcgacaatgagacggtagaactgtcagcacaagaaaaatgcattattgcacgcgacatcattggcaatcgtcgttactcgcgggtatttgagaaagcgtatgtggtaaattctggattcggaacgttcgtctttccggtgcgctccgggcgattctgccagtccaagctgattgagttcgctacgcagatttctgtctggattaaaactcaatcgtcgttcaaattttccgacgatgaagcagtatcgcaggggatgcggatcgccaacaatgcaattaaatgcaaaaacattacgtataccgctggcgttgatacatggaaactgttttgcgctaactttatgctgaatgtatacgcaagcaaccgcatccacatccttgatggcgtgtaa

SEQ ID NO: 469688 - DNA, 231 bp, Shigella boydii
atgtttgttcttatcgctggcgttaacgtccataacgaatattatgttaatcgcatcgctgggatcgctggttacgctgggcgcgcagtcgagcttataaatgaaacaacgcgcaaaattgacttattgagcgaccaggagcgaaaaaaagcagacgtgaacgacgctgatatttttttaatgttaaaagcgtttgtagaaatgggatttaaaatcagtttacacaaataa

SEQ ID NO: 469689 - DNA, 204 bp, Shigella boydii; identical to SEQ ID NO: 12076

SEQ ID NO: 469690 - DNA, 651 bp, Shigella boydii; identical to SEQ ID NO: 12077

SEQ ID NO: 469691 - DNA, 252 bp, Shigella boydii
atggactataagcctgtcattcagtcgctgatgaatgacgtgtgctcaacgtctcagaatgtatcagtttgcatgtatcaattttcggcagccgtaaaagcaggaaaagcgataggtgagaatgtggaactgtgtaagaaagtggcaaatgaagaacgggcaatgttggattgcgaatctagcgagtcatcggcacagttcgttgatgcgctatttgacaccaatcgtaaggctgtagagtctgttcaataa

SEQ ID NO: 469692 - DNA, 525 bp, Shigella boydii
atgacaaccaaagatattacctacggtatccaagctgaactctggccgcgagattacactaacgttgaaaaactactgatgttctggcgcagagaacaaattcctgtaagggtcactctcgaagatggccaggcgttttgcatgtacgtttatggcctcatgccatctcgtaacaaagttgacctttgcccagccccttttgacaaagaaaatcgtataaggctcccacttgaacgcattagtacaattgaatcaggagtggttgacagtatcgctcacgatttcaaaggtcgactaacagttcaccctgattatgtcgataatcggccatcacgccgcgatttttttgcaatttgcaaccaagcctacaaagcaaacaaatctataagggtgtacatggcggatggccgtgaaattgagggggtgtcagcaggcgcagatgcttgtcaggttacactacgtgtcgagaacggtagaaaaatagttgttttgttcgattgggttgaacgaattttgcctttttga

SEQ ID NO: 469693 - DNA, 465 bp, Shigella boydii
atgaagtctcccatactgttcactttctgttctaaaactatcatgaaatactcgcttctccctctactaacgttaccagtgttgatgcttaccgcgtgccaatcacgcccaatatcaatccatgacgccaaaccagcaccgcaggccaaagtgttcaagtatcaaagcgcagcgccagctacgttggtggtaatgagagacacaggttttgtaggagctggatgtgatgcttccattttcatcaacggcgaaactgtcgcaaaactggctacaggcgaaaaagcgactttccatttaaatgccggagaattaattgtgggtgcatctcttgaaggtgcaggtttatgtgctctaaaccccgctcgtcaagagcgagaaacgactctgaagaatggagacacaaaagcgttcagggtgttcaccagcaattctggtgacatcgacattctgccaacaactctgtga

SEQ ID NO: 469694 - DNA, 279 bp, Shigella boydii
atgagcgaaaagaaaacaacttattgtcaggtagcattgtctgataaggccaatgacaaacttggaaagtttcaagtgaaactaaaagaaaaaaatatcaaaatgtctaaggctgaagtcataaataccattctggaacaattgacaatggccgactttgacaaggttatatcttctgtcggggcttccgctaagactcgtgagaaaatcatgcgtatctatgagaactctaatatgacaaaggaagatctcgaaacgctattaagcagattaaaataa

SEQ ID NO: 469695 - DNA, 1560 bp, Shigella boydii
atgactgttcggattgtatctaacgcagttaatgcgcttatttctggcgcagatgacaaggtaaagcaactggtgcaacagatgttgagctacgaagtcgagactggcgactggaagggcacaagcacaatgttcaactggagtaaaaactcgttccctgcaggctttgccaagcctgtagcggcgaacttgaacaaggcgggcatcaaatgtgttcatatccgcaaagacaaagccccggcgcttggaaaaccaaatccggcggttaacccattcccatacaatcctgattatgcgtatcaggatcagactgtggaaacactggttcgagagggaatgatgattgcgcagatcgctactggtggcgggaaatctaatgttgcctgcaaagcagctgcacgtatcggtcgaatgacattatttttaacaacccgctctgttctgatgtttcaaatggccgaaaacttccagagatccatcgactaccgcgccaaaaatggcgaaccgtggttaaaagaccaaaaggttggagtcattggctcgggtgagttccaggtatcacgacatatcaacgtcgctacagttcaaactcttgcaagtttcctcgaagaaccaccacgcgatgcaacaccagataagaaaagctaccacctcaaacgtcgggagttggtgaaacgcttcctttcaagtgtctctcttcttattctggaagaggcgcatgagtcttcaggctcaaatttctatgacatcgccagattatgtgtgaacgcagactatcgtctggcgcttacagccacgccgttcatgaaggattcgacggaagccaacatgcgcctgatggcggtggccgggcgaattgaaattaaagtcacagaaaagtacctgattgatcgaggcattctggcaaagccgtacttcctttatcataaagttgcctacaagccagacgaggccagaatcaaggccgaacttgccaacaaacacctcaattttagagttggtatgagcaccgcctaccaaaaggcttatcagttggggatcgtgtataatttgggacgtaacgaggccattgttcgcgaagcattgctctataagcaacattctctcaattgtatgactctggttcgtcttaaacgccacgggcaaatcctgatggaaatgatgaaagagtccggccttagagttgacttcatctatggggaatctaaccaggcgacaaggcaagcaaagctgaacagtttagcgtctggagaaatagatgttttaataggctcgactattctggatgtcggtgttgatgtgccaagcgttggtgcggtcattcttgctggtggtgggaaagcagaagttgaaatgaggcagcgtgtcggtcgtggcttacgagccaaaaaaaatcaggcaaacgtgtgttttatcactgatttcattgacattagcaacaaatacctgttgtctcactcttatgagcgaaaacacatcatcgacaccacacctggctttgcagaaggtgtattgcctattgatggagcattcgattttggagttctgaaacgagattag

SEQ ID NO: 469696 - DNA, 681 bp, Shigella boydii
atggatgtaaaaatcacgattttgcaggttgatgttgccaaccttcgcccgaatacctggaacaccaattcggttggtgcgcagaattttgaaaaactgaaaggttctatcgaaaaattgggcttttttaagccaattttggctcgtgaacttgaagatggattttttgaaatcctcggcggcgaacatcgctggcgtgccgctattgagcaaggaatttcaacggttccagtgctttctgtgggcaaaattagcgatgtcgtagctaaacagatgtcactggtggacaacgagcgatacggtgaagacgaccaaatcgcattgcaacgcttcattgaagaaattcagtcagaacttgactatcaactgtctgaaatcgccccgtatgacgacgaaatctcgatggttttagcaaaagaggcggcaatcgaccttgaagcactggaggcgttgtctcgtggtagtgatgagcctgtcgataccgacaaacgagagaaaaccgaacgtgtgggggcggaacatcagaccatgcgcttcaaagtaactttcgatgcgtcagatcgtgttgcagaaaccataaaaaacatcatcaaagagcaggctattaacaccggtaatgaaatggagaacgctggtgaggctctggtgtggctggtcgactactacaaggagcgtatataa

SEQ ID NO: 469697 - DNA, 669 bp, Shigella boydii; identical to SEQ ID NO: 12084

SEQ ID NO: 469698 - DNA, 666 bp, Shigella boydii
atgagcaaatacatcatcaacgtatcgtttcagacacgcgtaaataaaaccacgcgcacgttggaaatcgctgagtcgttcgggcttggcctggacgaaaaagagtggacgctttacgacaatctggagctggaagtgaagcagggcgatgtggtgtacatcaccggccaatccggttccggcaaatccgttgtgctgcgcgagttgcaacgacagatgaaggatgaagggctgtctgtagcctccatcgatgattttaccttcgataatgaggttaacgtcatcgatcagttgggcaaaacgaccagcgatgcgcttgggttgttatctatggctggtctgaacgatgcatatctgtttgttcgcaagccttctgaaatgtcagacggtcagaaatatcgtctcaagattgccaaactgattgagtcaggcgctaaagtgtgggctgctgacgagttcggtgctgttctagaccgtgtaaccgctcaggttgtggcatctaacctccagcgtgccgctcgaaaggttggtgcgacggtaatggtggcgacgactcacgaagacctgaagaacgcgctgcgcccggatatgcagatcaccaagcactacaaagaacgcgtgaaggtggaatatcacaatggtagtcatgatgaggttcatttatga

SEQ ID NO: 469699 - DNA, 891 bp, Shigella boydii; identical to SEQ ID NO: 12086

SEQ ID NO: 469700 - DNA, 267 bp, Shigella boydii
atgacgttaaccgataaacaaaaggacatcatcaaaacgctcaatctcggttatgagcgaggtcatctacttgacctggacgaattgcttgaagttttgccgtacaagacaaccaagcaaagtatccagttctcaattcgcgctctgataaaaaaggggctggtggagaaagggcatacgcgccaacgcagtgacaatcgctatcaccgccgaactcttgggttaaccactttaggtcgagccaaagcgaagttactggtgatgtaa

SEQ ID NO: 469701 - DNA, 633 bp, Shigella boydii
atgacggtcgaaaaagacgaggtaaaaactcgcctgacaccagcggagtgggccgaagctgaagccaaatggacgtcaggcgaatatacactctcaaagctggaggaagagtacggcattcgtcgtgaaacactctccagacatttcaaaaagcgaggattagagaaaggcgcggactctgttgggaagatggttcgtgagtctcttaaatctgacgcagagcttcgcgctaaagcccgtgcggaaaagatagaagaacgtcgtacacgttatgacggctgggcgtatgcgttggggcagatggtgatggtcgaagtcactacggccaaacgtgagggtaagcctttaggggcgattgaggattctctcaagagcttacagagagccagtaatacccttgcaaaatgctttgaagtttcgtccaaagcattgggcatggatcatgcggaaaatgacgaggaagaaattccgaacctggtatttggtgagcttacgccttcccaggtggcgaaattacgtcaggaagacgacgagcctgaaatcatcgatgacgaattgcttgagacgttggaagaagaagctctaagcgaatttgatgcgacagatgatggaagtgaaggggaggacgaataa

SEQ ID NO: 469702 - DNA, 1257 bp, Shigella boydii
atggcaatcccgtcctcgctcagtcttgtgcaactgcattctggacagatgaaagtcttccagtctccgcatcgatttaaagttgtttgtgctggtcgacgctggggaaaatcccggttgtcgatctccactattattcgtgcggcggcaaaggaaaaaaagcaaagggtctggtatgtcgctcctacttaccagatggctcgccagattttgtgggacgatctacaggaagttctgcctcgtaagtgggttaggaaaaagaacgacaccacgatgacaatcgtgttgaagaacggttcggagatcgccctcaaaggtgctgataagcctgacactctgcgcggcgtagcgttgcattttgtagtgcttgatgaatttcaggatatgaaggctgacacctggtacaaggtgttacgacctactctttcatcgacacgcggcggtgcactgatcattggtacgccaaaaggcttctcggaatttcacaaactgtggactataggccagaacgtagagctgcaaagaaagggacagtggaagagctggcagtttgtaactgccgattctccgtttgtacctacggcggaaattgaagctgctaagaacgatatggaccccaaatcgttcgctcaggagtacctggccagctttgagaacatgtccgggcgcgtttactacccgttcgatcgtaacgtgcatgtaaaaccgcttcagttcaaccctcggttgcctatatgggtagggcaggacttcaacattgacccgatgtcttccgtaattttgcaacctcagccaaatggtgagctatgggcaattgatgaattggtgctcttttcctctaacacggcagaagtttgtgatgagcttgagagacgcttctggcgctggaaatcacaggtaacggtatttccagatccggcaggtgcttatcgccaacatgctcgtggggagtctgacgtagacatattcaaagagaagggattcttacgtgtcgattattcgaaaaagcacccgccaattgcggatcgtgttaatgctgttaaccgaatgctgatgtccgcatctggagatatccggctgtatatcgatccgaagtgcaagcatttgattgattcactggaaaaagtcatctacaagcctggaacacgagatatggataagacaggtggcattgagcatagtgcagacgcattgggctatccagtacatcgtaggtatccagtcaaaaaccgtgttattcttggtggttctcggtag

SEQ ID NO: 469703 - DNA, 1575 bp, Shigella boydii
atggaattgaacgacaaacaaattaaggatctggtggcgcgacgccacccggaatacgaaaagaaaaaagaacattgggacttcctcgccagcacttacgctggcgggcgtggttggtttacagacaatatctttcgttactttaaagagggagatcaggagtttaaggagcgtgttgagcgtgcctatcgcttcaaccacactcgtgaggtggtaaacctcatcaacaaatatctctttaaagaagacattcatagaaatatcgaagaggcaccagagcagatccgcaatttctggaaacgtgcgactcgccagaatgcctctattgactcatttatggccgccattgatttgcaatcgtcaatctacggccgtatctgggttgttgttgatagcacaatgagtggtgatgttgagtcagtagctgacgagaaaaagaaagatgctcgtgcctacgcctactggatttcacctcagcaaatgctggatgtggcatgggacgacgacgggaatatgttatgggcgttaattgtggaagtcgctcgcgatgacgcagatccttttacttctacaggtcaggaataccaacgttatcgtctgtggacacaaaacgagtggtatctgttccgtgaggaagtgaagaagggggctggtggagcaggtcgtcgtcaggcaaaagttattttagaggacagcggcgcgcataatctcggcgtagttcctgtgtttcctgttgattgtattggagaaagtgaatcaccgtatttcagcccatcgttgatcgatgatatcgcttatcttgatcgtgcggttgcaaactatctgtcaaaccttgatgccattattcaggatcagacatttagccagttggctataccggtacagtcgcttttacctggtgatgaaaaccacactaaagtgcttgaaatgggcacaaagcgagtcttcacctacgattctgaaggtggaaaccagccgttttatctgtcaccagacccgaaacaagctcagatgatcatcactacgattaagacggtgattaacgaaatctaccattcagttggtgtagctggtgagcgaacgaagcaggacaacgcacagggaatcgataattcatctggtgccgcaaaaatgtatgacttccagcgtgtaaatagcttgcttgtcacaaaagcagagcgtctggaaagggctgaacgccaaatcatgctactggttgcgaaatggatgggggtagatctggacgaagaccactctttaattgcgtatccagaaagtttcgatattcgtggccttactgatgaattttctgttgccgagaaactgtcattacttcaggcaccggactctgtacgtcgtcaccagatggaaatgcttattgagaagattttcccgaacattactgaggcgatgaaaaaggaatttgataaagatctcttgaattttcctccaaaaaatgatctaaatacccttgaaaataagtcagcacttacttatgatcgtggtgcagcccaagaaagcgggcaagatcaaccccgagggaatggggactcatctactcaagagaacgagtga

SEQ ID NO: 469704 - DNA, 888 bp, Shigella boydii; identical to SEQ ID NO: 12091

SEQ ID NO: 469705 - DNA, 876 bp, Shigella boydii
atgccattactgcgtgaagaagctgaaaagctgtctaacaacgaacttgaacagggtgtgatcgaaactatcatcgatcgcgatgacctgtttgccatcctgccttttatgaaaattaattcaaaggcatatctgtacaaccgtgaaaaaacgctgagtgaagctaccttcatcgacgttaacgacaccatccctgaaggtgcagcaaccttcgaagaatgcgttgcgaaactgcgtattctggctggtgacgtagacgttgataaattcctggcgaccactatggccgacaccaacaaccagttggctattcaggttcgtcagaaagttaaaggtctggctcgtgcgttccgtcgcaacctgattttgggtgactccagctccaacaacaaggcgtttgacggcattccacgcctgatgcacgcagatcagaagatcgatatcgccggtgcatctatgactttctctatgttcgacgaactggtcgatgcggtgaaagatcttggtgctgactgcatcatgatgcgttcagagcacctgcgtgcttaccgtgcgctgctgcgtacagtaaacgtaggtccgtctgaaatcatgatggagaactttggtcgtccgatgctgtgtcataacggcgttccgttcatcatcaacgacttcatcccgaccgatgctggcaaagcaagcatctactgcctgcatctgtcagaagagaacggcgttactggtctgtatggcggcgataacgcaggtatcgttgttgaaaacattggtactgtacagaacaaagacgcagtacgtacccgtgtgaagtggtactgctctctggcgaataagcatgataaggctatcgctgcactgaccaatgtaaaaatttaa

SEQ ID NO: 469706 - DNA, 921 bp, Shigella boydii
atgccagaacaaaagatgaagattacggaagaggcattttcggattttacggggcatatgtgccgtgccggatttaccaattctatctccgatgaacctttaaccgagcggcaacaaagtcagctatctgcttgtttgcaggcggttcccctctcccaatccgtaaacataaccccggcttcaccgtcagttttggttgggaaaactgttcaacttagtgcaggtattagtatgggtaagagtgccagttcattcacctggaagtcagcaaatgaccaaattgcaaccgttaacggcactggattagtaactggcgtagcaccaggcaaagtaaaaattactgcaactgatcaggaaacccagctttccgcgtcagtggaagtcaccgtaaatccggtagccgttcaatccgtaacggtaacgccagactcaacctctgttgagaaagggaaatcagtcagtctgaaagcgaatgttcagccgtcaaatgcgacgaataaggctgttacctggtcttcaaaaaatgaagataaggcaacggtagaccagagcgggaacgttactggtgtagaagttggcactgcgacgattgagatcgtttcccaagatggcagcaaaaaggcaactgcaacggtggaagtaactgcgcctgttgtggctgttaccggcgtcgaaatcgacccaaatagcacaaccgttgaggcaaacaaaactgttcagctgaccgcaaatgtcgagccggcaggagcaacaaataaaaccgttacttgggaatccaaaaataccgagtttgcaacggttgatagcgaaaccggtgttgtaactggcgttgcggctggtactgccacaatcgaggttactacccaagatggtagccacaaagcgacagcgaccgtagaagtcactgctgcacaggaataa

SEQ ID NO: 469707 - DNA, 435 bp, Shigella boydii
atgaaaccagcaaaaattgttttattagaaccgcaattttccggttattcgggaatgttgtgcggcgttcagttcgagaacggggtgtccgtagcggagttgccttttatcgatcagcaaaggatttgtgcctcaatgcgagcatcaacagtcgaaggcaaaaatgtttctccgtctgccgcatacagtgatcgtggcgagttgaccgcagacctgattaccgagccagcagcacctgacattgtgccaatgaaacgtgggacaccagatgaaccggctaaacagatccagactttcacacgagaagagttggagtcaattgcagacaatgaaggcattgccggtctacgtgtgattggtaatcaggttggtgtcaaagcgaaaggaattgtcgagatgattgaaggcatcctgaaagcacaaggcggtgagtaa

SEQ ID NO: 469708 - DNA, 834 bp, Shigella boydii; identical to SEQ ID NO: 12095

SEQ ID NO: 469709 - DNA, 345 bp, Shigella boydii
atgaatatttcgtggcaaacagaaattgcgatctaccgctttggcgcaaagaacgtttacggcgaggcgcaattacaattcgtcaggaagacgaatgtcggcgtggttaagttcgaacagagtaatgagaaatcgtcagttcgtgctgatagctctggtagtcgtggtaaggcgagtctggagctgtttgatgctgtgttagttgtccctttagaagcggctgtacaacttgatgatgtgctgatccttgaaggtcaaaaattaaaggtgtccagtgttcatcgccgctgggggctacgaggaagacctgggcatcttgaagtgggggcgaatatatgggtctga

SEQ ID NO: 469710 - DNA, 474 bp, Shigella boydii
atgggtctgaaatacgatgcgcatcagttcaaacgtgcggggaatagactcaataacagccagaaagcatttaagcgatatcttattcgggacatggaaaagctggcgcgtttggttgagcgtctcagccgtgcaatggctccgctggaaaccggatctctggagacagccatctttgccagggtgattaaagaaggttattcagggctgcgcattgagctttctgtgtctggagcaaaaccacgtcaggggcatccgggcgtagaagtcggtgactatgctaagtacatggagctgggtaaataccgactcggttatctttctcgaatgaagaacgtgacaaacccaccaattgccggtgttaaacctcgtgttgggccacactttctggaaagagcggtggaaattagcgagaagcagttctcagaagcgattcttgaggctgccagaaaagccggatttacgagaggttaa

SEQ ID NO: 469711 - DNA, 384 bp, Shigella boydii
gtgtttattgaagcgtttgcaagtttgatgcagaaggcaaagattggcacggtcgggactgacattttctgtcactacttgcctgccaatgtgaaatctggcgtcctgcttattaacccaaataccggtatcagcatcgatcatgagctacagggcttttatcacgaatcattcacaatcattgtgcgtggttcgtcaattactacgacggttgagaaagccaataaaatcattgagatgtttccagtggaggaaacggaatctggtggtgtttattttcgacttgtacgaccgatggcgatgccaatcatttatcccaaaaatgatggggcattaatagaagcaggcattcctgttgaatttgctggctatttattgaattaa

SEQ ID NO: 469712 - DNA, 747 bp, Shigella boydii
atgtctaatacccatgtaaaaaacatcaaacttggtgcctgtaaggtgtcgtttggtggtgtggatttgggttacaccaaaggtggtgttcaggttgaagtagccactgaaacgctgaaagtcaccgtcgatcagttggggcagaccgtaatttccgaattagttcaggggcgcaacattaccatcaccgcgcctctggctgagtctgtactccaaaacatggttgacctgatgcctggttctactctgagcgaagatgacaactctgtcacgatcacatctgcacagggcgttaacctgattgatgtggcgaaggagctggttctgactccgcaggacaccaccgactatgtgttgaccatcccgaaagcggcaaccgcgggcaacttcactatgacctaccagtctgatgatgttcgtgtgttctctgttcagttcagcgcatacccggatgatgaaggcgttctgggcaaaatgagcggtcctaaaccggtaaaaactgtgtcgatctcaccggaatctccaaccgtaaaagctggagaaactgtgcaactgacagccgaaatcactccagctgatgccgcagacaaaaccggtgtttgggaatccgaagaccaggaaaaggccacggtagatcaaacgggtctggtacgtggtgtggcgcagggttctacaaatatctccttcaccagcaatagcggtggtaagaaggcaactaaatcagtaacgattaaccccgcagattaa

SEQ ID NO: 469713 - DNA, 318 bp, Shigella boydii
atgaccaaattactcgatctagattccattctgcctccgaagaaaagcatcaaatttggcggtcaggaatatcccatcgttgaaatgacggtaggtctgttcgtttccatcaagcagatggaaggcaaagatctcatgaacatgtctcctgttgagcaagtgacagcttatgcagatctggttcgtaaggttatcccttcagtacctgacgaagttcttgaaaaactgactgttccgcaactccagcagatcttcaccttcgctatggaagtgattgatgaagaaaacgaaaaagcggctggcgaaggggcaaagtaa

SEQ ID NO: 469714 - DNA, 270 bp, Shigella boydii; identical to SEQ ID NO: 12101

SEQ ID NO: 469715 - DNA, 4572 bp, Shigella boydii
atgtcacaaaacgtagagtttatcctgtcgctggaagacaaacagtttacagcgtcaatcgatcgtgcggggaaactgcttactcgatttggtgagcaggtaacaaagcctgctcaaaaaatccaaacctttgaacgctctttgggttcggtcgcccgtatcattggcgttctggaaagcaagctcgattctacggcagataaactacaggatgtagctgccggttttgagcttgcttcagatgctacgcgtaaaatgcgtggcaacatcaccagcctcaattctggtcttaaagccctgattgagcgcgtcgatacgacaacttcttcagtagataaactcaccgcgtcattgcgtaaagtgcaatcagagctaaatgatttctctgattgggcgacctatgcaagcaaaagcgcaagccgctttggtacggaggtcaaagaagcctctgtgtccgtgagtggcatgaatacgcgccttaataccacgacgaagcgactcagtaattggggtgtcacaacgagtcaggctgccgagggactgaaaaaggttcgtgagcagatggacgaagttatcggacgtcagcaactgattagcaagccggtacgcgttcgtacatctggaagtggcgatggtggtagcgggcggcgtagcggcgcttctggccatagcggtaaaagtaacgaaggaggtatgttctctggccttcgtggcaacattttcctgcttggcgagatcggagatgcagccagaacggttactgacatcatgtttgggtggcagaagcctattgttgaagctgcggccgaaatggaacgtatgcgggtgatgcttcgagggttgaataaggagaagtccaacccgggccaggctgccgctgatgatatgaagtacatcgtagacatggctcaaaatgcgccgttcgcgatgcaggcgttaacagactccttcgtgaagtttcgttctgctggcttagatccaaccgatggttctctgaaggcgctggtggactccgttgctcgttttggtggtgatagtgagctgttgaaacgtgcggctgtggccgttcagcagatgtccggtaagggcgttgtgtcaatggaagagctacgtcagcaattaggtgaagccgttcctaacgcgatgcaggcaatggcagacgccgcaggcatcactatgggggaactgactaaagccgttgccagcggtacggttgaggcaaaacaggcgttgtctctgatgtttgttggtctgcgtgcggagaatgagaacgcagcgaaagacatgatgcaaacctacacaggtgcgctggcgcaacttcagacgtcattcacgttatttgctgatcgggttggtcaggccggatatctggattctctatcgaaggggatgaaagaactggcttcaatcatgaatagcgccgaagggatttcgtttgccaattctttaggttcggggttaacaacggcaatcgatgggttgcgtcagcttgctcaatggttagcaaagaaccaagagctggtaattaatctcggtaaggtcgtggccgcgatggttgcgttcaaactgatgcgagcagggatcatgggggtagttggcgctgggagccagatggttagcacctttgccacgatggcgaccgccatacagactccatttaacctcggcgctacagcagtaactcgattcaatcgtgcggcacgtatggggctggctccgatcccctctcttattttcgccatccgtggggcgattacggggcttaaaggcgcttttgctggattaacggcgttcattgcagcaaaccctataggggcagcatttacagttgccactgtagctgttgctggcctaatcacgtacatgaccatgctccgcagcgaaacttcaaaggtcgttgacgagattaggaaaataccagaggcgatgacggcggccaaacgtgcacaaatggccgaccgcgcagaaaagctcgaaaagcagattcttgctgatcaacgagcattaaaaactggtgagggtgttaattacgtatctaactctgccggtgttatcactcacaaagagtcgaaggctgacatcgaagcgcgcctgaaaaaaaatcaggaagagtatcaaaagataaccggcacgatagctcttggtgacggcgctgtagcaaagcgtttggctaaagaggctgccgaatctcagattgagaaaattcgagcggaaaaccagatttttgcggcaacattcgtgaaagcccggcaggaggctctggacaagatccagaaaatcaatgatgacggttcactttcagatgacgaaaagaacaagctattggcaccgttacgtgaaacggtaaacaaaagctatctggagcctgcgcaaaaactggttgattcactttcttctcgtaagaatgccaccgagaagcaaatagcgactcttaatgatcagcttgaaaaagccaaaaaggatggaaataccgagcaaatccagaaactgcaaggcagtatccgtggttatcaggagcatttggaagccgttgctcaggagctgactcaggcagagttcgagagagataacgcggccaaaactggtaagggcgtaatgtcaaaccaggggactgttcttgggttaggtacaactgataaagccgctcagaaggcgctggcgcaatatatgcgaaaccagatggattctgcgacttatcaacgtactttgcctgacggcactccgatgatggacttcgaaggtaagccgattattgggcctaaacaactcaagacgcagcttaatttgcagaaagcatccagcgccagctctctggagaaaatgagcgatgaagagcgtgccgcagccattgctgcactaactaaagctcgtgaacaggatgcagcagctgccgagaaagcagcccaacgatcagctaacgcctcgcagcgtgcggccaagaaggaacaggcagcgcaacagaaactggcagccggataccagaaggctctggacaaagccgatcagcttatggggcaaatgggtgaaagctctaaggctacggtatcgtttgatcagtctcttcgcgatacaacgaaatcgctgacagatttggctaatgcggttcctaacgagttcatcactcaagagatgatcgacaaggcgaaaaaacgtcttgaggacctcaaaaatgcgacacctgaatatcgcgagatgtttaatcgccgcaatgttgagcagatgatctccacttgggcaccggaggcggattccattattagtgctggctatacgccgtctcgcgaagagaaagttgctgatttcgaagacacctacaaccgcaatctcaaagcgttgatagaacttcgtgataaggcgtctgatcctaaagtcgtggcgctttatacaaagaaaatcaatcaactgattgctgctggcaataccgcgcttattaaagagacggggactgcgacgcagaagttggcactggaatacgaaaacttggcagagcagatcgaaagcacctggactgatttgtttagtggcttaactgatgtcctgactgatttcgttattaacgggaagatgagcttctccagcctatctcagtccattttgaaagatatcaccaatatggtcgtgaagtcgcaaatcacgctgcctctaatgaacatgttggggatgggaaccaccgcagctggtagttcacagagtggcaatttgctcactggagttgcttccgccgttgccaatcaaggggtacgaatgggcaacactgttaacggcgacaagtcggtgggagaagccacgaaggagacgtccagttcggtaactggattggggcaaacaacacagcagaccaccagcgcaattggcactgcaacaaatgcgattggtagctgggtatcagggctatttgatagcaccgaagccaaagatgctgaaacaaaagcagtgaaggactccatcttctcgatgcagaacctcagctctgttaccggcgctctgtctgccgcgtttgcaatgcttggagctaatgcttccggctctggtaataagtggttgaatttcggcgcgacagttgcatctggtttggtttcagtatgggctggtggtggattcgatggattgatgtccggttcttctggctcaacttccgggttcaacaatctgaccagttctgctgccgatggcacgaatggtattcctgcaattccgaagtttgcaaatggtggcatattcggaaaagacggcgtgatcccgctccgggcataccagaaaggcggtatcgccaactcacctcaattggcgttgtttggggaaggcgatatgaatgaggcgtatgttccattgcctgatggtcgaacaatccctgtaacgctcagtaccgatggtatgagtggaggaggaaatgttctttctccggtatcaattgagatcaacgtccatagtgacggtagcacaactgaatccggcgatacagaaagcatatggaacaatgccgctcaacggatgaaagcaatcgcgcttgagactatcgctcaagagaaacgccctggcggatcactcaacccaaacactcaacgtaactaa

SEQ ID NO: 469716 - DNA, 336 bp, Shigella boydii
atggaaagacaaacgtttaattggtatccagattacgaatctgaaaaaagcgtaaaaccgaatgtaacggtacttaattttggtgatgactacgagcagcgacaggctcaaggtcttaatcgtattaaagaagaatggtcgttaacctttaccagatcatacaacgaaattaatgcaatcgatgacttcctgactgagcgagcaggcgttgagtcgttctattgggttaatccaagaggaaaacggattgtagttgtatgtgacagtcatacggtcaagcgatatcaggggtactgtgtcttaacagctacattcagacaagtatttgaggcttaa

SEQ ID NO: 469717 - DNA, 699 bp, Shigella boydii
atgggaattaaagctgatattcagagcttatctccctctgcactcattgagttgttcgtactggatatgtcgaacacaacttcaggggggaagctattcttccacgccggaacaaacgaactgatgcaaccggtcgtctggcaaggagtgacatacgagccgtggccaatcaaagcatcaggctttgacaaaactggccagggaacgttgccacgtccaaaaattcaggtatcgaactttgccggaactgtctctgcggaagttcaggcaaacgacgatcttgttggctgccgcattattcgcaagatgacgctggctcgcttcctcgatgccgttaattttaaagacggcaacccaacagcagatccaaaccaacatttcccggatgaaatgtggtttatcgaacagaaaactctcgaaactcatcaggttgtcgagtttgaattgtccagtgtgttcgatttgatgggggtgcaactgccgtatcgtcagatcattaaaaacacctgcccgtggaaataccgagggccagaatgcggctataccggtccatatttcgacaaaaataaccagcagacgtctatgtctggtgcggattactgcacaaaacgttatgacgcctgtaatgcgcgtcggaattattttgccgacggtgtgatccattttggcggatttattggagctacgcggtatgggtaa

SEQ ID NO: 469718 - DNA, 798 bp, Shigella boydii
atgggtaataaagcaatccctgagcttggctctgacgttatgcagcaaatctatctctgcgccataaatcgctaccctaatgaagcgtgtggctttctggttagaactaatggcgacaaatatcgctttatggaagcgcggaatgtttcggagaacccgcagaacacttttgtaatgcacgttgacgacattatggcggcagaggatgcgggtgatgttatcgcaatctggcattcacatactgatgaatcagcagaagcatctgatgccgatcgtgcaggctgcgaagcgacggaagttccgtggatgattctggctattcgcaagaatgttgagggagatgcccctttccattttagcgagatgaatgtgatcacacctgatggtttcgaaatgccatacctgggcagaccgtatgtatttggcgtattcgattgctggatgttgtgtcgggactatttgaagcgtgagtttaacgtcgaactaaacccgaacgcacacctgcatattccatcgtggtacaccggcgataacgacattctcgatcagaactaccgtaacgagggattggtgcgtcttgcgcccggaacagagcctcaacgtggggacatcttctttatccaatacgggaaaatgcccgaccactgcgcggtttatatcggcgatggaatgattcttcatcaccagatcgaccgccttagttgtcgtgcttattacggcggaatgtatcagaaacatacgacgcatcacttgcgtcacagagacttgctcaagggagatgagacgtgtctgagttag

SEQ ID NO: 469719 - DNA, 594 bp, Shigella boydii
gtgtctgagttagttcatgtgcagcttggcggccctatggccaaacattttggccgccactggcatctaaaggtgcgcaatacaaaacaggctctggatttaattgaggccaacaagcctgggtttaaagcatggatgaagcgcaatatcaaaacctatgaccgttaccacatccagatcaccaataaacagggccacaagtggtctgttgacgaaagtgaatatcagatgatggggcagtctgacaacattgccaaaatccgcattacacctgttccgcgaggaagcggtggatctgcttttgggtggtttcagacggtagtaggggccgctttgttggttgtatcggcggtagtgatgcctgctttagcacctctcggtttgtcactgatgatgggcggcatatcacaaatcatatcgccgcaagccactaacgaaagtgtgagacaggcagataactcgaactcttattatttcgacggccctcaaaatacagaaaaccagggcaacccagtacaacttatctatggcgaggaaattctggttggctcacaggttgtgagttcttcaatcacgattgaccagctaatgtaa

SEQ ID NO: 469720 - DNA, 4728 bp, Shigella boydii
atggaacagttcaagaagaaaaagctaccgctgtttattgccggtgcgggtggtaaaaaaagcagcaaaagctccagccgtacaccggttgaagccgacgataccgtaaattctcgtgcaatggccgctatcctcgatcttcttggggaaggggtaattggcggcttagtaaatggcgcaagatctatttttatcgacgatctgccgattgtaaatgaagacggttcctccaacttcagcggaatcacatgggattttcgcgacggttcgcaagaccaaactccaatgtctggctttgatttcgttgaaacgcctaaatccgtcaatatccagttaaaaaaaacacattatgtaacggtttcaatcgataacgatgaagctgatcgggttcgtgtcatcatgaagtttccttctttgcgaagcatagataaaaaaactggtgacacgaacggtacaaccgttgagtacaagttccagatagcaaatggcgactcaacatttgtagatgtggtcgcggaaggtgaaaaaagcgttggcattaagctaacagcaaagaagaccggcgtttattaccgtagctacgagctgaagctgcctaagcctggacgcgcatacaaggttcgtgtagtccgtattaccgatgataacagtagccagtatctctataacgatacatgggtggattcaatcggggaaattgtcgatacaccgatgaactatccaaactctgttttggttggattgaaggtaaactctgagcaattcggcagcaccatgccatctcgctcttatctggtgcgtggcctaaaaattcgagtaccttcaaactataacgagtccagtaacacttacgctggggtatgggatggcacttttaagctgttgtcttcttcgaaccccgcgtggattctctttgatttgctgaccaatgctcgatatggccttggtcagtatgtgtcggaatctatgattgaccttggccagttgtaccagattggtcgatattgtgacgaggaggtcgatgatggctttggtggcaaagagaaacgctttgcaatcaatacgcagatcaccagtcgacaggacgcataccgactaattcaggatattgctggagcattccgcggcatggtgttttgggctggtgggatggttaacatcatgcaggatagcccatcagatccggtaatgatgtttaccaactctaacgtcaaagatggattgtttacctataaaggttctgcgcgtaaagatcgcccatccgttgcgctcgtaacctacaacaacaaggaggacggttataagcaaaacatcgagtacgttgaagatcaggacgcaatgcgccgttatggtgagcgtaagacagaagtcgtagcatttggctgtacaagccgagggcaggctcaccgagttggtttatggcttttatataccgccagaatggagtcggatgtaattacatttactgccggcttagacgcgtcatttctgatgcctggtgaaaccgttctgattcagaacaaatatcgcgcaggcaaacgtaactcaggtcgaattgtggcgtttaccaaaaatagcgtcacactcgatgcgcctgtgtcgttagccaaaggcggctgctttattcgaatactgaatcaggaaggcaaaatcgttgaacgcgatgttcttgaaactggcgaaaatataacaaaagttacgttttcaaaagccctgtcttcggctgaaacgcctgttttgaacggcgtctggactattacagaaccagacctcgaacctatgcgcgttcgcatcgttaacatcgcgcagggggaaacgccgggtagctttgacatcaccgctgttgagaacaatccgtctaaatatgaggcgatcgacaatggtgcaacgcttatcccgcaaaatacgacggtattggacccgacttactccaagccgtctaatttgcaaatcaccgaagggacttatctctcaagccctggcaacctgtcagtaaaactgactgcaacatgggaagggaaatctccagagtattggatcagttggcgacgttctgatgaaaacaatgtatcgaactggcaatcggcgcgtgtaaccgaagagcaatacgaaatcgttaatgttgcggagaatggacgctacgacttccagctgtatgcggtttcattcaacggtaaaaaaacagagattatcagtaccgtttatcaggtgctgggcacaatgacaccgccagatgccccaacgtcattaacggccgttggagactatcgtaatgtgatactgaattgggttaatccagattcggtagaccttgatcacattaatgtttacgcgtcccagaccaataatctggatacggcgaaactgatcgcagagtctgcaagcaccacctttacacatgctggtcttggggatagcgaaacgtggtattactgggttcgagcatcgaacaagcgaggtatgttaagtcctccgaactcaaacttgggtacagaggcgacaactcgcgatgtactgtcgttcctgactggcaaaattacatcttccgagcttggtcaggctctgcttgaggacatcaacagcaaagcctctcaagaagccgttgacgagttaaatgagcatatcaaccagagcgtcgaatctttggagggggcggtaaacgacgttaaggaagatatagctgaattagataagcagttcagcgataacctcgcggattttgaaataaaattcaacgagcgtagcgatgctttggagaacgcacaaaccgagcttaaaggtgaggtttcggcaacgatcgacaaggtcaatgaagcgtttgaaaaaattgatgctactgatgctgcaattgttgaaatcgaaaataccgtatctgaacacgataaagctctcgctaatacagtcgaggcaataaaggctgcaagagatgaagcggcggctcttattgctaaggaaagcgaggctcgtgttgaaggcgatgctgcaaacgctaaacaactggaagtgttgcagtcaacggtagaggaaagctccgctgccgttgaagaaatgaaaaagacggttgcagaggtcgatcgtgcaagtgcagaactgactacgaacattgaggcgttagccaaaacaaatattgacctggctcttcgtcaagatgaagaccagcacaagcagatggtcaataacgcgaagatcgcaacaacacagaaaacctttgctgatgatatgtctgcaatggctacgaaggttgaagaaattcgcgtagaaattggcgaagacattaaggccagtattctggaagagtccaccgcgcgtgccgatggcgatgaagcgttagcaaagcgtgtcactcagctgcaatctaagtttgaaggagatatcagcgcggcgattagtacagaacaggaggctcgtacatctgccgatgaagctttgacgaaacaaataactcagcttgagtcgaaagtaagcaacgatattgtcgcagccattaaggaagagcaagaagcccgagcaacggaagattcggctctggcaagccagatcacccaacttcaggcaaaagttgatgatgatatttctgctgcaatacgcagtgagcaggaggctcgtgcgagcggagactctgcgttagctaaacaaataaaccagcttcaagcaaaggttgacggtgatatatccgccgccatcactcaggagcaggaggccagagcaagtgctgacgaggcgctctcacgagaaattaacagcctgcgagcacagaccggaactgatattgccgcagcggttgctgtagagacaaaggcaaggactgatgccgatagtgcattgtccactcagattacgtctcttacagcaaaagctaatgatctcgaggcatctcttgccagagaaacaacggctcgtgcagatggtgataccgctttaacaaaagaggtttcaagtttaaaagcacagactgcgaaagatattagtgcggccgttgcagttgaaacgcaggctcgaactgatgctgactcggcgttgtcatctcagatcaccaagctgacctctcaatacaaagaggatattaaagcggctgtagcaaccgaaacgaaaacgcgtacagagcaagatgctgcattggcgactcaaatcacaaacttagagtctcaaacggcagccaacatttccgcggcggtaacaactgaaacgacagcgagaacgcaggcagataatgctctgagtgggcgaatcgatactctgaaagcagaggtggatggaaataccgcgataattcaacagcaggcaacagctattgctgataccaacaaaaaagtatcaaccgcgtggacgttgaaaatggagacttcaacgagcggagggcagaagtatgttgccggtattgcgcttggtattgacaccactgggctatctcagtttttggttcaggcggacaggtttggtttggtcaactctgttaacgggaagatcacaacgccatttgttatcgaaaacagtatcgcctatatgaatggagcgtatatcaaggatggcacaatcaccaatgcaaaagtaggcgatctgcaatctaccaattttgttagcggtagatctggatggcggttcggcaaaaatggaacgcttgagatcaacggtaatagcggcggcaatgggcgattggttataaatggtcagcggattgacgtttatgacgataacaacgtcctacgagtaagaattggccgtctgtga

SEQ ID NO: 469721 - DNA, 381 bp, Shigella boydii; identical to SEQ ID NO: 463673

SEQ ID NO: 469722 - DNA, 306 bp, Shigella boydii
atggcaaaaaacactatcaacgacaaatcaaaacagatttcaattcgtatcccacatgacgcttttgatggcatggaatccgtaaaactggacggcgaaagcaacgccggattcatagtaaccgccatgcgcggggagatcgcccgccgacaggcagaaggaagcagtgaaaatcctctgatttcttctctcgatgcattggcgcaagtggaaaaaattggtattaaagctacggaagaactcgggcaacttatcgccatcgctcgtgaagaactacagcgccgcaaggccaaagagcaggagtaa

SEQ ID NO: 469723 - DNA, 204 bp, Shigella boydii
atgagaaattataccatacacccgcaagggcgggactcgtacaacctgaataaatacatctggcgttttatcgccctgagcacggcacaaccgcgcgtgattaccattgaggccaccagcgaacaggaagcacgccagcaatccccagttggctgcgtgatggtattcgctgcccgtattcgccaggggtcacatcatgcgtaa

SEQ ID NO: 469724 - DNA, 381 bp, Shigella boydii; identical to SEQ ID NO: 463673

SEQ ID NO: 469725 - DNA, 213 bp, Shigella boydii
ttgtcccgtaaaatgacaggaattgtcaaaacctttgacggcaaaagcggcaagggtcttatcaccccatccgatggtcgtatcgatgtccagcttcatgtttcagcgctcaatctccgcgatgcagaagaaattgccaccggattacgcgtggaattttgccggataaatggtctgcgtggcccttcagctgccaatgtttacctttcatga

SEQ ID NO: 469726 - DNA, 216 bp, Shigella boydii
atgtcaaataaaatgactggtttagtaaaatggtttaacgctgataaaggttttggctttatttctcctgttgatggtagtaaagatgtgtttgtgcatttttctgcgattcagaatgataattttcgaaccttatttgaaggtcaaaaggttaccttctctgtagagagtggtgctaaaggtcctgcagcagcaaatgtcataattactgattaa

SEQ ID NO: 469727 - DNA, 207 bp, Shigella boydii
atggataagttaacaacaggtatcgcctatggcacatcggctggtaatgctggtttctgggcattgcagttactcgataaagtaactccgtcacagtgggctgcaatcggtgtgctgggtagtctagtttttggcctgctgacgtatctgacaaacctttatttcaagattaaagaagacaggcgtaaggttgcgagaagagagtaa

SEQ ID NO: 469728 - DNA, 261 bp, Shigella boydii; identical to SEQ ID NO: 8713

SEQ ID NO: 469729 - DNA, 498 bp, Shigella boydii
gtgaatcagatattcacgttgattttgctcgtgttggtaggatttgtcgtaggtaatgtctggagcgacagaggatggcaaaaaaaatgggcggagcgtgatgctgccgaattatctcaagaggtaaatgtccaatttgctgctcgaataattgaacaggggcgaactatatcccgtgatgaggctgttaaagatgcacaacagaaagccgctgaaatttctgccagggctgctgatctgtctgatagtgttaaccagctgcgtgccgaagcaacaaaatatgccatacgccttgacgcagcgcagcataccgcaaatcttgccgctgccgtcagaggcaaaacaaccaaagccgccgaaggaatgctcaccaacatgctcggagatattgcagcagaagctcagctttatgctgaaattgctgacaaacgctacatcgcaggagtgacttgtcaacggatttatgaatctttaagagataaaaaatatcagatgtag

SEQ ID NO: 469730 - DNA, 216 bp, Shigella boydii
atgatgtctaacaaaatgactggtttagtgaaatggtttaaccctgaaaaaggttttggtttcatcacgccgaaagatggtagcaaagatgtgtttgtccatttctcagctattcagagcaacgatttcaaaacgttaactgagaatcaggaagtcgaatttggtattgagaacggacctaaaggccccgcggctgttcatgtagtggcactttga

SEQ ID NO: 469731 - DNA, 174 bp, Shigella boydii; identical to SEQ ID NO: 150451

SEQ ID NO: 469732 - DNA, 207 bp, Shigella boydii
atgcataaagatcaatacactgatgccccctcccaggagcaggttcgtgtaaaaactatgcttaatagcaccatttcgatgggttacccggatgttgtaattgcatgtatagaacatcaagtatctctggaagcattcagggcaattgaggccgcgttagtaaagcacgataagaatacgaaggattattctctggtggttgactga

SEQ ID NO: 469733 - DNA, 177 bp, Shigella boydii; identical to SEQ ID NO: 465317

SEQ ID NO: 469734 - DNA, 231 bp, Shigella boydii; identical to SEQ ID NO: 463702

SEQ ID NO: 469735 - DNA, 381 bp, Shigella boydii; identical to SEQ ID NO: 463673

SEQ ID NO: 469736 - DNA, 1140 bp, Shigella boydii
ttgctgctggaacgtcagggcgtattacccgccaccgatggtagcccggcgctctttgcctcaacatcgccaggcgtttatgagggcgtagatggcgtgatgcgggtgatcgaacagcttgccggagtcggtttacccgcctcactctgggaaagccagatcctgcctgcccgcgtacgcgactattcgtcagaaatgctcgatgaattactggcaaccggtgcggttatctggtcggggcaaaaaaaactgggtgaagatgacggcctggtggcactgcatctacaggaatatgctgcagaatcgttcactcccgccgaagcggatcaggcgaatcgttcggcgctgcaacaagcgatagtcgctgttctggctgacggaggagcctggtttgcacaacaaatcagccaacggatacgcgacaaaatcggcgaatcggttgatctctctgccctgcaagaggcgttatgggcgctggtctggcaaggcgtcatcaccagcgacatttgggcaccgttacgcgccctcacccgcagcagttccaacgcacgcacctcaactcgccgcagtcaccgggctcgtcgtggacgtcctgtctatgcgcaacccgtctcgccgctggtatcttacaacacaccaaatctggctggacgctggtcgttattgcaggtggagccactaaacgataccgaaaggatgctggcgctggcggaaaatatgctcgaccgctacggcatcatcagtcgtcaggcggtgatagccgaaaatatccctggcgggtttccatcgatgcaaacgctttgtcgaagtatggaagactccgggcgaattatgcgaggtcgttttgtagaaggtctgggtggcgcgcaattcgctgaacgtctgactattgaccgatggcgcgatctggcgacacaagccacgcaaacgcgccactatacaccagtggcgctctctgccaacgatccggctaatgtgtggggaaatcttctgccctggcctgcacatccggcaacgctggttccaacgcgtcgggcgggtgcgctggtggtcgtttctagcggcaaattgttactctatctggcgcaaggtggcaaaaaaatgctggtctggcaggaaaaagaggtaagcgtaaactga

SEQ ID NO: 469737 - DNA, 375 bp, Shigella boydii; identical to SEQ ID NO: 461773

SEQ ID NO: 469738 - DNA, 1134 bp, Shigella boydii
atgaattatgaaaaatatcatagcacaaacagaagcaagggtttgcgaaccttctgctacttaatttattatgtgcaggtgatttttaatgtgatgaagtgttttatgactcgcggaaactttgattttataaactctaacgtggttttctcagaagccgataagtcattgtggattgatctcattaacaccgattgtatttggtatgatatgataattaatcctcctgatgatataagaacaaataagataataaagaactatctcagaattatggaaaaatatacgagggaaagctgtgaaaagagatttatttatttcttaggttcaagaaaaaaagtgaggttttcaaccaagaaacagcctaggtataacccattcacaaaaaatatagtattcactctgttgattggcaaagaagagcgaaagcttcggataaaatattccttttgcacgtttacgcagaatggggtagtgaaggtaactccaaatgttagagtaactgagaagtttctctacattgaatatgaaaatggcaatttatgtgtgatgtcagttcatgatttcgtaaacggacattatattgatttaggaattcatacagaagtgcattacgtaggatatacacgtcatccgcatcggcgccctgttgattttattcaccgtggcttatcaaagatgctgtatagcgtttcaaatgacgataatgatttttttgtttgttttagtatatttaatccaaggattatatctctgaataataaatgtaatgtggtctttaatatttcaaattctctactggatgaaattgatgttgataatgaggggagaattattgaaaactgcttaatacgttactttgatcctaagcttcaagatgatgacaaggaaagtaaaaggtcagatttaaataaaatgtttatggacctggtggaaaataaaaaaattaaaaaaatatacgttaattttcaatatgaaaggaataatgagtatttctgcttttactctaaagttgttccgccgaaatttcatcatttctttgtgttggatttttctgatggcaagataaatattgatagagaccaggatatgatgactcagatggcattgtgcatggggtattataattattaa

SEQ ID NO: 469739 - DNA, 1128 bp, Shigella boydii; identical to SEQ ID NO: 465326

SEQ ID NO: 469740 - DNA, 675 bp, Shigella boydii
atgagcactgataataagcaatcattgcccgcgattaccctcgcggcgattggagttgtctacggcgatattggtaccagcccgttatatacacttcgtgaatgtttgtccggccagtttggttttggcgttgaacgcgatgccgtgtttggctttttatcgctgatcttctggctgctaatctttgtggtttccattaaatatctcaccttcgtgatgcgggcagataacgccggtgagggggggatcctgacgttgatgtcgcttgccgggcgtaatacgtcggcacgaaccacatcaatgctggtgattatggggctaatcggcggcagctttttctatggtgaagtcgtcataacacccgctatttcggtgatgtcagccattgaaggtctggaaatcgtcgccccgcagctggatacctggatagttcccctctcaattatcgttctcactttattatttatgattcaaaaacatggcacggctatggtcggtaagctgtttgcgccgatcatgctgacctggtttttgattctggcaggactggggttacgtagcattattgctaacccggaagtgctgcatgcgctgaatccaataatcgtgcatactgtgcgcttttttgtgggccaagggactaagcacacatttcatatttcaacgaaagactag

SEQ ID NO: 469741 - DNA, 423 bp, Shigella boydii
atgacagcacagatagccgcttacgggcggctggtggctgacccgcagttaaagaccaccagcaagggcacacaaatggctatggcaagcatggcggtccccctgccgtgcaatcaggcagatgacggacaggcgacgatgtggttatccgtcctggcgtttggcagacaggccgacgcactggcaaaacaccacaaaggcgagctggtgagcgtggcgggtaacatgcaggtaagccagtggacaggccagaacggcgaaacgcggcagggctggcaggttattgcagacagcgtaatcagtgccagaacggcgcgacctggtggtaaaaaaggccagcagggccaggctactgacgcactgaacagggcaaaacaacaggcgggtaacgatgatccgtacggggataacataccgttttaa

SEQ ID NO: 469742 - DNA, 195 bp, Shigella boydii
atgccagagaacaacaccagaaagccggataaaagtgccactgtgcacatagacgccggaactatggagaagatcgaacgctatcagcagttcatcaaagataatcacccaggtatgccagtacccacgaaaggacaaatcacacgcagcgcggttgaatactggtacagggcaacgttaggagcctggctatga

SEQ ID NO: 469743 - DNA, 1890 bp, Shigella boydii
atgaaaacatggttttccattaaggctatggcagatgttgtacatgtgcgcatttatgacgagatcggcgggtacggtgtaaaagcatcggcacttactgacgagatcaacgcgtgtggtaatgcgtctgaaatccatcttcgcatccattcacctggtggcgacatctttgaagggctggctatctataacgccctgaaaaatcatccggcaaagaaaattgtacacattgagggcatggcggcttctatggcctcgtttattgccatgtgtggcgatcacatcgttatgcctgaaaacgcgatgatgatgatacatgccccccgtggtgttactgccggagtgtcgggagacgttcgccgctttgctgacctgatggacaagctgggcgacacgatggcagaaacctacgccggaagaacgggcaggagtaaacaggaaatcaccgccatgatggaggcggaaacctggatggatggcaatgagtgtaaggctaacggtttcgcagatgaggttatacccgcgattacagcaatggcccgaattgaatcaaaacgaatcggagatttttcaaatatgccggaaaaaattaaaagcatgatcagccagaaaactaccagtggcgaacaggaacgacttaacggcatccgtgaattgtttggcacgttcaacggaagatataacgacctggctataagttgtcttgctgattcagaatgtagcgttgagaatgcacgcgaacgccttttactcgctatgggtaaagaatcaacgccaacaaacaaaaccacccccgcaaatctttactacgcgtacacggataacggcaacataaccggcgatgcaatgcgccaggggcttaatgcgcgtcttggtcacgaacgggccgaacgcggtaatccttacgccatgatgagccttttcgatatggcacaggcatcattaacccatcgtggtataagcacgggcagctacggcacacgctcgcagatagtaaacgcggcattcacccacagcagcagcgattttaccgatattcttgctggtggcgctgaaaaatcagtgcttgcaggctgggagcacagcggcgaaacattccgccagtggacgaaaaaaggttccctttcaaacttccgggaagcccgccgcgttggtatgaatggcttctcaacgttaaacaaagtgccggaaggggcagaatataaatacatcaccaccagcgatcgcggtgaacccatcgcgctggctacttacgggaatattttcagcattacccgccaggcgataatcaatgatgaccttgatcagttatcaacggtgccaatggctatgggccgtgcagcatcaagaacggtgggaaatctggttaatctggtgcttacaggcaacgtaaaactttctgacggaatagcgctgtttgacaaaaaacacagcaacctgattgaagcaggactgacaacaccgggacttagtgcagcacgtcacctgatgcgcacacagaaggacaaaaatggcgaagtgctgaatattgcgcctaaattccttttagttccggcagcactggaagatcgcgcgttgcagatgattaactcaaccgcacctttcggggctgataaaaacagcgggatctttaacccgtatcacaagctacttgatatcatcgtcgatccccgccttgatgatatcagcgaaaaacaatggtacatgctttccgcacagggaacggacacaatcgaggtggcttatcttgatggcaatgacgagccttaccttgaacagcaggaaggttttatcgttgacggcgtggcctggaaagtccgtattgatgcaggtgtggcagctctggattatcgcggtatggtcaaatcaggcgggacagattcactatga

SEQ ID NO: 469744 - DNA, 543 bp, Shigella boydii; identical to SEQ ID NO: 6265

SEQ ID NO: 469745 - DNA, 183 bp, Shigella boydii
atgacagaagccgaaatactgggattaatccgccgtgatggtatccagcttaatggcgtggatatgcgcaacatacgaaccagagttcttgagttgctggcctaccgtcgccgcgttgagatgtatcgggagaaggagaaaataacgtaccactggaagaagccggagcggttgcggcgataa

SEQ ID NO: 469746 - DNA, 225 bp, Shigella boydii; identical to SEQ ID NO: 466503

SEQ ID NO: 469747 - DNA, 180 bp, Shigella boydii
atggcaacaggttcaacaaataataagtcgcaacagttaaatgccagattcccgcatgatgttgttgcagacttagaaaaaaatttagatgaaggtgaaagcaaggcgcaatttatagttactgccgttaaaggtgagatcaaacgccgccagcggcgcaaggccaaagagcaggaatag

SEQ ID NO: 469748 - DNA, 210 bp, Shigella boydii
atgcgtgaaataaatgaagatcgcgtaatccgcgaaaaagaatgcagagagctaacaggcgtttgccgcacaactcgttacgagatggaaaagcagggccgcttcccctcacgtatcagtctcggcggtcgttctgttggctgggttaagtctgaggttatggaatgggttaaaagcagaaatcgtattaattcaggtaaggcagcgtag

SEQ ID NO: 469749 - DNA, 1239 bp, Shigella boydii
atgagcagggcaattcatagacttagcgacactcttttacgaaaattaagcggatcaccaaccacaaaaaacaccttttttaatgatggtggcaaccttagcgtaaggcattcaaccaatggcctgttaacctggtatttcacttacagggccggaacaggcaggaaggtagcccctgaacgtctgaggctgggaaattatccagatttgagcctgaaagcagccagggaaaaagcgtcgcagtgtcgcgcctggcttgctgagggtaaaaatccacgccatgagcttaatcacaccgtacaggaagcgttatcacctgttacggttaaggaagcgctcacttactggcttgaatcgtacgcgaaggaaaagcgcacagattacgaatctctgaaaagccggatcaatacacacataatcagccatattggtgctatgccgctggaaaaatgcgagctacgccactggctgacctgttttgatcagcttgctatgcgtaatccggtatcagcaggatttttgttacaggtatgcaagcaggcgcttaagtactgccgcaaacgacgctacgcaattaccaacgttctagatgatatggttgtaggtgatgttgggaaaaaagcagaaataagcgagcgcgtactaacaaacaaggagcttggggaattactacgcgccctggatgaaaaaatttacacaccgtactacagcgccctgattcgcctcctgattgtcttcggatgccgtaccactgagctaagacgctctgaggtccaggaatgggattttaaagaaatgctctggactgtgccgaaagaacacagcaaaacgaaggtagcaatattcaggccaataccggaagcgatcttgccgttcgtaacgaagctggtggagcagaaccgacacacgggcttattactcggagaactgaaagggcaatcatctgtatcagagtacggaagaacggcacacagacgcattaatcaagccccctggacgttgcacgacatccggcacacgtttacaacgatgctgaacgatttaggcgtggatcctcatgtagtggagcagctaaccgcgcaccagttgccaggaatgcaacgagtctataatcactcccgttatctcgatgcaaaacgtgacgctcttaatctatgggttgagcgtctcgagcttctccagaacaatgatgaaaaaatcgttgttattaccccgcgaatttactcccaaaattcttga

SEQ ID NO: 469750 - DNA, 618 bp, Shigella boydii; identical to SEQ ID NO: 460597

SEQ ID NO: 469751 - DNA, 354 bp, Shigella boydii
atgttcgatccagaaaccttgcggactttcattgcggttgctgaaacaggaagtttttcaaaagcggcagaacgattatgtaaaaccacggcgacgatcagttatcgcattaaacttctggaagagaataccggagtagcgctgtttttccgtacgactcgtagcgtaacgttgacagcggctggcgagcatctactttcccaggccagagactggctgagctggctgagctggctgagctggctgagctggctgagctggctggaaagtatgcccagcgagctgcaacaggtgaatgatggcgtggaacgccaggtgaatattgtcatcaacaacctgctctataacccctag

SEQ ID NO: 469752 - DNA, 273 bp, Shigella boydii; identical to SEQ ID NO: 468617

SEQ ID NO: 469753 - DNA, 1992 bp, Shigella boydii
gtgcactcattgacgggctttcagaatggcactttaaatatcgatgctggtggcaatgttactgttaatcaaggtagttttgctggcaccatcgaaggtgctggtcagctcaccattgcgcaaaacggcagctacgtgctgtcgggggcgcagtcgatggcgctaaccggcgatatagtcgttgatgatggtgcggtgctttcgctggaaggcgacgcggcagatctcgccgctctccaggacgatccgcagtcgatcgtgttaaacggcggtgtgctcgatctctctgatttctccacctggcagagcggcacatcatacaatgatggccttgaagtcagtggcagcagcggaacggttatcggcagtcaggatgtggtagatcttgcaggtggcgacaatttgcatatcggcggcgacgggaaagatggcgtctacgtggtggtcgatgcgagcgacgggcaggtaagtctggcaaacaataatagttatttgggcacaacacaaatcgcctccggtacgctgatggtgagcgacaactcgcagcttggagatacccactataaccgccaggttatctttaccgataagcaacaagaaagcgtgatggagattactgccaatgtcgatactcgcactacgacgactgagcatgggcgtgatattgaaatgcgcgccgacggtgaagtggcagttgatgcgggggtagacacgcagtggggcgcactgatggctgacagcagcgggcagcatcaggatgagggtagcacatttactaaaacgggggcgggtacgctggagctgaccgccagcggtacaacgcagtcggcagtacgtgtcgaagaaggcaccctgaaaggcgatgttgcggatatctttccttatgcttcgtcactgtgggtcggtgatggggcgacgttcgttactggcgcggatcaggatattcagtctatcgatgctacttccagcggcactatcgatatcagcgatggtacggttttgcgtctgaccgggcaggatacttccgtcgcccttaatgcctcattgtttaacggcgatgggacgctggtgaatgctaccgatggcgtgacgttgacaggtgagcttaataccaaccttgaaactgacagcctgacctatcttgccgacgtgacggttaatggtgatctgaccaatacgtccggtgcggttagcctgcaaaatggcgtcgctggcgatacgctaacggtaaacggtgattataccggcggcggtacgctactgttcgacagcgaattaaacggcgatgactcggtaagcgatcaattggtgatgaacggtaatactgctggcaacacaactgtggtggttaactccattacagggattggtgagccgacatcgacaggcattaaagtggttgatttcgcagctgatcccacgcagtttcaaaacaatgcacagttcagtctggctggcagtggctacgtcaacatgggagcgtatgactacacgctagtggaagataacaacgactggtatctgcgatcgcaagaagtaacgccgccatcgccacctgatccagacccggacccaacacccgatcctgacccaacacccgatccaatccccgcttaccagccggtgctgaatgccaaagttggcggttatctcaataacctgcgggcggcaaatcaggcgtttatgatggagcgacgcgatcacgctggtggcgatggtcagacgctgaatttacgtgttatcggcggacgttatcattacacggtggcagggcaactggctcagcaggaagacacttctacggtgcagcttagcggcggcttgtttagcgggcgctggggcacggatggcgagtggatgcttggggcggttggtggctacagtgataatcagggcgacagccgctcgaatatgaccggaactcgcgccgataaccagaaccacggttatgccgttgggctgacctcaagctggtatcagcacggtaattag

SEQ ID NO: 469754 - DNA, 510 bp, Shigella boydii; identical to SEQ ID NO: 461065

SEQ ID NO: 469755 - DNA, 387 bp, Shigella boydii
atgaaactcgtgcacatggccagtggtttagcggttgcgattgcgttggcggcttgcgcagataaaagcgcggatattcagacgccagccccggctgcaaatacgtctatttcagcaacacaacaacctgctatccagcaaccgaatgtctccggtaccgtctggatccggcagaaagtcgcactgccgcctgatgctgtgctgaccgtgacactttctgacgcgtcgttagccgatgcaccgtcaaaagtgctggcgcagaaagcggtgcgtaccgaaggtaaacagtcaccattcagctttgttctgccatttaacccggcagatgttcagccggtgatcaacaagggcggaactaaagccgacctgacattggtgccggtgtag

SEQ ID NO: 469756 - DNA, 381 bp, Shigella boydii; identical to SEQ ID NO: 463673

SEQ ID NO: 469757 - DNA, 234 bp, Shigella boydii
atgaaatcaaaagacaccctaaagtggttccctgcgcagcttcctgaagtcagaattatcctgggagatgctgtcgtggaagtagcaaaacagggaagacctatcaataccagaacattgcttgattacattgaaggaaacataaagaaaaagtcatggctggataacaaagaattattacaaacagcgatatcagttcttaaagacaaccaaaatttaaatggtaaagtgtaa

SEQ ID NO: 469758 - DNA, 591 bp, Shigella boydii
atgtctcgaatttttgcttactgtcggatatcaacgctggatcagaccaccgaaaatcaacgccgggaaatcgaaagtgcaggttttaaaatcaaacctcagcaaataatcgaagaacacattagcggctcagcagcaaccagtgagcgtcctggttttaaccggttgcttgctcacctgaaatgtggtgatcaattgattgtgacaaaactggatcgccttggttgtaatgcaatggatatcaggaaaacagtggaacaactgaccgaaacaggtatcagagtgcattgcttagcattggggggcattgacctgaccagtccaacaggaaaaatgatgatgcaagtaatttcagcagtcgctgaatttgaacgagaccttttacttgaacgcactcattccgggatagtaagagcccggggcgcagggaaacgttttggtcgaccacctgtgttaaatgaagaacagaaacaggtggtattcgaacgaattaagtcaggtgtaagtataagtgccattgcccgggaattcaaaacctcgcggcaaaccattttaagagccaaagcaaaacttcagacacctgacatataa

SEQ ID NO: 469759 - DNA, 276 bp, Shigella boydii; identical to SEQ ID NO: 458859

SEQ ID NO: 469760 - DNA, 2409 bp, Shigella boydii
atgcgcacactgcccgcacagttcacggatattgtcactcagcttgccggtggtcagaatcccttccttatcatgctgcagcagggggggcagatcagcgattcattcggtgaaccgctcagcctgcttaccctgctgaaggaggaacttctcgggatcagggatgcctctgaatcatcagaggagtcgctgtcagatacggcaaatgcactggctgaaaatgcccggaatgccggtgagctgggacgatttatgtcggtggtccgtgtggcggcaggtggcggggttgccgtactggccgtgcttgctgccgccgcctggcaggcagagcaggctgaccgggccttattgcgttcactgatcctgaccggaggggcggctgccaccacaacggcagaattgtggaaaatggccggggtgatcagcgatgaagccggtggtggtatcagacaggcggcagaaaatctggcccgtctggcagaaagcgggaaatataccgccgggcagctacggatcatgggggaaacctctcagagatggctgcagacggtgggggacgatgccgggaaggtggaaaaagcctttgaagggattgcagcagatccggtgaaggcgctggcctccctgaatcagcagtataacttcctgagcgtttcccagttacgccatattgatgagcttgagcgcacgaaaggtaaacaggctgcggtgacggaggcgatgtccctgtttgcggatgtcatgaatgcacgtctggagcaacttgataaagcggccacgccggtggaaaaaatctgggacgatgttaaaacctggacttctgacgcatgggcatggataggtgatcatacactgggggcactcagtctgatcactgacgtggtggccggaaccgttgaacaggtgaagctgctgcttgtgcagggggatctggcactggctgaatttattcagtcagcctgggaaacgacaaagaatgtgcccggcgttggtgcgttgtttggtgaactggcagaagagaaccgcgtatttattgagaaaacaaaacgcgatgaactggcgctgagaaaatccattgcggaacgggatgcgcgtatacgccagggggaaatggggtacatcaaccgctcgcgtgcaacaggcgtcagcaaaggtcttgggcagcaggaagccgtcagccgtctggctgaagagctgacaggtaaaaagcatacatcaccgaaaacgcgctctgccggggagagggaagaggagcaggcaagagaggctctgcttgcccttgaagctgagctcaggacgctggaaaaacacagcggtgcgaatgagaaaatcagccggcagcgccgtgatttatggaaggcggaaagtcagtatgcggtcctgaaagaggctgccacgaaacggcagttatcctggcaggaaaaatccctgctggctcatgagaaagagacgctggagtacaaacgccagctggctgagctgggagacaagattgaacaccagaagcggctgaatgagctggcacagcaggcggcgcggtttgaacagcagcagagcgcgaagcaggcggcaatcagcgcaaaagcccgcggactcaccgaccgtcaggcgcagcgggagtcggaagagcagcgccttcgtgaggtgtacggtgataatccggctgcgctggcgaaggccacatctgcactgaagaacacctggtctgcggaggagcagcttcgtggaagctggatggccgggatgaagtccggctggggcgagtgggcggaaagtgcgacggacagtttttcgcaggtaaaaagtgtggccacgcagacctttgacggtattgcacagaatatggcggcgatgctgaccggcagcgaacagaactggcgtggtttcacccgttccgtgctctccatgctgacagagatttttctgaagcaggcgatggtggggattgtcgggcgtatcggcagcgccattggtggtgctttcggtggtggcgcatccgcttccacggggacggccattcaggctgcggcggcgaacttccatttcgcgaccggaggatttacggggacgggcggcaaatatgagcctgcggggattgtccatcgcggggagtttgtcttcacgaaggaggcgaccagccggattggtgtcggcaacctgtatcgtctgatgcgcgggtatgcggaaggtggttatgtcggcggtgccggaagtccggcgcagatgcggcgggccgaaggcattaattttaatcagaacaatcacgtggtgattcagaacgacggccccaacgggcaggcagggccgcagctgatgaaagcggtgtatgagatggcccgtaaaggtgcgcaggatgagctccggctgcagttgcgtgatggcggtctgttatcggggagcgggcgatga

SEQ ID NO: 469761 - DNA, 150 bp, Shigella boydii
atgcataaaaatatctttctatactacgaaactacgaaactacgaaactacgaaactacgaaactacgaaactacgaaactacgaaaattatttttgtgaaagtattgacaacgctaactatttttaattatatattcatggtgctctag

SEQ ID NO: 469762 - DNA, 816 bp, Shigella boydii
atgaatcagttgcttgtaattgatggcgtttctgtgcgccagtacttcgaatctaactactgtcttaacgaccttcagaaagctgctcttcttgccgctggtgagaatcgctcctcccgttcgctggaagttcacgagtttatgcgtcgtcctgaaacgaaggctcttgtggaattattggaagaagaaactacgggagattcccgtagtattcctgtcatcaccattcaggggcgcaatggtgggacgtatgtctgtaaagagctggtctatgcatatgcaatgtggatcagcccggcattcagcttaaaagtgatacgtacttttgatgcgcttcataattcatcaccagaagaaaccacatccgacaaaattaaatccggggtcattctgcttgaatcagcagcaaagactctaaatctgtcaaactcctcgaaacttggtgcataccagaaattatcaaaggtagctggtcttcctgaacttatgccgatctatgccattgatgcccctgctgatgcgccagatggttcaagccgccctacgctgtcgctgagtgcactgctgaaacagtatggtatccgcctgacggctaatcaggcatatcaccagatggcgaagctggggatcgttgaacaacgcgaacgatacagccgtaccgcgattaacaacatcaaaaaattctggtcgctgacggcgaaaggctgcatgttcggcaagaacatcaccagtcctgcaaatccgcgcgagacgcagccgcatttcttcgaatcccgattccctgagctgttaaagctgctcgataccgttcattga

SEQ ID NO: 469763 - DNA, 531 bp, Shigella boydii
atgacgagactgtcgcaactggcggggaacctgcggatcgtcttcccgcccactgtaacgatcactgtcctgttcgcgttgtttcagcagggcctcagcctgttcaacttcacgacgcagtttttcagaacgggtaccgaacagcatccggcgcagtttttctatctgagcccgcagatgttctatttcccgttcatcttcttcgatcttttcttcggcgcgggccagtgcagagcgcaggaaggcctccgtctcttcaaccagactcagttgctggtctttctgacggagctggcattccagttctgcaatgcgaatgaggtatttttgattcatggccgtttttataatccggccatgacatttttacaacattgtcagtgcgttaaggcgggatgtttttggctgacgccagtccagcttatcgaggagcattgccagttgcgagcgggtaatggataccttgccgtcacgcacagcaggccagataaactggccttcctccaggcgtctggtgaacaggcacagtga

SEQ ID NO: 469764 - DNA, 480 bp, Shigella boydii
atgtatatcgggactgaagagcagcgaaaaaagcgtctaaaagaactggaaaaattaaacaaagaatcggaaccagaaccgaaaaataacggcccattcacccaggtttatcagaagggctgggaaaggatccgagaactgtcgaaggacaagcagggagttgtagcaataccgctttactcgtttttagctgagcacatagatccctcatgcggtgctgttgttgccgatcagcagtttttagcagataaattgggtgttagccgaagcacaattaagcgctggctcaactacttagaatcaaaaaacgcgttagtcagaattcctgttgccggtaaggtttgtgcgtatgcactcgatccacatgaagtctggaagggatacaacacatctaaaaactacgcggcgtttgtcactaaaacactggtcaacaaagacggtgatattcagcgccgaatcatggccatgttttcaaattga

SEQ ID NO: 469765 - DNA, 489 bp, Shigella boydii; identical to SEQ ID NO: 461547

SEQ ID NO: 469766 - DNA, 1161 bp, Shigella boydii
atgcgaaccctgcccgcacagtttacggatatcgccacgcagcttgcaggtggtcagaatccctggctgatcctgctgcaacagggcggtcaggtgaaggactccttcggcgggatgatccccatgttcagggggcttgccggtgcgatcaccctgccgatggtcggggtcacctcgctggcggtggcgacaggtgcgctggtgtacgcctggtaccagggagattccacgctttcagcgtttaataaaaccctggttctttccggtaatcagtccggactgactgccgatcgtatgctgactctctcaagagccgggcaggcagcagggctgacgtttaaccaggcgaaagagtcactggcagccctggtgaatgccggtgtgcgtggtggtgaacagtttgatgccatcaaccagagtgtcgcgcgttttgcgtctgcatccggtgtggaggtggataaagtcgctgaagccttcgggaagctgaccactgacccgacgtcgggactgatggcgatggcgcgccagttccgtaacgtgacggcagagcagattgcgtatgttgcacagctgcagcgttccggagacgaggccggggcattgcaggcggcgaacgatatcgccacgaaaggctttgatgagcagacccgtcgcctgaaagaaaacatgggaacactggagacctgggcggataaaacagggaaggcattcaaatcgatgtgggatgccattctggatatcggtcgtcctgaatcctcagcggatatgctcgccagtgcgcagaaggcatttgatgaggcggataaaaaatggcagtggtaccagagccggagccagcgccggggaaagatctcctcttttcgtgcgaaccttcagggggcatgggatgaccgggaaaatgcccgtctgggtctggcagcggccacgctgcagtcggatatggaaaaagccggtgaactggcggcaagggaccgggctgagcgtgaggcgtcacagctgaagtataccggagaggcgcagaaggcgtatgagcgcctgcagacgccgctggataaatataccgcccgtcagaaagagctgaataaggccctgaaagacggaaaaatcctgcaggcggattgcaacacgctgatggcgtcggcaaaaaaggattatgaatag

SEQ ID NO: 469767 - DNA, 993 bp, Shigella boydii
atgattcagccaggtgctggctttaataaaggtgccgcgagacttggacatcttcgcgccgttcaccgtcacatagccgtgaacaaacaggttggtcggcttgcggaagttgctgccttccagcatggcaggccagaacaggctgtggaagtaaacaatatctttaccgatgaagtggtacagctcggcggtggagtctttcttccagtattcatcgaagctggtggtatcgccgcgcttgtcgcacagattcttgaaggaacccatgtagccaatcggcgcgtccagccagacgtagaaatatttgcccggcgcgttcggaatttcaaaaccgaagtaaggcgcatctcgggagatatcccactgttgcaggccggattcaaaccattcctgcattttgttcgccacctgctcctgcaacgcgccgctgcgggtccatgcctgcaacatttcgctgaaagaaggcagatcaaagaagaagtgttcggaatcacgcattaccggggtagcgccagaaaccaccgatttcggctcgatcaattcagtcgggctatatgttgcgccgcagacttcacagttatcgccgtattgatctggcgctttacatttcgggcaggtgccttttacaaaacgatccggcaggaacatgcctttttccgggtcgtacaactgagagatagtgcggtttttaataaaaccgttctctttcaggcgagtatagataagctcagacaactgacggttctcttcgctgtgcgtcgagtgatagttgtcatagctgatgttaaagcctgcgaaatcagtctggtgttcctgactcatttcgccaatcatctgctccggtgtgataccaagctgctgtgctttcagcatgatcggcgtaccgtgggcatcgtcggcacagatgaaattaacctcgtggccgcgcattcgctggtaacgaacccagacatcagcctggatgtgctccagcatatggccgaggtggattga

SEQ ID NO: 469768 - DNA, 291 bp, Shigella boydii
atgatcaacgtaagcgtcacgcagattgatttgctgatagcgaccgcgtttggtttcatcgacgggaggaaagtcgttggcttcagccaggcgctggacatcgcgcagtccggtatcaccgctgatcgggcgagccccttcgcgcaccagtttcatgccgttataatccatcgggttatggctggcggtaacttcaatgccgccatccacgccgagatggaacgtggcgaaatagatctcttcggtgccggacataccaatatccagcacatcgacgcccgcatcctgtaa

SEQ ID NO: 469769 - DNA, 585 bp, Shigella boydii
atgctgttcgacgcggttaatcgcctcaacaggttgtgccagtttgctgttgatctcaccgcttgccggaaacgccgccatccggtcgcgcaccagttcgcccagcgtttttcctttcaggcacaccagttcggcgaccagcagccacgggatcatgccgctgtcgcagtaagcgaaatcacggaagtaatggtgggcgctcatttcgccaccgtagatggcgtcttccttgcgcatacgttctttaataaaggcgtgtccggttttcgacattaccggggtgccgcctgcggcagtcaccacatcaacggtgttccaggagagacgtggatcgtggatgatcttcgcgccgggatttttttcgaggaacgcttctgccagcaggccgacaatgtagtagccctcgataaactgccctttttcgtcaaacagaaaacagcggtcaaaatcgccatcaaaggcaatgcccatatccgcgccgtgtttgatgaccgcattgcgggtgtcgtcacggcattccggcagcagcgggttaggaataccgttggggaaattgccgtccggcgtgttgtgcactttgattaa

SEQ ID NO: 469770 - DNA, 354 bp, Shigella boydii
atgcgtgattttcagaatgcctttgatgctgccctcgccggggtagacagcacgattgttgaagtgatggggctctgtgcgcagttcacctcgggagcacagcgtggaagcgaagttcagggggtttttgacgatccggagtcgctggggtttaccggtggcggggtccgtattgaaggaagcagcccgtcattatttgtgcggacggatacggttcgtgccgtgcggcgtggtgacacgctgaccattaacggcgagatgttctgggtggatcgtatttctccggatgacgggggcagctgttatctctggctcaaccgtggtcaaccacccgcagttaaccggcgacgataa

SEQ ID NO: 469771 - DNA, 384 bp, Shigella boydii; identical to SEQ ID NO: 467192

SEQ ID NO: 469772 - DNA, 279 bp, Shigella boydii; identical to SEQ ID NO: 463424

SEQ ID NO: 469773 - DNA, 411 bp, Shigella boydii; identical to SEQ ID NO: 463834

SEQ ID NO: 469774 - DNA, 381 bp, Shigella boydii; identical to SEQ ID NO: 463673

SEQ ID NO: 469775 - DNA, 420 bp, Shigella boydii; identical to SEQ ID NO: 459063

SEQ ID NO: 469776 - DNA, 279 bp, Shigella boydii
atggatttcaaaaaccgtgaatttccgttagaacaaaacagaagattgtatgcctgggatattctgcagaaaaaacagtctgacataccgaaaaggattaaaggttatattcaccaggcgattggtgacgtgtctttaggttatgccttattggaggatatagtaagcaaattaaaacggggtaaatttgaactccaaataccaggaggtggaattaaagaatgcgatggatggtatatttacgaaaaaataggtaatgctgccaacttactgatttag

SEQ ID NO: 469777 - DNA, 426 bp, Shigella boydii; identical to SEQ ID NO: 463404

SEQ ID NO: 469778 - DNA, 264 bp, Shigella boydii; identical to SEQ ID NO: 463855

SEQ ID NO: 469779 - DNA, 381 bp, Shigella boydii; identical to SEQ ID NO: 458903

SEQ ID NO: 469780 - DNA, 495 bp, Shigella boydii; identical to SEQ ID NO: 461605

SEQ ID NO: 469781 - DNA, 360 bp, Shigella boydii; identical to SEQ ID NO: 461764

SEQ ID NO: 469782 - DNA, 360 bp, Shigella boydii; identical to SEQ ID NO: 461764

SEQ ID NO: 469783 - DNA, 360 bp, Shigella boydii; identical to SEQ ID NO: 461764

SEQ ID NO: 469784 - DNA, 276 bp, Shigella boydii; identical to SEQ ID NO: 464846

SEQ ID NO: 469785 - DNA, 354 bp, Shigella boydii; identical to SEQ ID NO: 461603

SEQ ID NO: 469786 - DNA, 258 bp, Shigella boydii; identical to SEQ ID NO: 461679

SEQ ID NO: 469787 - DNA, 258 bp, Shigella boydii; identical to SEQ ID NO: 461678

SEQ ID NO: 469788 - DNA, 588 bp, Shigella boydii
atgtacctacatattgtccctaaactttttcatcgcatggcgaacaaatgcactctaaaatccatctccatacctgaacttgatttaataattgatggcgaatcattgtctgtagggaggccgtggcctaacaaatgtttgtgggttggaatgcggaaaagcagaaaggcagttaatggacttcttttgcatacagataaaaaactaagatggttcactaccagatatacctgggatattgaagatatgggattaattcatcatcaggttaatacttatattgaagataatgaatttgatatggtatcacaggaaattctcttaaatggttcttttgataagtggagtgacagggtgcattcagcttatgaaggtaagcctccagcaataatccagcccaaaatggaatcatttttaaaaagaccaggtgaagacagtcatgatatgtgggaggagttcgagtggggtaacttcctcatatcaagagaagaaagcatcttgcttcacacgatccagtctgaacgattaaccaccgatttctcttttttcaaaagacaaccatctattgaaagtgcattagttatttaa

SEQ ID NO: 469789 - DNA, 2166 bp, Shigella boydii
atgaaactttttatcgcagaaaaacccgcagtagcgaatgatattgttaaggcgcttggtggcaattttacccgtcatgatggctggtttgaaagtgataatactattgtgactaactgttttggtcatattatcgaatcacagccccccgaaaactataatcctgaatacaaagagtggaagattgaaacactccctttgcgtctttatcccgtaaaataccagcctgtagaaagcgccgaaaaacaggttaaaacgattattgagcttatcaggcgtgctgatgtgaccgaaattattcatgctggcgatcctgatgacgaaggacagctacttgtcgatgaggtcctggaatatgcaggcaacacaaaacccgttaagcgcgttctgatcaacgacaacacccttccggcagtgaaaaaggcgctggcaaatcccaaaaataaccgtgacttcagaggactctatctcaaggctctggcgcgttctgtagccgacgcgatatacggtttatccatgacgcgtgcttacacaatcccggcaaaaactaaaggctataaaggtgttttgtctgtcggacgggtccagacacccgtgcttggcctgattgtaaatcgcacccgtgccaataaaaatcataaatccagcttctactacaccatgaccggacattttcaacgcggcgctgatgttatcagggcgaactggaaacctggtgagttcgcaccgctgacagaccgcaaattgcttgataaaacctgggcgaatggaacagcaacatcacttgcaggaaaaccagccacagttgaagcggcagcaacagatgataaaaaaacggctgcaccgttgccctttaacctggtacgacttcagcagtacatgaacaaaaaattcaaaatgactgctcaaaaaacgctggatatcacacagcagctacgcgaaaaatacaaagcaattacttacaaccgttcagattgttcatatctttcagacgaacaattcagcgaagcaccacaaataatcgatgccctgaagtcggtgtttgatcagccaatggatattgatacgacacgtaaaagcaaggcatttaacagcgcaaaagtaacagcgcatacagccatcatcccaaccgttagcgtaccggacgtaaacgcactgagcaccgacgaacgcaacgtttacctggcaattgcacaacactatcttgtccagttcatgcctgaaaaggcatatcaggaagtatccgtcgccattcagtgtggtgatgagtcgttttatgcccgtgccaggaaaactacagacagcggatttgaagcgtttcttggtgtggaaaatgccggggacgatgaagcagaagtcgaaaatgatgattccgcttttgatcttctctgtaaaattcgcacaggagaaacagtgacgacaaaagaagtggttgtgaatgagaagaaaacaacgccaccgccattattcaccgaagccactttgcttgccgcgcttgttcgtgtcgcagattttgtcactgatccagtgattaaaaagttactgaaggataaagatcgggataaaaaagacgaacatggcggtattggtacgccagctacgcgggcttccatattggaaacactgaaaaaacggaactatatcaccctggaaaaaggaaaacttattccgacagataccgggtatgcgcttattgatgctctgccggatatagctgttaatccagatatgacggcattatgggcggaaaaacagacactcattgaaaacggaaaaatgaccatcgaacagttcgttgacgaactgtacaatgatctgataccgatgatcagtaatgcgaacagtgctgaaataaaagtttcccccagcgcgccgtctggtcagtcacaacgcctgtcctctccttgtccttcctgtggtaaacagattgttatcaggccaaaaagctattcctgtacaggatgtgaatttaagatatggaaagatttctgcggcaaatcattaaccgataaacaaattgaaacgttaataacaaaaggagttacaagtgaattgaaaggtttcattagtcaaaaaacaaacaaagaattttcagcaaaagtaaaactggttgacaaagcaaccgggaaactgggatttgagtttacacaaaaaagtaagaaataa

SEQ ID NO: 469790 - DNA, 207 bp, Shigella boydii; identical to SEQ ID NO: 403785

SEQ ID NO: 469791 - DNA, 432 bp, Shigella boydii
atgtttttcctctacgatacctacaatttcttctactacctgataaagttaattgtcattcagccacaatatatttgtgtctatatgatattcttttttttcaatgcagggatagcatatagcatcaccaatgatatcgaggatcaagtatgtcgatggcttttattcgtaagtatgttacatgctctgatgattcccctcgcaattatcatgccaccacaggaaatacttcaggaaacagagaaaaggcaggaactacatgaatcaatacccaaaacatgcaaattaaaggcactggatgctcaacaaggtggtttattcggcgttgataaagatgaatgggtattccctgacaataaatcattctatctgcctgaaaagtaccgtccagaaaacaggattacggaactagccatgatgaaagaaggataa

SEQ ID NO: 469792 - DNA, 441 bp, Shigella boydii
atgaaagaatacgaaaaaacggctttaatatattccttaaaggaaagcaatacattagttcttcggattatactaatctctattttagttgtcggggtgatttcaggcgcgatatacttatataacttagcgatctcgttgtttgattcaaaccaaacgtctgtgcaattcaccttttgcggagtaggctgttttattgctctattacttcaatggatatctaatgttgatgcaaattacagagaaagaattggggagcaaccaagtacaataaaaaacattgtacaatatttatttgcagccattattaccattagtttcattacaatggcattaacagccatattagtcttaaaagactcgtccaacatatggctcaacattacttttattgcattattactgtccatttttgtagctattatttctgtttggggttga

SEQ ID NO: 469793 - DNA, 4203 bp, Shigella boydii
atgattgtcagatatggtggtggtaatgacggtattgttgattacctgataaatggtcgcaaagcagaacgtcagtacacacgtgatgaacttgatcatcgtgttgttcttgatggtgatctccagactacagataagattatcaattctattgaagacaacaaacaggaccgttatttgcacattacgttgtcttttcatgaaagtcacgtatcaaatgaaatgttaaaggcggttgtggatgattataaaaaattattgatgaatgcttatcatcctgaagaatattctttctatgctgaagcacatttgccaaaaatccggcatattcaggataatagtacaggagagttaattgaaagaaagcctcatattcatattgtcattccaaaggttaatctagttacaggagataaacttgatcctgttggccttatagggaaaggtcatactatcgaacagctagatgcaatacaggagcatattaataataaatataatcttgccagcccgaaggactttccgagaaaaaatagcgattatagtgttattttaaagagagtaaaagcagatcttgatgtagagcgtaattctgcatttaagaatgaattgaattatcgaattgaaaaagaaaaagtaagtgattatgctgtattcaaacagattgttgcagaatatggtgaggttaggataagaaatgaaggaaaggccagtgaatatattgctgttaagttaccgggagataaaaagttcactaatctgaaaagcccgttgtttcgtaaaaactatattgaagagggaaagttgactcttcaaaaacctacgcctaagcaaatagaaaaacgtctcaatacctgggtaaacaaaaccagtcacgagattaaacatgtttttctcaacgccagcgttcgtaaggactatacaagtttatctgaagcagagcagattgaatttctgaaagagaggataaaagaatatgactcaagagaaaaacttaacgaaagaaattctcagcaaacgtcaggacgagcgggaggttacaagtcgtgtcctaaaaagtttgccagaatccgtcaatctgaagcaacagtcggattgtcacgtatgccccaacgcggtatggtttacggaatcaatggattcacaagacccgactctatcagtgtattgtcagatatttcgcagcgtgatctggcagagcaattaccgcaaagagaacatcctggtcaggatgtgcgacgggattatgatagacaattcacagagtcaggaataaaaagtcttgaacgctcttcttttttgtgtgaaacgatgtttcagactctgaatgaggcggcagagaaaaacgaaattacaacgatggcagaaattcgcagaaatattgatcctgtcaggtttctgtcttctgccgccgagcgttttaatattattccagcgcagcataaaatcagaacagcaaaggacggctccccccggttttctgtggggaatcgtaatatgaacgcatctgattttctgacaaagcatattaatcttgcctggaaagatgcgaaatcctttctgcttgaagtttattcacagcagttagaaaacacgccatatacgcgctatccaacctacagacgccttacgcatcatgaagcccgtgagcgtcttaactcactgaatttatcggaaaaaacattacgaaatactatcaggtttgagcgtggcaagctgtataatgatctgcgagagatgagacgcgagttgaagttaataccacgtgaacagcgtgatattgccgtgggtgtgattgtttacaaaaaactaaccacacttgagcgtctttctgaactcgacacagaggggcgacacataattcgtcaatatcatgctgactggcataaggataaagatgaaatgaaagcccttgaacgtctcaaaagctatctcaacttcgatgaaatcaacgccatttctgctgacgaacccgaactttcgcttcagaaagcggtggattcccagcgccgcttagaagaggcgaaaaaggttaactccaaactaaaagatcttgtgatggataagcaggattccaggattgtttatcgcgatcaggaatcggaaaagcctgtctttaccgacaaagggaactttgtcgttgcgggtaaaaatccctcaaaagaagagatcggaataatgcttgagtattccagggaaaagtttggtggtgtactcaaacttaccggctctgaagatttcaaaaaaatgtgcgctgaagttgccgcagagcaggacatgaagattattttacgcccggagcagtatcaacagatgatgctggaattaaaagcagaacttcagggtaataagtttgagcaggtggaaacacaggaaaatagccaggagtccgaatccagaatagagaaaggtgatgcattgaaggaacaggccaccgaacaggaacaggccaccgaacaggcgcaggctacagagcaggcacagaccacagagcaggcacagaccacagagcaggtacagaccacagagcaagcacaggtcgcagagcaggccacatcttcatatgatcctggtgttattaccagggcaaacaccctggattcacagatgcttagtaaaggcacaaatggtgaatttggctatttgaaatctctggatagcgatgaaaatgagatttgggaagtgctggggcatgtacctggagacagcgatgatatctttagtgttgccagttttgataatgaaaacgacgcaaaagaattttgcaaaattgtgaatgagttaggtattgacagaacacaggctctgattcaggagcagcttactactcaacacgatcaggctactgcgcaggtgcataataaacaggaaatttattgtataaactttagtcgcttccatgatttgaatgaaggtatcgtctttcattctaaagatgcggctattcagtgttatgaggaaagcaaatcttctgcaatagaaaaatatgaaagcaattatttaaatggtgatggttttgatactgttgtgcttatgtctaaaactgtctcaaccgatgaattatcctcttatccagagggggcattagtaacgtttgataggccatttgaagtaattgccaattcatatgaagaataccgtactccagtgtatgcggtttctttctcgaaggatgagtttagtgaagatattaagacttttgagtcattgcacgacgcatctgaatataaaaataagatgcttcaggagcacgggcttaaccaggatgatatcttaatcacacctgtaacaagagaagaaatcgcctttaaaggaattaaggacgctgttaatgacgctaatatggcagtgatggaacaggcgggggattcgtccagagaatcaccagaagagatactcgccagtatttcagctaacgagcatatgatctccgggcttgaaaacttcctggttaaagaccgttctcagttcagttcctgcaatggggatatcgttgtggaggcggaaattaccaggggggaaggtggtctttatcgccttgcggtcgctggtaagcatggcttagagcgtggtgatgcagttgccagagtggatgttacggagcagcaatttgccgcgatcactggaaaaacaccttctgaagttttaacgggggacaaaacatcggctcgtgttccggtaattacaggtatccatttcagtacaagggctattgaaaatgtgaataaactggaacaacagaaggattatgtctatttctcaacacatgaaggtctgaatgctgaaataaaagatttcagctctctcaaggatgctattgagtggggccgggttgaatgcgagctacatgatctcaataagcgcgatactgtcatttatcgcgtcgagtctgaacatatttctcaggggattgacgctgtaatgaaaaatgctgaacgcgtggagcgtcatgaaattgagaaagcacagggacgggattgcacgccggaagacggcaagattcttgaggcaattgatcgctttgaggacaagttcagaggggaaggactgaagttcgaaagggagaaggccgaatccgatttgcttaatcacggattcactcgtgaaatggcagaagatgctcttggaaaacaatttgtccaggccagagaagatcatcaggaatcgcagcagcagcgtgacgattcacaggacatgcactaa

SEQ ID NO: 469794 - DNA, 342 bp, Shigella boydii
atgaagaaaaaagccaacaaaagtgttcatgtgacattcagacttacagaagaagagtatgctccatttgacagagcaatcagagagcttgaaattagtaagtctgaatttttcaggctgcttactattggtaaaataaaaaactacacatcagataaacgccatatcccggaatacaaacggtgtctttctcagttaagttgggctgggaataatattaaccagatagctcaccgcttaaactcagatcatttaaagggtattatatcagaggcgctttataaaaagattttaaatgtgctgattggtattcgtgatcgccttcaggagatagccaaatga

SEQ ID NO: 469795 - DNA, 402 bp, Shigella boydii
atgaaaaagatcgagagtttattatctccaatatgcgaggctataaacgaaacaaaatcgaaatcaaaacaggctgtcttcaatatgtatttgcaaaatatacttgaagcaaagaaatattatacatgggagcaaatagctgattacataaacaacaacaccaagacagaactagcccaaaagacttatataaatatgacagagagggctaaaaaaagacaaaaatgcactgaaccaaaagaacaggcaaaaaccatagatgtaattgatcagaatgaagctaaaggcgatgaaccgagagggggggtaaaaggttttttttcaaacattagtgagaacaaaaaagaaatagagcacgatccaagtgctacgaatgaaaaattcataaataaatatctttaa

SEQ ID NO: 469796 - DNA, 753 bp, Shigella boydii
atgaaaaactcaatcaatttcatccttcagggtaaaggtggtgttggaaaatcattcgcgaccgcaatactggcacaatactttattgatgaaaatcacatggataatatcgtagtcggtgacacagacccggttaatacaactacggttaaagtaaaaagattaaatgcagatttgatacaaatcactgaaaacagcaaagtaatacaatccaaatttgatccaatgttcgaatcaatgctgaccaatagtcagaatacttttgttattgacaatggcgcatctacatttttaccgttaattcagtatttcaatgataactgtgttatggacatgtttgaagatgtagaacaagacgtttatatccatactgttatcgttggtggacaagctcttgcggataccttgcagggatttgaagaactgaaagaactggttaaaggaagtaaggtaaaacttattgtctggataaatgaatttcagggtattccagcacttgaaaatatcccattaatagaaactaaattcattgaaaaaaacaaggatgtaatcgctggcgttgtggttattcaggacagaaaaagtgatgcctttgcctctgacatcaaagagctaacagaaaaatcactaacactgaaagaagctcttgagtccgaccattttggattaatggctaaatcacgattaaaacgagtcttcaatgacatttacaaacaattagatagcatctatgacgatgaacacggtgaataa

SEQ ID NO: 469797 - DNA, 732 bp, Shigella boydii
atgacgatgaacacggtgaataatatgagtacagttaatcagccagaattaaaacagcctgaaaaggctgtttccagtgaagatattgataattttattgttgatgtattcaaggagacagggcataaaatatcaaaagatgatccagttatttcattaatttttctgaaccaaaagatacaggaaaaattcagcaatgagttacaagctaacttcactgccctgtctgagggcttcagacaggtcgtttcatctgtagaaaatgactatattcaaagattcaagaatattgttgagacgtgcggcgatctggataatgaaataaaagaaaaagtagaagagggaaaaaacgatctaaaagaaacaagtgttgaggtaaaagaaaaattaacagatgatattattgaactcatatctggaattaaacgcaaccaggaaaaaaacaacaaattatatgaagaaaagttgaagtcattatctaaggctgtaaaacccttcagtacaagaacagccattgcaatttgtgccttgtgcacattatgcctgtctgcggcattttctggcgcaacctggtatgttgcacaacatgaaaaagaggcaagcctgcgcttctatgcaagagcttttcttgatatgaaaaaaataactgaagagagcatgagaaaattaccaaaatcagaccagcaaaatataaaactcaaactagacgaaattgattcaagaaaaccatag

SEQ ID NO: 469798 - DNA, 450 bp, Shigella boydii
atgacaacttttaccgacgacgacaagaaactaattaaagaaatcagggagcgaatcggcagcctggaagtgcgagacaatattgagcgtcgggcttatgaaatttctctggcatcgctggaagcagagccagttatgttctgtatatcaggacaaaatgtagattcagaagaacatgtatcaaccagcaaagcggttgttgatgcctgggttgaagaatggaatcaggttgacggaagtcctggcgaaccactgtacaaaactatgccactctactttcacgctgccttgccagcgccggtagtgcctgaaggactggttaaagcggtgcgtttttatgagcaggtaaaaaatgagaatccgccagttgggactggtgcgtggaaagacgctgttgactgggtactcgaagaggcttgtcaggctgtaaatacatgcatcaaaggatga

SEQ ID NO: 469799 - DNA, 204 bp, Shigella boydii
atggcaaccaacaatcgtaaagcaaagatgctaatttcccgtgtatacagactttgctaccccagccagtggttgagagttagcaatcgccgtgtggtgttgttctcattttctggaattgccagagagggagtcaaagataagcgtagcgcggtgcaaaaccgctggaaaaaccactgttatctgcgcactaaaggagagtga

SEQ ID NO: 469800 - DNA, 516 bp, Shigella boydii; identical to SEQ ID NO: 15395

SEQ ID NO: 469801 - DNA, 321 bp, Shigella boydii
atgacaactttaaccgacaaagaaatgattaaagaaatcaaagagcgcataggcagcctggacgtgcgagacaatattgagcgccgggcttatgaaattgctctggcatcgctggaagcagaagcgccaaatttgcctggtggtttcacaattgaagaagcaaaagaattacacgaaaatctggtaaaaagtcacgtaagcaaggctttaagtggcgaaaaaatgaaaaaagaaaatcgtgatgccgatttgcgctggattcatggcgtaatagttcaggccgcgtggtttgtgaaagcatcactagggcagaatgcatag

SEQ ID NO: 469802 - DNA, 444 bp, Shigella boydii
atgactcaactaatcccagaaaagatactggaaatcatagatgatcatgatcgtgcagaaaaaaagcaacgcaacaaaatcggtttcatttatttatgtctctatttagcaataattggtgtggccgcgtattcctttatatcaacgtttagcattaatgtggtaacaatcatcataatgcttttcggtgtgttcatgattgtgatttttaagagttatttagactcatggagtgggataattcttagcagtgaccacatattgtccatactcgataaaaccaaagattacccagaaattaaacgtatagttattaatcgtctgctctccggctcaatactcacaggtaaagatgaagagtacatatacagtcaactgaaaaaggctgaacaaagcaacgaacgtgaaaagagattgcaagcaattaaagagtatacatcgtaa

SEQ ID NO: 469803 - DNA, 666 bp, Shigella boydii; identical to SEQ ID NO: 221148

SEQ ID NO: 469804 - DNA, 285 bp, Shigella boydii; identical to SEQ ID NO: 403805

SEQ ID NO: 469805 - DNA, 573 bp, Shigella boydii; identical to SEQ ID NO: 221149

SEQ ID NO: 469806 - DNA, 216 bp, Shigella boydii
atgcttcaacaacatcaggatagcctcttaccgcgcgttacgcaaggagaagaaggccatgaaacagccgaaaaacgccctgacctggtgtttattaatcgtgtgctgcacattgttaatattcacgtatctgacccggaatcgtttgtgcgaggtccggctgaaagatggaaacagggaggttacggcaagtctggcttacgaatccaacggtaa

SEQ ID NO: 469807 - DNA, 162 bp, Shigella boydii; identical to SEQ ID NO: 22640

SEQ ID NO: 469808 - DNA, 1029 bp, Shigella boydii
gtgcagcttgctgtgattagcaaacgtcactggtctgaactatcaccggaagagcaggtccgtttctggcaggactacgaagcgggtattgaaagctcattcctggtcctccaggaaaacaaaggcggaacaacaaaacgtcgccggggtgaacattccactaagccaaagtgtgagaatccagcctggttccgtcccgacaactataaggcgctgggcggacagttgggccacgcttacaatcgtctcgttaaaaaagacccggtcactggtcagaacacactcagaatgcacatgtcgttgcatccattttatgtactgaaacgtcagagtgtcggtcgcaaatataaattccgaccggagaaacagcggctgcttgacgcaatatgggttgtacttgtgagtttttgtgatcgtggattgcacactgtcggcatgtctgtctcccgcctggcagaagaaataagcccaaaagacagtaagggagacgtgattcctgaaaccgcagtcacagtatcgcgcctttcccgtctgctggcagagcaggtttcctttggcacgttgggaacgtcagaaaagacgatatgggatcgtgaatcccgccagcgactgccgaaatacgtctggatcaccgaaactggctggaaaatgctgggagttgatctggtgaaacttcaggaacagcaacgtaagcgccttgcagaaagtgaaatccgtctgcaattgattaaagaaggcgttatccgcgagggcgaagaaatctctgttcactcggctcgtaaacgctggtatgcgcagcgttctctcgatgccatcaagtcccgacgtaagaaagcagcggagcgcaaacgtgctaatcgcctggcaaaactgccgtatgatgaacagcgaaacgaaattgcgcggtttattctgaagcgtatgccgccggacgaagcgtactggtgcactaaagaaagattagaacaactggtagccagagatctacgtcagcttgaactggctctgacagcttcgccaccccactag

SEQ ID NO: 469809 - DNA, 453 bp, Shigella boydii; identical to SEQ ID NO: 403810

SEQ ID NO: 469810 - DNA, 216 bp, Shigella boydii; identical to SEQ ID NO: 403811

SEQ ID NO: 469811 - DNA, 177 bp, Shigella boydii; identical to SEQ ID NO: 25982

SEQ ID NO: 469812 - DNA, 978 bp, Shigella boydii
atgattgacgctataattactccaatagttacatctattccgttactcttattaattttagtcgcgctgatattcgttaaatctgccgtcaaaatcgtgccgcaaggtaatgcctggacagtggaacgctttggtaaatatacccatacgctttcccccggtcttcacttcctgatcccgtttatggaccgcataggtcaacggatcaacatgatggaaaccgtcctggatattcctaaacaggaagttatttcgaaagacaatgcaaacgtaactatcgatgctgtttgttttgtccaggtcattgatgcagcgaaggcagcttatgaagtcgataatcttgcatcagctatttcaaatcttgttatgaccaatatccgaactgtcgttggtggaatgaatctcgacgatatgctttctcaacgtgacagcatcaattctaaactgttaacggttgtcgattatgcgactgacccgtggggaattaaggtcacacgtattgaaattcgggatgttaaaccaccaaaagaactgactgaagcgatgaacgcgcaaatgaaagcggaacgaactaagcgtgcccggattcttgaagcggaaggtatccgccagtcagaaattctgaaggcagaaggggaaaaacagtctcaaatactgaaagcggaaggggaacggcaatcagcatttcttcagtctgaagcacgcgaacgtcaggcagaagcggaagctcgcgcaacaaaactggtgtcggatgcaatcgctgaaggtgatgttcagtctgttaattactttattgcgcagaaatacactgaagcactccaggcaattggcacagcatcaaacagtaaactggttatgatgccgcttgattcaagtagcctggtgagttcggttgcaggtatcagtgaactgctaaaaaacgtatcacaggatactcccaaagttgatatgaaacaggctcaacaatatttgtcttaa

SEQ ID NO: 469813 - DNA, 300 bp, Shigella boydii; identical to SEQ ID NO: 31583

SEQ ID NO: 469814 - DNA, 444 bp, Shigella boydii
atgttatggtttacactgtttcttctgtgtattgcacttgaaattataaccggaacaggatggttactcttaatcagtcttggtgcattatcaagcgccattgtgggcttttttcttccgatatcacaagaagccaatatatgcttctttgcgtcaatcagcatactggcgtcgataattaagttcttctatgacaaaaaacataagaaattagatactctcctggtgaacacagggcattcacgttttaaaggaaaagaatttacgctcagtgacgatattgttaacggcaaggggcaattactcattggtgatacattctggcctgttgagacgttacacgatgaaaactaccctgcgggaacaagagttattgttacagacatgcaaggaataactcttaaagtaatgaccatcgaagacaagagtaaaagcaaggaataa

SEQ ID NO: 469815 - DNA, 171 bp, Shigella boydii
atgcctctttcgttgttaattccgcttacgggaacagcgatgaatgcactatgtatttttattatcagacttctggataaagattttattgaagtctacaaaaaaacgctaataaatattactgcattacatattttattgatggtgttaagtgtcacaggaatagtatga

SEQ ID NO: 469816 - DNA, 654 bp, Shigella boydii
atgcgaaacgcaaatgaaggaatttctcttgcagctattgtagctaaagaaacaacaacagataaatggaatggtactggtgggggtattggtttaggtactggtggtattggcttattcatcggaggtgtttctggttctaaacaagagcagacacaaagggcaaaaaactttgaatcgcctaaagaggaagaatacagtctattaaatgtatacggttcgataataaaatttctcgtttttggcgggctatttggtttatctgcccgtttatttacatttttatcagacactggttctgattttgctgaaccagtaacaaccaccacagccacaggaaagattcaatctattctgggtggcatggcagaaatggtaagcattttaggcagcgttgtcccttttttagtaattatcatagcaatgatctggtttctgtttttcagcagcaaacgagaaaaagaagagttaacacgagttgaacgtgaagctgctaaaacaaaactccgtatagatgtctatcaccgtttacgttacgttgaaagcgatcatgtcgtttttgacccgattacaggccgggaggttccggcagaacgggcgtgtattaataaacttattgaggcacttgctgatgaaagcaacaacgtctcatga

SEQ ID NO: 469817 - DNA, 258 bp, Shigella boydii; identical to SEQ ID NO: 25981

SEQ ID NO: 469818 - DNA, 258 bp, Shigella boydii
atgaaaaaaaacgacgatttaatcactttaccatctcataatagccacgctctcgattacatcattaaaaaagcgtttacaccacgtaaaaccaaaacatcgacagcgacccacaacgtttatagttacaataaagaagaatccacattaaatttccaaaaaattggagaagcaatttttttcggcacagacctggtaattaagctgaagccaaatattagtgcctctggtgaactcttcatctgccagaaggactaa

SEQ ID NO: 469819 - DNA, 987 bp, Shigella boydii
atgaacattgtttctgaaactcttgagctagtaacaaccattgttgaatccacagcggcgacgaacgccgctaaagtcgcacaagcaatatctcctacattctttgctgccatagccttatacgttatttacctaatatttgaaatcacgtatgcccagcgtgacgtcctgatgagcgaggtaactaaaaatatcggcgcattcgccctggttggtgcattcacttattcagcgccttattacagccagtttgtcattccttttgtaatgcacgctggcgctgatctttctgctgctataactggtgatgcaggaacggcaaccagtgttgataatttatgggattcattaagcaaatcactggatggttttctgttacaacgaatgtcccaactgtctatgacagatgtaagcggctatttgctttcattcaccatatatataataggctatctcggtgggatgatattaatctattacactgctatttttttatgtctatcaacttttatggtcggaatcttactatctgcgggaatattatttatctgtttttccctattcgcatcaacaagaaatatgtttactgcatgggttggcagttgtttaaactacattttattaaaccttttctacactatatcgtttagttttttattgtcatttatcactcaacatataaatatcagccaaacaccaagtttatttgatgctgtgacaattctacttgttattgctatttcggtatttcttattgaacaagtcggcactctttgctcaacgctcacaggcggagtcggcatcaatggcttgacctcggcagcaaatggatttgctgggaaactggctgctgttaccggagttagggcactaagtaacgctggcggtaatctcgccaaaacaacagcgagaaatttaacacgagcagccggaagcaaagcaaccgacatgctatttcatcgcaatggaaaacttaaagctgggtga

SEQ ID NO: 469820 - DNA, 648 bp, Shigella boydii
atgaaatataaagtattatcatttctccttgctggaataattaccgtaacatcaccatcaatctttgcatctggtattccagtagtagacgttacagcgatagctaaaacagttgaagaggggttaaatcgtgctgccgaagcagcaagacagcttgagcaacttaagcaacaatatgaacaaacgataaaatacgcagaagaacagaagaaaaggctggaaggtttcactgatttcagtaatggttttaatgacgcctcaaattatatgaaggattcattatccacaatcactgatagtgctaaatcagatctaaactcgctacgctctcaatataacctctctagcgatgtcgtagagacacagcaaagatatgatgcaatcctagctaagatcaaattttatgaaaatttcaatactcaaatgcaggaaagggcgaagagactcacaaatttacaaaaagaattttctaatgccgacactccacagaaaaaagcagatttatccaaccaactgaacacagaaaaattgacaatggagttgcaattgaagcaatatgatattgctgagagacaaatgaagtttgaacaggaagctgcatatgaatctcgacgcattaatatcgttaatgaaatgttaaggcattaa

SEQ ID NO: 469821 - DNA, 237 bp, Shigella boydii
atgaagaaaacaattatcatttctcttgctgtattctgcggtttgctcgccggatgtgacgacaaaatccatgatgtatcttactataaggaacatcacgaagaagctcaaaaagtatccgacaaatgcaaggctggcgaaatcacaaatgataattgtaaaaatgccaacgaagcactctatgatctaaaacgaaaagaaatcatgagtcaaatgcttggacgctccaataaataa

SEQ ID NO: 469822 - DNA, 792 bp, Shigella boydii
atgaatgagccattaaaggcggaattgcactctttgtttagttttgatatctatcctgttgcatcatcagaacagaatactggagttaagttggttatggcgcggttttatttaaatgtaccttttgaagaaaaggagttagccaaacaaaaaggggcgcaatgggatcaagaacaacggaaatggtttgttccacaggggaaaaatccaatttattttattcagtgggtaaaagaattaaacgaacatgattacaatattttttctcaacgtttttatattgcggaaagttaccagtcatgttggcgctgtaagaaaataactcctgtgtttggtgtttttttgcctcgttggtttagttatagagatgttgtttgtggggttaaacctgctgaatgggaaggtcgcatattagataaatggtatgaaacatcttctccacgaggtatggtatattttgattcaaagaaaaatataatttatcagtggttaaccaatccaaaagcatgggctattttatccaacgtaagaaggatatcatcttctgcgttatcaataatcaataagcattctaagttatattatcccgcctatagtaaaacagcgaaaatgacctactacgcgaatcattgttgtcattgtaaatcaatgcagggagactttatgatgtttgatgagccaggtggtgtgttttatccagtcacatctgaacaggcgaagaaaataaaactccatgaagtaataaatgaaacaatttttgctaatgcaaaccacaggcaagccatagagtaa

SEQ ID NO: 469823 - DNA, 636 bp, Shigella boydii
atgaaatccatcattttatcgatggttgccgccaccgcattactgtcaggctgcgcggatagcaaaacacaaccagtacctgagtcaccgttaaccaaacatgaccatcagataacgttgaaaattgataccgtgcgaacagacctgccggacagttctcctgtttgtttgaatggtatgaatatatacgaaagtctgagcgagcggcatcctggcttgtttgccaaaaatcagaacgtgattttccgtagtgcattctttgatgacggtcaggcgatatcctccgaaacaatccgcaaaataatgaagagtaccccgtgcgttgtatcacaaacaacatctgccggaagcagggaacctgtcacggaactgatcccccgtcaggcaatatccggtgacactacactggctgaaaaagatcgcactgctggcttcacaatgcggataacaccggatattgagcgtggaaatttccacctgctactcacaaccactgacccgatacggaaacagactgtcgagcagaatattttactcaaaccggaccagccccttgtcgtgagtgggtttactggagttaatgctgatagccaaagtgagaagcggattgtcatcattacgccacacgtgcgttga

SEQ ID NO: 469824 - DNA, 300 bp, Shigella boydii
atgaaatccatcattttatcgatggttgccgcaagtgctatcgcactctctgcccccgtatatgcgtctgatccgtgtgcttccgttctttgtctgtacggtaaagctatcggtagcggcggcgggagcgaatgcaaaagcgccgaaaaggacttctttaatatcatcaaaaagaaaaagggatctattcgctggagcaaaacctttgatgcccgaaaagcgtttcttaatcaatgcacgaccgcagacccggcggcgatctcaaaaatcatgagtaagttcggacgttcctggggttaa

SEQ ID NO: 469825 - DNA, 1236 bp, Shigella boydii
atgaaaaagatcattattattcccaccacattattgctgaatgcgtgttcccatgcccctgaacccgcacaggcaaaaggaggttggtatgaactgaataccacaattgagcaggtaagagcagacacataccataacggggtggtccttcagcagcccgtgtcacagccaaacagcactgttcaatacagcaatgataattatctcaaaaaggaagccataaacgtaactcccgcgcctcgtattgcagaaaccgtaaaaccacgttctgagcaatcagcgacagcgccaaaaaaccaggacagcaataatagttttctgaagccaacaacaaacagcataacttcatctggtgagataaaaacagcagccaaaggagcaactaaacagcattctgaacaaccagcactccctcccgcaaagccaatcagtagcaacaaccatcaggcacaaacggcacaaaatactgatcagcagacaaaaccgcgtcctgaacaaccaccgctaatgtcaaaaagcggttttctgaaaaaaaacgctaacaacgctgttccggccaccacgcttacaggcccatcaacacctgaaaagcaaatttactttgttcgccatgatggtaaaggctcgctgcaaaaagcagtaaaagaaattgtcccatcggactggacggctgaaatatccccggaggtaacgaaaactttccgtcgcacgatatcctggcagggcaacgatcaatggccttatgtcctggataaaatgcttcgcaactacggtctgacggtaattaagaacaccgaaaaaagacatcttctgattgattttcaacaacagaaagggaaaacatcacaaaaagcacctgtatctcctgacaaaacccctgcatctcctgtcaggacaccagtttcctctgacaagttacctcaaaaaccgctaacgcctgccaccgttccgcaaaaacagacagaaaaactcacctggaatcttaaaaaaggttcaacgctgcgggatggcctcacagaatgggcgtcaagttcgccgtgtggtaattcaacctggaatcttgtatgggatactcctgtgaactacagaatagatgctcctcttattttccggggaaactttgaatctgcattaaaagatacgctgatgctttatctttcagcagataaaccgttatacgcattcaggaatattgcacaatgcgtaatcacaattaaagacacacaacaggagtaa

SEQ ID NO: 469826 - DNA, 438 bp, Shigella boydii; identical to SEQ ID NO: 22658

SEQ ID NO: 469827 - DNA, 399 bp, Shigella boydii
atgcaggataatgatgatgtcagcgagcttgatattgccactcgtgaagtccttatcttacgatgcaatcttattcagcttgcttctgaatatataaaaataaatccccttaaaaacacccgaatctacacagatttaattcatcgttcagcagatgttatcaaaaatatcgaacaaggtaacatccagaataaacataattatctgtcacaggatgtaaaacatacgcttgttttatacgacctgtacaaatcagactttgaacaatgtccgggggcaaaatcccttatacctgtcagggaaaaaattgtctcgctgaaagaacttctttccggcgctaatgagctggacagtatcgttcgtcgcccccgcaggaaaaaacgatcttcacgaatttaa

SEQ ID NO: 469828 - DNA, 585 bp, Shigella boydii
atgcagttatcagcggctgttctggcagcactgataagtcagtgtgcccctgatgtatcacccgatacgatgaatgccctgattatgactgaatcaggggctaatccatatgtaatagcgaatgtttctgacggaacaagtaagtattttaaagatgaaaaaggagctattgaatatgcagaaaaattaacagcagaaaataaaaggtttagtgcaggtctgacacagatatacagcaaaaatttcccatcactcaatctgactaataaaacagtttttgacccgtgtacaaatataaaagcaggagcggcagtcctgacggacaattatctgagacaaaaggagggtagtagtaatcaaaaaattctccgcgctttatctttgtattattcgggtaacgaatcaacaggatttataaaagaaaagaaatttaacaacacttcttatctggaacgggttattcgtaacgcgaataactatatcgtgccatcaatccgtgaaaaaactgatgaatcagaaataacccccccgaacgatgaagagaaaacatcaccggactgggatgtttttggagattttagttaa

SEQ ID NO: 469829 - DNA, 291 bp, Shigella boydii
atgaaagtcaaatcaactttgcagtattttattctggcgtttttcctgtcactaactgcctccgttgcctatgcaggtggactcgacaccgcaacaaataccatgacagaacttaagacatgggcatttagctttggtggtgtttgtgctttgtgttacctgatctataacgtcatcatggcattcatggagaagaaaagctggtctgatgtaggaatggcgcttgtctattgttccctcgctggcggtgcactttacgccgggaactgggcgctggaactcttcaaataa

SEQ ID NO: 469830 - DNA, 285 bp, Shigella boydii
atgacttataacgggtttaaccgtcctgcgttaattgctggtatacccttaatgttgttattgttcacggcttttttcgctgttctgacaggcttccccgctattttcctttggggtataaaagggataattattcctgtcatatgtgcgctgtttctttttatagtaaaactggcctgtgaaaatgactcaaacgcactaagagtcatccgtttaaaccttatggggcttttgttaaaaatccgccacagagatttaattattggttattcatctgtcaggtaa

SEQ ID NO: 469831 - DNA, 2358 bp, Shigella boydii
atgcacaaaatcaaattaaaaaacagtgacaatatggatgttgctcgtgaatatcccgattatcgcttccatataacagacagtattatctttacttctgacaggaaaatgctggcttcacttgttgtagcaggcattccatttgagacagagaacgataatgttcttacaaatttatttaacagcgttaaaaacttcctgattgggttaggaaaggaaggcgacctgtatttatggactcatcttatcaagaaaagagcaaccatcaatggagaatggaattttgacaatgattttctaagcaggttttcaaaaaaataccttgctctgttcacatccagcgcattctataaatcaacatggtatctgacatttgggataccctacgatgatgttgataccggaatcgagcgcatgaatgaaatgacacaacaggcgcaaaaagcacttctaccatttaacgcttctttattatccgtttacaatacttatattagtgaggtggcagactatctatcactattgctaaatgcagaacacaacatgattcctttatcatccacccccttatcatccagcatttgtgattctgaatggtattttggtgctgatgttcttgaactgcgtaacaacgaatcggatagtaaaaaattcgcaacgaattatattttgaaggatttcccgatagaaacaacccccggacaatgggatttccttctcaaacaaccctatgaatttattcttactcaatcctttatttttgagtcacccacaaaaaccctgaagaatatcgattcgcaattaaacaaactacaatcagctaatgatgcagccaaaatacagcaggaagaactcgaagctggtaaagaagcggtcgcagccggaattacgttgtttggttcactacactgcgcattaacggtattcggtgatacaccagatcaggccagaagcaatggtataaagctctctgctgagtttattacttcgggtaagggattccgcttcagtcgcgcctcactcgcatcaccttttgtttttttcagtcatatgccgctgaataagaggcgtccactggatacccgaagaacaattaccaacctggcctgtctgatgtcttttcacaattattcctccgggaaaaaatcaggcaatcctattggtgatggctccgccataatgcctttaaaaacggattcaggcagcgtttactggttcaatacacattacagcccaccggaaaaaaatgttaccggacaaaaaattgccggacacgcaatgtttcttggcgcaacaggcacagggaaaacaacatttgaagcaacagccagcggctttcttcaacgctttgaccctttaatgtttgttgtggattacaaccgttctaccgaactttttgtccgcgcatacggagggagctatttcacattgcaggaaggtatctatacaggctgcaatccgtggcaactggcagaaggcccggaatctcccgtctggcacagacttctcgcatttctgaaacgctggacacaggttctggcacgagacaaccagggcaacccctgttctgatgaacatggcattgaattaaacgctgccgtggaaagcattatgcgaatgcctgtcgaagaacgccggacagcccttcttctcgatatagtcagtcctgaacttcagacgcgtctcgccaaatggtgcgacaacggcgaatatgcctgggcggtggattccccccggaataccttcaatccactgcatcataaaaaagtgggatttgatacaaccgttgtcctggacacaaaaaacggtattcatcctgcctgtgaacctttactcgcggtcctgtttttctacaaagaaatcatgcaacgcggcggcaatctgatgctctccattattgaagagttctggatgccagcaaactttcccatgacacaaagcatgattaaaagcgcactgaaagcggggcgcatgaaaggtgaaatgatgtggttaacatcacagtccccggaagacgccataaactgcgcaatttttgcggcgctggtacaacaaaccgcaacgaaaattctcctgcccaatcccgatgcaaaatgggaaggatataaagaaattgggcttactgaaaaagagtttgaaaaactcaaagaactgacgaaggagtcaaggaccatgctcatcaagcaatctggctcttctgttttcgccaaaatggatttgtttggattcgatgagtttatccccgtgctttctggctctgaaactggcctgtctatttttgatgagattattgctgaaaaaggagatgtagctcctgatatctggataccagaactcctgaaacgcctgaacggttaa

SEQ ID NO: 469832 - DNA, 135 bp, Shigella boydii; identical to SEQ ID NO: 22664

SEQ ID NO: 469833 - DNA, 735 bp, Shigella boydii
atggaaaacacaaactattatgaacattcaaaaaaagaagcctccaaaaagaaatttgaagaaaagaacgaaaaaaaggattatttcaaggccatacgtgactttgagcgtagtgaaattgaaatcataaagaaaaaggcaaaaacatttaccatcctcgccattggtgaatttgttgtaatttgcattcttggtttcgcaatagcctcccttgctccattaaaaaccgctgtaccgttccttgtgcgagtggataacagcactggatatactgatattgcccctcaattatctgatgctaaggaaagttatcaggatgttgagactaaatatttcctgtcaaaatatctcattaactatgaagcatacgactggcagactatccaggaacaggccgatacagtaaaaacaatgtcttcccaaaaggtgttttcagcttatgacaccatgattcgtgctgattcctcaccactgaacattctgaaaaacaactacaaaattaaggtccagattaattcagtaatccttctaaggaaggatatggcgcaggtgcgtttcaaaaaaatggtactggatttatctggtaaacccgcccccggatacagagcaacagagtggatttcgacgatttcttttgactgggataaagatatcaaaacagaaaaagagcgccttgtgaatccgctgggactgcaagttctgagctaccaacctgatccagaggttataaaatga

SEQ ID NO: 469834 - DNA, 771 bp, Shigella boydii; identical to SEQ ID NO: 403834

SEQ ID NO: 469835 - DNA, 1140 bp, Shigella boydii
atgaaaaataaagatgatgaaaaaaataatgacgcgggaaatcgcggaattatcgaagtaaaaggtaaagcagcaccaaaaaaaatattaatcctcatcatattactgattgccgcgttatttgtgatcattatcttgtttaaagttctttcacgagaacaggtcgttcagcaaacacctcttgagaagtctgacgagacactggtcacaaataccaacaatggcgtttcactgacaacaatgatgaaaaacatcgaagaaaaggaaaaactcgatgccgctaaccgcaggaaagcacaggaggagcaagaacagaaacaggcagacaatgccccgtcagcgccagcatcacaaaaggccgatcaaacagccgtcaatgtgatagccaacggcagtccccaaaccgccagtggagatccaaaccaaccacaaccattgccaaaatccgtccgacaactgatgggcgacacaatggtgaagatcgacaatcaggaaccaggcgaaaaaaaccaggaaagagatgatttacagggcagtcagtacgcagacggaaaggtatcccctgtgctgaaccgccgatatctgttatctgcgggaacagcattatcctgtgtgctcaaaacgaaaatcgtaacctcttatcccggtatcacaatgtgtcagttaacacgagacgtctggtcggataacggcgaagtgcttcttgcccgtaaaggagcattactgatcggggagcagaataaagtcatgacacagggagtagcccgtgtgttcgttaactggacaacgctcaaagatgaaaatgtcaatgtgcgcattggcgcacttggcactgacagtctgggcgcttccggccttcctgcatgggtcgataatcattttggtcagcgttttggtggtgcattgctgctgtcattacttggtgatggtttagatattctgaaaaacagcacgcaacaaacaggctcaaacagcaatatcacctacgaaaacacatctgacgcaacaaaagaaatggcaaaaacaacgctggacaatacgataaatattccccccacggcatatattaatcaggggactgtattgtctgttattgttccgcgaaatatcgacttttcatccgtatatgaacttcagtaa

SEQ ID NO: 469836 - DNA, 1056 bp, Shigella boydii
atgaataacatcagagataccagcaatacatcacaaccacgagataacagtaaaaccgcaagacgatatctggatatgacgggtatccagtctgttcttaatattgaacatgtcacagaaatatctgtgaataaaccaggaacaatatggtttgaaggaaaaaatggctgggaatctaaagatgcgccagacgcgacttttgataatttaatgacacttgccaaaactctgacgaacttatcaaagataaaaataccacttagccatgataatcccattgcatcggtagttcttcccggtggggaacgtggacaaatcatcattccacctgcaacagaaaataacagcgttgtgatatctatccgtaagccatcattaacgcgctttactatagatgattatgtccgaacagggcgttttgataatgtcaggattgcgacgaaacacgaagccatcctgactgaacggcaacgctacctgtatgaattatcccggcgtccagatggtcaatctaaagctcaatttttaagagaggcagttaaagaccgtcttaattttttaatcgtcggtgggactggctccggtaagacaactatagcaaaggcaattgcagatatctttccacctgaacggcgttatataaccgttgaagatgtaccggaaatgtctctgccgctgcatccaaaccatatccggcttttctacaaaaaaaataccgttgaagcgaaggaaatcattgaagcgtgtatgcgattaaagccagatcacatctttcttgctgaacttaggggtaacgaagcatggagttatctggaggcgcttaatacagggcatgaaggctcaatcagtaccattcatgctaataatacttatgcctcattttcacgactggcaagtattgtaaaacaatctgatgttggtatgactgttgatatggacctcatcatgcgcacgataaaaacatcaattgatgtcattctttttttcaaccataccagaatgactgaactgtattacgaacccgaagaaaaaaatcgctttttgagcacaatgtaa

SEQ ID NO: 469837 - DNA, 1959 bp, Shigella boydii
atggatgcaaaaaagacggggggattaattctcttcctgttactgcttcttgtgggtgtgcttatagcctcaaactatctcggtggatacacagcattaagatattcatccgttgatatgtctttgctcaagtgggatacattccattctgtaatctcaacattttctggcaacccacaatataaaaaactcgtttttatggcatggtttggattcagcgttccattaatattctttgccatattcatgttaattgtcgtgattgggattatgcctaaaaaagtcatctacggtgacgcccggctcgcaactgatatggacctgagtaaatcaggttttttcccggataaaaaatcaccttacaaacatccaccaatactcatcggtaaaatgttcaaggggagatacaaaaaacaatttatttatttcgccggacaacaatttttaattctttatgccccgacacgttctggtaaaggggtggggattgttatccccaactgcgtaaactatccaggaagtatggtcatactggatatcaaacttgaaaactggtttttatcagccggattcaggcaaaaagaattagggcaaaaatgctttctctttgcgcccgccggatacgcggaaactatcgaccaggcaattaaaggacagatacgctctcaccgctggaatcctctggattgcgtcagtcgcagtgatttacttcgtgaaacggacctggcaaaaattgccgcaatccttatcccggcaagtgatgatcctatatggtctgattctgcacgaaacctttttgtcgggttaggactttacctgctggacaaggagcgttttcacctggaacagaaagccaaaggtcataatgtaccggacgttcttgtttccatcagcgccatactgaaaacgtcggttcccgatggcggcaaggatctcgccgcatggatgggacaggaaattgaaaaccgtagctggattagcgataaaacaaaatcattcttctttaagttcatgtcagcaccagatcgcacaaggggaagtatagaaacaaacttttcatcaccgctgagcatcttcagcaaccctattactgctgaggcgacgaatttcagtgattttgatatccgggatattcgtaaaaagcccatgtcaatttatcttggtctgacaccggatgctttaatcactcatgagaaaattgtaaaccttttcttctcattactggttaatgaaaactgtcgtgaactgccggaacacaacccggacctgaaataccagtgtcttattctcctggatgaatttacatcaatgggtaaatcggaggtcattgaacgcgctgttggttttacagcaggttataaccttcgctttatgttcattcttcagaatgaaggacaagggcaaaaaagcgatatgtacggtcaggaaggatggaccacattcactgaaaacagtgctgttgtgctttactatccgccgaaatcaaaaaatgctctggctaaaaagatttcagaagagattggggtgcgtgatatgaaaatatccaaacgctcaatatccagtggtggtggtaagggaggaagttcacgtacacggaatgatgatgtaatagagcgcccggttcttcttcctgaagaaattgtgtctctccgggataagaagaataaagccagaaatattgcaatccgtgaaattataaccagtgaatttagccgaccatttattgccaacaaaataatctggtttgaagaaccagagtttaaacgccgcgtggatatcgcccgtaacaatcatgttgacattccaaacctgtttacacaagaagtcatggatgaaatagcaaaaattgcagaaatttatctccctaaagctggaggaaaaaaagtcatggttgccggaggcaatgtgattactaatccagaccttgataatcacgataaaacagacgtatctgaataa

SEQ ID NO: 469838 - DNA, 537 bp, Shigella boydii
atgagaataaaacactcaaatatgataaatatgaatatgaatatgaatatgaatatgatgaaagaagccattgatgttttgataaactctgaaaaacatattctgattataggcgaaactggaactggaaaatcaacacttttagcagaattgctaatcaatgacactgacgttaaatattttgatttctgtgatatttataaacgccatgaacaccttccccttctaaaacaccattatctttgcgatgaaaattttgattattttgactttttatctgcacctgaaaaaacgttggttcttaatagtgtagccatcggtaacaacttacgggaatcaaaagttgttcagtttattgttcgatttattaaaacagccaggaaacgtggcaaacgtcttattgttgtcacgactccttcagatggcggcgtgcagatacaaaatcttttcgacacagttatatcgttaacccgctctcacgatgaaataggatgcacagttatcattccagtaccggagttaattaaatatgaataa

SEQ ID NO: 469839 - DNA, 1644 bp, Shigella boydii
atgaataaaaaattgctttgtttattaatatcctcttttttattatcaggctgtgcaaacttcaaaaaaatcaatgctaatgaacttgcagccgaaagagacgcacaaaaagcgactgaatacgcgaaaaaaattcgtaataacccggttatccaggactcaacaaaacaatggattaatacaacgccaattattgaaaagcaggtaaagcaatcagcgccgccctgcccgattgtgattaatactcgttcagatattgagctacgccagatcgcacaacgcatcacacaaacctgtcatatcccggtacgaatcagcgccgatgtctggacctatctgaacggtacaggcactggctcaacacaacaaatgacaggatcaattccagcaccggatgcaaatggaatggttcctctggcgtcagtaggcagtcagccagtaaaagtctcttctggcggtacatcactcccggaactgaatatctccgggcttcctgccctactgcaaaccgtatcttcacggctgggaatatcctggaaatacgataaaggtcgtatcacattcttctatctggaaacgcgctcattcccgatcacatatatggacagcaatgtggcatacaactcaaaagttgtgagcggcacaatgtcttccagtggcagtaccggctctaccagttctggcggtatgactggcgacgcatcaaatacgcaaactacaaccgtggaaatgaaatcatcgctgtacaacgacctgaaaagcgaagtttcctcaatgctgacaccaggtacagggcgcatgtatctgtccactggttcactgacagtaacagataccccggatgtactggacagcgttcaggagattgtgaacaagcgcaataatgaaatgagtcgtcaggttgtgctgaacgttgaaatcctgagtatcaagaaatcaagccaggaacaggcgggaatcgactggaacgcagtatttaatgatggtcatcttggtctgagtcttggtggctcatttggtgatgccgccgagaatgttattaccagtggtgtatccatcgtggacggtaagctggctggctcaaaagcatttctgaaagccctgtcgtcacaaggcagcgtcagtgtcgtaacgcaaaactccgctgtgactaaaaacctgacgcctgtccctatgcaaattgccaatcagcagggcttcattgaaagtgtcacaaccgattctaccgccaatgtgggatcatccacgtcactgaatgcggcaacaataacaaccggattcaatatgactctgcttccatacattcagccggattcacaaaacctgcaattgctgttctcaatgagtctgtctgacaaacctacttttgaggtgttcgaaagtggcggcagtaaagcacaaacaccgaatgtggatttgaaaacaattaatcagactattgatctgaaatcaggccagacagtcattctgagtggattccagcaatcaaaccggaaaaccagtaagcaaggtgtaataaccccctccttctttggacttggaggtggcgttaacagcgaagacggcgacacgattctggtcgttttgattacaccaaatgtgcttaattccggctccagtgcagtaataaaaaatgtgaactaa

SEQ ID NO: 469840 - DNA, 1311 bp, Shigella boydii
ttgtctgagaataatcagaataaccggaatttcacttcggttattaaaaacaagcgtgcttttttctccggtctggactggaaaacgcttccttcagaagaaaagaatgcgcgtacattcgcaagaaaaaacgacgctgaatattttctctcctgtcagtatcaggattcagaaaatgaaaccaaaacgatggtggcatttatcagaaaagaggatcttcccacaggggcgtcctcattctggtcactggcactgatgataaaacccctcatcgaacctgacggatacgctatctgcgaactcggtgatctttatggctttgtttcctgcgtcaataacgttctcgtcaacgatgttgtaggtaacaaaagtcagatcatgagtgctctgacaacatttcttgagtttaatgaaacaccagaacccggctggaaactataccagcctgaatcatgggatatcagccaggcactcccctcactcactctgtctgcgttgattgacgtaaaaaaaccgccgaaagaggcggcgtttactcgcgtatcccgaaaacgtcagttcatgatttatggcggaagtgccattctggccatactgctctggaacgggatcaccatgtaccaggaataccgggaaaaagaagctgcggcagaagctgcacgtcttcgtctggcaaaagaaatggcagacaaacaggcaatacagattgccccaccgtggcaacatttacctgaaataaaaccatttattgataaatgcattgataaatgggatgcactgcccttatcgatcgccggatggcgttttgaccttgctgaatgcagcacatccggtaatgacgggctgttacgcacatcatataaggaactgagcggcgttacggtcgaggacttcagcacacggatacgagaaatattccaggggacaaccacagcaacttttgtattgccagaaggcagcgccgggggattttctcttcctgtcagttttgacgtttcgcctgatccaattaccccggacacattgccacaggcaacagatattcaggaacgcctgacaacatttgcacaaaaaatgaggttaaaactcacctggcaggaaattgaaaacacaaaaacagatgaagaaggccgtccaataattctcccgtggaacgagtatgaattaatgattcagaccagcaccccgccttcaatacttttcgctaactttcatgaacctgccgttcgcttccagtatgcaggaataaaactggaagaaggaagactgaattatgagattaaaggtgcattctatgttaaaaataattaa

SEQ ID NO: 469841 - DNA, 516 bp, Shigella boydii
atgagattaaaggtgcattctatgttaaaaataattaaaccaacgattatttctgtctgttttttcagttcacttgcttacgcaacagaatctgaaagcacaccaaaagacgaaataaaatattcatctccgaccattttacaggtagagcagattcaggctgaaacggtaatttacgaagcaaagctggcgcgtcagaaggctgtcagtgaattgcgtaatcttgatttgaatggtgtagcgtccgcaacgccagcaataacgccctcttccgggtattcttctcttgcagataccgatataccagcgcaacgtgtagccgctaaatcacttcgtgttattgaaatatttggtacaccacaacaaatgtcagcacgaatttctctcctggacgggtcagtaactgatgtcaaggtcgggcaaagtattcctggtacttcttataaggtggcatcaatcactggtaatggcgtctggattcagaatggtacagagaaacgccagcttattctttaa

SEQ ID NO: 469842 - DNA, 1539 bp, Shigella boydii
atgtttttttctgacgcagactatcccggaaaagatatttctgatgttgtatacgtcagtatatctgaaaaagacgataaacctgttcatgtttatatcgctgataacagtaaaggacagcgtgctgttcaggcttatattggcactctgaatgttaaatatcccggaaaggtaaatataacctggaccactcttgatgttatcgcatcccgctaccaggacagcgaaagaaggtctgattcaaactcatcacaacacttaaacagcaaccaggaaaaggttattagctacctggcgaaagcaaacaacctgggaagttccgatttgcacatcacacctggtcgggacggttccgagttcacttatgtcgaagcacgcgtgcatggggaactggaaattctggatgtcatcccgcgtaaagaagggctggaattgctgggtgctgcctattctggaatgagcgatgttatcaaaggtacgcagtttgacccggcaataccgcaggatgcacgtatcgcagagaattttctgaagcctgtaaatctttttggggcgcgctattcgcattatccgtgcgtgggtggtgtgtacgcggtcttccgcctgattaaagatgacagcgaggatattcccactttcgaagaacttggctacatgccacaacaaatccagacaatcaggcgaatgttacaacgcccggaaggaattatcgttttatccggccctacagggtccggtaagtcaacgactctgagaacggcttcagaagcctatctgagcacgtttggtttcaaccataacgataatatgcgtctcccccgaaaacgccttttcaccattgaatcaccgccggagggccgcattcccggcgcaatacagacggcagtcagggattccgtcgatggctgggttgacgcgattaaatccgctatgcgacttgatccagacgcgatactgaacggcgaaattcgtgatcacgcatcggcattagcagcaatcaaagcctcgatgacaggccaccttctgttgacgaccttacacgccaacgatgccctgaatattattgagcgccttgaaatggagaatattcaggccaggctgattgcagatcctcttctgtttatcggtctgctgagtcaacgactggtacaaaaactctgtccttactgtaagcgcacttatgctgaaatggcagacaaactgagtacagaagaacggaaactcattgaggaaaactgcctgccggaacaggtccggttgcgcaatcttgacggttgtgagcactgttataaaggcgtaacgggaaggacggttatagcagaagtcgtctcacccgacgcacgtttttttcagttgtatcgtcagtccgggcgtctggaagcaaaatcatactggcactatgaacttggaggaattacccgtaatcagcacttattacacctgattaatcatggcctggtagatccgctgtccgcacacttcatatcccccattgacgaagataaatactcaatgctcccggaggggacatggcgataa

SEQ ID NO: 469843 - DNA, 1110 bp, Shigella boydii
atggcgataaaagatatatttgagaaactcaattcgatagaaattgatttctctggaatatcccactggctggcaaaatacacattcaggtattccagaataagtttatatgaagatttatctggaatgttaaatgatggcataaatgtaaagcgtgctcttacacacctgattgatgtagaaacagactacgggaagaaaacggggtcttctgcaacctactatatttgttgtgagtgccttaatgcactgaataacacaggggcaatatcttcagcattaaaaaaatatataaaggaggatgaatatcaattaatatccagcggtgaaattcgcggcgaccttgccgggggattagttcaggccataaaaattgtcagaagtcgttctgaaatgacaatgactcttgttatgtcgatgatttatccatccgtactggtttttggttgtctggcaaacatgtatatggtccacgataccataacacctgttttcctttctctcgcaccgaaagaacgctggacaagttctatgcgattactgacagatacgtctggtttcctgatagaaaacggaacgtatattctctgcttctgcatcgtactgtttttcctgatcagatattcgcttgcacgttatacaggaccgggccgtcagtatcttgattacattcccccctggtcactttataaaacatttaatggtgtaagttttctcttcaacatggcctccatgttaagtattgatattcccgttgcaaaagcactggaaaggctggagaaaaacagcactcaaaacagatggctactcgaacgaataaaagaaatcaggagatatgttttacttggacagtcacttgcaatggcaatgaaaagttgcggttatgacttcccatcgaaattatgcattaacaaactattacttcattctgaaaatgctgacaatgcattgatgatgtctaactatgctgataaatggctggaggaagcaaaaggaaaagtcaaatcaacaggagtctggataactgtagtatccgcattaattgttttcgcatttattgtaatgatgattactgctctctacgatgtcagtaacgtcctgcaacactaa

SEQ ID NO: 469844 - DNA, 558 bp, Shigella boydii; identical to SEQ ID NO: 22675

SEQ ID NO: 469845 - DNA, 483 bp, Shigella boydii
gtgcgttctgttctttatatcctgctatcatgtatttcatcattaatcttttcattgcaacccgcatattcagcgacaacgacccgatttgatgcctgctttgcacaagccgggcaacgttacctgattgaccccctgcttctgaaaagcattgccactgtagaaagttcactcataccagaccgaataaatcacaacaaagaaaaaggaaaaatattaagcaccgattacggactaatgcaaattaattcatcacacatccctaacctgaaaaaacttggcgtaataaaagacaaatcagagcttattgataacccctgtctcaatatacaaattggcgcgtggattctggcaacacattttcagaaatgtggcataaactggagttgtcttggcagttataacgctggttttaaagaaagtaacgaacagaaaagaatcaaatacgcacgctatgtctacaataaatacatggtaaggtaa

SEQ ID NO: 469846 - DNA, 636 bp, Shigella boydii
atgctaaacagcatatttaatacggcgatactttgctgtgcaaatatcgtctgtcaatgctacgcctacaatgaagttaaatcccgtttaaataaacttaatgtatcttataaaaccggaacagagaaatattactgtctgatactgacaacgcttgccgttctgtatctttcattaaatcagctatcactgattcaatccataatagtgattgttttctatgccttccttacattaatggcctgtatagaccttctttcatttctactaccacgcctttataccgtgacatttatcttctccggcctgttatatcagacatggaataacaatatattgtctggtttgttttgtgcaatgctgatgttcttcattatgctgtttgtaagactttactttgcatataaaaacggaacggaaagtttcggcatgggagatgtgctacttattgcaggaactggcgtatggtttccaacgcctgagattgcctgttcaattgtatttattgccgttatcggcggaattattttcttcactcttggcggattaaacaagcaaaaaaaatatattccatttggtccgttcctttgtggcggaatgtttgtttactcactcgtaccgggaatattattctga

SEQ ID NO: 469847 - DNA, 1287 bp, Shigella boydii; identical to SEQ ID NO: 25979

SEQ ID NO: 469848 - DNA, 348 bp, Shigella boydii; identical to SEQ ID NO: 462825

SEQ ID NO: 469849 - DNA, 597 bp, Shigella boydii
atgctaccaaaagccgcccgcattccccacgccatgacgcttcatggcgatacgcgcatcgataattactactggctgcgggacgatacgcgttctcagccagaagtcctggactacctgcaacaagaaaatagttacggtcatcgggtgatggcctcacaacaagccttgcaggatcgcatcttaaaggaaatcatcgaccgcattccgcaacgagaagtttctgcgccctacatcaaaaatggctaccgctatcggcatatttatgaaccaggctgtgaatatgctatctaccagcgtcaatcggcattcagtgaagagtgggatgagtgggaaacattgctcgatgccaataagcgcgcagctcatagtgagttttattcgatgggcggaatggcgattacgcccgataacaccattatggcgctggcagaagattttctttcccgacgccagtacggcattcgttttcgtaatctggaaactggaaactggaaactggtaactggtacccggaactgctggataacgttgaacccagctttgtctgggcaaatgactcctggactttctactatgttcgcaagcatccggtga

SEQ ID NO: 469850 - DNA, 432 bp, Shigella boydii
atgacgaaacatgccaggtttttcctcctgccctcctttattctgatctccgcggctttaatcgccggttgtaacgataagggagaagagaaagctcacgtcggtgaaccgcaggttaccgttcatattgtgaaaacggccccgttagaagttaagactgaattaccaggccgcaccaatgcttaccgtatagccgaagttcgcccacaggttagcgggatcgtactgaatcgtaatttcactgaaggcagcgatgtacaagcaggccagtccctgtaccagatcgatcccgcgacctatcaggcaaattatgacagcgcgaaaggcgaactggcgaaaagtgaagccgccgccgccatcgcgcatttgacggtaaaacgttacgttccgctcgtgggtacgaaatacatcagccagcaggagtacgactag

SEQ ID NO: 469851 - DNA, 189 bp, Shigella boydii
atgcacaatggcataggcaacactcagaccacccagcaaaacacccaaaaagttgaacaccgccgccataaccacggcgagctgagaacgcatcgcgcgggtatagataacggttgccacggcgttggctgtgtcatggaaaccattgatggcttcgtagaacagcacaaaagccagtgcaagcaataa

SEQ ID NO: 469852 - DNA, 297 bp, Shigella boydii
atgcaggatctggaggaagaaggttatctggttggcctggagaaaacgaagttcgtcgagcggctggcgcattactattgtgaaatcaacgtgctgcatcccttccgggtgggaagtggtctggcacagcggatcttcttcgagcaactggcgattcatgccggatatcaactgagctggcagggtatcgaaaaagaggcctggaatcaggcaaatcagagtggggcaatgggggatctcaccgcactgcagatgatatttagcaaagtggtaagcgaagccggggaatctgagtaa

SEQ ID NO: 469853 - DNA, 4944 bp, Shigella boydii; identical to SEQ ID NO: 461791

SEQ ID NO: 469854 - DNA, 1227 bp, Shigella boydii; identical to SEQ ID NO: 468380

SEQ ID NO: 469855 - DNA, 357 bp, Shigella boydii; identical to SEQ ID NO: 463749

SEQ ID NO: 469856 - DNA, 186 bp, Shigella boydii
atgggtatccagcacgatgatctcgtcaaccccttcggcatgagggtaaacagggtgaatatgcagttcgccaaaacgctgggccagcgcgcgttgctgctgcggcgtaatggcttgatcgcgcagaaacaccacctgatggcgcagcaccgcatggtaaagctgttcaaactgattatcgcttaa

SEQ ID NO: 469857 - DNA, 510 bp, Shigella boydii; identical to SEQ ID NO: 461158

SEQ ID NO: 469858 - DNA, 654 bp, Shigella boydii
atgatagaacaactacagagtgattttttattctggatatttatttacttcctgatagtaggtttgcttatcagaaacattcatcttaccagaaaaattaaatccatcgaaaaaaacaaaatgttcccagcggaggaatatgctgtcctggacatagaacagcatatgtctaataaatatattgggcggctagtaacccgttttatgaagagaactaatggtgcacctttgttaattgtgtttccagaatacgataaaggagacaacaatgaagacaaaaattctccaccattccaacttgtaaaactaacatccaacatcaacaatattaaagaaatttattccaatgatgacttaaactgttttctgaataatatttcggcacaaaaaaatttatatacaacgcactctggacctagccaggcatggattgaacatgcatatcctttgcaacaagtaactattctcttacaaggcactcgtcatagtgaaagggaagatataatcagtcaacttgagattattctttccagactaaaaaatggagaaaatacaggttttgagcatgacgatgattttggatattcatttcagtatgatgccgcagcagtaggaaaatcatcatttttcgatgaagcagcaggaagaaaataa

SEQ ID NO: 469859 - DNA, 1125 bp, Shigella boydii
atgtttcagaaaatcaaaattcgcaaaatgacaatcagccgggcgctggacaaatacctgaagacagtatccatccacaaaaaaggtcatctacaggagttttatcgcgtgaatgtgattaaacgtcaccctattgctgaacgctatatggatgacattaccactgttgatattgccaattatcgggatcaacggttggcgcaaattaacccccgaacggggcgtcaaataaccggaaacaccgtccgtcttgaacttgccctgttgtcatcattattcaatatcgcccgtgtggaatggggaacatgccgcatgaatcctgtcgaactggtcagaaaacccaaaatcagtagcgggcgcgatcgtcgcctgacttcaggagaagaacgccgactttcgcggtatttcaaagaaaaaaaccaggctctttacgtcatttttcatctggcgctggaaacagcaatgcgacaaggtgaaatcttgtcattgcgttgggaacacgtcgatctgcaacatggggtagctcatcttccaacaaccaaaaatggtgctccacgcgatgttccgctatccaggaaagcccgtagttacctgcaaatgctgccaatacagcttaacggtaatattttttcttatacatcttcgggattcaaaagtgcctggcgaacagcacttcaggaactgaagatagaaaacttgcattttcatgacctccgtcatgaggctatcagccgatttttcgaacttggtacattgaatgtcattgaggttgccgctatttcaggccatcgctccctgaacatgttgaaacgatacacacaccttcgggcttatcaacttgtcagtaaactcgatgcccgacgcaagcaaaccagcaaaatcgctccctattttgttccctacccggcaacggtcgagaacagaaacgggcaagtcgttgtgactctgagtgatttcgacctggaaacaagcgcagccacaaaagaacaggccatatttcatgccagcgtgttgctgctacgaacactggcacaagccgcccagcgaggagaacgcgtccctactcctggcgaacttcctacaaacattgatgaacgggtaatgatttgtccattaacaaattag

SEQ ID NO: 469860 - DNA, 312 bp, Shigella boydii
atgcgtaaattatgtgctgttattttgtccgcagtagtctggcaggtcgccgctgctacgccagcgagtgcagcagaacatcagtccacgctgagcgcggggtatctccatgcctcgacgaacgttcccggtagtgatgatctgaacgggattaacgtgaaataccgttatgagtttacggacgcgctggggctgattacgtccttcagttatgccaatgctgaggatgagcaaaaaacgcgctacagcgatacccgctggcatgaagattccgtgcgtaaccgctggttcagcgtgatggcggggccgtga

SEQ ID NO: 469861 - DNA, 276 bp, Shigella boydii; identical to SEQ ID NO: 458859

SEQ ID NO: 469862 - DNA, 207 bp, Shigella boydii; identical to SEQ ID NO: 24440

SEQ ID NO: 469863 - DNA, 606 bp, Shigella boydii; identical to SEQ ID NO: 461990

SEQ ID NO: 469864 - DNA, 483 bp, Shigella boydii; identical to SEQ ID NO: 37538

SEQ ID NO: 469865 - DNA, 315 bp, Shigella boydii; identical to SEQ ID NO: 33595

SEQ ID NO: 469866 - DNA, 330 bp, Shigella boydii; identical to SEQ ID NO: 36176

SEQ ID NO: 469867 - DNA, 276 bp, Shigella boydii; identical to SEQ ID NO: 458859

SEQ ID NO: 469868 - DNA, 315 bp, Shigella boydii; identical to SEQ ID NO: 33595

SEQ ID NO: 469869 - DNA, 462 bp, Shigella boydii
atgagcagctcacttcctgacgatatcaatgcactgaaacgtctccttgccgaacaggaggcgctgaaccgtgccctgctggaaaagctgaacgagcgtgaacgcgaaatagaccatctgcaggcacagctggataagctgcgccggatgaacttcggcagccgctccgaaaaagtctcccgtcgtatcgcacagatggaagctgacctgaaggcacttcagaaagaaagtgatacccttaccggtcgggttgacgacccggccgtgcagcgcccgctgcgtcaaacccgcacccgcaaaccgttccccgaatcactcccccgcgatgaaaaacggctgctgccggcagcgtcatgctgcccggaatgtggaggctcactgagctatctgggtgaggatgccgccgaacagctggagttgatgcgcagcgtcttccgggttatccgtaagcgtacagcctga

SEQ ID NO: 469870 - DNA, 1050 bp, Shigella boydii
gtgcaggcccccgcgccttcacggcccatcgagcggggtatcgcaggaccggggctgctggcccgcgtgctgatctcaaagtatgcagagcacaccccgctgtaccgccagtctgaaatgtacggccgccagggcgtggagctgagtcgttcactgctgtcgggctgggtggatgcatgctgccggctactgtcaccgctggaagaagcgcttcaggactatgtgctgactgacggtaagctccatgctgatgacacgcctgtcccggtgctgttgccaggcaataagaaaacgaagaccgggcggttatggacctacgttcgtgacgaccgtaacgccgggtcaacgctggcgccggcggtgtggttcgcttacagcccggacagaaaaggcatccatccgcagacccatcttgcggggttcagtggtgtactgcaggcggatgcatacgccgggttcaacgagctgtaccgggatggccggataacggaagccgcctgttgggctcacgcccgccgtaaaatccacgatgtgcacgttcgcaccccgtcagccctgacggaggaagcgctgaaacggatcggcgaactgtacgccatcgaggcagagataaggggaatgacggcggagcagcgccttgccgaacgtcagttgaaaacgaaaccgctgctgaaatccctggaaagctggctgcgtgaaaagatgaaaaccctgtcgcgacactcagaactggcgaaagcgttcgcatacgccctgaaccagtggccggcgctgacgtactatgcagatgatggctgggctgaggcggacaataacatcgctgaaaatgcgttgcggatggtcagtctgggccgcaaaaactacctgttcttcggttcggatcatggaggagagcggggagcgctgctgtacagcctgatcgggacgtgcaaactgaacggagtggagccagaaagctacctccgctatgtccttgacgtcatagccgactggccgataaaccgggtcggcgaactgctcccctggcgcgtagcactgccgactgaataa

SEQ ID NO: 469871 - DNA, 315 bp, Shigella boydii
atgcagatcaaataccggatttatatggctcacgcgttccatgccttcaggcaacaatgcatggactgccagttgcgacacgaccgaagatcaaaatggttcaattacagtttacgccatttgccagtgacgatacttatcacaggcaaaccacgatgtaactacatttccccgacaggtcagttcggtgagtaccgccataaaagttgtattcgtcatagaagccgcatttcacaattcgattggcatcataggttgcaactgaccccgcaaaataattcggcttccacccgtgcggattttctgcattactga

SEQ ID NO: 469872 - DNA, 315 bp, Shigella boydii; identical to SEQ ID NO: 33595

SEQ ID NO: 469873 - DNA, 210 bp, Shigella boydii; identical to SEQ ID NO: 462041

SEQ ID NO: 469874 - DNA, 330 bp, Shigella boydii; identical to SEQ ID NO: 26017

SEQ ID NO: 469875 - DNA, 315 bp, Shigella boydii; identical to SEQ ID NO: 33595

SEQ ID NO: 469876 - DNA, 186 bp, Shigella boydii
gtggccgccggagaacaggttgttcctgcctctgaacttgctgccgccatgaagcagattaaagaactccagcgcctgctcggcaagaaaacgatggaaaatgaactcctcaaagaagccgttgaatatggacgggcaaaaaagtggatagcgcacgcgcccttattgcccggggatgggaagtaa

SEQ ID NO: 469877 - DNA, 327 bp, Shigella boydii; identical to SEQ ID NO: 462700

SEQ ID NO: 469878 - DNA, 210 bp, Shigella boydii; identical to SEQ ID NO: 9340

SEQ ID NO: 469879 - DNA, 852 bp, Shigella boydii
gtgataaaacgtaatttgccactgatgatcaccatcggcgtctttgtgctgggctatttctactgcctgacgcagtttcccggttttgcttccacaagagtgatctgcaatatcctgaccgataacgcttttctggggattattgccgttggtatgacctttgtgatcctctctggtggtatcgatctctccgtcggttcggtgatcgcctttactggcgtgtttctggcaaaagtggttggcgatttcggcctctcgccgctgctggcgtttccgctagtgctggtgatgggctgtgccttcggcgcatttatggggcttctgatcgacgccctgaagatcccggcatttatcattacgcttgcggggatgttctttttgcgcggcgtcagctatctcgtttcggaagagtcgattccgataaaccatcccatttatgacacgctctcaagccttgcgtggaaaatccccggcggcggtcgccttagtgcgatggggctgttgatgctggcggtggtggttatcggtattttccttgcgcatcgtacccgttttggcaatcaggtgtacgctattggcggcaacgcgacgtcggcgaacctgatggggatttctactcgcagcactactattcgcatttatatgctctccaccggactggcaacactggcggggattgtcttctcgatttatacccaggccggatatgcactggcgggcgtaggtgtggaactggacgccatcgcgtcggtggtgattggcggtacgttgttaagtggtggcgtcgggacggtgctgtgggagaatcgtcagagttcgccagtgacaagagtcaacattgcgcagcgataa

SEQ ID NO: 469880 - DNA, 201 bp, Shigella boydii
atgaactacgaggaagggaacaacattcatactgaaattgaatttttttactcactattttattttaaaaaaacaacaacttatattgaaattattaaacgcatcataaaaatcggccaaaaaatatcttgtactatttacaaaacctatggtaactctttaggcattccttcgaacaagatgcaagaaaagacaaaatga

SEQ ID NO: 469881 - DNA, 585 bp, Shigella boydii; identical to SEQ ID NO: 463101

SEQ ID NO: 469882 - DNA, 4896 bp, Shigella boydii
atgacggacggacagtcagaaacggtgctgaccggtaatctggtgatggcactgtttaaccacgacaccagtcgcgatcaggaaccacagttacacacgcatgcggtggtgactaatgttacgcagcataacggcgaatggaagacactgagcagtgacaaagtggggaaaacggggttcattgagaatgtgtacgctaatcagattgcctttggcaggctctaccgggaaaaactgaaagagcaggttgaggcgctgggctatgaaactgaagtggtcggtaagcacggtatgtgggaaatgccgggtgtaccggtggaggccttttccggacgctcacagactatccgggaggccgtcggggaagacgcctcgctgaaatcccgggatgtggcggcgctggatacgcgtaaatccaaacagcacgtcgatcctgaagtcagaatggccgagtggatgcagacgctgaaggaaaccgggttcgacatccgggcatatcgtgacgcagcggaacaacgggcatatacccgcacgcagacacccggacccgcttcacaggacgggccggatgtgcagcaggcggtgacacaggccattgccggattaagtgaacgcaaagtgcagtttatgtatacggacctgctggccaggacggtcggcatactgccgccggaaaatggtgtgattgaacgggcacgcgccggtatcgatgaggccatcagccgtgagcagcttatccccctcgatcgtgagaaggggctgttcacgtccgggattcatatgctcgatgagctgtcagtccgggcactcagtcgtgacatcatgaaacagaaccgggtgaccgtacatccggagaaaagtgtcccccggacggccggttacagctatgccgtcagtgttctggcacaggaccgtccgtcgctggccattgtgtccgggcagggcggtgcagccgggcagcgtgagcgggtggctgaactggtcatgatggcccgggagcaggggcgggaggtgcagattatcgctgctgaccgtcgctcgcagatgaacctgaagcaggatgaacggctgtccggtgaactgataaccggacgtcgtcagttgctggaaggcatggccttcacgccgggcagtaccgttatcgtcgaccagggcgaaaaactctccctgaaagagacgttaaccctgctggatggtgccgcacgtcataacgtacaggtcctgataactgacagcgggcagcgaaccggtacaggcagtgcactgatggccatgaaggatgccggggtgaacacatatcgctggcaggggggagaacagcgaccggccaccatcatcagtgaaccggaccgttatgtccgctatgcccggctggccggagattttgcggccagcgtgaaagccggagaagagagcgtggcacaggtcagcggagtacgggaacaggccatactgacacaggccattcgcagtgagctgaaaacacagggcgtgctcggacacccggaggtaaccatgaccgccctgtcaccggtctggctggacagccggagccgttatctgcgggatatgtaccgcccgggaatggtgatggagcagtggaacccggagacacgcagtcatgaccgctatgtgacagaacgtgtgacggcgcagagtcacagcctgaccctgcggaatgcgcagggcgaaacgcaggtggtgcgtatttcttccctggacagcagctggtcgctgttccggccggaaaaaatgccggtggcagacggtgagcgtctgagggtgacagggaaaattcccggactccgcgtctccggcggtgaccgcctgcaggtggcatccgtcagtgaagatgcgatgacggttgttgtgccgggacgggctgaaccggccaccctgcctgtgagcgattcaccgttcacggcactgaagctggagaacggctgggtggaaacgcccgggcattccgtcagcgacagtgcgacggtttttgcctccgtcacacagatggcaatggacaatgccaccctgaacggtctggcccgcagtggtcgtgatgtccggctgtattcctcactggatgaaacccgtactgcggaaaaacttgcccgccatccttcctttacggtggtttctgagcagataaaggcgcgtgccggtgagacattgctggaaaccgctatcagtctgcagaaagccgggcttcacacgccggcacagcaggccattcatctggcccttcctgtgctggaaagtaaaaacctggccttcagcatggtggacctgctgacagaggcgaagtcgtttgctgcagaaggaaccggttttgctgacctgggaggggaaatcaatgcgcagataaaacggggtgatttactgtatgtggatgtggcaaaaggctatggcacaggcctgctggtttcccgtgcgtcgtatgaggcagaaaagagcattcttcgccatattctcgaaggtaaggaggcggtcacgccgctgatggagagagtacctggcgaactcatggagaaactgacatcaggacagcgcgccgccgcccgtatgatactggaaacgtccgaccgtttcacggtggtgcagggctatgccggtgtgggtaagaccacacagttccgggcggtgatgtcagccgtgaacatgctgccggagagtgaacgtccccgtgtcgtggggctggggcccacacaccgtgcggtcggggagatgcgcagcgccggcgtggatgcacagacactggcgtcctttctgcatgacacgcagctgcagcagcgcagcggagaaacgccggatttcagcaacacgctgttccttctcgatgagagctctatggtgggcaataccgacatggcacgggcatacgccctgattgcggccggtggcggtcgggctgtggccagcggtgacacggaccagctgcaggccatcgcgcccggtcagcctttccgtctccagcagacgcgcagtgctgccgatgtggtcatcatgaaggagattgtgcgtcagacgccggaactgcgggaggcggtatacagcctgattaaccgggatgtggaaagggcgctgtccgggcttgagcgtgtgaaaccgtctcaggtgccacgtctggagggcgcatgggcaccggagcactccgtgacggagttcagtcacagccaggaagcgaaactggcagaagcgcagcagaaggcgatgctgaaaggcgaggcttttccggatgtccccatgacactgtatgcagccattgtccgcgactataccggcaggacaccggaagcacgggagcagacgctgattgtcacgcacctgaatgaggaccggcgcgtactgaacagcatgattcatgatgcacgggaaaaggccggagaactggggcaggtgcaggtcatggtgcctgtcctgaacacagcgaatatacgcgacggggagctgcgtcgtctctccacctgggagaataacccggatgcccttgccctggtggataatgtgtatcaccggattgccggtatcagcaaggatgacgggctgataaccctgcaggatgcggaaggtaacacgcggctgatttcgccccgggaggcggtggctgaaggcgtcacgctgtacaccccggacaccatccgggtggggaccggtgacaggatacgcttcacgaagagtgaccgggagcgcggttatgtggccaacagcgtctggacggtgacagcggtttccggtgacagtgtcacactttctgacggtcagcagacccgtgtgattcgccccggtcaggagcgggcagagcaacatattgacctggcctatgccatcaccgcccacggtgcacagggggcgagtgaaacctttgccatcgcgcttgaaggcacggaaggtaaccggaaactgatggccggctttgagtcagcctacgtggccctgtcgcgtatgaagcagcatgtgcaggtgtacaccgataaccgtcagggctggacggatgccatcaacaatgccgtacagaaaggaactgcccacgatgtgtttgagccgaaaccggaccgggaggtcatgaatgcagagcggctgttcagtacggcgcgggagctgcgggacgtggcggcaggccgtgccgttctccgtcaggcggggctggccgggggagacagtcctgcacggtttattgctccgggacgtaaatatccgcaaccgtatgtggcactgccggcgtttgaccgtaacggcaagtccgccggtatctggctgaacccgctgaccacggatgacggaaacgggctgcggggattcagcggtgaaggtcgggtaaaaggcagcggggatgcgcagttcgtggctctgcagggcagccgtaacggagaaagcctgctggctgataatatgcaggatggcgtccggattgcccgtgataatcctgacagtggtgtggtggtaagaatcgccggtgaaggccgtccgtggaatcccggtgccatcaccggtggccgcgtgtggggggatatcccggacaacagcgtccagccgggagccggaaatggcgaaccggtcacggcagaggtactggcacagcggcaggctgaagaggccatccgccgtgaaacggaacgtcgcgcagatgaaattgtccgtaaaatggcagagaacaaacctgacctgccggacggcaaaacagagcaggctgtcagggaaattgccgggcaggagcgtgaccgggctgccataactgaacgggaagccgcgctgccggagagtgtactgcgtgaaccacaacgggtgcgggaagcggtccgggaagttgcccgggaaaatttgctgcaggagcgtctgcagcagatggagcgggatatggttcgtgacctgcagaaagagaaaaccccgggcggagactga

SEQ ID NO: 469883 - DNA, 267 bp, Shigella boydii; identical to SEQ ID NO: 463134

SEQ ID NO: 469884 - DNA, 123 bp, Shigella boydii; identical to SEQ ID NO: 463918

SEQ ID NO: 469885 - DNA, 369 bp, Shigella boydii; identical to SEQ ID NO: 463181

SEQ ID NO: 469886 - DNA, 927 bp, Shigella boydii; identical to SEQ ID NO: 467061

SEQ ID NO: 469887 - DNA, 342 bp, Shigella boydii; identical to SEQ ID NO: 460954

SEQ ID NO: 469888 - DNA, 420 bp, Shigella boydii; identical to SEQ ID NO: 463084

SEQ ID NO: 469889 - DNA, 351 bp, Shigella boydii; identical to SEQ ID NO: 462764

SEQ ID NO: 469890 - DNA, 252 bp, Shigella boydii
atggacccgacctgttcactgtttactacagggcaatgtctgggagaacccgacctgctggcgtcggcccgtcgcttacaatttttttcacatcagtactcgattgccgtgctgatggcaaatgcccgtggtaacagtgcactatgggatgaatatggtcgtctcatcgttcgcgccgatcgtggttcattattgttagtcggtcagcgttcatcacagggttggcaaggcgatatcattccattacgctag

SEQ ID NO: 469891 - DNA, 294 bp, Shigella boydii; identical to SEQ ID NO: 25632

SEQ ID NO: 469892 - DNA, 156 bp, Shigella boydii
atgcagaaacagcttgacccgaatgaagtcgctgcacggcgtagccttgcaggcagccgttatgatctggtggatcgcaacaacaatatcgttctggaatatcgcaaaaaagaactggttcgcctgaccctgacagaccccgtgacagggaagtga

SEQ ID NO: 469893 - DNA, 261 bp, Shigella boydii; identical to SEQ ID NO: 463150

SEQ ID NO: 469894 - DNA, 342 bp, Shigella boydii; identical to SEQ ID NO: 460954

SEQ ID NO: 469895 - DNA, 1455 bp, Shigella boydii; identical to SEQ ID NO: 463559

SEQ ID NO: 469896 - DNA, 543 bp, Shigella boydii; identical to SEQ ID NO: 464540

SEQ ID NO: 469897 - DNA, 342 bp, Shigella boydii; identical to SEQ ID NO: 460954

SEQ ID NO: 469898 - DNA, 276 bp, Shigella boydii
gtgaggcgcaatgttgcgggggctttatccctggtggcattggttgctggaaagagaaaacccccgcacgttgagaggtttaacctgacaatagaacgggggctaatcttgaaccatgaacaattcaagaatagccgcaaaatgttatcattacaacaaggcggctatatgacgctcgcgcagtttgccatgattttctggcacgacctggcagcaccgatcctggcgggaattattaccgcagcgattgtcggctggtggcgtaaccggaagtaa

SEQ ID NO: 469899 - DNA, 879 bp, Shigella boydii; identical to SEQ ID NO: 463044

SEQ ID NO: 469900 - DNA, 135 bp, Shigella boydii
atggaaggtaaaaatggcctgaaaatagtgtgcgatagcggtgggggttttcgacggagcaagctgttttccttgccaacaatcttgcaaaaaaatgcgatcgctaaaacaaaagtgcaatttgcggcaatatag

SEQ ID NO: 469901 - DNA, 132 bp, Shigella boydii; identical to SEQ ID NO: 463454

SEQ ID NO: 469902 - DNA, 420 bp, Shigella boydii
atggaacagaaagcattatctgcagaaccccgcagatcattttcaaatgagtttaaacttcaaatgggtaaactggcttcacaaccaggagcctctgttgcccgtattgcccgggaacacgatatcaatgataacctgctgtttaaatggctcaggctctggcagaacgaagggcgcatatcgcggcgtcttccggtaacaacctcttctgacactggcgttgaattattacctgtggagataacgccggatgagccgaaagaacctgtggctgctcttacttcgtctttatctactcagactacagttagtgccagctcctgcaaggtggagttccgtcacggtaacatgacgctggaaaatccttcaccagagctgctcacagtgttgatccgtgaactgaccgggaggggacgatga

SEQ ID NO: 469903 - DNA, 414 bp, Shigella boydii
atgaatacagatacgtttatgtgcagcagcgacgaaaaacagacccgcagcccgctgtcgctgtattcggaataccagcggatggagattgagtttcgcgcaccgcatatcatgcccaccagccactggcatggtcaggtcgaagtgaatgtgcctttcgatggcgatgtggaatacctgattaacaatgaaaaagtgaatatcaatcagggtcatatcacgctgttctgggcctgtacaccgcaccaactaacagataccggaacctgtcagagcatggcgatttttaatctgccgatgcatctgtttctctcctggccgctggataaagacctgattaaccacgtcactcacggcatgatgatcaaatcactggccacacagcaacttagcccgtttgaagtgcgccgctga

SEQ ID NO: 469904 - DNA, 240 bp, Shigella boydii
atgtgctataccgccggtatagacaatcagcgagcctccggcgctaatattgctgccagttgccgtaccatctttctcaacaacctgccggctcccggtggaaatatttgtcgtgtcagctttcccgccgctcttgatattttgtgttccgctgttgatattggtacccgtggcaataccatgattattaatattctgtgtaccaccattgattatggggtaatgactccaacttactga

SEQ ID NO: 469905 - DNA, 201 bp, Shigella boydii
atgctgaatattattaaaaaattgtttgaatgtgtttttgtatgcgatgattttacgaataactccaccgcaccaataaaattattgtgtctgatcctgggtaacatatggctaccttattttatttggttattttatgtcgccattaaatatctcattatagaagtaaactatcaaaaaacgctcattattaaaatgtaa

SEQ ID NO: 469906 - DNA, 576 bp, Shigella boydii; identical to SEQ ID NO: 465220

SEQ ID NO: 469907 - DNA, 219 bp, Shigella boydii
atgactaaaaatacacgtttttcccctgaagtccgtcaacgggcagttcgtatggttctggaaagtcagggcgaatatgactcacaatgggcagcgatttgttccattgctccaaagattggctgtatactggagactctgcgtgtctgggtacgccagcatgagcgggataccgggggcggtgaggtaggctcaccaccgctgaacgtcagcgtctga

SEQ ID NO: 469908 - DNA, 414 bp, Shigella boydii; identical to SEQ ID NO: 463211

SEQ ID NO: 469909 - DNA, 420 bp, Shigella boydii; identical to SEQ ID NO: 463084

SEQ ID NO: 469910 - DNA, 378 bp, Shigella boydii; identical to SEQ ID NO: 465226

SEQ ID NO: 469911 - DNA, 303 bp, Shigella boydii
atgaaaaaaagaaattttagcgcagagtttaaacgcgaatccgctcaactggttgttgaccagaaatacacggtggcagatgctgccaaagctatggatgttggcctttccacaatgacaagatgggtcaaacaactgcgtgatgagcgtcagggcaaaacaccaaaagcctctccgataacaccagaacaaatcgaaatacgtaagctgaggaaaaagctacaacgcattgaaatggagaatgaaatattaaaaaaggctaccgcgctcttgatgtcagactccctgaactgttctcgataa

SEQ ID NO: 469912 - DNA, 420 bp, Shigella boydii; identical to SEQ ID NO: 467059

SEQ ID NO: 469913 - DNA, 210 bp, Shigella boydii; identical to SEQ ID NO: 463042

SEQ ID NO: 469914 - DNA, 219 bp, Shigella boydii
atgactaaaaatactcgtttttcccccgaagtccgtcagagggcgattcgtatggttctggaaagtcagggcgaatatgactcacagtgggcggcaatttgttccattgccccaaagattggctgtacaccggagactctgcgtgtctgggtacgccagcatgagcgggataccgggggcggtgaggtaggctcaccaccgctgaacgtcagcgtctga

SEQ ID NO: 469915 - DNA, 195 bp, Shigella boydii; identical to SEQ ID NO: 463581

SEQ ID NO: 469916 - DNA, 372 bp, Shigella boydii; identical to SEQ ID NO: 469549

SEQ ID NO: 469917 - DNA, 564 bp, Shigella boydii
atggataaaggttattactcactgggactgttaaatgcctggagcctggcgggagaacaccgccactggatgatacctctcagaaagggagcgcaatatgaagagctcagaaaactgggtaaaggcgatcatctggtgaagctgaaaaccagcccgcaggcacgaaaaaagtggccgggactgggaaatgaagtgacagcccgcctgctgaccgtgacgcgcaaaggaaaagtctgccatctgctgacgtcgatgacggacgccatgcgcttccccggaggagaaatggcggatctgtacagtcatcgctgggaaattgaactgggatacagggagataaaacagacgatgcaactgagcaggctgacgctgagaagtaaaaagccggagcttgtggagcaagagctgtggggtgtcttactggcttataatctggtgagatatcagatgattaaaatggcggaacatctgaaaggttactggccaaatcaactgagtttctcagaatcatgcggaatggtgatgagaatgctgatgacattgcagggcgctgaggtagcctga

SEQ ID NO: 469918 - DNA, 219 bp, Shigella boydii; identical to SEQ ID NO: 469914

SEQ ID NO: 469919 - DNA, 675 bp, Shigella boydii
atggtcgggctggatgctggcgtggctaaactcgccacgctgtcagatggcacagcctttgagcctgtaaacagttttcagaaaaaccagaagaagctggcgagacttcagcgacagttaagccgcaaggtcaaattcagcaacaactggcagaagcagaaacgcaaaatacagcgactgcattcctgtatcgcaaatatccgcagggactaccttcacaaagtcacaacgaccgtcagcaaaaaccacgcaatgatagtcattgaggatttgaaggtcagcaacatgtcaaagtcagcagcgggtacggtcagcctgccggggcgcaatgtccgggcaaaatcaggtttaaaccgttcgatactggatcagggctggtatgaaatgcgccgccagcttgagtacaagcagctctggcgtggcggtcaggtgcttgctgttccgccagcgtgcacaagccagcgttgcgcgtgctgtggtcatacagcgaaagaaaaccgcctgtcacaaagtaaattcagatgccaggtatgtggatatacagcgaacgccgatgtaaatggcgctcgtaacattttagcggcggggcacgccgttcttgcctgtggagagatggtgcagtcaggccgcccgttgaagcaggaacccaccgaaatgattcaggcgacagcctga

SEQ ID NO: 469920 - DNA, 264 bp, Shigella boydii
atggcttcctggctggttgagtggaaaaatgccactgaaacgcaatggcttaaagatgccccgtcacagccattgcaacagtcactgaaagaccttgagcgagcctacaaaaatttctttcagaagcgtacctcttttccccgcttcaaaaagcggggacagaatgatgcattccgctatccgcagggcgttaagctcgatcaggaaaacagccgtatttttctgccgaaactgggctggatgcgctaccggaacagccgttag

SEQ ID NO: 469921 - DNA, 153 bp, Shigella boydii; identical to SEQ ID NO: 463099

SEQ ID NO: 469922 - DNA, 216 bp, Shigella boydii; identical to SEQ ID NO: 467445

SEQ ID NO: 469923 - DNA, 372 bp, Shigella boydii; identical to SEQ ID NO: 462525

SEQ ID NO: 469924 - DNA, 441 bp, Shigella boydii; identical to SEQ ID NO: 463153

SEQ ID NO: 469925 - DNA, 1926 bp, Shigella boydii
atgctcggtagccagacgtttgtcgtgttgtgtgcctgcgcaatattacgctggcagctggggacgcgttggcgttatggattgaccagccgatatgtctggcaacgtctgttctggcttggtttggtgacgccgatcggcatcaaatgcagcatgtatcttgtggggagcttctttgatttcccgctaaagatatccacctttttcggcgatgcggatgccattttcacggtcgttgatttgctaagccttttcaccgctgtgctgatttacaacatgcttttctactatctcactcgcatgattgtaagtccccactttgcgcagatattgtggcgcagggatatcgcgccgtcgttgggcaaagagaaacgcgcatttaccttaagctggctggcagcgttaagcgtgcttctacttctgttgtgcacaccttatgaaaacgactttattgccggttacctggtacccgttttcttcatcatctttaccctcggggtcggtaagcttcgctatccgtttttaaatctcacctgggctgtttcaacgctttgccttctgaattacaaccagaactttttgcaaggggtggaaaccgaatattcgctggcatttattcttgcggtgctgatttcctttagcgtttgcctgctctatatggtgcgcatttatcatcgcagtgaatggcttaatcgccgctggcatttgcaggcgctgaccgatccgttaacgctcctgcccaacttccgtgcgttggaacaagcgccggagcaagaggcgggcaagagtttttgctgcctgcgcattgataatcttgagtttatgagtcgtcattacggcttaatgatgcgcgttcactgtatccgctcaatttgccgtacgctgctgccgttgatgcaggaaaacgaaaagttgtatcaattgccgggtagtgaactgctgttagtgctgagcgggccggaaacggaagggcgactccagcatatggttaacatcctgaatagtcggcaaattcactggaacaataccgggctggatatgggctatggtgctgcctgggggcgttttgatggaaatcaggaaaccctgcaacccttgttggggcagttaagctggctggcggagcaatcctgcgcacatcatcatgtgctggcgctggatagcagagaggagatggtttccgggcagaccactaaacaggtgctattgctgaataccattcgcacggcgttagatcagggtgatttgctgctctacgcccagccaattcgcaacaaagagggtgaaggttatgatgagatcctcgcgcgactgaaatatgacggcggcattatgaccccggataagtttctgccccttattgctcagtttaaccttagcgcgcgttttgatttgcaagtgctggaatccttgttgaagtggctggcaacacacccttgcgacaaaaaaggaccgcgcttttcagtcaatttaatgccgctcacgctgctgcaaaagaatattgccgggcggattattcgtctgtttaagcgttatcacatctccccgcaggcggtcattcttgagatcaccgaggagcaggcgttttctaacgcagaaagcagcatgtacaacatcgagcagctgcataagtttggtttccggattgcgattgatgactttggcaccggctatgccaactacgaacggttaaagcgtttgcaggctgatatcatcaaaattgatggcgtctttgtgaaagatattgtcacgaacacgctggatgcgatgattgtgagatcaattaccgatctggcgaaagcgaagtcattgagtgtggtcgcggagtttgtcgagacgcaacagcagcaggcgctattgcataagctcggggtgcaatatctgcaagggtatttgattggtcgcccgcagccattagctgattaa

SEQ ID NO: 469926 - DNA, 351 bp, Shigella boydii; identical to SEQ ID NO: 467400

SEQ ID NO: 469927 - DNA, 210 bp, Shigella boydii; identical to SEQ ID NO: 9340

SEQ ID NO: 469928 - DNA, 372 bp, Shigella boydii; identical to SEQ ID NO: 462767

SEQ ID NO: 469929 - DNA, 303 bp, Shigella boydii; identical to SEQ ID NO: 458125

SEQ ID NO: 469930 - DNA, 303 bp, Shigella boydii; identical to SEQ ID NO: 458125

SEQ ID NO: 469931 - DNA, 372 bp, Shigella boydii; identical to SEQ ID NO: 462525

SEQ ID NO: 469932 - DNA, 219 bp, Shigella boydii; identical to SEQ ID NO: 468851

SEQ ID NO: 469933 - DNA, 225 bp, Shigella boydii; identical to SEQ ID NO: 462726

SEQ ID NO: 469934 - DNA, 372 bp, Shigella boydii; identical to SEQ ID NO: 462525

SEQ ID NO: 469935 - DNA, 372 bp, Shigella boydii; identical to SEQ ID NO: 462525

SEQ ID NO: 469936 - DNA, 372 bp, Shigella boydii
gtgctggatgctctggagcaggcgttatgggcccgtcgaccgtccggcacggtccatcacagtgataaaggttctcagtatgtatcgctggcctacacacagcggcttaaggaagccggattactggcatcaacaggaagtacaggcgactcgtatgacaacgcgatggcggagagcatcaatggtctttacaaagcggaggtaatacaccgtaagagctggaaaaaccgtgcagaagtggaactggccacactcacgtgggtggactggtataataatcgacgattgctggaaaggctgggccatactcctccggcagaagcagaaaaagcttattatgcttccatcggaaacgatgatctggcagcctga

SEQ ID NO: 469937 - DNA, 318 bp, Shigella boydii
atggcgctatggcaaacagatattctcgctcgcaaatacaacgccgataagtttgaaaagcgattatcagatctggatgacgttgctgaagaaagctggctggaggaaaacctgccgtcagcatttgcacagcatccgtggtgcagctcgcttggctctatcggtggcggcaatcatttcgctgaactgcaacaagttgatcaaatcatcaacgctgaactgtttgcactagcaggtctggatgcacaacatctgcaactgttggttcatagcggctcgcgggggggggcccctattaagttgtcaagcatgttatga

SEQ ID NO: 469938 - DNA, 294 bp, Shigella boydii; identical to SEQ ID NO: 25632

SEQ ID NO: 469939 - DNA, 807 bp, Shigella boydii; identical to SEQ ID NO: 464586

SEQ ID NO: 469940 - DNA, 327 bp, Shigella boydii; identical to SEQ ID NO: 465401

SEQ ID NO: 469941 - DNA, 1359 bp, Shigella boydii; identical to SEQ ID NO: 466917

SEQ ID NO: 469942 - DNA, 957 bp, Shigella boydii; identical to SEQ ID NO: 464180

SEQ ID NO: 469943 - DNA, 345 bp, Shigella boydii; identical to SEQ ID NO: 464216

SEQ ID NO: 469944 - DNA, 351 bp, Shigella boydii; identical to SEQ ID NO: 465668

SEQ ID NO: 469945 - DNA, 132 bp, Shigella boydii
atgcgctcacaggatcccggcgcggcgagtaccgcgggtgaggcgagggcgagcagaagcgcggcacagcaggttgagagtttcatcataagctccttacgcgaagataacttctttaagcatagcatttaa

SEQ ID NO: 469946 - DNA, 360 bp, Shigella boydii; identical to SEQ ID NO: 464873

SEQ ID NO: 469947 - DNA, 384 bp, Shigella boydii; identical to SEQ ID NO: 464877

SEQ ID NO: 469948 - DNA, 468 bp, Shigella boydii
ttgttctataagttgctcagcaagctcattttcgctgttcttcatcgtgccgaaggctgcagccgtcagcagatggctggtcagttccatctggcagaccattttgacctgcgggtagagcgccgggttcccggcatgtgtctggcgggggaaggctgcatcgttctctggtgtgtccggtgtgcgccagaacacaccatcgatggccagcagggtcaggccgcaccagtgcggatgcggcgtggcgttatgccagagctgcgctgttttcgtgaacacgcggcggacagcctcacttcccaggcgctggcgggcctgaataacggcactggggacaacgaaggggcgattgcccggcagcatgatgtccaggcgattcacaatctggtgaagaggttctttacgctcaagcgccatgccaacaatacaccagaccatcatttcgaggggaagacggcgcttgcgtag

SEQ ID NO: 469949 - DNA, 294 bp, Shigella boydii; identical to SEQ ID NO: 25632

SEQ ID NO: 469950 - DNA, 837 bp, Shigella boydii; identical to SEQ ID NO: 464897

SEQ ID NO: 469951 - DNA, 399 bp, Shigella boydii
atgcaacatcggcggattgcgattctcgaactactgcaaaaacatattcgccagcgcgacttaatgttattgctggagcaactggtcacgctgattgacgaagggtacactagcggaagtcagttagttgccatgcaaaactatatgctgcaacgcggtcatactgaacaagcggatttgttttatggtgtgctgagagacagggaaacgggaggggagtctatgatgacgctggcgcagtggtttgaagagaaagggattgagaaggggattcagcagggaagacaggaggaaaggcaagaattcgcccagcgttttctgagtaaagggatgtctcgggaagacgttgcagagatgacaaatttatctcttgctgagattgataggctgattaactaa

SEQ ID NO: 469952 - DNA, 1368 bp, Shigella boydii
ttgcgccgcgaggcactgagtgatcaggtctgggagcgttattttttttatgaatcacgtgatcctgtccagcacgaaatggagcaggataagctcattagccgggcaaagctggcgcatgagcagcagcgttttaatccggatatggtcattctggcggacgtcaacgcccagccttcccatatcagcaagccgctgatgcaacgtattgaatacttcagcagcctgggcaggccaaaggcttattcccgctatttacgtgagacgattaagccatgtctggaacgactggagcatgtacgcgacagccagctatctgcatcttttcgttttatggcaagccatgtagggctggacggcctgctgattctgcctgaaatgagtcaggatcaggtgaaacgcctgtctacccttgtcgctgcgcatatgagcatgtgccttgatgcagcttgtggtgatttgtatgccaccgatgacgttaagccagaagaaatccgcaagacatgggaaaaggtggcagcggaaaccctgcgtctggatgtcatcccgcctgcgtttgagcaactccgtcggaaaagaaaccgccgtaaacccgtgccctatgaactcattccgggttcgctggcgcgtatgttgtgcgccgactggtggtaccggaaattatggaaaatgcgttgcgaatggcgggaagagcagttgcgtgctgtctgcctggtcagcaaaaaagcatctccctatgtcagctatgaagccgtgatgcataaacgtgagcagcgccgcaagtcattggagtttttccgttctcatgaactggtgaacgaagagggcgacacgctggatatggaagacgtggtaaacgccagcagcagcaacccggcgcaccgccgcaatgagatgatggcctgtgttaaaggtctggagcttatcgcggaaatgcgcggtgactgcgccgttttctacaccattacctgtccgtcacgtttccattccacgctcaataacggcagaccaaacccaacctggacaaatgcgacggtaagacaaagcagcgattatctggtcggcatgtttgctgcatttcgtaaggcgatgcacaaagccgggttgcgctggtatggcgtgcgggtggctgagccgcatcatgacggtacagttcactggcacctgttgtgttttatgcgcaaaaaagaccgccgcgccattactgcattgttgcgtaagtttgccatccgtgaagaccgcgaggaactgggtaataacactggtccacgctttaaatatgagctgataaacccgcgcaaaggaacgccgacaagctacatcgcgaaatacatcagtaagaacattgacggtaagcgtacagcctga

SEQ ID NO: 469953 - DNA, 132 bp, Shigella boydii; identical to SEQ ID NO: 465690

SEQ ID NO: 469954 - DNA, 2085 bp, Shigella boydii
gtgggtgcagaagggcttcgccatgtaccgggcgatgtcattgaaatctgtgatgatgactatgcgggtatcagcatcggcgggcgcgtgctggcggtgaacagccagacgcggacactgacgctcgaccgtgaaatcacgctgccatcctccggcaccacgctgataagcctggttgacggacaggggaatccggtcagcgtggaggtccagtccgtcaccgacggcgtgaaggtgaaagtgagccgtgttcctgacggcgttgccgaatacagcgtgtgggggctgaagctgccgacgctgcgccagcgcctgttccgctgcgtgagtatccgtgagaacgatgacggcacgtatgccatcaccgccgtgcagcatgtaccggaaaaagaagccatcgtggataacggggcgcactttgacggcgaccagagcggcacggtgaatggtgtcacgccgccagcggtgcagcacctgactgccgaagtcaccgcagacagcggggagtatcaggtactggcccgctgggacacgccgaaggtggtgaagggcgtgagcttcctgcttcgcctgaccgtgacagcggacgatggcagtgagcggctggtcagcacggcccggacgacggaaaccacataccgcttcaggcagctggcgctggggcgttacatgttgacggtccgggcggtaaatgcgtggggacagcagggcgatccggcgtcggtatcgttccggattgccgcaccggcagcgccgtcgcggattgagctgacgccgggctattttcagataaccgccacgccgcatcttgccgtttatgacccgacggtacagtttgagttctggttttcggaaaagcggattaccgatatcaggaaggttgaaaccacagcgcgctatcttggcacggggctgtactggatagccgccagtatcaatatcaaaccgggccatgattattatttttacgttcgcagtgtgaacaccgttggcaaatcggcattcgtggaggctgttggtcagccgagtgatgatgcatccggttatctggattttttcaaaggcgagatagggaaaacccatctggctcaggagctgtggacgcagattgataaaggtcagcttgcgcctgacctggctgaaatcaggacgtccattacggatgtcagcaatgaaatcacgcagactgtcaataagaaactgaaagaccagagtgcggcaatccagcagatacagaaggttcaggttgatacaaataataatctgaacagcatgtgggctgtgaagctgcaacagatgaaggacggacgcctttatattgcgggtatcggtgccggtattgagaatacgccagcaggaatgcagagtcaggtgctgctggcggcagacaggattgcgatgattaatcctgcgaatggcaacacaaagccgatgtttgttggtcagggcgatcagatattcatgaacgacgtgttcctgaaacgcctgacggctcccaccattaccagcggcggtgatcctccggcattttccctgacaccggacgggcggctgacggcgaaaaatgccgatattagcggtaacgtgaatgcgaactccgggacgctcaacaacgtcacgattaacgagaactgtcgggttctgggaaaactgtccgccaaccagattgaaggcgatctcgttaaaacagtgggcaaagctttcccccgggactcccgtgcaccggagcggtggccatcagggaccattaccgtcagggtttatgacgatcagccgtttgaccggcaaattgttattccggcggtggcattcagtggcgctaagcatgagagagagcatactgatatttactcctcatgccgtctgatagtgcggaaaaacggtgctgaaatttataaccgtaccgcgctggataatacgctgatttacagtggcgttattgatatgcctgccggtcacggtcacatgacactggagttttcggtgtcagcatggctggtaaataactggtatcccacagcaagtatcagcgatttgctggttgtggtgatgaagaaagccactacaggcatcacgattagctga

SEQ ID NO: 469955 - DNA, 294 bp, Shigella boydii
atgtttaagtatgcagagatgttgatggcggaagaagatgataaagtatgtgaacttatttttaaacaacaagataatataattataaagaaataccgaacattacaaggtaaagtcgtatggctatggatattgccatttgttattgaatggttaatcttgtgtgctttagacgtaaacagctggcgaggcaaaagtaaataccctgattattatttgttaagagatgagatgcctgtgcgtctagtgtctattatattcccaacattattggcgctattcttgctggcgtag

SEQ ID NO: 469956 - DNA, 294 bp, Shigella boydii; identical to SEQ ID NO: 460208

SEQ ID NO: 469957 - DNA, 1107 bp, Shigella boydii; identical to SEQ ID NO: 465702

SEQ ID NO: 469958 - DNA, 1107 bp, Shigella boydii; identical to SEQ ID NO: 466505

SEQ ID NO: 469959 - DNA, 1206 bp, Shigella boydii
gtggaaacctctgcccgttatctggggaccggcagtcagtggagtgtatccggcccgcacattaagcccgggaaggatttctggttttacgtgcgcagcgtcaacctggtggggaaatctgcttttgtggaggccagtggacgggccagcaatgatgcagaagggtatctggggctgtttcgggaaaaaataggaaaactgcatctggctcaggggctgtgggagctgatagacaacagccagcttgcggatgagatggcggagatgaagaccaccatcaccgaaacccgcaatgaaatcacacagacggtcagtaaaacgctggaggaccagagcgccaccatacagcagatacagcgcgtgcagaaggacacaaatgatgaccttgctgcactttacatgctgaaggtacagaaaacaaaaaatggcataccctatgttgccggtattggagcggggattgaggatactgatggccagcccctgagcaacatactgctgctggctgaccgtattgcgatgattaacccggaggacggcaacaccacgccgttatttgtggcgcaggggaatcagttgttcatgaacgatgtgttcctgaagcggctgtttgcggtgagtatcacctcgtccggcaatcccccgacgttttccctgacgccggagggcaggctgaccgcaagaaatgctgatatcagcggtaacgtgaatgcgaactccgggacgctcaacaacgtcacgattaacgagaactgccgggttctgggaaaactgtccgcgaaccagattgaaggcgatctcgttaaaacagtgggtaaggcttttccgcgggactcccgggcaccggagcggtggccatcagggaccgttaccgtcaggatttatgacgatcagccttttgaccggcaaattgttattccggcggtggcattcagcggcgctaagcatgagagagagcatactgatatttactcctcatgccgtctgatagtgcggaaaaacggtgctgaaatttataaccgtaccgcgctggataatacgctgatttacagtggcgttattgatatgcctgccggtcacggtcacatgacgctggagttttcggtatcagcatggctggtgaataactggtatcccacagcaagtatcagcgatttgctggttgtggtgatgaagaaagccaccgcaggcatcacgattagctga

SEQ ID NO: 469960 - DNA, 831 bp, Shigella boydii
atgtctatgccattaagcaatgcccttcagagtcaaattattacagataatcacttccttcatcatccaaaagtcgacaataagttaacacgtgaatatgaatatgcacggatggatacggaaaatatctatcttctgcctcttactcgtggaaataaccataattacgatggaaaaagcgttgtcgaaattagaaaacttaatattggcaaacagtcctggccatttaattatgcgacagatacatgcagagaattcaatggtattacaacaacaggacgtatgctctatcgaaacttgaaaatcacctcagctttagacgaaatatatggtggtatatgtaaaaaggcgcatgctgctacagagttagcagaaggtttacggctaaatttatttatgaagagccctttcgatcctgttgaggactatacagttcatgaaataacattaggccctggttgcaatgttcctggttatgccggaaccacgataggatatatttcaacccttccagcttctcaggcaaaaagatggaccaatgagcagccaagaattgatatctatattgatcagataataactgtctcaggggtggcaaattcttccggattcgcccttgcagcattacttaatgctaatattggaatgggaaatgacccaataattggtatagaagcctatcctggtaccgcggagatccatgcaaaaatgggatataacgttatccccggtgatgaagatgcgccactcaaacgcatgactctgcaaccgtcatctcttccagaactgtttgaattaaaaaatggtgaatggaattatattggcaaataa

SEQ ID NO: 469961 - DNA, 960 bp, Shigella boydii; identical to SEQ ID NO: 467729

SEQ ID NO: 469962 - DNA, 306 bp, Shigella boydii; identical to SEQ ID NO: 464418

SEQ ID NO: 469963 - DNA, 249 bp, Shigella boydii; identical to SEQ ID NO: 465618

SEQ ID NO: 469964 - DNA, 294 bp, Shigella boydii; identical to SEQ ID NO: 465586

SEQ ID NO: 469965 - DNA, 378 bp, Shigella boydii; identical to SEQ ID NO: 462723

SEQ ID NO: 469966 - DNA, 447 bp, Shigella boydii
atgcgagggattcagtttattactgcggttggattaatttctgaactgggtgatctgacccgttttgaaaatccacgacaactgatggcatgctttggtatcacgccatcagaatattcatcgggtggaagcagacatcagggcagcattaccaaagccggaaacagctatgccagaaagctattggtcgaggcagcgtggagttaccgtcatccggcacgcatcagtccggcaatacaaaaaaggcaggaaaatttaccccgccccgtcattgacagagcatgggatgctcaactcaggctttgtaagaggtatcgaaaacttcaggccaaaggaaagaatgtcaatattacaattgttgctgttgcacgtgagctggcgggttttatctgggatatgggccgaatagcaatgtctgtcgcacaacaaccacaatgtcacaaataa

SEQ ID NO: 469967 - DNA, 318 bp, Shigella boydii; identical to SEQ ID NO: 464967

SEQ ID NO: 469968 - DNA, 480 bp, Shigella boydii; identical to SEQ ID NO: 463183

SEQ ID NO: 469969 - DNA, 345 bp, Shigella boydii; identical to SEQ ID NO: 464381

SEQ ID NO: 469970 - DNA, 501 bp, Shigella boydii
gtgaatgcgaactccgggacgctcaacaacgtcacgattaacgagaactgtcgggttctgggaaaattgtccgcgaaccagattgaaggcgatctcgttaaaacagtgggcaaacctttcccacgggactcccgggcaccggagaggtggccatcagggaccattaccgtcagggtttatgacgatcagccgtttgatcggcaaattgttattcccgcggtggcgtttcgcggtgctaaacatgagcggaagaataacaatatttattcgtcatgccgcctgatagtgaagaaaaacggtgctgaaatttataaccgaacgaccctggataatacgctgatatatacgggtgttattgatatgcctgccggtcacggtcacatgacgctggagttttctgtatcggcatggctggtaaatggctggtatcccacagcaagtatcagcgatttgctggttgttgtgatgaagaaagccactgcaggcatcacgattagctga

SEQ ID NO: 469971 - DNA, 294 bp, Shigella boydii; identical to SEQ ID NO: 25632

SEQ ID NO: 469972 - DNA, 468 bp, Shigella boydii; identical to SEQ ID NO: 461580

SEQ ID NO: 469973 - DNA, 303 bp, Shigella boydii; identical to SEQ ID NO: 458125

SEQ ID NO: 469974 - DNA, 300 bp, Shigella boydii; identical to SEQ ID NO: 461638

SEQ ID NO: 469975 - DNA, 213 bp, Shigella boydii
atggacttcattttgccaacgttggtgcttcgtagtgaggataaaatgaccctggcgattggcatttttagttggattgcttctaattcagcagagaattatacgctttttgctgctggggcgcttttagttgcagtacctatcacattgttatttgtattcacacagaagcatataactactggacttgttagcggtgccgttaaggaataa

SEQ ID NO: 469976 - DNA, 210 bp, Shigella boydii; identical to SEQ ID NO: 9340

SEQ ID NO: 469977 - DNA, 2133 bp, Shigella boydii
atggaactgttacaggaacacggggcgatacttaaagttgtaatcatgcctactactggggaacaaaccataatccaaggtttcgatactggcctcctcaacccagagatatccaacattctttttttattggccaaaacaccaaaagaaattagtgagatttttgtcaatgaaaatgataactttcagcctactctaagcgggctaaatcctatttttttaatatctaaagaaaatcttgaaaaaataccaaatatttatcaaacgccattttgcttaattttttgtgctaaagaagatttttcgtatgtttgtgctttaaaaaaacattttgctataccacctataatttgttgcaattctaaacgcgctgatctaccacttaataagattaatagtatatactcatttgataaggtgctcttctctcggttgaaattcattgaggataaaataagaaaaaatcacagtgaaaagaaaatatcaacgaagttgaagcgaagaggggctttatttaataaatcaccttggagatcgacgcttaacaattcaacactacccaatgagttgttaattgaatcacttggctatatgctatctccaccaaaaagaattaaagatggtagtagcaaaagagagtttatagaaataatacttcatagcgttgatgcatacaccgaatgtttaaaggaattagatataccacttccaacggaagtcttactttttgctccgggtatgcactcttttttatatgataaaaataatgacttttatgagttaataacggaaaatttatccacaattgagaaaaaattccttattgatggagtgttgaggaatccaggctattctggaattagacttgatataaattcagatagaaaagaactttttaaaagtcctgctttccgttacctcacctcactaagacgcgctgaaatgcgattaacaacagctgcgattactttatttagcataaataaaaaaatcccagcaataagattgccaaatgcaataaatcattactccaattatttgaaaaatcttgaagatcttgcaacttcttctgggataaatagtgaagcattcatcactaaatctaaagcattcaatactgttattcgaagagcccttggttgcaagttgagaacatatataagtaaaaactatagcgatttgtcctttgtttgtgatgtaccattggattggattaggtttaataacatacctataatgttcagtcatgagatatcaagaataaatgctacgcctggtaacgttcttctacagagcgcctctgcttttccgcgcgttttagtaaaagcatctgagttgagaaaggttttagttatacgttcttttgagcctgatgatcacttaaagttcatattagagaacgcaattgagatatttaaaaaacagatgccggatcttgattgcgagattattgatgttagatcgaaagctgagtttattgatgctctaaatcaatatcaaggtcatattcttgttatggattgtcatggaaaccatgatggcaatgggagtcatggatggttaataataggtgaggataaagtggacacttggagtttgagaaaaatagcaagaattcctcctatcgtaattctgagtgcatgtttaacatctgccctaagtggttctcatgcctctgttgctaatggcttcgttataagtggtgcattaagtgtcatcggaacattactgcctgtaaatgcgatagactctgctgtttttgtaagtcggttgatctaccggttttacgagtttccttcgacgctatctacaaattttacacatgttaatgtaaggctttttctttctgtttttcttaggatgtcctatgcaagcgatttaataagaggatttttatctgaagatttgataccgaataattcatggaagaaagatgcagttgatattaacatgtatataaacatgcttcaccatgattggtatgattatgtaattaacaaattgacgatgttaacggggctcacgaaaaaagatgtacttgattttatcgatagaaaattattcataaccgaaactatgtgctatagccaaattggatttccagatgcaatcacaattagtcttaaagattga

SEQ ID NO: 469978 - DNA, 621 bp, Shigella boydii
atgaccacttacaccgataaggaacagattaaagaaatcaaagaacgaatcggcagcctagacgtgcgagacaatgttgagcgccttgcttatgaaattgctctggcatcactggaagcagagccggtggcgtggcttcattcagacaatggcttaggtattccggcaataaccaggagcaaaaacattgctgacagttggttatcaaagggctggtatgttcagccgctatatatggctcagccagtgtcggtggtgccggatgctcttccgtctttaaataatggcatagtcggctttgatgaaggctggaacgcctgccgcgccgccatgcttcatggtgccaaacctgtaagccagacttacaagttgaacgagctgtcgggcaactctccggtaactccggatggttggataagctgtagtgagcgaatgccgaacgataaacagtatgtttggtgttgggggaagtcttacggctggactgagtgcgataccttcgaagggtattacgattggtcgagaaacaaatggtgggcagttactgacgatgtggaagaaccggcatcgaaagtaacccactggatgccgctaccggagccgccgcaggaggtaaagtaa

SEQ ID NO: 469979 - DNA, 1149 bp, Shigella boydii
atgaacagtttaacggcaaataaccgttggtcgcaacagctggtggtccgcgtggctgaacacctgttgttacggcatgaatgcagattaccaaatcacctggctgtaagtaaccacagagaactttacctgactgtggggggcgagttgtgcaggaacttaaccgctggtttcgtgacggaagaggactttatgttcatgttattcgttgggagccagaaacacagcgcgttatctatcttcgcaaagactacccgcatgagtgctttagtcctttgtggaaattcaggcgtgattttgttgagtgtgaaggaccaccagcacattgattctgccattccgggacgttacactgttcaggcaccttataaagcgggtgccgggattggcgtcctggaattgcatacggcgacaattggcgcgttagcgtcttttttgttgctacaactcagctatacccaaattatggtgggctgggtgggggcaccgaaaggtgcgccggtttccgtatgcgccggttacgccaaccctgctcagttcaccaccagcgaaattggcgtttccggtggtggaagttatccattgcatacggaggctgccatcatggctacgatccctgccttagtacaacctgaactttgcattattgcagacaaagttgttacttcttctctggctgttgctagttatttcggcaaacaacacaaaaatgtcattcaaaaaattgcgtctcttgaatgctctgccgaatttactgagctgaatttccagctcagtgagtacatcgacgcatcaggccgcaaactaccttgctatcaaataacccgcgacggctttgcgtttcttgctatgggtttcacgggtaaacgtgctgcccagttcaaagaggcatatatcaatgcctttaaccagatggagaaacagctttcaaaaccctctgtaccgagcgacgttgcacataacgccagcattctctattcctacatttcatcaattcatcaggtctggctgcagcagctttatcctatgttggcaaaagccgaatctccgctggctgttagcttgtatgactatattaatgatgcttcggcgctggcctgcctcataaatttgtcgctgaacccttcagaggtaagggggcgcaaatga

SEQ ID NO: 469980 - DNA, 363 bp, Shigella boydii
gtggtttttactgagcgcggtgtacacggtggaacatatggcgggaagtttgttgcttatgattatgcagcatggctaaaccccggatttaaatatgcagcctataaagtcctggatgactacttcaccggagaacttcagcatcgcaacagcttaagtgcgcagctcaatatgaagtgtcatgagtttgatcagaaaaaagatatggcgagcttctgtggacaagggctggcggcatggcgctatacgaagccagtgttggtcgctgagattaactccctggctaaccagctgcagataacgatccccgggctgtccggtatttgccggtatgaaattaccggaaggcgcggtcgttactga

SEQ ID NO: 469981 - DNA, 360 bp, Shigella boydii
gtggcttcagatgactctaacaacagctggaatccggcatacaattgctttgatcgtccgggtaaaaaatgtatctcttttacgctacgtatcaacggcaaagatcacgatttgttagcggtagataaaattcatgtcgatttaaactggcggtatttgaacgagtatcttgatcaaatcagcgctaatgatgaagttctatttttgaaacaaggtcatgagatcattgccaagaatcaactcgctcgtgaaaaactgattatttataatagcgaaggtaattataatattattgattctgtcgatacggagtatattgcaaagacatcagcaggtaatgctgccaacttactgatttag

SEQ ID NO: 469982 - DNA, 426 bp, Shigella boydii; identical to SEQ ID NO: 8113

SEQ ID NO: 469983 - DNA, 447 bp, Shigella boydii; identical to SEQ ID NO: 462775

SEQ ID NO: 469984 - DNA, 627 bp, Shigella boydii
atgttccgccgtctgcttatcgcaacagtcgtcggtattctcgcggcctttgccgttgccgggtttcgtcatgcgatgctgctactggagtggttgttcctcaataatgactccggcagtctggtcaatgcagcgacaaacctttccccctggcgacggttgctaactccggcgctcggcggactggcggcgggtttgttgctgatgggctggcagaaatttacccaacaacgccctcatgcgccgaccgattacatggaagcgttgcaaaccgatggacagttcgattacgcagcaagcctggttaaatcgattgcctcgctgctggtagtaaccagcggcagtgcaattggtcgcgaaggtgcgatgattcttttagctgcccttgccgcctcctgttttgcccaacgttttacgccacgccaggagtggaaattatggatcgcctgtggcgccgcggcgggagtggaaattatggatcgcctgtggcgccgcggcgggaatggctgcggcctatcgtgccccgcttgctggcagtttatttatagccgaagtgctgtttggcactatgatgttggcctctctcggcccggtgattatttccgccgtcgtggcattgctggttag

SEQ ID NO: 469985 - DNA, 468 bp, Shigella boydii; identical to SEQ ID NO: 463302

SEQ ID NO: 469986 - DNA, 468 bp, Shigella boydii; identical to SEQ ID NO: 467335

SEQ ID NO: 469987 - DNA, 204 bp, Shigella boydii; identical to SEQ ID NO: 462297

SEQ ID NO: 469988 - DNA, 447 bp, Shigella boydii; identical to SEQ ID NO: 462775

SEQ ID NO: 469989 - DNA, 309 bp, Shigella boydii
atggtctggttagcgaatcccgaacgttacgggcagatgcagtaccgctattgcggaaaaagtggtttacgcctgcccgcgttatcgctcggtttatggcacaatttcggtcacgttaacgcgctggaatcacagcgtgcaatcctgcgtaaagcgtttgatttaggcattacgcactttgatttagccaacaattacgggccgcctccaggaagcgcagaagagaactttggtcgcctgctgcgggaggattttgccgcttatcgcgatgaactgattatctctaccaaggctggctacgatatgtga

SEQ ID NO: 469990 - DNA, 447 bp, Shigella boydii; identical to SEQ ID NO: 462775

SEQ ID NO: 469991 - DNA, 564 bp, Shigella boydii; identical to SEQ ID NO: 463434

SEQ ID NO: 469992 - DNA, 369 bp, Shigella boydii; identical to SEQ ID NO: 462503

SEQ ID NO: 469993 - DNA, 447 bp, Shigella boydii; identical to SEQ ID NO: 462775

SEQ ID NO: 469994 - DNA, 267 bp, Shigella boydii; identical to SEQ ID NO: 462029

SEQ ID NO: 469995 - DNA, 1035 bp, Shigella boydii; identical to SEQ ID NO: 467347

SEQ ID NO: 469996 - DNA, 225 bp, Shigella boydii; identical to SEQ ID NO: 462228

SEQ ID NO: 469997 - DNA, 327 bp, Shigella boydii; identical to SEQ ID NO: 5975

SEQ ID NO: 469998 - DNA, 225 bp, Shigella boydii; identical to SEQ ID NO: 462228

SEQ ID NO: 469999 - DNA, 225 bp, Shigella boydii; identical to SEQ ID NO: 462228

SEQ ID NO: 470000 - DNA, 1455 bp, Shigella boydii; identical to SEQ ID NO: 465244

SEQ ID NO: 470001 - DNA, 1134 bp, Shigella boydii
atgaaaatacctgaagcagtaaatcatattaatgttcagaataatattgatcttgttgatggaaaaacgaatccgaataaagcaacaaaagcattacaaaaaaatatattgcgcgtaacaaactcatcttcttctggcataagtgaaaaacatttagatcactgtgctaatactgtgaaaaactttttaaggaagtctatagcagcgcaaagttatagcaaaatgttttctcaagggaccagtttcaaatcactaaatctttctattgaagcgccatctggagcacggtcatcatttcggtcacttgagcatctcgataaggtgtccaggcactatatctctgagataatacaaaaagttcatcctctttcttcagacgaacgtcacttactttctattattattaattctaattttaacttcagacatcaaagtaactctaatctgtcaaataatattcttaatattaaatcctttgataaaattcagtctgaaaatatacaaacacataagaatacatactctgaggatattaaagaaatctctaaccacgattttgttttttttggggttgaaatttccaatcatcaagaaaaactcccgctaaataaaacacatcatactgtagattttggcgccaatgcgtatatcattgatcatgactctccatatggatatatgacattaaccgatcactttgataatgctattccacctgttttttaccatgagcaccaatcatttttcttagataactttaaagaggttgtggatgaagttagcaggtatgtgcatggtaatcaggggaaaactgatgttccaatatttaacactaaagatatgaggcttggaattgggttgcatcttattgattttataagaaagagtaaagatcaaagattccgagagttttgttataataaaaacattgatcctgttagtctggatagaattataaactttgtgtttcagcttgagtatcatataccaagaatgctaagtacagataacttcaaaaaaataaaactcagagacatatctttggaggatgcgattaaagcatctaattatgaagagattaacaataaagtgactgataaaaaatggctcatcaggcccttgcttattctttag

SEQ ID NO: 470002 - DNA, 777 bp, Shigella boydii
atgctgcagcgtcacaacaatcagcagccacttctgcatccaccgcgactacgaaagcgtcagaagctgccacctcagcccgggatgcggcggcttcaaaagaggcggcaaaatcatcagaaacgaacgcatcctcgagcgccagtagcgcagcttcctcggcaacagcggcaggaaattccgcgaaggcggcaaaaacgtcagagacgaacgccaggtcttctgaaacggcagcgggacagagcgcctcggctgcggcaggctcaaaaacagcggctgcattgtctgccagtgcagcgtcaacaagtgccgggcaggcctcagccagtgccaccgccgccggaaaatcggcagaaagtgctgcatcgtctgcttcaacagccacaacgaaggctggcgaagccactgaacaggccagcgcagcagcgaggtctgcttccgcagcgaagacatccgaaacgaacgcgaaagcgtcggaaaccagcgcagaatcctcaaaaacggctgccgcatcgtcagccagttcggcgtcgtcatcggcctcatcggcgtctgcttcaaaagatgaggcgaccagacaggcgtcagcagcgaagggtagcgccacgacggcatccacgaaggcgacagaggcagctggcagtgcgacggcggcagctcagagcaaaagtacggcggaatctgcagcaacgcgcgccgagacagcggcaaaacgggcagaggatattgcatccgccgtggcgcttgaggatgcgagcacgacgaaaaaggggatag

SEQ ID NO: 470003 - DNA, 636 bp, Shigella boydii
atgatctggcagcctgagttcacagataaaacactctccaggaaacccggggcggttcaccccgcaggacgaagtgggcgtcgtgtgcgtaaacaattcgccaccaaaggcgaagcactggcttttgagcgccacacgatggaagaaaccgaagcaaagccctggctgggtgaatcagtggatcgtcgaacactgaaagacgtggttgagctatggttcaaactacatggtaaatctctgacagctgggcagcatgtctatgacaaattgctgttgatggttgacgctctgggcaatcctcttgcaaccgatctcacctctaaaatgtttgcccactatcgagataaacgcctgacaggcgggatctacttcagcgagaaatggaagaaaggagcaagcccggtcaccattaacctggagcaaagctatctaagtagtgtttttagcgaactatcccgtctgggcgaatggtcgtatccgaacccactggagaacatgcgaaaattcaccatcgcagaaaaagagatggcatggcttacccatgagcagattgttgaattgctggctgattgcaaacgtcaggacccaattctggcactggtagttaagatatgcttaagcacaggcgcacgctag

SEQ ID NO: 470004 - DNA, 447 bp, Shigella boydii
gtggcgttcattattgatgtgtttgccggatacatcgtggggtggcgggtctcatcgtccatggaaacgacattcgtgctggatgctctggagcaggcgttatgggcccgtcgaccgtccggcacggtccatcacagtgataaaggttctcagtatgtatcgctggcctatacacagcggcttaaggaagccggattactggcatcaacaggaagtacaggcgactcgtatgacaacgcgatggcggagagcatcaatggtctttacaaagcggaggtaatacaccgtaagagctggaaaaaccgtgcagaagtggaactggccacactcacgtgggtggactggtataataatcgacgattgctggaaaggctgggccacatccctccggcagaagcagaaaaagcttattatgcttccatcggaaacgatgatctggcagcctga

SEQ ID NO: 470005 - DNA, 1071 bp, Shigella boydii; identical to SEQ ID NO: 463216

SEQ ID NO: 470006 - DNA, 345 bp, Shigella boydii
atgaaatgccccactgcccaccacctgtgccagcgcaccggctgccgcatgttgcgtgataccattcccggatatggcccggctgagtttccacaactgcccgacagtgacaccggcataatgtcccgtcagcgccagctgacggttaaattcctcgccctccttccggccgtcatgccaggctttacccagacccaggaccgccgcgacaagtccgccaataacgccgccagtcatcatgcctttcggcgacatcagtgcgcctgtccatccggcacggttagccagcgttatcccggatcccctcagcgcaccaaaattgccgcgcgccatctgactgattaa

SEQ ID NO: 470007 - DNA, 222 bp, Shigella boydii; identical to SEQ ID NO: 463157

SEQ ID NO: 470008 - DNA, 222 bp, Shigella boydii; identical to SEQ ID NO: 463157

SEQ ID NO: 470009 - DNA, 867 bp, Shigella boydii; identical to SEQ ID NO: 463163

SEQ ID NO: 470010 - DNA, 201 bp, Shigella boydii; identical to SEQ ID NO: 463154

SEQ ID NO: 470011 - DNA, 441 bp, Shigella boydii; identical to SEQ ID NO: 463153

SEQ ID NO: 470012 - DNA, 327 bp, Shigella boydii; identical to SEQ ID NO: 5975

SEQ ID NO: 470013 - DNA, 528 bp, Shigella boydii; identical to SEQ ID NO: 466966

SEQ ID NO: 470014 - DNA, 327 bp, Shigella boydii; identical to SEQ ID NO: 467275

SEQ ID NO: 470015 - DNA, 528 bp, Shigella boydii; identical to SEQ ID NO: 466966

SEQ ID NO: 470016 - DNA, 372 bp, Shigella boydii; identical to SEQ ID NO: 462601

SEQ ID NO: 470017 - DNA, 294 bp, Shigella boydii; identical to SEQ ID NO: 25632

SEQ ID NO: 470018 - DNA, 225 bp, Shigella boydii; identical to SEQ ID NO: 462228

SEQ ID NO: 470019 - DNA, 222 bp, Shigella boydii; identical to SEQ ID NO: 463157

SEQ ID NO: 470020 - DNA, 210 bp, Shigella boydii
atggatatcaatgcctggctggtttcccgctcactgtggaatgcggatcagtctaaggatgtagagacgctttgcgcatccgttattacaacatggtcgtatgatgccctgggggcgggggcggagatggttctgtcgctgagcggtatgggggccattgagaatgccggggatttggagcatgaggtgctgacgccggaaaagtcctga

SEQ ID NO: 470021 - DNA, 330 bp, Shigella boydii; identical to SEQ ID NO: 96322

SEQ ID NO: 470022 - DNA, 327 bp, Shigella boydii; identical to SEQ ID NO: 5975

SEQ ID NO: 470023 - DNA, 447 bp, Shigella boydii; identical to SEQ ID NO: 462775

SEQ ID NO: 470024 - DNA, 321 bp, Shigella boydii; identical to SEQ ID NO: 462743

SEQ ID NO: 470025 - DNA, 447 bp, Shigella boydii; identical to SEQ ID NO: 465237

SEQ ID NO: 470026 - DNA, 186 bp, Shigella boydii; identical to SEQ ID NO: 463326

SEQ ID NO: 470027 - DNA, 447 bp, Shigella boydii; identical to SEQ ID NO: 462775

SEQ ID NO: 470028 - DNA, 447 bp, Shigella boydii; identical to SEQ ID NO: 462775

SEQ ID NO: 470029 - DNA, 267 bp, Shigella boydii; identical to SEQ ID NO: 462029

SEQ ID NO: 470030 - DNA, 225 bp, Shigella boydii; identical to SEQ ID NO: 462228

SEQ ID NO: 470031 - DNA, 267 bp, Shigella boydii; identical to SEQ ID NO: 463614

SEQ ID NO: 470032 - DNA, 312 bp, Shigella boydii
atggatacggggagggcaatattatccgctcagggcgatgccatacgtaatatctatggtgagttcaagactgtaaacaccgaaaattattcaatatgggaatcagtaggcacgtttaagggggcagtagtgcctttgaacccctcaacgaacaatagttatttctccttagtcagaagtatggtgactgaaagaacagatggcactgtttacccaaaagtgattggtcttgatgcttcaagaattgttccaactgcaaacgaaaaccgtcctcgtaacattgcctttaattatatcgtgagagctgcctga

SEQ ID NO: 470033 - DNA, 603 bp, Shigella boydii
atgaataaagccgtattaaataacgaactcattgccataaaagcgggagacattaccatttataattatgatggtgaaacgcgggaatatatttccacatcaactgaatatcttgcggttggcgtcggtatcccggcatgttcttgtttagatgcaccagttacacataaagctggttatgcaatctgccgttctgcagattttaactcatgggaatatgtgccagaccatcgcggtgaaatcatctatagtaccgaaacaggagaatcgaaagaaatcacagctctgggtgattaccctgaaaatacaaccactatcgccccgttaacgccatacgataaatgggatggtgagaaatgggtgacggataccgaggcacagcatagtgccgcagtagaagcggcagaagcaaagcgccagtcgctgattgatgctgcaatggcttccatcagtctgattcagctgaaattacgggccgggcggaagctgacgcaggcagaaaccacccgacttaacgctgtgctggattacattgacgcggtgacggcaacagataccagcaccgcgcctgatgtcatctggcctgaactgccggaggcgtag

SEQ ID NO: 470034 - DNA, 441 bp, Shigella boydii
atgcagaaatatattttcagtgccgataaaaatgcgtttttccctgtggagcttaaaatcgcttatcaggaatctggcgaatggcccgatgatggaatcgaaattgacgacactgttgccgccgaatttatgaagggagcaccagaaggaaaatacagaggtgtcatcgacggaatgcctgcatggattgatattccaccgccaactcatgaggaacaaattgccgcagccgaactggaaaagcagcaattgattaatcaggtcaacgaatacataaacagtaagcaatggcctggtaaagcggcgattggtcgcctgaaaggtgaggaactggcgcaatataatttgtggctggattatctggacgcactggaactggtcgatacttccggtgcgccagatattgaatggcctacgcctccggcagttcaggccagatga

SEQ ID NO: 470035 - DNA, 561 bp, Shigella boydii
atgcttattggctacgttcgcgtatcaacaaatgaccaaaacactgctttacagagaaatgctctcgaatgcgcaggatgcgagctaatttttgaggataaagcgagcggcaagaaggcagaacgccctggtttaaagaaagtccttcgcacgctttcagaaggggatacccttgtggtttggaaactggatcgcctcggaagaagtatgagacatctggtagtgcttgtagaagaacttcgtgatcgcggcataaacttccgttgcttaaccgattctatcgacacaagtactccgatgggccgttttttctttcatgtgatgagcgctctggctgaaatggagagagaacttattattgagcgtacacgtgcagggcttgaagctgcacgagcagaaggtcgcataggaggacgccgttcaagattcacacctgaatcatggcagcaaatgcgcagattattagaaaaaggcatttcgcggcagcaagtatcaatcatctacgacgttgctatatctacgctatacaagaaatttccggcctcatcatttcaatcttaa

SEQ ID NO: 470036 - DNA, 324 bp, Shigella boydii; identical to SEQ ID NO: 401079

SEQ ID NO: 470037 - DNA, 450 bp, Shigella boydii; identical to SEQ ID NO: 401078

SEQ ID NO: 470038 - DNA, 618 bp, Shigella boydii
atgtcaaataaaagccagtatgtactgcttaattatgatgaactcaatgagaaaggtctttcgaagctggtaaaagagatttcgaagtccggttataaaatcgccaaagtggttcctgccgggaatggcaggaaaaaagacggcattatgacccgtactttctcactggttggcaacgatgagcagacaatggaaatccaggttaatgacactggtgatatttctggtatcaaacttaacgggaaaatagttccgttcaaaccagtcaaaaccctggctgcattaggccagtcaatcgctggattattcaatcgtggcgcaacatcattccaaaaaacgttggcacgtaaactcgccagagccgcgaagaatattgatgacgacaacaaaaaacgtcagggtgtgaaatcgaatgcacagaaacttgcggaagcaaaacaggcgcgcgattcaatccaggaggatatagcgcaggcgaaagaaaaactgacgcaggtacagggcaactccgataaaaccacccaggagattggaaatgtcaaagctgctttggcacaagagcaagcccaaacacgctcgctgaaagaagagatagcacggctggaggatgaagcatga

SEQ ID NO: 470039 - DNA, 1944 bp, Shigella boydii
atgattaaaaatcctattcgtataaatattcagtccacctttgctgacacgttgacggggtacgtcccaggaagatggagtcgtgaagagcttactgatgatgaccttctcctcgaagccgctacgcttgaagacatcgaactcgcctatatgggtaatgaaattctcgttgaaagcgatgaggcgatgtttgaatccatcacaacgacgaggatcaggcttgcgcagaccatgcgggcatttgtccgctcactaaaccgaggcctcaacggtacaaatatatctgccggtactgatgaagttggcgaagatgagaatgggcgaaacagcattggtggagcgataatcggtcgtgttcgtcgggtagcaaacattccggtattaacggcacttatcccgcttactgacggtcagaccaccagcattatcttccattcccccacggcagacggtgcaaagattaaaagcagcgatgaactggtggctttccagttcctgcttaataaacgcaatgtaactcatgtagtagcccccatcggcggacgagatgtttcattgagtcaggtatgccaggcgctatcgaacctgattgagcgcaatagtgaaaagttcaaaaaagctaaagcccgtcaggacaaaatgaaggcagatattgacggttatctaaatgaagccgacaaattggcagaagagcgttctgtattgattggccaggtagatacagcgcaacaaggtttagctgaaaagcgagaaagccttgtcgaactgcaaacaaaattagatgaccagaaagcacttaatgcacagttgcaggccaaacgtgatcaacttaaatcagcaaaagaaaaggtgaaaccggaacgagcgttcaacgaccagttgcgccgggtgaaaagcaatctttctaccgaaggtcgagcgacgcttgataatggagccgaggttatgtacgtcagcactggtgctgataattatgtcaccatagcagcaccagaaggcaactacagcattgaagcaagcgacgttaatggtcagagcatggctgatgccgcaacaaaactactgaaagcctatcgcgaacataaagctgaacaatacaaagtggatgtgttgccaggccagccagagccatccgttcagccggaactacaaccagatccagaaccacaacctgggccgcaatcagtatcacagccagagactcaggatgtaggtaaatatcgctatgcactgcaatcccgtccggcggctgtaggtgcggtgccggaaggaaataaaggcgtacttgaccgtcctgaccaggcggatccgtattacgaatatgctcgtcacgggataattacttatgaccgaaaactgacagatgaagaagtcagccagtatgaattacgctatctgcctgatgacgatgaactgaaagggatggcgaacgagctggttgcgtccagcatggtaaaacatattgatggctatgtagatctgtttggaagtgacctgaaaacattcaaggcgcaagttaaaattcttttccgcaaagcgttcccgaacgtggcatatccacttggtgatggggagaaccttttcattatggacgtgtataacgcccttcaaaatcattcaagcgaagtaaaaacagatcctgtagttgagccagaatcgcaacctgcacaagcaccagaacaggagccggagccagaagaagcgggtgaatcagcaagcgaagctgaccaggaagcagataaagcgcttgagtacctgaaatccgttccggagcagttcacatcccgcgatctgacggtcataagtgctgaacttgatcatgtgcaggaagctgcaaacgctcttatcagtgctggtcgatatgacgagaacgaagcaactgtaggtgcagccgttgactacctgatcaatattctggctgaaattcagcagggaggtgcttaa

SEQ ID NO: 470040 - DNA, 369 bp, Shigella boydii
atggctatctctgttttagaacgcctgaaattaggtaaagagctatcagatctaatgcaggcgcagaaaaccgcgccagtattacaacgcgtctcaattggtaagcagattgttgatgtgatgcttaaactggggcttggggctgcggcccaatcagtatcggatccgcaggcgcagccagatactgttgcaggtgacattcctaagatagtgacagacttccttggaggtgcattcacaaagtccacgcaaatggaatttattgatgcgctacgtgggatctcaaactatgtaggcgagttccttacgttggaacaggctaaagagcagaccataagctgggtgaaagccaacggttatgcaggctaa

SEQ ID NO: 470041 - DNA, 963 bp, Shigella boydii
atggatattttaaattcagatgccatcactttcaacatttttgagcggaaaggcaacgctgagtaccataagcatatcaaaggccaccagctaagtttctttgcccggcacagtggattcctgtcgccaacacacggttcgatcattgccgaattttccaacctggcagggtcaactgacgaatacataatccgtcgctcttatgctgatatggctgccattctgggccgtagcgtctccaccgttcgccgtgcattttctgaggctgttaaatgtggaatgctcaccaagcaacatcagatcggcagtaacaatgctcaggtttgtaatgtctaccgcttcacccctgatttcctccagtttatttccatcgttttggagactggacgtaagcagggcgtcaaaattgttaatgccacgaaactggttaagcaactgatttcaaaggttcgttctttttttgaggtcaatgcccccctgttcaaaatgaacaactccccccgtgttcatgatgaacagccaatagaaaagaagaataaaaccttaaccaaaaaaagagaaagatcatgccaggttcagccaaaggcttcccaggcggtgtccactcagttaaatccagactttctgagtgaagcgcatgttgttagcgaagagcagataaacagccgcatagctgctgcaaaagcgcgatccgctaaacgtcaggctgacgaccgccacgcgaaacgtctgtcactacatcgggctgctgaaaagttagctcataaaattgcctggattcgcgggacagggaatgcgggaaaggccaataagactgccaacgggctggatttttcaatggattattcggcctatcagggctgccagaccgttgacgaggcgttaaagctcatgaaacaacgaggcaccaaaactgagtttgatgatcgtgagtggcgtatccctgctggattccgaggatga

SEQ ID NO: 470042 - DNA, 435 bp, Shigella boydii; identical to SEQ ID NO: 401068

SEQ ID NO: 470043 - DNA, 261 bp, Shigella boydii
atgcgaaagaatcggcttttcacgattgatgatctaaaagattacgcattgtcaaagggatacgaacttgactttcatcgttataagcgtgtttttacactgataaagattgatagtcctaatgaatggagttggatttattatcctcatactgaggataaattggtcgaacgtgttgataatttaaactttgatgggtggaaagtagccattgataagacaattagcagtattaccgaacaggataagataaactattga

SEQ ID NO: 470044 - DNA, 306 bp, Shigella boydii
ttgctgagaagtcactacgtcagtctggcattcgcagatgacgcaggcagaacgcgaagcatcgttatgaagagcgcccgcaaagcggttactgccccgctcatcagggaagccctgaacgaacttgatatgaatgaaaatgccacgctgctttctgcgtgctggatgggaaagatgtccgatccagaatacgccaatggcgttaatcagccaggtttcttgcgaatgaaatggttgctggctgcaatccttatcttgcttttagcccttgcctcaatctggttatggtccgtaatacatccttga

SEQ ID NO: 470045 - DNA, 1212 bp, Shigella boydii
atgagtcagcaagcagtaacctcctccaccgaagacatcatttctgcggatatcgatacactccgcagccagatacagttgttacaaaagcggactgccggagatgacctgtcaaaacgcctttttgaaagcactcttgccacagcagataaccttgtaaatgacatcaatcagctactggatgcgggtgcatcagactacaacgccctggttgatcagttcgaagaatttcagcgtgtcgttaacgccagcctgatcagtttttcccatgctaccgggatgagcgccacggcggagacgctgggtgaaatcattactgagtatgcagaacagcataaaagagagatcggtacacttgaagccagtctccagcaggccaacacgctacgcgcagcggcagagtcagatttacggcgctataagaaagacttcccgtccagcctggcaaaacgcctggatgacagcgagagagataaccgttcccttaaaagagaacgccgcgaacttaaagagcgtgtatccgaactgaacaaagtgagcattaaataccagggcgagaacgtaagcctgcgtaagaaacttgcttctgctcaggctatcatcgagaagttaaagagtgaatgttctcagcttgggtatgatctgaatcgcgcctgcggtatgccagaacgcccggaatctttcccgctcatgtacgatggcagggatgcggttgcttatattcacgaatacccacatggcctggttgcagaaaccggacagcggggagaatcattacttactgctaactatcacctgcaaattagaacaaaccgtttgctgacaatggatgtgatcccgtcagtttggggaacgccactttattaccgaatgcctgagtttgccaaagactggaacaacgacatcgacgaatgccttcacaataagattatggcgtaccttgaagaggattatcctcgcttgcatcgacgcattatggatgccaaagatgccccggttgacgagttaaaaatgcgtcctgagacgatggaaggcatcaaggacgccggatttgatactgttttcagtgttgcctgcatcccaagcaactttcatgacgagttgccattcatgcagggcgactgccgacaggaaatcattgattcctgtcgggtatgggcgaatgagtgggataaaaagaacggcggtgttgaagatttgtacgggagatga

SEQ ID NO: 470046 - DNA, 507 bp, Shigella boydii
atgactccccgttctttaatacacagacgggaaaactctgcggtcgatttcttgacggggggcgactcataccccgtggcgtcaggcttcttaggccgctaccatcatcagatcatcgtttgcatttactttaatggtcggtttctaaaccgccgcaaagtcgctaaccatgacgaaaacactgaaaaaaagcccacccggagatgggcaaacatgagtacatccacaggtaattcaggcgtgtggttatggcgatcacttaggcgtatggtcaacctgaacacccggtgtcacacactggcaggaagaaaaccaagccatacttaccgcctcttttctgataaccacaacatacaagccgactgcctgaataagactttcttctcaaggcccgcaagaagcagtctccaatcggcttgtatgttgcggcgggggtgcctccccctggggatatccccggccttaccccattctttcaagacacaatgcaaggccacatccgcatag

SEQ ID NO: 470047 - DNA, 132 bp, Shigella boydii; identical to SEQ ID NO: 102832

SEQ ID NO: 470048 - DNA, 576 bp, Shigella boydii
atgactgttttggctaatgcaacgtatacagagcaggatcgcatcctgagtgagttcattggacgcaatgaacgctggtcatgcatgggtgacgctttgtatcacgcactgtcaaacaaaggggtcaacatcgaaacggcgtcaaaaggcgattcccatgctgtgacagtaacagttcgtggatgcagccttaccgaagtccatcccgaaccttatgttgcgcttgccgaggccgctgtaaaactcctcaagtttcataaacaggctgtcgctggtggactttccattgccaaagcaaacattcctttttctgtcgcaatccactggttaatgaacggattagacgcacgccgaaaatcctggcctaaaggacagtacatatcactcgaacccggctgcattgaaagtaaggacaagatggttagctttcttccggaaggaatattcaacgtgcaaaagggcgtcaaagtctccattcttccacgtctggtaatgatggatggtgctttgcaagcacgttctgactggtttgccagcagcgtagacattatggcaactgactgggaggcattttga

SEQ ID NO: 470049 - DNA, 393 bp, Shigella boydii
atgtacgaagagcagaagctaacagttgaacaagctaaggaaatggactggacgttgcttgactgcaaaatcacgtcatgtcatgcaggtgaaacaaaactaggttacgaaagtaccgtgcatgggtatgcaacccttgccgttcgtgacgtacgtattcgatttaactggaacgcaaagcaactaacgccgttcagagcacccacaggaccacttaatgttgatcaggactatctgaccgtaccacaagttgaaggctatttgctgtcggaaaacgatgggcgcaaggctgattatgaaagcgagttaaggctggcgcaggcggtagtcaacaaaaccaaagggaagtggtccgcaaaagtaagacatattgttcgtttaagcagatggtag

SEQ ID NO: 470050 - DNA, 393 bp, Shigella boydii
atggataaaatcagcagtgctgaaatagcggatatcatgatcaggaaagactgttatcttacagtcactgagataaccaccctcgccaaagataaatatcctcatcttcacgtatcacgtgtcaatgttaacaatatcatccgtcactttgttcgttcgagcagggctatttgtgagcgcgatgaccgcgtatacccgcgcaaatactggcttcatggccttgacgggtatcagtttaaggtacgcggacgtacaccgcagtttgaccgcctgcttgtaaagaattccaaccgatttatctttggcaagaatcagacggaacgccgtgaactggtgaacatggctaaccgattgtggaatgaagccattaaacgccgtggtgttgctgtatga

SEQ ID NO: 470051 - DNA, 1365 bp, Shigella boydii
atgacactggttaattgggaagagcatcgtgcccggtttctggcgttgaaagaggaaaaagggatcacggtaaaggaatactgtgaacaaaatggccttagtttcaacactgccagaaagcatctcaatatgaaaaaaaatgaggtgcaggccaaagttaaaccatcaaagaaccgcgccagaacacgccagcaaccccgtgctggtgggacaaaaagacaacaacgagcgagcggaaaagaatcagaatttacaaaaactgacaataggccagcgacaagtcaattcagggagatgccgcgcaagcgtaacgcggatcatgctgataagcccattgataacagtgagttagtggatttatcaaagggatcatttgccgataaaaaagcaaaaatgatcccagaaaaggataaaaaggcatcttcaagtcagagatcatcgcaaatgatccccggcgaatcagcacaatgtgccaccttgccgtcgaaaaatgtcgcccgtgaaatgatgcagaacggtgcggctgaacatctgcgtaaggccatcctgatggctcaggaacgcgccatagaataccagtcaattgtagacattgaggcggcacggctacgtaaagaaattgatattttaggcgatggcgagccggaagggatacacccggcccagcgtctctgcggcctcatgcaggatgccgcctattacatgaacgacttcatcagccgcctcgcagccatttatcagacagagcaaaaactccagcaaggccaggaaaaactgattcagggggcgcggcagcaggcatttaaagaggctgaggccagagaaaaactggacattgcacgcctacaggcagagcaacgtagcaaagagattgactatcgtcttggcgctgatgcacgcgccgccagggttatcgcaaccgctatacgtatgcgcgagcgcgaagaactggacgatataggtgttgcggaatacatcgagcggcaaggggtaagtgttcctgcaatcctggctgcgcgtgcggcgaaagccatcacgcttctggaaccgccaatttctgacagcaatgatgttgatgatgaacaactggacaaagaagcgcgggagttcgcctcactccaggctaaccatccgcagtggttggcagatcgccgtgccgatgtggcaacaatagttgaagacctggggtgtggtgattatgaccaaaatggtgagcgtaaggcaggtgaattcgagtccaacgatgatgaattggatatagacccctccgcaacggctgaaatttacggcgatttcgacgcgtcagatacagagtatgacggcggatatgatgaaatcgccatagaatcgccagaggccgattaa

SEQ ID NO: 470052 - DNA, 1038 bp, Shigella boydii
atgagtaaaagaacaatcgagagagagtacaaacagttcctgtctgttgctgaacgttggaaggatctggtggtatcaaactcagtgttccatgacaccagttataacggagaggatttccggcatgttgctttaacgcatgatccagacgtcttgaaagaagccgaaaaatgcctggttgcctggaaagcctttgtggacgtatgccgcaatgctggtgggaaaaaactgaatatcgttgagacagtgtatcttccgatcccattcatcatcgaggacacgaaccaaagtacgcatattgtcgtatctacagcttcgactaccagaacgtttacgcgcgagagtttgctgaaaaagtacgataaagtcattaagaaaagtaaaaaaagccctatcttttctcaggtcgtaggtgcccttgaagaagaaagacatttctttgcaatggagccggaaggcgaactctatcgcgcacgaaaagatggctataccgatgtggtgctgacctctgctctcacatctgacaacaccctgtctcgcttaagagtgggtgcgcacggggcactggtgttctcacgcaataaagaattgaagatccctgtggttaataacgtagatgaacgccgtagtattaccgtttattccggtgtgaagcctatcccttgtggcccgctgggcgattttagcctgtatcgtgtgaacgacatcaccaggaatcagccaagctatgtggctaaggcctatattctgcgtagcattgagtccagaaacctgagttttaacaacaaaagccaggcgcttctgaactctacgcctcctgagatccgccaggtcattgaaagaaaggtgaacgcggcgagagaggcgcttatccgcctggaaaaaatggacatggagttgattgatgtcatgatggcatcaggcgatgacctgacaggtgtccggctgaccgatgcacgcaagaaatacggcaaagaaattgaggaacgatacggatacacgttcaatcaaacaatgtcagcaacaaaacttcgttaa

SEQ ID NO: 470053 - DNA, 1029 bp, Shigella boydii
atgagtaaacttattgtctccggtaattctggcatgtttcttcgtgatattggtgctgagtaccaggaagccgccaaaaatttcatgcagttccttaatgaccagggcgcttactcacctaatacactgcgcgatctgcgccaggtctttcactcctgggcgcgttggtgtcacgctcgtggtcttgcgtggtttccgatctccccggaagctgcccgcgaatacctgcttcaactgcatgatgcggatctggcttcaaccaccattgaaaagcattacgccatgctcaatatgctgttgtcacaatgcggactgccgcaactctctgatgacaaaagcgtatccctggcgatgcggcgcatccggcgcgaagctgcaaccgaaaaaggcgaacgcacaggccaggcagtgcccctgcgctgggatgacctgaaactgctcgacgtgttgctgtcccgttccgagcggctggtggacctgcgcaaccgggcgtttctgttcctggcctacaataccctgttgcgtatggctgaaatgtcccgcgtgcgtgttcgcgatctggaacagactggtgacactgtaacgcttcacgtatcccacaccaaaaccatcacgaccgccgccgggcttgataaggtgctctcccgccggacaactgcggttctcaatgactggctggacgcgtccggactacgtgatcacccggatgcgatacttttcccgccagtacaccggagcaacaaagcgcggatcaccaccacgccattaaccgcgcccgcgatggagaagattttcagtgacgcctgggcgctgctgggtaagagtgatgccacccccaataaaggccgttaccggacgtggacaggccacagtgcgcgtgttggtgccgccatagatatggctgaaaaacaggtgtctttggttgaaattatgcaggaaggtacatggaagaagcccgaaacactgatgcgttatcttcgtcgtggcggtgtgacagcaggtgccaatagccgcctcatggattcatga

SEQ ID NO: 470054 - DNA, 255 bp, Shigella boydii
gtggtgttcggaatcatgacagggcttgagaccgtacctgtacttaccctcgaaaagaaatggtcaaacctgggcgaagctgaaagctacgtccggcgagtaaccgtcattgctgctgaaaaactcctggcccactatcaggaaaactatcgcgccatgaccgagaagattgatctcgtattttcccgccctacaaccggattcattgctccggttgatgcccgctctcattatccagtaagggggcgcaaatga

SEQ ID NO: 470055 - DNA, 492 bp, Shigella boydii
atgaaacactattacccatctcttaactgttacccgtcttcctcccctgagctatccggtaagttgctggcgcttcttactgagtcgccggaagcatggctaaagcccgccgatctcaatctccagatacaggaatacggttatgagactacgcgcagggaactaaaacacctggtgtcgtttggttttcttcgcgcccataaggggaaaggctatcaactggctattacgccggaagaagcccggcaactgtttgcctatcgtgaaacacaaacccagtctcgtgtcgttgctgaaattatccgtaacggcagcatttacgcccgtaaattctggctgtccggtggcggcgatgcgtctcagttcctgcgtgccgttcgctctctagaagagcaaggcattatcgaatccacaaacgtatccgtaccgactgccccgcatattaaacgtcgaatttacaccttcaccaaaagagcaaagaagcatgattaa

SEQ ID NO: 470056 - DNA, 441 bp, Shigella boydii
atgaataacatggcaacgaaagagctttttaagttccttcccaaatacaaaactcacaaaaaaaatggaaccacggtcatcattacggatgacaacggcgtgatgattaatcttaccgggagcgtaactatttctgctggtggcatcaccacccagcaagaagaaatcgaccttgaagcagccgacttttctgacgcgctgatgtggctgaaggatggcaagaaagttgctcgacgcggatggaacggcgaaaaccaattctgctggctggttcccgaaggacagtacccggcacgaatggaagccattaagggatatttccccggcgatctcgttccgtatggtgcttatttcgccttaaaaaatgcacaaggtgtagttgttctgtgggttccttctgtaggcgacttactggcatgtgactggtttgtggtggagtga

SEQ ID NO: 470057 - DNA, 654 bp, Shigella boydii
atggcgcaaaaagaaatgaccagaatcactgaagagcgtatatcagagattatttcccgcatcgaaatgtatggtcacggtgctggatatacggcagatgaagtattggaaatagcccagcagatgctggccttgagacaaaaagagcaacatgaaagtaatacgtgtagattgaaatttgagcagtggctggaacagcagcgcggaaagatcgatgtggactgtggttgtgtgtccactgaaacattcatgcactggctgcgggtagcttacgaggctggcaactatccggatattccggatagttcggcgcaagcaccagggaaggggggcttccccggagagcggatccgaattaagccgcatgtttaccgtgaactggttaaccgcctccacgatacagcgatcaagtgtgctggcacccagcaattacgggaaagaattagccgcattttgggcgaagttattacaccagatcgtcataaacaagccgagaaaagcggtctggaaaggagtcatcttgaggcggcattaaacattaaaccggggcatacgctaggtgtcattgatgccatgttggtccatgaaatggcaagggctttattgccgctggtggctgaaaagcatgaggcggaccatgccaacgaaagctga

SEQ ID NO: 470058 - DNA, 375 bp, Shigella boydii
atgatgacattcaaacattttcttgaccgtccattatgggcggcagccgcaggctatgactttaattatatggattgcatgtcttatactgccaatgcatacgacaattcgttcagcctgctgtataattctttaagaatattgccggaaacagaagttggagagcttcatttatggctattgggctttatcacggctgtcgttggtattgctgtatggccttttattttctggctggtggctgttgtagtgtggtttaagtgcaagacataccggaaaaagtatttcttaggtgatggaatgaccgatattgccaaaatgaacattgaaaaatggactaaggaatgtgaaaagaaatggcgcaaaaagaaatga

SEQ ID NO: 470059 - DNA, 159 bp, Shigella boydii
atgaaatataaaaagttttggtctacgtttctatttgtcagtgtttgtggcttttttgttgctttggctggtggcgtagaatggggaacggagaactgcggcgcaatggctggtgacaccttattcctagctggcatgttagcttttattctttcatga

SEQ ID NO: 470060 - DNA, 294 bp, Shigella boydii
atgtggcgcggtaataatcatggcggaagtcagatgatacttaccgaatatacgttcgaccacaaaaccaataaatcacgttcagtatatttgcttcggcacaatagccgcgtaaggaataccgtgctggagcaaaatctgaccgttgaaatggataattttgggaacttcaagccaacaatagcgcttgatgattttcctcgtggtttaagcgaaagagaagcaatgcttaaattagcagaatggctacagagattaagtattgctattgaagataactggagcaatccgtaa

SEQ ID NO: 470061 - DNA, 282 bp, Shigella boydii
gtggctaacctgcaacttgccgtcaaaggtgaatacttcgatgccatgattcgtggagagaaaacggaagagtatcgcctgtgtaatgactactggaataagcgaattatgttccgggagtatgaccgcctgattatcacaaagggatatccgaagcgcgacgattccagtcgcagaattgacgtcccgtataacggatatgaaataaaaacaattacacatccacacttcggtgataacccggtaaaggtgttcgcgataaaagtgaagattaatagctaa

SEQ ID NO: 470062 - DNA, 555 bp, Shigella boydii
atgaccatttctacaaaaaagcctctttatgctgaggttcacaatgttcctgatgattatgagttcactgacgaggaactaaacagaattattgcaggtgatatgttcactcctcgtcaggacgcaataatggcacgggagatacagaaactccgcgccgccatgcttcatggtgcagaacctgtaaaacagacttacaagttgcctcccctgtcatccagcgaagtaaacgacgcggcatggaaattacacaacatgctgactgaacacgtcccgctaaatgggcgtcagttcaacaatctgaaaggttgcttctatgaggcattaaaggtcgcaatgcgcaactatccggtaactccggatggttggataagctgtagtgagcggacgccgaacgacgcgcagtggtgcgtagtgaacacaaaatacgggtattacgtgcaatgctggtctgaaggtcaagggtggcttggtgatgatatcagcatccctgaatgcgatgtaatcaattggatgccgctaccggaacctccgcaggaggttaaccgtggctaa

SEQ ID NO: 470063 - DNA, 618 bp, Shigella boydii
atgaccactattaccaaagagcgactactgacaatcaagcagtggcgcgaaacatacggacctggtagcaacgttgtactgccagcagaagaagcggaagaactggcacgaattgctctggcatcgctggaagcagagcctattggtgaggtttcagagaagcgactcggccttgttatggatggaacggtagaccttggcgggaaatcaacttatcgcatcattaagggagaaaaaacgatgaagttgttgccgctggggacgaagttttataccgcaccgccagcgccgatagcgttggaggccattgaaaatgcaatagaatacatccgcagtatcgcttttcacatcgatgaagacgattaccacggcaaacatattgcgtatttcatgcgacaagcattggcctggctggaagggcattcatgcagtgatgacagtcagggcaaatccgataattcaccattgccgcgctaccaggtgatcgaattaacaatgctggttaaacaattggtcagccaactgaaaaaagcaaaacctgattgcaaattacctgatagggcgatggattatcttttgcgaaacggactggtaagtgcggaggatgttttacgatga

SEQ ID NO: 470064 - DNA, 195 bp, Shigella boydii
atgaataaagcctccccagtagagttaagagtgagcatcgaaatggcgcatagcctcgctcaaattggagtcaggtttgtaccaattccagtagaaacagatgaagaatttcaaaggttagcggcatcggcagcacaaaagctggaaatcatggcggataaagcagagaaagcggaaggagcagacagtgagtga

SEQ ID NO: 470065 - DNA, 276 bp, Shigella boydii
gtgagcattgagccaacaattacggcaggaactgctttgcatacagggttggcacttatcggctgggtttacatcctttttaaatcaggccagttcgttgccaagacgctttttaagcagtgggataaaagccgcgagaaatcacgccgccagaaggcagtagaagaattttatgatgcgttttctctggaaagcatggagccaggtagcaccatccgcattgctacaaagggcgacctggtaatcatgatgtatcggaaagaggaagccaaatga

SEQ ID NO: 470066 - DNA, 504 bp, Shigella boydii
atgagccaactatacgcagaaagagatgctatggagcttgatgctgctggtggattttatatccgccacgttacagctatgaccaaagaagaattacacaacaaatcagatatcgcggcagagcttggctggcgcgatatgcgaattgcgggacttgaagctaagtgtgccgcattggcctcagaactcgacgccattgttaaacaaagtgaggctgtttacgaggctggctataaccacgggcatttgcacacagttgatggcatagcctacgcggattgcgttaaagatgatttttttgcgctggcattacaggtgattgcagaaactgacacgccagaaacaaacaaattcatggcagacgcgaaggcgcaaggcgtggaactctttgcaaatacaatgcgtgatacgggtgatgatgctttttttgatgccattgctactgcttgtgctaatgccgcagttaagtttgctgagcagcttcgcaaggaggctgtgaagtga

SEQ ID NO: 470067 - DNA, 996 bp, Shigella boydii
atgagtgcaattattaccccctatgtctcgcaagagactggtgttgcagtctttaaggtagataaggccaccagcggctttatcggttccggtaggcgcttcatcatttccccgttaccacgcgaacaagcagaaaacactgctgatggtatcgtagaccttaactattcgctggtggctaatgaatccttatcaccattcttcaatagtgagcgtgtctttaccgttcttggaggcgagggttctttagtgtcatgggtaagtcgcaatatccatgaatgccaggcgcatgacaaaacactatgtagcaacaggttaactacccatttccataatggttcagccgtgcgtttatgctgggatcatgacgctgagtacatgatgaaaggctacgacaagttacgtgaccaactggcgcttaaccgggccaactggattatgaactgggcggctagtgagttaaaactccctgctgaacgtgacctgagcatggttgagcttgcgttctgggctattcgtcgcggcctgaaaaatgagttaccggaagaagccgggcgtatcgctttgtgtctgccaaaagatgaaatccctaccggaccgctgaaagagtccgatatcacctggcaaaacagtacacgtgaaattgtgaatttaaccgcagagcagatcgtatctattgccgttgatgaagattccggcctgctttatatgcgccgcccaaaaaccgtactcggaaaaagccaggcttatctccgctttgtcgtatcccgcccatgtcttgggtgtgggaataaagttaatcgcccttttatgtaccgttcccgtggcctgaacgagcacgaccgctggactgttcctctttgtgaccattgcgctcatgaggcagaaactgatgtccgggcatgggagaaaaaacacggcatacgcctttatgtagccgctaaccaacttttcgacttcgccatcgaacgcggagttatcacgtttaatacctga

SEQ ID NO: 470068 - DNA, 663 bp, Shigella boydii
atgacgaaatactaccagcgaatcgacggcacagcatttagaaatgtatgggtagtaggcgatctgcatggctgccacacgctgttaatgaatgagctggaccgcgttggctttaacccggaatgtgatttgctcatctctgtaggtgatcttattgatcgtggtcctgagaacgttgagtgcctggagcttttacagatgccctggttcagggcggtaatgggaaaccatgaagatttaatgctcgaaggtatatcgccaacggggagtgtaacgaactggttgataaatggcggcggttggttctactcgctggatacggataaaaaagcacttgctatgtcgctggtggaacgtgtcagacagttaccgtacatcatagagttgaaaaccacgtcagaaactatcgtgatcgcccatgctgattatccagacggagaatatcaatttgggaagcaggtgccttttttcactgttatgtggggcagggaacgcatcagtgagtctgtggacggcatcggtggagaaatagcaggtgctgacagattcatctttggtcactcacctgtaaacatgcctaaaaccttctggaatcagcactacatcgacactggtgcggtgtattgcggaaaactgacgctaatgctggtccagggggcttaa

SEQ ID NO: 470069 - DNA, 645 bp, Shigella boydii
atgagcaaccgtttttacatgttgtgccttcgtgaaacggtcggtaataacgcctcattccattgccacaacggttatgggtacagttcggatattgaccgcgcacatgtttatacacgggaagaagcccagcaggagtgggaacgaggacgagacattgatcagcctgtttgcgctgatagcgtggatgcaatggctgtgtggcacgttgattgccagtacatccctacagaaagcctgattgagtcagattgcactgcgtatgtggcctacaaaaaaggtagctggaacggcaacgatgtttactggcttcaacacggtggattgccaacagatgacttcagtaaagcgaccatctttagcgtcgccaacaaaaacgaaccaggaatagtttggttgccattttccattgctgatgcagcaaagcgccggacgttcaatatcaataactttaaccgcagaacaatggttcagggcgcaggtttagtgatgcctgagtggttaaaaaaacagaacagacgaaagaaatcacgtagcggtaaggtgcgctggaactgtccgtattgcggaaaaatcacctggcaatacagcccatatgattttgaaggatgtcgtgattataactgcgaagggtggatgcaatga

SEQ ID NO: 470070 - DNA, 294 bp, Shigella boydii
atggcacgtgctttgaagttttatatcgctggccccatgactggctaccctgattacaaccgcgcagcgttcgatgctaaagccaaagagcttacggagcaggggtatatcgtaattaacccagccatgctgccgaatgggcttaccctggctgaatacatggatatttgcctggcgatggttcgttcagttgatgcggtgtatttacttaaaggctgggagggatccgcaggagcgcgggcagagtacgcgctggctgaaaaattaggcctgatgactgaggtggagatatga

SEQ ID NO: 470071 - DNA, 153 bp, Shigella boydii
atgctgattgttttgagtgcgctacaccttccgcccctaactgacgcccccctgtttcatggtctgcttttgttagcgctggcactttttgaacttgggattgagctttttgctttgacgctgtttttcgtaacgatgctggagaaattctga

SEQ ID NO: 470072 - DNA, 606 bp, Shigella boydii
atgaaagaaaaactttctctatgggaaaagcagcgccagaaagcgctacagaaattgtccgatcctgagtggagagaatcacaacgggaaaaacagcgtttgagagcacagcgccagtatcagcgcacacgtgaaaaattggcttcacctgaatatcgtcaggaaaaaattgaagcagtcaggaaggcagaggaacgccgaaaagagaaagctatgagcaaggcttctgccggggaagtaaaaaaggtggcagtaaccaaacgtgcatcacgcggactaaaagggcgctcactgacagcggaagaacgcagaatacagggtgccattgccaccttaccgtgtattgcgtgccagttgcatgggaagcatagtccacacatctccctgcatcacatttttggcaggacagtcgcagatgcacataaatatgtcctccctttgtgcaaatggcatcaccaacatgcagcgccagcagaagtccggacacagtatccctggctggtacccgttcatgctgatggaaaggtaggcggtaagagtgattttatacggcacaatgccgaccaaatgacgctctataagatggcgcttgatttgatatcttaa

SEQ ID NO: 470073 - DNA, 186 bp, Shigella boydii; identical to SEQ ID NO: 401041

SEQ ID NO: 470074 - DNA, 429 bp, Shigella boydii
atgttgcgcatgaaatcttcaacaaagatgtcaaccttgaataagttggctatggcggtattaatagtttcccctctggttgctaatgccggaaatttacaagtgaagtgcggtcagttcgatataaaaatctatccgaacgccatatttctgaatgggaataaggtagacaacgcgcaccgtgaaactgaatctgacgtaatgagctatgtattccaggaatatgcagagatgggcggaacctacacgctgtactcgttggatgttccttcacgcggtgaaatgacattatcccatcaatggcagaacgccgatggcgaagccctgcgtgaggtgaagacagaaaaatgtggcgctttccactcttttaaaggtaaagcaccaaatgttaaatcagtgcttgaaaaacagcgatcaggcgagttttaa

SEQ ID NO: 470075 - DNA, 321 bp, Shigella boydii
atggcagcattaagccaaaactggatgcaatttgaggtttaccgaagtcaaggcatggggcaactattgcagcctctctatatgctggcgctggtaccggaaggacagcagttccttatccgaaaaggaatgcttcggcaaagcgatgcggcgggatttaataagacaatagaactcgaacgctcaatgacgccaaaacaagcgcctaagcaacctacagccgattgcgttagccgtgagattcagaaggtattaagtgagcagccttacatggatcatggtgttgcagaaatggctgcaaaaatgaagtgctctaattaa

SEQ ID NO: 470076 - DNA, 654 bp, Shigella boydii
atggaacagattgcggtattcagccttaccaccagcaagccattgctgatgacagccatcctgaaagacggcgcactcgtcgttaatgacgtaaaaccacttcccgcctcagcaatggaacagcggaaaaaaatccctggggcaattgcaacgcttcggaaaagcaaatttaaagtgctggtggatgaaataacccccgccgtatctgctggcaccggggcaagccaggtaacactgaaaacgcgtcattcagacggaagggccgcgattatcgtagggatggagcgttacagagagcttaaactgcaacgcctgttatcactaccagcgcaaaacaaagccgcattcgatatccctgactcaattgtagataccgaatacaactcgaacggtgaagaagtttaccgggtgaactggcaggacatcaggccggaacatattctgatgatactgtgctgctacgcaaccgtatatcacaacgtctccagtgtggattacgtgcaacagatgacaggcattgtagagaaagagcacaaaggcgggataatcgctccgttcctgtcaattcttgggtacgaaaaagccacttctggcagcgttcaacccaaatcgctggctgggcgagaagttgatgaagataccgtgatactttga

SEQ ID NO: 470077 - DNA, 330 bp, Shigella boydii
atgggctacagcagactcgatgaccgctatgttgaagacgatgttcttcgcgccctgctccatcaggaaatgattaagcgggtatctgaatttcatgctgacaatttccagtacacgataaaaatcgacgaagtatatcgatcagaccttgctgcataccgggcgtatggaattgcagatatgagatgggtattccgcgtgctggtggggcatgaatcagagatggaagaaatgccagcaggcaccacactaacacttcctgatctggcctgggtgcgcaataaaattcgtgattatgctggacctgctccggagatgactaatgcctga

SEQ ID NO: 470078 - DNA, 138 bp, Shigella boydii
atgctgggactactctgcttacagagaaaaggaatctgtgatgaaaataatgtcggtaaagacactaagggatttctgggcgaagaatcccgatgcagaacagctattaaagtgttggaatttaagccaattaaataa

SEQ ID NO: 470079 - DNA, 768 bp, Shigella boydii; identical to SEQ ID NO: 401032

SEQ ID NO: 470080 - DNA, 987 bp, Shigella boydii
atgtcgcaagagttacaacaatacttcctccagtcagtcaccattaacgataacaaagtgccgcgagactggatttttaccgctgtatacgtggaaaaagccagccttaaagcgcctttgctaaagctggaaatccacgacatcactggaacgattattgatgactggaaagcaaaatacggcgcatcgctggtggctgaaatgggggatccgcaaggtaatgcaggcaccttcaagacgacatttttcgtcacgtctgcaatgctggctggagatgttgttaccgttattgcagtcagtgaagatgtgcgtcggtttaaaatcccctcccctcgcacaaatctgcataccaacaaaacgccagatgccatctttaaggtgtatgcgggcgatcagcagatcgcaggtagcgcgatgaaacgtgctgttacctatcaccttaatgcaggtgaaaagccatcgaaaatgtttgctgaaatggctcgtgataaaggtgctttatgctggacatgccgggggcaattcaacttctaccccctggcggatctcattaagcagcagccatccttcacatacgaaggtaataacccacaggctgaatatacgctgtcaaaaatgcggcttattcagcaagaccacgcagtcacggcaaccaatcaatacagattcgtcggctactccatgaccgacggctacattgagtgcggagacagttcgctccccgtccgctacatctctgattcagacatggagacgctgcgtaacatgcagctatcgctcgtaccaaaactggatattgaagtagctggtaatccggaaattaaaccggggatggtgatcgaaatactggtgtaccggtatgaccaggaaaatcgactcgatgaatccctgccgcgaaaaatgattgtgaagaacgtcgcccactttgaagaccgtgtggggtacacgacacgaataatattaggagtaccgaacagtgaagcgtag

SEQ ID NO: 470081 - DNA, 627 bp, Shigella boydii
gtgaagcgtagagcacaaattgtcggaacagaacacccggcggggcttatgcgtgctcaggtgcgtgttttaccagactggaatggtgttccggatgaagacctgccctgggctgaataccagttacctatcggtaatgcttttgtacctacagtaaaaggtgatttggtttgggtggagttcccttatctcgacgtgaacgggcgaattgataccagacgaccactgattgtaggggctgcacaggatgcgccaggcggtgttccaaatgtcgcaccggaggcgtcaggccagggcagtggatggacgccaccagccgtagatggtgctccttcccgtccaacactctcttccacgaaggattatgttattcaccgaaacaacgtgctcgaagtaaggacggcaggcggcggatacgaaattgcaaatacggctgccgggtcgcggatcggcatgaatgagtcaggacagatatacattattggccccgctgacgttgtgattaacgcgggcggcgatgtcaacgtgaagggcaacaatatcaatgtgaaggctgacggaaacatggagtttaccgctggtggcacgtttaaagcgaaggcatccaactttgagtttgtgaactga

SEQ ID NO: 470082 - DNA, 906 bp, Shigella boydii
atgaagtcagtagcatttaaaaacatcttcatctaccgcctttcacgcgaaatcgaccttgattccagcactgttaaaaacgctctgagcaaattccagttctacccttgcggctctcaggacatggcaaaggctggatggactcacgtcctggcagaaaatttcactcacgagtaccggggctttcttctcctgcaacataaacgcgaagaaaagattctgcccgctccagttctgaaagaagaattgcagaagaaagtccaaaaactggaagaagagcaatctcgtaagttgaagaaaactgaaagagacagccttaaagatgaagttcttcattccttacttcctcgcgcattctcccgtaagtcattagctcgcatcttaatcgaccgagataaccatctggtcttcgtggaagctggcagcgcaaaaaaagcagaggatatgctggcgttactgcgcaaatcacttggcagcctgccagttatcccattcacaccgaaggatccgctggaaatcaccgtgacggaatggattaaacagggatttcctcaaggtttccgggctggagaccaggccacattaaaggcactgctcgaagatggcggcgcggtgctgtgtaaaaaacaggatcttcaatccgatgaagtgatggcacatattgaagctggtaaggtcgctacggcaatttcgctcaactggcaagatcgcgccttcttccgcctgggcgatgatatgagtattaaatcgctgaaattctgcgacgacctgtacgaccagaatgacgacatcgaccgggaagatgtcgcacaacgttttgacgctgatttcattctctttacttctgaattatcagcaatgtttgcttcactggtggaggccgtaggcggtgaagctgagcgttaa

SEQ ID NO: 470083 - DNA, 681 bp, Shigella boydii
gtgaagctgagcgttaataacaggccgctcatggtcagtctgtgcgattatacgggggcaatggttgccccctggctggactatggtgttgatgcggcaatcgtagatccacaacatccagttacacgtaatgagcgtcaagcgtccggtgcaatcctgactcgtattagtgcgattattgatagcgatgaagtatatgcattcgtgcgtaacaacttatcccgcattgtttttctggccggattcccaccgtgtacagaccttgctgtatccggcgctcgatggttttcgtcaaaagctaaaaaagatgcctcgttccagttcaaggcgatgcaagtcgtctggcaatgttacgacatggcaaaaatgatcggatgtcctttccttattgaaaacccagtcagccagatctcaaccttttggcgcaagcccgactattcattccatccatatcactacactgcctattgccgtgaagataattacaccaaaaaaacgtgcctatggaccgggcaaggttttgtcatgcctgaaccagcaacggatacatcgttgggtaaacctgataaccgaatccattccgcaccaccagggcctgatagagctaattttcgtagtgctactccgcgtggattcgcaaaggctgtttttgaagcgaataaaggggtgatctatgagtaa

SEQ ID NO: 470084 - DNA, 906 bp, Shigella boydii
atgagtaattcgcaaacatgcatagccattaaccgaccagcggtgaaagcgacaataagttatatgcgggccatccgggcgcaggaagaatatgagcgcccgatttttaaatgggtaggcggtaaattctcagagttgcccatagtgcttgaacatcttccgcacggtaagcgcttaatagaaccatttgtgggtggaggatccgtgtttaccaatgcgggattccgtcacaacctgcttaatgacattaacagtgacctgattaatttctatcaaacgttgcagcgcgaggggcattcactgatcaccctggcatatcgctttttccagaactacaacaacgttgacgcttatcttgatgttcgtgaagcatttaacagggggaagtatgaccaactgcatcatgctgccgcctttttgtacctgaatcggcattgttttaacggccttacgcgatataacaaaaatggcgagttcaatgttgggtatggcaaatacaaatcgcactacttcccacatacggaaatggaggcgttcctggcgaatgacgtaatcaaaaacacttcgtttgtatcaggtgactttgcaggcgtcatcgagtcggctggtgaggacgatgttatattttgtgatccaccgtatgaacctctgccagatacagagggatttaccagttattcaggaaacagctttcttttcgatgagcagaagcggctggtatcactgttggttgaggcccaccagcgcggagctaaggtggtaataacaaacagtggcgcgccaaaaattcgggaattgtacgaagaaaacggttttaagctgtaccccatgccagccagacggtccgtgtcatgcaaagcatccactcggatagtcgctaacgatatcattgcaacgctcaaatag

SEQ ID NO: 470085 - DNA, 288 bp, Shigella boydii
gtgattaagcctcgtaaatctgcgaaagccacagaagtaaaagatctcgagcttgaacgccgcattgaggcttttgccagtaaagctgatttggttccgggcgagcagccagaaaacaacaaagtgcttgataaagacgcgccgcgcgactttaaatccatacgtgtgagctttaatgaatatgagtatggtgtgcttgatcagttgagcaaaaaacttaaccgtagcaaattgaatctgattcgacatgccatcctcatgcttgctgagtcagaggatgcaaaatga

SEQ ID NO: 470086 - DNA, 339 bp, Shigella boydii; identical to SEQ ID NO: 401024

SEQ ID NO: 470087 - DNA, 837 bp, Shigella boydii
atgcttgattcaaaaggcgaagttaaagccttcaaaattctttcaggttcaggtactgccactccagagtccatcaccataagccgggcggcatccgcaaaagcctcgtcactcgcaagcgccatgaagggaatggttcatgacgataaaacctaccctgaatcagtgtcagcttggacaactaagttaattgttttttcagaacaactcgttgccgccagcaaagcctgtttatcacttgctgattctctttccccatacaccacgccatcagaactgttacagatgaagattggctgggaatgccacgcaaaaggtaatgaactggcacccacgccagcattcgctctcgtggaggggatgggtaatgtttccataccgcaatcattaacggacgcattggcggtgctgaaacttgacgatctgagcgccgctatgagcgccattaacgcaaaaatagaagccgccggaagtacgggcagcgatgggaatcaggctggtggagggactgctccggctccagggactgctccggctccagtcattacccaggatgaaattgacgctctgagggaggcagtaacaacagcggaaacttcactctccgggattaatttagccagcgagaatgttgcatctcttgcaggtcggataagaacgtcaacagaacaggctgcaagggggcttgagaatgctgtcgccatcacgctaacaggctctctactgaatgacgcagtaatgagtccggcaatcagcctgatcatgccagaaggcgttattgaggcgctacagagtggctccaaaaaggaacaatataaacaccaaaacggcacctga

SEQ ID NO: 470088 - DNA, 453 bp, Shigella boydii; identical to SEQ ID NO: 401020

SEQ ID NO: 470089 - DNA, 393 bp, Shigella boydii
atgagctacagcatatttgtttcttatccgaacggggcgaaaagccacaagctgagaacaacaaagcgccgtcttgtagagagccaactggagaacattctgagcgaaccggaaatactcagtctcgctgaccgggtggttattcagtttggtggtcatgacatcctcaatgttccagcctccacaccgccggaagttgttatcaaaactgttcgatggcctgccccaggatgcaggataaaagttgaaaacccgatggtcacatcgttgtacatgcctaaagccttccatgactggttagtcgcgcaaggtggcggcaaggccagtcggggattgcgagtgctggtggaaaaggccgacataccagaattgaaaaacgcatggcggcagtga

SEQ ID NO: 470090 - DNA, 1698 bp, Shigella boydii
gtgaataaaaccattcagccagctcgtgatcgcgagcgcgatattatgaatcgggcggcaagcgtcatggctatgaccgtcgatccgaccactgatgctgcgggcaacatgattgctgataacgcagtaatgatggaaaacctggataaagctgtccagaaagtacctatgtttgaaggcgtacccccggaagctgcacgtcagattgctggtggatgggcgatgtctctgcatgagtacaagcgtcagaacggtcactacccggcaagtgatgtgctggcaaacgcacacagagcacttgagcgtttgatgactgaatgtgccagcaatacacacgaaggctctggcaaagcgatgtttgagtctgtcgcggaatctatgcgtacctctgacggtgtaatgaaggtcgcgcagtatgcagcattaatccttccggcttctttaggggcagccaccagcgatgcctgtacctttgttccttgcgaacgtgacgagtctcatatttacgaactgctcaacgttgcaggcactaaattcggctccttccagcagggcgacgaactggacatgcagtctgctggcgtttattcacagatgaaacgcctgtataccctgactgaaaaaggcgataacagcaaaacaaccttcacgttcgatatcaagaaatttgaaggccaggcctgcccgatccgccagggatataacaaacttttgattaaccgcaaaccgtccaaagtggacgatggcgacggcaacctgtatttcaacgaccgcgacaccaaaggcaatgctttttctgctacggcgaaagtgaaatacgacactggcgtaattgacatcacctttaccgacgcaccagcagaaggcaccgagattgccgttcaggttgaaattaacgttgagcgcaatcctggcctgatcccggtaattaaccaggcaatgcgcaaatataccgtacgcccgtcacagtacgtcattgcgtccgaacataccgtcatggcggcatcagatttaagccgcgagcacggcctggaactggcagcactgcaattctccgcaatgcgtaactggatttctcacgaaaccgacattatgcgtctgcgtaccctggtattccataccgtttacggacgtgaatttgatgttgctctgccagaagcacaaagctacgagtcctgggtaggtctgctacgccatgcagtaaacgcgctgtctcaggatatggcaaaccgcaccaaaactacgggtattcgcggtggcttcgcgggtgctgatgcggctaacttcttgcgttctctgccgccgcaacacttccagatcgcaccgggctatgtccagtccccatacgtgcagtacatcggcacactgtttggctctatccgtatctacgaagtgccgcaacctgtctgcgaacagttcgggaagcagggctatgagttcggcctggatgacattttcttctacggtcgcggcgaaggcatcggcaaagctggcctgatcgcgggcgatgctgtcccggctattccgtatgttcatgaaacaaacccgtcactggttaaccgcaccactctctggggcacagccatcaacgaagttcatccacgcaacggtgaaaactacttcgctcgtctgcgcctgactcgttcgaaagaaggtgcgattgacatgctgaccgggcagatcaacgaaaaaaagtag

SEQ ID NO: 470091 - DNA, 279 bp, Shigella boydii
atggctgacattcaagtaaccattacgcccgcggacgcaacagataaatcttttaccgttgagtctaatcacccagagattgtgagcgtggaaggcactacatgcaccgccagaaaagcagggcaggccgtactgaccattaccacaaatgatggcagtaaaaccgcgcaatgcaccgtcactgttcgtgaggctacaaaaagggtgagcagtgtttcctgcgaacctaccacaaaagaagtgaatgtaggcgacaccttcactgtgggcgaagcctga

SEQ ID NO: 470092 - DNA, 1659 bp, Shigella boydii
atgaataaaattagtttttcggtagggcaggccgcaggtgtcgccgttatggcggtcgatgctgacgctactctatccaataccagtggcggggcttcggtctttgccgggcttgtcatctctcgacgaggtgcgccggggaaggtactgcaagtcaatgccaccacctaccagagtgtattaggtacaccaattcacccgcgtgtgggtgcagcatttgaatcataccgccacgtggagcgtgctgtgaacggcggcagcggctatgttgtgcgtgtttgtccaaaagacatgaaggtacctggcatttccgtttcggtagcggcacaagcaaaggcaagcaaagcgacggccaaaaatctcgctgtcgaaccagaaacagtggaggttaacactagcgatactattagtgttcgtgttactggaaccgccacgactaaggccgttgctttcacaccgaaacaaacgccggaaattacagaagatgccgttgcaatcttctacattaaagatggtgacgcgtctcaaaaccgcacgctctctttaacacgtgacgaagacagcgaactgtatacgctgacactgaaagaaaagcaggcagacggctccgttgaaacgctggaaagtcatcaggtttcctttaagccggaaggcacaaacgatatgggccagccagcatggatccctacgttgctggaaagccagtctaaccgcctgggcgcagtgcttgcagataatgccgaaggcgttgcggcgaagatctcctttgaagatgttgcgttcgagggcggctccgatggcacactgaccagcattgaagccgaagactatctggaagccctgaaaattctggaagcctcggaggtcaattacaccgcactattgtctcttggctgctatgacccttctgtccttgccaaaatcaaaacgctggcagaagaagttcgcgtggacatgttctacgacctgagcggtaacaagacaccagaaaaggccatcgaagaggcaaaatcacatagctttggcggctctcatcagccaagtcgttactacttcccgtatgcctgccgcgataccttcactggtatgaatgttgtttacggcatcagttgtgacgcatttgtggcgaaagcgaaaggtgttgcactggtatcagatgttggtggctggcattacgccccggcaggtgtttcccgcgcaattattgatcgccagaacatttcccgcctggcaagcgttggtgtgattgaccgcgaagccttcgtgaaagctcgcattaacccggtatccattgccgcagatggctctgtctatattgacgactctctgaccacgttcagcaaaaataattacctgcgtttccagcacgtatcgtccctgatgaacgctatcgcacgcaatttctacgaagttgctcaggcgattaagcatgaaccggatggcatcacgcaagccactctgatgaaagcgatgacagagctgcttgaccgattctatgccgctggtgcgctggttaaaccgcgcgacgcttctcagggggaagccccatatgtcgtgacggtcactcagcaagatatcgacttgtggcaggttgactggtctgtctgtccgactggcacagcccgccgaattgtcggcaaaccgatcctgatgcgttga

SEQ ID NO: 470093 - DNA, 708 bp, Shigella boydii
atgaacaattttaccgttgcagatccgttcatgcgtgcgctttttgcatcccagcacgccgataatcaagatgccgcgatgcttgaaagcgcaaatagcaaaaaagaaaagaccacagataaagttgatgttgagaaagcaatgctggaagccgttgaatcccgcgccaaaggcgatatgcgaagcctggcagcttccatgctggctggctgggtagaagatggagatccagaagctgactccttcgatgcactggcaatttctatggctggtcttactgacattgacgaagacactgatttcactgacgagcaaatcgacgcgtacaacgaagcgctggctgcactggctgacgccgctgtcgcgctgggtgcggatcaggatgacgttaccgagatgatcgatgacgatgacgacgccgctgcggaacgcgtattcgatgcgttatccgaaaatgactccgacatgatggaatccgcgattgcgatttacaccgtggctggtggcgatagtgcaatgctggaagatgtgcgcaagaaagtcgtccgtgacggcaaagttaccatcatccgcaagcgaccgcgcccacgccgcatgacttctctccagaagcaggctctgaaaaaagcccgtcgcaaagcgcatacatcagtggcaaatatcaatcgtcgcaagtctatgcgcattcgtaaaaaacgcggcctttaa

SEQ ID NO: 470094 - DNA, 3666 bp, Shigella boydii
atggcgagcgctccacatgtccagggcgctggaagagaaatacaaagcacagaccgggaagaaacgctgatcactggggtggtaagtgaggacattttgaaagagaacaaagaccgtattgcgataattgacgcgattcaaagcgccagttcggatgaattggaagcgctggcagaaataaaaaaagcgatcatgtcgaatatcgttgtttcaaatagcgataatagccaccagggcaaagtgagtcgtcggctgtctcgtactcaaaacaacagacaatcaaaaacaggctctaatagtgctcgtgatcagcaaaacgtgtacgaggaacggctacctccaaagaaaaaacctttacgaatgacaacggcatcaagctctgctgttgtaacggattatccgcaacgtaaagaacgccgaaataataccgataaacgtacggcaacagttccacttatatcccaatcacctgcttcttcgccaaaaaaacgtgcgcacaggcaagccggggctgttcagacagaaaatcctgaacaatctccttcaccacgtgaaaaatcagcatcaccaacgcttcgagacagtaacgggcgctttgtgtctcagcaaaagaacgaggacattgccaggaggaaagaacgccaacaggaacgagatgcacaggccaaactccaggccggatttttccgcaaattaggctcaataatgggtgccgatagcagtgggccatccagcgaggactcattgactgatgccgctggtgtaggcgctggtggtccattatggatggctgcaagaggagtgtttgacatctctaaagagatcaccgggaaagcagtatcactgaaagaatgggtaggtaagtttgaggatgatgacgcaaacaaccgcgtagcaacaaaaaaaacagcgatcacatacccggcccccggcgagcataaagcgtcagcaacagcatttagcggcgctgtagaagctaaatcaacacgggcagtggaagaacaaaccaagattcttgaagggaatgattcgaaaatcattgatggccttgaggacgtcactgacgagatcgtgaaactacgtaaatctgtctcgtccggtggtaatttccggcttagtgacctgtggcgaaatagatctgtacggcgtaacaaaatcaatattggcggagagtctcgcaccaggcgaaacaaaggccgaaaaaaaagcgctaaggcaggaaaactgctttctgccggagagaaagctgcggcaggaacggctactgttgctggtggtggtgctgcaatcaaggccgggaaagatgtcgcggtaaaaactggagaaaaagtcgcactgaatacagggaagaaagctgcggagaaaaaaatcggtgctgtagcacttaaagatacagccaaactcggaattaaatctgcggcctctatgggggcaagggcgatccccatcatcggctcgctggcaatggcgggatatgatgcggttgacggctataacgacacggaagcacaaaaggctgcatttggactcagcgatcagcaaaaggtctctacacagcagaaaagcgcatacgccgctgcgaatgtgctggatatgggaggaattgtttccggcgcaaccaatctgatagggcaggggatatcagcacttggattccaacgcgccggagagtcactaaagaacttcgaaacggctgatatagcacgcggtgttaatggcgcaatagatatcacaaaatcggcctttaacggagtgactggtgcagttaaagacgcgtttttgtctacagacgacagcaccaagcaggttaaaaaagcggttgaggacggcacaaggaaaactgttgatgcgattaattccttaaaacaacaattgcaaggcgggattaatggcgaagatggtgtgggggtatacggatacacatccccgtctgaatttaatgcgcctgccgtaaacaccattaccgatgatctgaatattggcgggagtaacgcccaaaaccgcaactaccggaaccataatcttgggaatctggtgtttgccaaccaggagggggctacgcttgaaaccccaaatgccaaaggcgaacaacgttttgcccggtttaataccccagaagaggggatcagggcgctggcaaaccaggtttcaagttactacaacggcacaagccgtgctgcggggtatcaaaagctccagacggtttccagtattatctccaaatgggcaccagccaacgagaataacaccaaccagtacattgataacgtcagcaaatatcttggcgtgtcaccaacggataaaattgatgtttctaatccggaagtaatgacacaccttgtgcgggctatagccacgaaagaaggcggtaacccggcggtcagagatgaatttatcaaaaccgcattaggcaccttcaatgcatcgaccgggcgctgggaaggccagttcaatgacgaaactctggcaaaactcaataaaatccagaaggaaaatggcggacagcttattgctcgtaattcacaatacagcgtcggcaataaggtcaaatatgccaacggcaatacgccagcagtgccagtaaataaagccattcctattaagtcagccgaaacgtttgaagttgctcagcacgcccaggccgcgaagaagatggcggcaaatactcctacagccagtgagcatcaaaaaactgatggtaattcagagagtaagttgcattccctgcttgaatccagccatgaagcaattgcagaagtggaagggatgtttggcggtgctggtagttttataggtgacaatttccaactcaccaaagaattcgcatctgctcaatcagccggggggatcgaggcgctggttgaaaaggctcgcagaatggatcaggcaatgaccgccaaagtatcttccatcacgggtaaatcattcggttttcagccagcaaaacaagttgctgctatccagcaggcattgcaacaaaagcgcacaccaccagcggcggctagtgatgtgaatctacttgaaagcagcaaggacaacgcagtttataacaatggatatcgggtagtagaaggtgaggataaaggttttctcggctcactactggattcctctgccactggattaactcgtattggcgctgccgttctgcctacggtgggggacagcctttcaagcctggtggggggactcgatggtgccggactggtaaatgatctcgtctatcaggccacaggccagaataccaacattgcccgcgcaataagccccctgacaaaagcaacggggagttggcttaatggcggcataaatcaggttgccaacaccattaaaggtgtatccggtgatttgaataccctggcattcggctcagcctctgcgattcaggaaccttttcttgcaatgcctcctcagttgcctaccgtgactgaccttgcccgaagtggtgtccgccagactttaaatactgacactgtaaataacgatccggctatgttgaaggcgctggataacgtctattccatcctgaaagacattctgaatgtgaataaaaacaatgcaaaaggtgatccggataaggttgttaaaacggcacaaccgcaaccgcgacaacgggccagcacggttattaacgatccctcactggatgcattgcttgaggattaa

SEQ ID NO: 470095 - DNA, 375 bp, Shigella boydii
atgttgtatgagatagattcctgccttcgaaccaatgaaagcggtgtcgttattgcagaaggtataacggcggcatggattgcccgccttgatgaatggctgcgcaccccggaaggcagtgtttatggcttgccttcatggggaaatcctatggctgagtttaagcacgaaccttttggcggtgataactcgcacattattgaagtggcaatagaaggccggattatgaccaaacttaggcaggatctgccgggactggatgtgcagggcatcaggtgttcagccatttcggaagaccaattgttaatcgttatatatgcgaaaggcagcagcctgaacgttgtaatgcagaaagcaaacggagagacgttgtga

SEQ ID NO: 470096 - DNA, 1431 bp, Shigella boydii
gtgagtattaccgaattactggataaatttaacgcgaagctcaatgaaaatacctggtgggcgcgttttgttaatagccagttcgcgcaaatgatggcggtgcttggcgctcagatcatatatacagcgaaaacatatgccagtagggcattaaccgaaggctttatctccacggcgacaaggcgggcaagtattcttgcggcggcagaagatcgaggttatgtggggcgttttgtcagtgcatcttatggaacgattaccatcatcaacaaatccaatgcggatatcatccttcctgctggcgctgagttgctcgccagcgaccagacaccgcttgctctgaccaacagcatcgttatacccgctggtgggaaagtttctgctgttggggtcaaacagcatgaagccgtaagcgtgacatttgatattgagaaagaaacgctatttcttaccctgctgctttcgcgtgaattaacaaaagaggtatctagccttgaagtaacagtgatccgaaacggggaggtggataaatggatttataacccgttatttcggatgtctcgcgataccagtaagcactatgtgctggtgtataagcccactgagcaactcggcgttcgcttcggtgatggctctatgggaatgatgcctccagccggaagccaggtgcgcattgatattatggcaagtcagggcgactacaccctggcagaaggccagaagctggaacctgctggcaatatcgcaaaatacgttgatgttctggatatcactaccgactctatcataactggtggtggcggcatggaaactaccgaagaaacacgcaatcgcgctcagtattatgtgccatatgatgagcaggttgtttggggtggggattatcgtcagtttatccagcaagtcgtaaacgggacatcgtggctgaacgtatggggtgaggcactccaggaaaaagtaactggttatgatgtccgtaatatcaataaaattttcttctgcggacataagcccggcgtaagccaggagtctctggcttctgagatactcaaggctcttaacgacgtacctaacgaactgaataaaaagtttgagtacgttcccactaatgagcaacctttcaccatcaaatttactgggatcgtgcgtaaaagcgtgctggttgatgatgcgaaaaatgcgatcacatccgcacttgaagaaaactttgggcgcgactcatcatctttcagtcagttactacagagtgatgatgattcccagcaatgctacgcccaggtcaaagtcaaagatatatggcgtgtcattgagtctctggatatgttcctgtcctatgacgtaacgatgcaaaacttgaaagacgccgtttatttcaacgactttgtttaccttgatgtgaaatcctctacgtttagcatcacttatccgtaa

SEQ ID NO: 470097 - DNA, 846 bp, Shigella boydii
atgaaagtaaactggctaaaagaaagactgactaaagcaaaacaggattctcaactctggagcgcctttataggcgctatggaggacgtctggaatgaaactgtggaacctgttttaactcgaattagcaacaggaaatcgttcttcactatggcgagtgaagatatggatacccggatcgcagaatatgggcgtttcttcgttatcaccgaaaatgataaggcacgccgaccaatgttattagcgcaacgtcttgatgaggtgcattttaagggcactgtgcgcccgattgaacaaactttctggcgtgagtttgggaccatcccagttacctgggaaccactatatgcccctgcggatatagaaaaacatccatatgggtcttattttgccactaaagctgagttccccactgcccaagctcaatttggcgaattttttcttacatctcgcggcctggttgtggtcaaccaaaacaagttgtatcaggtatacggtagtcttgataaagacggtgcggtaaaaaaactcctttctgactttgataccgtaatagcacagttattgcctctgcatatcgttttcgatggcgtctctttccagttaagtgctgtattcccagaagtggcagaaatactaaattgcttgtctacggatgtttcggtaattgaaggtgtttatgttactgagagtatggctgatatgctatcccgtagtgatacctcctgccaggtagacaatatttctcttaacgccataccgaaccgaacggcagaaaagcaattacatcttgatgtaaccccactcgatgcgtggcctttggattaccaccttcaacctgtttaa

SEQ ID NO: 470098 - DNA, 534 bp, Shigella boydii; identical to SEQ ID NO: 464815

SEQ ID NO: 470099 - DNA, 810 bp, Shigella boydii; identical to SEQ ID NO: 464352

SEQ ID NO: 470100 - DNA, 438 bp, Shigella boydii
atgaagatttcggtgatccctgagcaggtggcggaaacattggatgctgagaaccatttcattgttcgtgaagtgttcgatgtgcacctatccgaccaaggctttgaactatctaccagaagtgtgagcccctaccggaaggattacatctcggatgatgactctgatgaagactctgcttgctatggcgcattcatcgaccaagagcttgtcgggaagattgaactcaatctcaacatggaacgatctagcctctatcgaacacattgttgtgtcgcacacgcaccgaggcaaaggagtcgcgcacagtctcatcgaatttgcgaaaaagtgggcactaagcagacagctccttggcatacgattagagacacaaacgaacaatgtacctgcctgcaatttgtacgcaaaatgtggctttactctcggcggcattga

SEQ ID NO: 470101 - DNA, 534 bp, Shigella boydii; identical to SEQ ID NO: 464817

SEQ ID NO: 470102 - DNA, 201 bp, Shigella boydii
atgatcttattaatcttatctatcttagttaatcttcttacttatcttacttactttatctactttattattaataatagcttcataagctctctgtgtagctctctgacgcaagaaacagagttcaggaagggaatcaccttagaaaagtgttctttgcgtcataatgtattttatgaaggattcagaggtgtttcataa

SEQ ID NO: 470103 - DNA, 183 bp, Shigella boydii
atgaaatggtttataccggaacacgtcgtagaggcatttaaaaaaggtgagctaacacgacatcaagtagtaatgaatcgtaatatggcaaggagtcgaggttatccagagcgtgaaaaatgctttgacgatgcactcaagattattgatgaactgcgtaaggcagaagcagagaaagaataa

SEQ ID NO: 470104 - DNA, 720 bp, Shigella boydii
atgatcaaaaatatcaaaacaattgccgaagcgaaagccaaatgtctaaatcagaaagatggtaaacaaaaatatgtagttgttgagcaatggttgaagatgtttaaaaaatggtactcaccatctggtaatgaatacaccgctacactgccagccgttgaaatctatagctatatagctggattcaatgaacaagggcaagaatgttacgctactcaaaaaacattagctaatattggaatggttagtgatcgtcaggtacgcaatattataaatatgtttgttgatatgggagttctttctgtagaggcacgccacggtcaaacatcactctataaagcattaccctttacagatgcacatattacagcaccaagagaagcgaaagcctctgtaaatgcagaaaagccacagacagagcaagtatctactgttaaagctgttcctgaacagcttccccctacggaagataaaaaaacactagaaacaacacgctctattcagcaggaaaaaacagagcttccttggggcggtgtcactatttgcaaaccgaatggacagccaacagaagcagcccttgagtgggctttagctgaaacgcagggcgataacatagaggcatacaggctaatttcaatagtggtttctgaatttacaggaagagaacatatatacacgatacctgagacagaagaggacgattttgacattccattttaa

SEQ ID NO: 470105 - DNA, 246 bp, Shigella boydii
atgatccaatatttagtaaaaaatcaagtagaccgcattcagtgtaacgacaccggaaaacacacctacgaaacgcttgcttacctctataaaggaaagccaacaccgctaaaatatagcgatgtgttacatcgagcaggttgctctgagtcaggtttaaaattctggctgaaacagctatcaaatttcggtgttattgaaatgaaagagctgtctttttctacatttaacctcaagaagttatag

SEQ ID NO: 470106 - DNA, 789 bp, Shigella boydii
atgcaaatcgacctgctaagtccgacgcaatctgcgcgcgctttacacctgtttcaacaacattccccccttgtacactgcatgaccaatgatgtggtgcaaacgttcaccgccaatacattgctggcgttgggcgcatcgccagccatggtgattgaaacggaagaggccagtcaatttgcgtccattgccaatgccttgttgattaacgtcggcacgttgacacagccacgtgcgaaagcgatgcgtgcagccgtcgaacaggcgcatatcgcacaaacaccctggacgcttgatcccgttgcggttggcgcgctcgactatcgccgccgtttttgtcgtgaacttttatcgttaaaacctgctgcaatacgaggaaatgcgtcggaaatcattgcattagcgggagcttcacgaggtggacgtggtgtggatactactgacgccgcagcagacgcgttgcctgctgcacaatccctggcgcaagaatctggtgcagtagtcgcggtcacaggcgaggtggattatgttaccgatggcagccgtattgttggcatttgcggtggcagtctgctaatgaccaaagtggtcggaactggttgcgcattatcggcagtggtcgctgccagttgtgcattaccgggcgatacactggaaaacgtcgcatctgcctgtcactggatgaaacaagccggagaacgcgctgttgccagaagtgaagggccgggcagttttattgcacattttcttgatgcgctctggcagctggcaccggaggtgaaggcatga

SEQ ID NO: 470107 - DNA, 801 bp, Shigella boydii
atgaaacggattaacgctctgacgattgcaggcaccgacccgagcggtggtgcgggagttcaggccgatctaaaaaccttctccgcgcttggtgcatacggttgttcggtgatgaccgcgctggtggcgcaaaatacccgcggcgtacagtcggtgtatcgtatagaacctgattttgttgccgcccaactcgattccgtgctcagcgatgttcgtattgataccactaaaatcggcatgctggcagaagctgatattgttgaagccgtggcggaacggctgcaacgttatcagatcgaaaacgtagtactggatactgtcatgctggcaaaaagtggcgatccgctactttcaccttcggcggttgccactcttcgcagtcgattattgccgcaagtttcattgataactccaaacctgccggaagcagcggccttgcttgatgctccacacgctcgtaatgaacaggaaatgctggagcaggggcgcgccttattggcgatggggtgcggtgcggtactgatgaaaggtgggcatctggatgatgaacaaagcccggactggctgtttacccgtgacggcgaacaacgttttaccgcgccgcgcattatgactaaaaacacgcatggcacaggttgtacgctctcggcggcgttggcggcgctacgtccgcggcataaaaactgggccgatactgttcaggaagccaaaagctggctgtcagcggcgttagctcaggccgacacgctggaagtcggtcatgggattggtccggttcaccacttccacgcctggtggtga

SEQ ID NO: 470108 - DNA, 816 bp, Shigella boydii
atgcagctaaaaatcgtcagtcgcaaaaaattcaccgtcttgttatgcgctctggggctaatttccatcgttgcgatttatccccgccagacggtgaattttttctattccacggcagttcagattaaagactacattcacttttatggttatcgtccggtcaaatcttttgctattcgcattcctgccagttacaccattcatggcatagatgtttcacgctggcaggagcggatagactggcagcgtgtggcaaaaatgcgcgacaacggtatccgcctacagtttgcttttattaaagcgacggaaggcgagaaactggtcgatccgtatttctcacgtaactggctgcaaagtcgtaaaaatggtctgctacgtggggcatatcactatttttccccatcggtagcggctccagttcaggcgcgattatttctgcaaacggtagattttagtcctggcgattttcccgctgtgttggatgtagaagaacgaggaaaattatcagcaaaagaattacgcaaacgggtaattcagtggttaaagatggttgaaaaaaacactggcaaaaaaccgattatctattccgggtctgtgttttatcaggaaaatctggcgggatattttaatgagtatccctggtggattgctcactattatcaacgtcgtccagacagtggatcacgattgtggcgtttctggcagcattcggatcgcggtcaggtggatggtatcaatggcgcggtggattttaacgtgtttaatggctcggcggaggaattacaggctttcgtggaaggtactcttaagcagtaa

SEQ ID NO: 470109 - DNA, 2574 bp, Shigella boydii
atgatacctgtcgaactgattcgccaaaaagattatccagccattgttgactgggcactggcattaaaagaaaaagaccgtctggctgtacttaaggctctacaagaaactgattatcatccactgttctctggggaagatgcgcacgatgcgttctcgttgagtaaagtggtatgcgcacgtaactatacagagcaaaaattattccctatccactggcccaaaaatcaaaccaaacttcatgaattactgggtagtagcaatagttcagtacaccatgcactcctcacttattttagccatactgttcctgattatctcgatagtataattgaagatttattgcttgctacatatacttatccagatttccgtcttatatggaatttttatcaacatgggtggataaaattcaatgaggaatcatttgttagtatattattttatgtcggtaggtatatgcataatcccagatatgatatcgcctggttgcgtgaaaacccacaggtaatagaaaagttaataataccgttccctcaatatgaggttccagtactgttgcgtagtcacttttatcaggcggataactcaccttacggtgggatcttgaccgaattttgggatgaaatgtttaagcaacttatggctgaaaaccttctacctcgccagttaattaaggagttattagcttcattaacaaataattttaagaaagcccgtcttgactggcatattcgtctggtaaacatgtttaacccacaaaaagatgaatggattgataatcagcagttattattttcagggctgaatgccagcaataattcagtcgtcaattttgttattcagacaattcaaacattatacactcaccctgagttcgaccattcatcatttatgcagtgttttccggtaattagcggacgagaaaaatgcgataaatcattattaatagcactggatattgccgagacattggcagaacgctatccccaatatcgtacaacactggcgcaaaacgtgtcaggaaccttaattcagcgcaccgaaaaattacaactacgcacggctgaattaatgttgaaataccagccagcacaggacgttgccgcgttaactgagccatggttgggaggcttaaagcacagtgtactggcactgttacaatgtgattcaccgccgggtgaaagtcatgttattccaatgctacaacatgagcaggttattgttcctgaaaactgggatgcgttgttgtttcaaactggaaaaatgttggaaaataaagaagccctggatattgaacttttttatgccgggattattgctctgcaaaatgaacttcctgctggttataaaaaacaattacaaccgtactataaaaaattacataaaaagtatctcggatcatcaatactctatagtctgagagatttttttcagcagtggttaaacgatgaatatgcatcaacgccggagcgacatgaacgccgcctcccgcatttacaaaaccaaaaccagctggtgctttcgcggctgcgtgataactgccacttaactttactggcaacgccaagccacacgccgttctatgtttcgccgcgaatcctggtggagcgattgttggcccacgaacgcgagaattatccggttgatgttgatgatttaattatcgcctgtaatcgtattttgccaggcgaggtaacagcagaagtgaagcaacaggcatttatgttaaccgggaaatacgcccaggcggtgcaatatttgttgcggattactgatgatatatcggcaacaaatgacgagtttttaccactctggacacagattacacgcacccgaaatacaaacggggtatttccacaatatgaatctatcgccaaagagcaggcgagttggccgggtatcgcccaaccattcacctgtacgtatcgcatattaattgataagaatgaatataaaacctggtataaactggcattaaataaccgtgtgccttattactgggagagaaagagtcttcacccttatcctggtcattattattatatgagtctctgtcgtgatgagtgttgtcactggaaggacgtattgtattatttatctttggtgccaaattatccagattcttggttaaatttctttattccagctacggcatcgggaaacgaagttgatggctttgaagaatgtttatatcctctacaatatttgcttgaaaaccaacttcgtgttcatcacgtaggttgggtctatattgcagtttgtttactttttgagaaaaagattagccgcgatttggcagctgaatatatacaattggctatccagcataactttgtagacagtcactatctgtctgaatgtattgcttacttactcatgtataagtatgcgccggttaatagatttattgaatatcttgataaccacaatggtgatccagcaatacgaagattccaaaagcaaattctggagaattgcatcacactggctggtgaaaaagatctgcctactaattataaaaaattaatggcttatctaaatgaatttattatacaaggatgtgaaagatga

SEQ ID NO: 470110 - DNA, 2679 bp, Shigella boydii
atgaacgatattaaagaacaatacagtaatattattgagtatggaaattctgaacagttaatagttctattaaaaggattgagtgaaaagtctcgaaaagatttagctccactaatcaagaaggatataaaaagattaaccggttacaaggaaatatcacggggtagatggaggattattggtagtgaaattcagttcagaatgttaggtgttgcaatattatgttgttacaataaaaaagattgtaataacataaaatctattgtgtttagaaataaccattatttggatgcggcgctggaactattttctcctgattggtttacagattatatcaatatttttgcggataaagatggttgtccttttaattatgaacaaattagtgactgggttgctgctggttatctaactaatgtatcgccaatgcttatcgcgaaaagcattatacatagtataactctacaaaagcactctttcactttagatgttcatctgtgggaaatatttaattacccttgtaatatatcatggactgaccgctgggatcgtgcacaagagaaaccagatgacgccgatgaacaaaaatggatatattattttaaaaaattctctaaagacaaaaggatagacagaatgcgggttttgaaagaaagcctccttgctgtcaatcgcggtttcaataaagatcaaactaactggtatatggcgttattcacggcactggagcctactgaaaatgaatgtttgcatttacaaagagaactattttcagtatgccattgtccacataataaaccaattgccacaatattaaatattattaaaagtcttatattaaatcctggatttgataacgatgaatttattaatcatctaccactccttttttcttcaataatcaaaggtacagtaaatagcactttaatattggcagataaactggcaagtcaataccctgataaacgaacgattatttgctatcatctcacaggtgtattcatcaataaaaaccctggccttcaggataaaactgcaaaaattattgctaaatatggtgatccggcagatgctgaattaagtgtattgttagatagctataccaatagtttgctaactggcgctcgagaagtattaacagactttcttgatgccaaacctatggttgctgatgacgcgctacaattgcactcggttatgccgctgattcgtaatgacaatcgtatcctggaaattaaaacctgggatgattttgttttcctcgcgggtagagcatgtcttaacctggaatcgtaccattttgacctgtttcccgcagcgttgttacgttttgctcctcagattaataaagataatattagtcaacttgagcctgcttttggactggcggtaaaaacattgcaatctggttctgtatcagttggcgcatttgataaaatacttgcaacatttattcttgagtttgctggcgatttactaagagaattgccaaataaaaatataagcataaaatataatcaatatcttgccatcattaataatgagaataagaatttaaaacttaactggggttttcatgaatggcagaagtccactaaagcaaaatttcagccatggattgatgtattaattaatgtgctgcattcgttacaaaaaacagaaccgctgccacttctttcaactccgacacatttaccgtgtttcattgatccatatactcttgtacaaaggctaaaaaaatatcaagcagcaactcaagttcctgataatttcgatttccagcttgctattcagcgttgtgtgactccagaaaatgaaattaacttagcgggacttagccaaaatgatactgcactattaaactatttcttctatggtgatgtgaagtcacttaaatgtgttgaaaatgatgatttagcattgtcagccattattacacgtaatgccagtcactatgatttagcgtcattcgaatacggtttgattttgctaaataaaaacaatttacccgcaaagatcatctctaatgattttccatggtgccttgagacaaaaatacagacagcaccttatttaaaggaggagttttcttacaaacaattgagtgttgatattcctcgtaactggcagcaagaaaataccagccttttttatgcttttagttttatgaaagcatcggctgatttggcaacagataaacatcgattgttgttttcttttcctgtcgctcacgatctctttttagtacagtttatcgcataccactttaaaacagaatataacgagtctcgtgatattattcacttgttgcaagcgatgctggaactgcctttgccattaaccccgatgggccatctacttaccgctttttgtatgcttcacgctgacaaaacggtccgtgttcttgctggcgaattatggattgataaactgcgttatccacaaggtgtgaattctacccatatcggcgacatcctggggcgtctggaaaaagaaaactgggcaccactcaaacgttttaccgatctcgctatgcagtcgcttatcaatatcagttctcgccataatcagtcattactggagatggtcactgcaatggatagccatttgagtgcagtcaagattactaattataaaaaactggctgagctacggcaggaacttgaagcagcattgtaa

SEQ ID NO: 470111 - DNA, 2685 bp, Shigella boydii
atggatacaacccaagagcaatacagcaaaattattgaatcagggaattcagcgcagttattagcatttctgaagtcgctggatgataagcagcgaaaaaatttagtgccgcttataaagaaagacgtgaaacgattaggcgagtatcaatggcatgaagtaagtatcggcggtcttcgtggaggaacttaccagcaagatggtacaaaaaatcagttagagatgcttagcctggcgatcatcggttgctatgtacgaaaagactgtaaaaatattgaacgtaacttgctgagttctaatgaggcagttaaacagacactcaaatggcactgcccggaatggcttactgattatattaatggtgatattaaaggtggacatttttcaatagattatgccactctctgcgactggattgccgaaggatatgttggcaatattacaccgcaggttattgttagtaaaataacctctgcatcaaatcttgaaaaacatcgcttttctttagacgatcatatctggatggtttttaattatccatgcggtgttgcatggtcagatcagtggtatccaaaggaaagtaaacctgaggatgccggagaacggaaatggatatatttcttcgaaaaatatatcacggaaaaacgtatcaacagaataagagtattacaagagagtttgctcgcggttaatcgtaattttaatcgtgaacaaacatgctggtacgccacactatttactttactgcaaccgacgatagatgagtgcttacaactacaggaagagttattttcaacgttttgttgtccacagagcaaacctgtcgcgacggcattacaggcaatcaaaaagatcgtcgatcacagagattttcgttataatgagtttatcacctatcttccgcagctattttctgctaccactaaaagtattgtagatagtgcattagtaattgctgataaattagctaaacaacaatcagaaaaaagaccagaaatatttcaacatcttactactgtatttctaagtaaagatgttatcctgcaaaataaagccgctaagttaatagctaaatatggtaaccccatggaacccgaatttagcttgctattaaacagttatgcagacaatatgcttactggtgctcgggaattgttgactggctttcctgatattcagccgatattgaacaatgaatatgatgaactatccgcacttttaccactgattcgtgaagataaccgtattgcagaaattgagacctgggatgattttgtcttcctggcagggcaggcattttataacgtcgagtcgtattactttgacctgttaccagctgcattgttacgttttgctcctgaaattaatgaagagaatgtgaaccaactggaacctgcatttatgcaggcgctggagacatctgaacatatttctttttttgacgggatgttgggctttttctttatggaatatgcggcagaacttatctcatgttttccactacagacagcaaaaattaaaatagtatatgaaaattttcaggagttaaaaaatacaactgacgaatggaaaaagatagactgggggtttcattcctatgataaggaagacaaaaaaagaagtcgctcatggattgcgtttttcaaaaatattctgttgctattaaaaaacaacgttaatctgcctttgctttcaacacccacgcatctgccttgctttattgacccggcggtgtttgtcctgcgccttttgcaataccaaaatgcgggtgttgttcctgttagtcaggatatgcaacttgcgattcaacggtgtgtatttattggcagtcaacctgatatttcacaacttaacaccgaatatgctgcattagtgcgatatttgttttccggcgcgcaagacgcattagcacaagtcgcgcatgaagaatggaaactggcagccattattacccgcagtgcggtgaatcctgatacaacgtcttttgatgtcgggtatacattgctggaaaaacacgcgttaccgatggaattattaagtaatatattcccctggtttatcaagggtgacaaaaaaaactcctcagcaagaacattcaattttgacgttacaacggctgttcaaaatctggagatgactttgttctatgctgacagtttcatgccttgctctaaatacagttactttggcggagagtataagcggcgaacgctgtatgctttcccctggcagggtgatgttacactcatgcgttatatagaaatgaattttcatgatccaaacatttcatcaacgaaatcgaatctggaaatcctccaggcactttacgatctccctttgccactttctcccatgggccacttgcttaccgggctttgtatgcttcacgctgacaaaacggttcgtgctcttgctggcgaattatggattgataaactgcgttatccacaaggcgtgaattctacccatatcggcgacatcctggggcgtctggaaaaagaaaactgggcaccactcaaacgttttaccgatctcgctatgcagtcgcttatcaatatcagttctcgccataatcagtcattactggagatggtcactgcaatggatagccatttgaatacagtaaaaatcaccaattacaaaaagctcaatgagctgcaactcgaactcacaaggaagtcataa

SEQ ID NO: 470112 - DNA, 1344 bp, Shigella boydii
atggaagatacgctcacttattgttacaacatcccatccgttttgcataaaacgaacggccaggatgaattacgtctggcaaaatatagcgagatccaaaaggcatccgatgcgccctgtttctttgtcggtcaggtcaggcaaccttttttgatggcgcgttgtttaattgcgttgtctaacgtggtgaagtcgagctttaacctttcgcccgcgcaactagcgctactgaaagatcccattgtcagtgcaggatatgaacgggtgcggtttgaagggttttcccattgcgccggggtttatgcgcggctcgatattttgcccgatggcttaaatggcgagtttttacaaagcggtacgactaatgttgatttcaatcaaccgatgctgtcggcgctggcgggagtgcgcaatagtgaagtggttacgctttcggtagggcaaaaatcggttggcctacatcttgagagccagcaggttattgaacgcaaagtgccacttccagtgaaatggattaaaggcctcagtagcgtgcaggtctaccttgcacagtcggtaaaaggtcatcagtttaataaagttcaggcacagcaactgtttcgctcattacccaaagggcaggtgaaaactgattactatttgcaggtgcgtagtacgacgccacaattttcgccagtaaaatcagtcaatgcagtgtgtatcggcggtctgcatcgcctgcgcttactggaacccttgttaccttttgttgactgcttgcaggtcttcgcacaaccagatatgcaatccaccacctggcaactctggtttggcgatctacgtttcacgctttctttatcacgcgattgctggcgtggattttctggtgaaggggcgacgctggatgcgctaaatgagggtattgacgaaagctggctgactgtttttgatgagcaggcacaggccaaccagaccattagcccgacatttttcacttccggtggcagtcagtggctgggaaaaaccgacacattagccgcgcaactggcagcaatgggattactgggttacgaccttaccgataatgcttatttttatcgccagttgccgttcaaactctcccgcgtaatgagtctgaacccgcgcctgaaaggggctgataaattgctgcaagagaataaagttgagattattagtcagcaaccagccagaatcgaggcgcgggtcgagggaagtggtgtacgacatacggtcattctcgacggcaacggtgaacgctgtacctgtgaatggttcagtaaatatcagggcgaaagaggaccgtgcaagcatgtgctggcggtgaagaaactgctaagacaatag

SEQ ID NO: 470113 - DNA, 747 bp, Shigella boydii
atggaacaagcgcatacccagcttatcgcccaactgaacgaacgtattttagcggcggacaacacgccgctttatattaagtttgctgaaacggtgaaaaatgccgtgcgcagcggggtgctggagcatggcaatattttgcctggcgagcgtgatttgagccagttaaccggcgtttcgcgcattacggtgcgcaaggcgatgcaggcgctggaagaagagggcgtggtgacacgttcgcgtggttacggcacgcaaatcaacaacatcttcgaatactcgttgaaagaagcgcgaggtttttctcagcaggtggtgttgcgcgggaaaaagcccgatacgctatgggttaacaagcgagtcgttaaatgccctgaagaggtggcgcagcaactggcggtcgaagcgggcagtgatgtctttttgttgaagcgtattcgttatgtcgatgaagaagcggtatcgattgaagaatcgtgggttccggtgcatttaattcatgatgttgatgccatcggtatctctctctatgactacttccgcagtcagcatatttacccgcaacgtacacgttcccgcgttagcgcccggatgccggatgctgagtttcagtcacacattcagctagatagcaaaataccggtgctggtgatcaagcaagtggcgcttgaccaacagcaacggcctgttgagtacagcatcagccactgtcgcagcgatctatacgtttttgtgtgcgaggagtag

SEQ ID NO: 470114 - DNA, 966 bp, Shigella boydii
atgagcagcgctcaattacacacgctgctgcctgaattaacgacgcgtcagccggttatggtgattggcgcggcggtcattgatgtgatcgccgacgcttacgccctgccctggcgcgggtgcgatatcgagctgaagcagcaaagcgtaaacgttggcggctgcgcgctgaatattgccatggcgttaaaacgcctcggcatcgaagcagacaacgcattgccgctcggtcagggagtatgggcggagattattcgcaaccggatggcgaaagagggattaatcagcctcatcgataacgccgaaggcgataacggctggtgcctggcgctggttgagcctgatggcgaacgcacgtttatgtcgttcagtggggtggaaaatcagtggaatcgcgaatggttggcacgattaaccgttgcgcctggcagcctgctctatttttccggctatcaactggcctcgccctgcggcgaattattagtggaatggctggaagggctgaacgacgtgatgccatttatcgattttggcccgcgtattggcgatatcccggatgcattacttgaacgcatcatgacctgtcgaccattggtgtcactcaatcgccaggaagctgaaattgccgccgaacattttgctttatccaccgatataacgacgctcggcaagcaatggcaggaaaaatttaccgcgccattgatcgtgcgtctcgacaaagaaggcgcgtggtattttagtgcgcaatcttctggttgtatttcggcatttccgacgcaagtcgtagacacgattggtgcgggtgatagccacgcaggtggcgttctggccgggctggcctccggcttaccgctggcagacgcagtgctgctgggtaatgctgtggcgtcatgggtggtcgggcatcacggcggtgattgtgcgccaacgcgtgaggaactactcctcgcacacaaaaacgtatag

SEQ ID NO: 470115 - DNA, 1005 bp, Shigella boydii
atgaaaacagaacgtattctcggtgctctttacgggcaggcgttaggggatgcgatgggaatgccctccgagctttggccacgctcccgcgtcaaagcgcattttggctggattgaccgttttctgccaggaccaaaggagaataacgcggcctgttattttgactgcgccgaatttaccgacgacacctcaatggcgctctgtctggcagatgcgttgctggagcgcgaaggcgaaatcgacccggatctgattgggcgtaatattctctgctgggccgaacgcttcgacgcgtttaacaaaaacgttcttgggccgacgtcaaaaatagccctcaatgccattcgtgagggtaaacctgttgccgaactcgaaaacaacggcgtgaccaacggcgcggcaatgcgagtgtctccgctgggatgtttacttccggcgcgcgatattgattcctttattgatgatgtagcgctggcgtccagcccgacccataaatccgatctggcggtcgcgggcgcggtagtcattgcatgggcgatttctcgtgccattgacggagaaaactggtcaacaattgtcgactcactcccctcgattgcgttatatgcacaacaaaaacgtatcaccacgttcagcgcttctctggcggctcgtctggaaattgcactaaaaattgtccgcaacgccgacggtacagaatccgccagcgaacggctttatcaggtcgttggcgcaggcaccagcaccattgagtccgtgccgtgcgccattgcactggttgaactggcacaaaccgacccaaaccgttgcgccatcctgtgcgctaatcttggcggcgataccgacaccatcggtgctatggcgacggcgatttgtggcgcgttgcatggcgttaacgctatcgatcctgcattaaaagcggaactggatgcggtaaatcagcttgatttcaaccgctatgccacggcgctggcgaaatatcggcaacaacgggaggcagtatga

SEQ ID NO: 470116 - DNA, 1278 bp, Shigella boydii
atgaaaacaacagcaaagctgtcgttcatgatgtttgttgaatggtttatctggggcgcgtggttcgtaccattgtggctgtggttaagtaaaagcggttttagtgccggagaaattggttggtcgtatgcctgtaccgccattgcggcgatcctgtcgccgattctggttggctctatcaccgaccgttttttctcggcgcagaaagtgctggcagtgttgatgtttgctggtgccatactgatgtatttcgctgcacaacagacaacgtttgccgggttcttcccgttactgctggcctactcgctaacctatatgccgaccattgcactgactaacagtattgcctttgccaatgtgccagatgttgagcgtgattttccgcgcatccgcgtgatgggtaccatcggctggattgcttctggtctggcgtgtggcttcttgccgcaaatgctgggttatgccgatatctcaccaaccaatattccgctgctgatcaccgccgcaagttcggcactgctgggcgtttttgcgttgttcttgccagatacgccgccaaaaagcaccggcaaaatggatataaaagttatgctcggcctggatgcgttgatcctgctgcgtgataaaaacttcctcgtctttttcttctgttcattcctgtttgcaatgccgctggcgttctactacatctttgccaacggttatctgacagaagtcggtatgaaaaacgccaccggctggatgacgctcggtcagttctctgaaatcttctttatgctggcattgccgtttttcaccaaacgttttggtatcaaaaaggtattattgcttggtctggtcaccgccgcgatccgctatggattctttatttacggcagtgcggatgaatatttcacttacgcgctattgttcctcggcattttgctgcacggcgtaagttacgatttttactacgttaccgcctacatctatgtcgataaaaaagcaccggtgcatatgcgtaccgccgcacaggggctgattacgctttgctgtcagggcttcggcagtttgctcggttaccgtcttggcggcgtaatgatggagaaaatgttcgcgtatcaggaaccggtaaatggactgacttttaactgggccgggatgtggactttcggtgcagtgatgattgccattattgccgtgctgttcatggtttttttccgcgaatccgacaacgaaattacggctatcaaggtcgatgatcgcgacattgcgttaacacagggggaagttaaatga

SEQ ID NO: 470117 - DNA, 1053 bp, Shigella boydii
atgacagatattgcgcagttgcttggcaaagacgccgacaaccttttacagcatcgttgtatgactattccttctgaccagctttatctccctggacatgactacgtagaccgcgtgatgatggataataatcgtccgccagcagtgctacgtaatatgcaaactctgtacaacaccgggcgtctggcaggaactggatatctttctattctgcccgtggaccagggggttgagcattctgcgggggcttcatttgccgctaatccgctctatttcgacccgaagaatattgttgaactggcgattgaagctggctgcaactgtgtggcgtcgacctacggcgtgctggcatcagtatcgcggcgttacgcgcaccgtattcctttcctcgtcaaactcaatcacaacgaaacgttaagctacccgaatacctatgatcaaacgctgtatgccagcgtagaacaggcgttcaatatgggcgcggtggcggttggcgcgaccatttattttggctcggaagagtcacgtcgtcagattgaagaaatttctgcggcctttgaacgtgcgcatgagctgggcatggtcaccgtgctgtgggcgtatctgcgtaactctgcatttaagaaagatggcgttgattaccatgtatccgccgacctgaccgggcaggcgaatcatctggcggcgaccattggtgccgacatcgttaaacagaaaatggcagagaataacggcggctataaagcgattaactacggttacaccgacgatcgcgtgtacagcaagctgaccagcgaaaatccgattgatctggtgcgttatcagttagctaactgctatatgggccgcgcagggttgataaactccggtggagccgcaggtggcgaaactgacctcagcgatgcggtacgtactgcagtcatcaacaaacgcgcaggtggcatggggctgattcttggacgtaaagcgttcaagaaatcgatggccgacggcgtgaaattgattaacgccgtgcaggacgtttatctcgatagcaaaattactatcgcctga

SEQ ID NO: 470118 - DNA, 1233 bp, Shigella boydii; identical to SEQ ID NO: 465396

SEQ ID NO: 470119 - DNA, 396 bp, Shigella boydii
gtgccgcgtaatgatgatctgaaagtatttgtgatgggtgaagtgaagaaactgagcaccctgaaaatggactttagcggcatgaccctgactgaagctctgggcaatgccgaaggtatcgacatgaccacctccaacgccagcggcatctttgtcattcgtccgctgaaaggcgagggtgggcgtaacggcaagattgccaatatctaccagctggatatgtccgatgcgacgtcgctggtgatggcgacagaattccgcctgcaaccttatgacgtggtgtatgtcaccaccgccccggtttcccgctggaaccgtctgatcaatcagttgctgccaactattagcggtgtccgttacatgacggatacagccagcgacattcataactggtaa

SEQ ID NO: 470120 - DNA, 561 bp, Shigella boydii; identical to SEQ ID NO: 267346

SEQ ID NO: 470121 - DNA, 744 bp, Shigella boydii
atgaaacgtgtctctttctctcttgcagaaacatatgaagctgatgtaattaaaaagtatcagcatttaaaaaaatgctcattttcagcagcgattaaagagtgtttaaagctaggggctcctgttttaaacaggataaatgaaaatattgctgctataactgatatagaggataagctacgtcagttttttaatgaggaaccatttgtgcaacggacaaggcctgaaataacaaaaggagagttttttcatagcatttataaatcgcatatcaaatatgaatatgatgttctcgatagaaagatatttcctcatgaaagcaccagaaatgctatgggagttgcagagaaaaagggaattaaagagaatgcgaccttaatgctggaatattataaagttgagaaggcaatttgtatttacacgaacagaaaagtttcccataccctgaatcgtgcaggagggttttataaaaccattctgattaaaaccagtgtttttggggattatttttttgacttttgcaattcagtttgcctgccgatagatgagttgattgagtatggtacgaaagaaacagtgaggcgacatcagattcgtagtacaggattttgtacttttcatattccgattttttatatcaataataaggctgtaatagtgcctgttctgagaacagaggaagtttcacaaagttccagaacaggtggagatgttattattattaacccatttgaagatgaatga

SEQ ID NO: 470122 - DNA, 228 bp, Shigella boydii; identical to SEQ ID NO: 8593

SEQ ID NO: 470123 - DNA, 1605 bp, Shigella boydii
atggtaactaaaaaggtaaaaacaaaccccccgtactatcgtgttttatccggcacctccatgccgtttccccacatacatgaagctgtttccgaacagttgcttctactcattttcaaagcacgcagattgtatctggatccagaatatcgtccttggtttgatgaacaacatcggattctctcggcattacgcgctaacacaaaactccaaagtattttagagaaaaacagagagaactactccataagtgagaccgataatccactatctaaagatctgtatgctgcttttcaggttatgtgccatttatacaatggttttgataacagactcgtcagcctgaaaacctggggagatatgaacagggaaccaacagcaaaatttgtcggccaaaatagtggtggctggaaaacacctgagatggaagaattcgtcagaaacgatttgttcaatattctgacagattgtaaagctcattgctcaccacttcccgctctggttcgacaaggatattgccatcaggatctttctgttgcgcactcatgtactaaagaattactggaacaactgaaccgataccatcaaattgatgaatcagcgatacttgccagaacccttggtttggctattaacaactgctatcactcagaaacagagattcctgaatggctttctccttttgaaaatgaatacaaaagtccctggaattgtgagaaaccagatactaacgatgtgagtaaacttagaaaacaattgctaacaatcgggcgtacagaattcgtggacaaaatgttttcgctagccaacaaaaatgcaacaaagataatatatgatggatacgttaaactttatgctctggaaatatatgaatggttaaataaattagtgcaatattttaaaggaaatgattttattcgttacacctggaagttcacaacaattatttccgatgaaagtgacacgattgaaaacaccaccgcatgggaaaaagactattgtcaaatcactatacagcgtgatgaacttctgaaactgatttataccaataccctgcaggatgcagcaatgaatcttgctgattgcctgcaacaggcatacacagaaccgttaaaaatggaaataaattatccaggaataaacattgatgcaaaagagcgtaaaattagaaaatctattgaattcaggagcgaactgaataacttcacaaacatcatgaaacaactggaaatatttgaaaaatggtataacgccaataaaattctgttggtaagtaacaaaaagatacgtacagaaaagattgacgtgaatattcgtcttgcaggactgaaaggctatgatctgaatgaaggtatacctgatggtcagggacgcagaattaaagatggtgtgaatgaacttgtcaaggcagatggcagtctacaacttccacaagatatcagtgacacttcgcttaaccgttaccgtcaagcagttcaacacattattaaggatgagatcgacacgttgctgatagcacagagggaaaaaaataaaataaatccatatagcgaagatagatactcgatacgacctttatggggaaaatgtctggtcgaacagtaa

SEQ ID NO: 470124 - DNA, 597 bp, Shigella boydii; identical to SEQ ID NO: 8595

SEQ ID NO: 470125 - DNA, 1317 bp, Shigella boydii; identical to SEQ ID NO: 267319

SEQ ID NO: 470126 - DNA, 165 bp, Shigella boydii
atgctcgatgccagcggcaaaccggggctgaattatttgtgtgccgggtatcagcgttatttccgccatctaccgccatatcttaaagcaatggctgatttgctggcgcacggtcgcccggccagtgacattatgcaggcacatttgctggtggtgaataagtaa

SEQ ID NO: 470127 - DNA, 189 bp, Shigella boydii; identical to SEQ ID NO: 464175

SEQ ID NO: 470128 - DNA, 525 bp, Shigella boydii; identical to SEQ ID NO: 465573

SEQ ID NO: 470129 - DNA, 300 bp, Shigella boydii
atgatggaactgcaacatcaacgactgatggcgctcgccgggcagttgcaactggaaagccttataagcgcagcgcctgcgctgtcacaacaggcagtagaccaggcatggagttatatggacttcctggagcatctgcttcatgaagaaaaactggcacgtcatcaacgtaaacaggcgatgtatacccgaatggcagccttcccggcggtgaaaacgttcgaagagtatgacttcacattcgccaccggagcaccgcagaagcaactccagtcgttacgctcactcagcttcatataa

SEQ ID NO: 470130 - DNA, 1407 bp, Shigella boydii
atgtcaaagcaacagatcggcgtcgtcggtatggcagtgatggggcgcaaccttgcgctcaacatcgaaagccgtggttataccgtctctattttcaaccgttcccgtgaaaagacggaagaagtgattgccgaaaatccaggcaagaaactggttccttactatacggtgaaagagtttgttgaatctcttgaaacgcctcgtcgtatcttgttaatggtgaaagcaggtgcaggcacggatgctgctattgattcccttaagccataccttgaaaaaggcgacatcatcattgatggcggtaacaccttcttccaggacaccattcgtcgtaaccgtgagctttctgctgaaggttttaacttcattggtacgggggtttccggtggtgaagagggcgcgctgaaaggtccttctattatgcctggcggtcagaaagatgcctatgaactggttgcgccgatcctgaccaaaattgctgccgtagctgaagatggcgaaccgtgcgttacctatattggtgcagacggtgctggtcactatgtgaagatggttcacaacggtattgaatacggtgatatgcagttgattgctgaagcctattcactgctgaaaggtggtctgaatctctccaacgaagagctggcgcagacctttaccgagtggaataacggtgaactgagtagctatctgatcgacatcaccaaagatatcttcactaaaaaagatgaagatggtaactatctggttgatgtgattctggatgaagcagctaacaaaggcaccggtaaatggaccagccagagtgcgctggatctcggtgagccgctgtcgttgattaccgagtctgtgtttgctcgttatatctcttctctgaaagagcagcgtgttgccgcgtctaaagttctgtccggtcctcaggcacagccagcaggcgacaaagcggagttcatcgagaaagttcgccgtgcgctgtatcttggcaaaatcgtttcttatgctcagggcttctctcaactgcgtgccgcgtctgaagagtacaactgggatctgaactacggtgaaatcgcgaagattttccgtgctggctgcatcatccgtgcgcagttcctgcagaaaatcaccgatgcctatgcagaaaatccaaaaatcgctaacctgctgttggctccgtacttcaagcaaatcgccgacgactaccagcaggcactgcgtgatgtcgtcgcttatgcagtgcaaaacggtattccggttccaaccttctctgcggcggttgcttattacgacagctatcgtgccgctgttctgccagcgaacctgatccaggcacaacgtgactatttcggtgcgcatacttataagcgtattgataaagaaggtgtgttccataccgaatggctggattaa

SEQ ID NO: 470131 - DNA, 171 bp, Shigella boydii
atggagcatatttctgctatcctcgattacagacaagcttggaaagtggaatataaattgttagatattctactgttaactatttgcaccaccatttctggtgcagaaggttgggaggatatagataatttgggtgaaacatatctcgattttttgaagcaatatagttga

SEQ ID NO: 470132 - DNA, 1320 bp, Shigella boydii
atggttattaagaatattttttggcaatttgcagagaagattttaaggttaatttttgcgatttttattagtgcgttgttggcaagacatttaggtgtcagtggctttggtctgtataactatattaatgcgattatttccgttgcattagttgtaacttcgctcgggtttaatcgaattttagttagagaatccacttgttgcaaagataaaattagtcacaatgagttgatatcaacatcgttttattcaagactgcttttttcaatccttatattcgctctcttatggggggggtacagctatatagataataaaaactcaataatatatttaatatccttcctttcagtaatttttgtttcatttgatgtaattgactatcacttacaaggacagtgtatatttaaaacagcaactctatgtagagttgtgagttttttaattgtgtcctttataagaatttttttagttttcgaaaatgcaacgttgatatggttctgtattaccatattatttgaatatgccatatctgccattttattatatttgagctctagatttatacatagaaacatttttactattaagataaaacacgtatcactaaataaagcaaagtatttgctgaaggaatcgtggtcagaaattatagcaggatttggagccattctgtttatgaaaatggatcaaatcatgttacaatatatgcttaatgctgagagtgttggtgtttattctgctgccttaaggataagtgaatcatggtattttttgccggcagcaattgtttcgtcagtatttcctgtaattatgaataaatataataaggaaaatacaaatgagtcggcgttggttgaattatttggtcatattatgacccttcttgtctggttatctatctgtgctgcgattactatttctttgtttggcccagcggtaatacattggttatttggtgatgaatatattagaagtgccacaatattgatatatcatgtatgggcaggagtttttttgagcatggggattctttctggttcatggttagtagctaaaaaaaaattaaaattaaatttataccgaaatatcggaggtttgatagtaaatttttttctaaatatcatattaataccagtgtatagtggtgttggagctgctattgcaacaatttcaggatttgcattcgctttcttgttttttgatttgtttcataaagagttaagggggatgttttttttaaaaataaaatcactttccccgattaatttaattcaagcaatcaggtttttatctaacataagattaaaatatctatag

SEQ ID NO: 470133 - DNA, 201 bp, Shigella boydii
atggggattgataatacaaaggcttgtatttgcaatggtgataatttcgtggttgataatattgatgtgatgaaaaatgtggagatgttaatcggctacagagcgattaaaagcaaatacctctccatactgcaaaactttggagcaggtaatattcatcttgataatgctaaccgtgtctgggaattacgcagaatctaa

SEQ ID NO: 470134 - DNA, 201 bp, Shigella boydii; identical to SEQ ID NO: 465760

SEQ ID NO: 470135 - DNA, 918 bp, Shigella boydii; identical to SEQ ID NO: 22868

SEQ ID NO: 470136 - DNA, 846 bp, Shigella boydii
atgtctgatatcacagcctcccgtccggaagtggtcaacgggcatacggccgttatctgctcaaccagtatccgccacattctggctgtacgaaaaagtacactgctgcaaatcgacacacttatccggcaactggctgaaatctcagcaatgacagaaagtattggcggtaaaaccgcactggactgggccatgaaacagaattttcgctgcggctgctggctgatggagaaacctgaaacggcaatgaaagccatcacccgcaaccttgaccgcgaaatctggcgtgacctgatgcaacgttccgggatgctgtcattaatggatgcgcaggcccgtgatacatggtaccggtcactggagtacgataattttccggaaatcagtgaagcgaacattctgagcacatttgaacaactgcaccagaataaggatgaggtgtttgagcgaggggtaatcaatattttcaggggactgagctggaattacaaaaacaattcaccctgtaaatttggcagtaaaattatcgtcaacaatctggtgaggtgggacagatggggatttcatctgaacaacggcccacaggccgatcgacttgccgacctggaaagaatgctgcatctgttcagcggcaaaccgatccccgacaaccgggaaaacatcactattcgtctggatgatcacatccagtctgttcagggtaaagaggactatgaagatgagatgttcagcatcagatactttaagaagggctccgcgcatatcacgttcagaaaaccagaactggttgatcggctaaatgacatcgttgcgaagcattatccggggcaactatcagccatctga

SEQ ID NO: 470137 - DNA, 423 bp, Shigella boydii
atgaaactggccctgacgctggaagctgacagcgttaacgtacaggcactgaacatggggcgaatcgtcgttgacgtcgatggtattgagctcgctgaactgattaacgaagtcgctgaaaacggttattcactccgcatggtggatgaacgtggcgctaccgaaacaccggcgacttctgccagccctcatcagttgccggaagacaatacagtgatacagagcgcgatgccattaaccactgaaacagcgctggatatcctcattgcgtggctgcaggacaatatcgactgcgagtccggaattattttcgacaacgacgagaataaaacggattcagttacactgttaccctgtattaaacaggtgcgacaggatgtccgtaccctgcgccatatgcaacttctgcaccagaaccggtga

SEQ ID NO: 470138 - DNA, 378 bp, Shigella boydii
atgaaaacattatccgacacacacatacgggaggcatcgcgctgcccgtctcccgtcaccgtctggcagacactgctcacccgactgctggaccaacactacggcctcacgctgaatgacacaccgttcgctgatgaacgtgtgattgagcagcatattgaggcaggcatttcactgtgcgatgcggtgaactttctcgttgaaaaatacgcgctggtacgtaccgaccagccgggattcagcgcctgtaccaactctcagttaataaacagcatcgatatcctccgggctcgccgggcgactggcctgatgacccgcgacaattacagaacggtaaataacattacccagggtaagtatcaggaggcgaaacgatga

SEQ ID NO: 470139 - DNA, 369 bp, Shigella boydii
gtgtcagacacactccccgggacaacgcatcccgacgataacaacgaccgcccctggtgggggctaccctgcaccgtgacgccctgttttggggcacgtctggtgcaggagggtaaccggttgcattaccttgccgaccgcgccggtatcagaggccggttcagcgacgcggatgcgtaccatctggaccaggcctttccgctgctgatgaaacaactggagctcatgctcaccagcggtgaactgaatccccgccatcagcataccgtgacactgtatgcaaaagggctgacctgcgaagccgacaccctcggcagttgtggctacgtttatatggctgtttatccgacgcccgaaacgaaaacgtaa

SEQ ID NO: 470140 - DNA, 222 bp, Shigella boydii; identical to SEQ ID NO: 9110

SEQ ID NO: 470141 - DNA, 213 bp, Shigella boydii; identical to SEQ ID NO: 464907

SEQ ID NO: 470142 - DNA, 822 bp, Shigella boydii
ttgaatctcagtattccgttagaacgctggttaccgcgtagccgggtttcctatcagatgaccagccagaaagatcgcccaacccaacatgaaatgcgtcttgatggctcactgctggatgatggtcgcctgagctatagcctggaacaaagtctggatgacgataacaaccataacagtagcctgaacgccagttaccgttcaccttatggaaccttcagtgccggatacagttacggtaatgacagcagccaatacaattacggcgttaccggcggcgtggttatccatcctcatggcgtgacgctctcgcaatatctgggcaacgcttttgcgcttatcgatgctaacggggcttctggcgtgaggatacaaaactatccggggattgctactgatccctttggctatgcagtgattccttatctcacgacttatcaggaaaaccgtctctcggtagatactacgcagctgcccgataacgtcgatcttgaacaaacaacacagtttgtggtgcccaacagaggtgcaatggtagcggcgcgtttcaacgccaatatcggttatcgcgtacttgttacagtcagcgatcgcaacggtaaaccgttgccctttggcgcacttgccagcaacgatgatacggggcaacaaagtatcgtcgatgagggcggcatactatatctctctgggatatcgagtaaatcacaaagctggactgtacgctggggaaatcaggcagatcaacaatgtcagtttgcttttagtacaccggattcagaaccaacaacctctgtattacaaggcacagcgcagtgccattaa

SEQ ID NO: 470143 - DNA, 213 bp, Shigella boydii; identical to SEQ ID NO: 464907

SEQ ID NO: 470144 - DNA, 1104 bp, Shigella boydii; identical to SEQ ID NO: 465681

SEQ ID NO: 470145 - DNA, 636 bp, Shigella boydii
atggaatctgcgcccagcgcgacagagttaataccgttggcactgctattactaccaagcgcaagactcttatcaccagttgcattactggctgtgcctaaggcaatggtgtttaagcctctcgactggctaccattacccagagcgatggcatccacgccatcagctttgttgccctggcctatggcgattgcattatctgccagagcctggctgccatttcctaatgcgatagtattgactttatcggcaaggcttccgaaccccattgccatgctattagtcccttttgccttcgcattattgccaatagcagttgcattttcagcggcttcggtctcagcacctatcgcaatagcgttcgctgcgctggcaagtgattgtctgccaaatgcgaggctgtcagtaccgctagctacactgctacgccccagggcaattgcgttttcttcagatgcgacgctacttgctcccagcgccattgaatacgcttttgacgcattggcggtgtcgccaagagcaatactcataatatcagtagctttagtggcatttcccagggcaatggcgtttgctccttccgctttggaagagtcccccatagcaatagacaatttacccaatgcttttgaataa

SEQ ID NO: 470146 - DNA, 774 bp, Shigella boydii
gtgccacttcactgtgccgtccaggatattggtgattttgctggcggtattgttgccatgagctgcagtgaagacaccattgtccttatcccatttcagcgcatcctcaccaagattagtcaccgtctcagtcagattagagatgttggtggtgttagtggcgatattggtggtattcgtcgccacggcatcgttggtggttttcagctgagagccgttaacggcatcggtgctgccagtcgtcaggtcgccatctttaacgttggtgattttgctggtggtctcggtgccatgagctgccgtgaatacaccattgtccttatcccatttcagcgcatcctcaccaagattagtcaccgtctcagtcagattagagatgttggtggtgttagtggcaatattggaagtgttattggcgatattggtggtattcgtcgccacagcatcgttggtggttttcagctgagagccgttaacagcatcagtgctgtcagccgtcaggtcggcatctttaacgttggtgattttgctggtggtatcctggccgtgagctgcactgaatgcctttttagtttcgttccagagcagggcatcagcctgaaggtcaccaacggaatccgtcaggttggtgatattggtggtattggtggcaatatttgccgtattcgtggcaatgttgctggtattagtagcgatattggcggtgttggcttcgacatcgtcattggtagctttcagttgggaaccgttaaccgcatccttactggaggctga

SEQ ID NO: 470147 - DNA, 456 bp, Shigella boydii; identical to SEQ ID NO: 464908

SEQ ID NO: 470148 - DNA, 747 bp, Shigella boydii; identical to SEQ ID NO: 107025

SEQ ID NO: 470149 - DNA, 1542 bp, Shigella boydii
atgccaacagttccaatttctatgagaaaacttaaagaaattcttagacttaaatacggtgttggactcagccatcgacaaattggtcgtagtcttgcaatctccccttccgttgtatccagatatgctaatcgggcggctcaacttggcataaagcagtggcccttacctacaggatgggatgatacaaaactaaaacatgcgttccttcagacccaggttaagatgaagaagcactctctgcctgactgggctacagtacaccgggaactgcgtaataaatgcgtgacgctgcagctactctgggaagaatactgtgagcgtaatccaggcggtttttacagctataaccattactgccggatgtaccgtgaatggctcaaaaccacttcaccatcaatgcgtcaggtacataaagctggcgaaaaacttttcgttgattactgtggacctaccgttggcgttaccgaccctgagaccggagaaataagaactgctcaggtcatcgtagctgttctcggggcatcaagttacacatgggcagaggccacctggtctcagcagcttgaagactgggtgatgagtcatgttcgctgcttccagtggttgggtggcgttcctgaacttgttgttccggacaatctgaaaagcgccacatccagggcatgtaagtatgatcctgacgttaaccctacctaccagcagatgcttgagcattataatgtcgcagttttgcctgcgcggccacgtaaaccgaaagataaagccaaagctgaagttggcgttcaggttgttgaacgctggatcatggcccgaatcaggcatgagatcttctacagccttgcatcgcttaatcagcgcattcgggagttgctggaaagactgaataacaaaataatgcagaagttgggttattcacgtgcagaactcttcatccagcttgataaacccgcactgaagcctcttcctgaagccagttacagttacaccctggtgaagaaagtcagagttcatgccgattaccacgtggaaatcgacaaacattactactcggttccatgttcgctgttaggccagcaactggaagcatggatctccggagaactggtaagactcttcaatcaggggcaggaggttgctgtgcacccgcgcaagcgtacttatggctacagtacccgcaacgagcacatgcctgaagctcatcgacagcatgccacctggacgccagagcgtcttctggaatgggcggggcacataggcagtgaaactcatagttatgtgcttcatatactgaactctcgttcacatccggaacaaagctatcgcttctgccttggactcctgaaccttcataaaaaatacagtaaagccagacttaatgcagcatgtgcaagagctctgaaaacaaaggtatggcgtctgtcaggtattaaatcgatcctggaaaaaggtctggataaacaacctgttcaggatccaaaaccagatctgttatccacgatggaacacgaaaacgtacgcggcagtgagtattaccactga

SEQ ID NO: 470150 - DNA, 213 bp, Shigella boydii; identical to SEQ ID NO: 464907

SEQ ID NO: 470151 - DNA, 234 bp, Shigella boydii
atgccgggttgtacatcacgtttattgcccgaaggccctttctcacgcgaacaggctgttgccgtcaaaacagcttaccgcaatgtgtttactgaagatgaccagggaacatattcccggctggttatccgtaatgctgaaggtcagctacgctggcgctgctggaattttgagcccgatgccggcaaacaacttaatgtgtggctcgccagtgaagggcttctcagacaataa

SEQ ID NO: 470152 - DNA, 819 bp, Shigella boydii
atgcgattagccagtcgttttggttatgcgaaccagatacgccgtgaccgccccttaactcgtgaagaactgatgcaggtcgtccccagcgtattcggggaagagaaacacacatccagaagcgagaactatacctggatccccaccatcaccgtgctggaaagcctgcagcgggaaggcttccagccattcttcgcctgccagacccgcgtgcgcgacccgggccgccggggatacacaaaacacatgctgcgtctgcggcgggccggagagataaacggagaacatgtccctgaaattattctgctcaactctcatgacggtacctccagctaccagatgctgccgggttacttcagattcgtctgccagaatggctgcgtctgcggtcagtctctgggggaagtgcgtgttccacaccggggagacgtagtggagaaagttatcgaaggggcttacgaggtggtgggggtttttgaccggattgaggagaagcgtgatgccatgcagtctctggttctgccgccaccggcacgccaggcgctggcacaggcggcactgacttaccgttatggtgacgaacatcagcccgtcaccaccgctgacattctgacgccacgacgccgggaggattacggtaaggacctgtggagtgcttatcagaccatccaggaaaatatgctgaaaggcgggatttccggtcgcagcgctaaaggaaaacgtatccacacccgtgccattcacagcatcgacaccgatattaagctcaaccgcgcattgtgggtgatggcagaaacgctgctggagagcatgcgctga

SEQ ID NO: 470153 - DNA, 918 bp, Shigella boydii
atgaccgccctgaatgctgagacggacgctgttattttcaccgtttacaccggtctgatggctgcgggagcctgccagaatccggtcatagtccattgcctgtgtcagcatggatgtatacagggggacttcagcacgataagcattttcactgcgcaggtaccagtcttcatcgctgtcacggttcagggtgtagttaaaggcgccggcctgaagcgggcgactcagggcaaacgcaccttcttctgtggtggcgccattctgtgcatccacaacccggataccctgtccggaggttgccaccccgaggttactgtttccgacatttgtaaacgcaagccaggttttgccggttgcctgaccaccattaatcaccagctggtcagaggtattgctgccatcaaggcgaacacgcatattgatggtgccaccctgaccggtgaggttactggtggtcagtttatggaacgttaccggggagtcgccttttgcaacagcacggctcagcgcggcatccggtgtcgtctgattatcaaagcgaatctcccctgcgttaacaatatcgccggtactgaccacatcgccattcagtaccatgctggcacctttactgagctgtgttctgccactcagacttcccccggcagccagcgtcagtgttccacgatgtccgacagtggtgttgctggccagtcctccggcattaaccgtaaagctgccgccattttccagcagcaggccgctggcctgaccggatgtgccatcaatactgaacttaccgctggcattggtcccctcaacagtggcaccactgtctgcaatcagggcaccaccggatgtcatggtgacacctgttgccttaccaccggcagacactgccagggttccgccgtcatccaccagtgttttccaggctga

SEQ ID NO: 470154 - DNA, 228 bp, Shigella boydii
atggtgttgtttctcgctgaggggtttcctgaactaagccgaagagttcagaagttgatgcctgatagaaacgtgtttttttctctagcccacaaatacgaatcgcctccagcaaacgtaaagtccccatcgcatctacgtcagcagtatattcaggtgattcgaatgaaaccgctacatgagattgagcgccaaggttataaacttcgtctggttggatttctttaa

SEQ ID NO: 470155 - DNA, 213 bp, Shigella boydii; identical to SEQ ID NO: 464907

SEQ ID NO: 470156 - DNA, 924 bp, Shigella boydii
atggcaaagcaaaagttcaaactcaccaactggcccacctacaataaagccctcatcaaccgtggctccataactttctggctggatgatgaagctattcaggcctggtatgagtcggcaacgccttcatcacggggaagacctcagcgctattctgatctcgccatcaccaccgttctcgtcattaaacgcgtgttcaggttgaccctgcgggctgcacagggttttattgattccatttttacactgatgaatgttccgttgcgctgcccggattacaccagtgtcagcaagcgcgcaaagtcggttaatgtcagtttcaaaacgcccacccggggtgaaatcgcacacctggtaattgattccaccgggctgaaggtcttcggtgaaggcgagtggaaagtcaaaaagcatggccaggaacgccgccgtatctggcgtaagctgcatctcgccgttgacagtaaaacacatgaaatcatctgcgctgacctgtcgctgaacaatgtgacggactcagaagccttcccgggtcttatccggcagactcacagaaaaatcagggtagcatcggcagacggcgcttacgacacccggctctgtcacgatgaactgcggcgtaagaaaatcagcgcgcttatccctccccgaaaaggtgcgggttactggcccggtgaatatgcagaccgtaaccgtgcagtggctaatcagcgaatgaccgggagtaatgcgcggtggaaatggacaacagattacaaccgtcgctcgatagcggaaacggcgatgtacagggtaaaacagctgttcgggggttcactgacgctgcgtgactacgatagtcaggttgcggaggctatggccctggtacgagcgctgaacaaaatgacgaaagcaggtatgcctgaaagcgtgcgtattgcctga

SEQ ID NO: 470157 - DNA, 327 bp, Shigella boydii; identical to SEQ ID NO: 464915

SEQ ID NO: 470158 - DNA, 534 bp, Shigella boydii
ttgtctaataaagaatggctgtactttttaaatgcgggagatatttttttctctgatgatgttttaaataaattatatgactttattataaatagtaatttgactaatttgatatatgcaccttatattagtgatgggaaaatagataatactcaacttttttctttgtcctatctttcttcccatatgattaatcatcaaagtatgcttctacacaaggaactgtttcaaaaacagttatatgatattaactataggttttgtgctgattatgcattattattaaatttgtttgataatatcaaaccggtaaagacggactttattattgttgattatgattcgaaagggatcagttcattagatgataataaagtatttatatggaaagaaagaattcttgctgttctgaaatcaaacttaagcttttataaaaagctatttttattgaaaagggcttttggggtatacccatatcatttattaaaaagtaaattaaaatgcatgaagaatataatgacacattgtcgatag

SEQ ID NO: 470159 - DNA, 255 bp, Shigella boydii; identical to SEQ ID NO: 464791

SEQ ID NO: 470160 - DNA, 327 bp, Shigella boydii; identical to SEQ ID NO: 464915

SEQ ID NO: 470161 - DNA, 387 bp, Shigella boydii
gtgtgccagcaccacggcagcggcattgtggtacagcgcgcgtttaatcacctcccggggatgaacttccgtgcggttgatggtgccggtgaagagggtttcaccggcaatcagctgattctggttgttcagatacagcacccggaactcttcccgctccagtcccgccatgttcagaatcagccattcccgtgccgcacgggtggaggtgaaggccacgccgggttcatgaagatggcggtccagggtttgcagggcccgcagaatgagactgcgctcgccgggcgtcatgtttccgggcagaaaggaaagctgctgcattgtccctgccccattcagtcgatgatgcgcataatggcgctgcattccggatgctgcagggcgtaa

SEQ ID NO: 470162 - DNA, 324 bp, Shigella boydii; identical to SEQ ID NO: 465528

SEQ ID NO: 470163 - DNA, 327 bp, Shigella boydii; identical to SEQ ID NO: 462700

SEQ ID NO: 470164 - DNA, 468 bp, Shigella boydii; identical to SEQ ID NO: 461580

SEQ ID NO: 470165 - DNA, 258 bp, Shigella boydii
atgcatgaaggtgcgatagccacaggaaccgtcattaatgataagggctggcaggtcgtcaaacccggcgcagtggcaacagacaccgttgtgaataccggcgcagaaggaggaccggatgcagaaaatggtgataccgggcagtttgttcgcggaaatgccgtacgtaccaccatcaataaaaatggtcgtcagattgtggctgctgaaggaacagcaaataccactgtggtttatgccggctgcgtattaccgtga

SEQ ID NO: 470166 - DNA, 1251 bp, Shigella flexneri
atggaaagtaaagtagttgttccggcacaaggcaagaagatcaccctgcaaaacggcaaactcaacgttcctgaaaatccgattatcccttacattgaaggtgatggaatcggtgtagatgtaaccccagccatgctgaaagtggtcgacgctgcagtcgagaaagcctataaaggcgagcgtaaaatctcctggatggaaatttacaccggtgaaaaatccacacaggtttatggtcaggatgtctggctgcctgctgaaacccttgatctgattcgtgaatatcgcgttgccattaaaggcccgctgaccactccggttggtggcggtattcgttctctcaacgttgccctgcgtcaggaactggatctctacatctgcctgcgtccggtacgttactatcagggcactccaagcccggttaaacaccctgaactgaccgatatggttatcttccgtgaaaactcggaagacatttatgcgggtatcgaatggaaagctgactctgccgacgccgagaaagtgattaaattcctgcgtgaagagatgggcgtgaagaaaattcgcttcccggaacattgcggtatcggtattaagccgtgttctgaagaaggcaccaaacgtctggttcgtgcagcgatcgaatacgcaattgctaacgatcgtgactctgtgaccctggtgcacaaaggcaacatcatgaagttcaccgaaggcgcgtttaaagactggggctaccagctggcgcgtgaagaatttggcggtgaactgatcgacggcggcccgtggctgaaagttaaaaacccgaataccggcaaagagatcgtcattaaagacgtgattgctgatgcattcctgcaacagatcctgctgcgtccggctgaatatgatgttatcgcctgtatgaacctgaacggtgactacatttctgacgctctggcagcgcaggttggcggtatcggtatcgcccctggagcaaacatcggtgacgaatgcgccctgtttgaagccacccacggtactgcgccgaaatacgccggtcaggacaaagtaaaccctggctctattattctctccgctgagatgatgttacgccatatgggctggactgaagccgcagacctgattgttaaaggtatggaaggcgcgatcaacgccaagaccgtaacctatgacttcgagcgtctgatggaaggcgctaaactgctgaaatgttcagagtttggtgatgcgatcatcaagaatatgtaa

SEQ ID NO: 470167 - DNA, 654 bp, Shigella flexneri
atgcggcaattcataatctctgaaaataccatgcaaaaaacttcttttagaaatcaccaggttaagcgattcagctcgcaacgttctaccaggcgtaaacatgaaaaccagcccacgcgtgtgatcctcttcaataaaccctacgatgttcttccgcagttcaccgatgaaaccggacgcaaaacattaaaagaattcatcccggttcagggcgtttatgcagcaggtcgccttgaccgcgatagcgaagggttgctggtgctgaccaataacggcgcgttgcaggcgcgtttaacccagccgggtaaacgcaccggaaaaatctattatgtgcaggtggaaggtattcccacacaagacgcacttgaagccttgcgcaatggcgtaaccttaaatgatggccctaccctgcccgcaggcacggagctggttgacgaacccgcgtggttatggccgcggaatccaccaattcgtgaacgcaaaagtattcccaccagctggctgaagatcaccttatatgaaggacgtaatcgccaggtgcgccgcatgaccgcccatgttggtttccccacgctgcgactgattcgctatgcgatgggagattactctttggataatcttgccaatggcgaatggcgagaagtgacagattaa

SEQ ID NO: 470168 - DNA, 462 bp, Shigella flexneri
atgtttaaaccgcacgttaccgttgcttgcgtggtgcacgcagaaggcaaatttttagtcgttgaagagacgattaatggtaaagcgttatggaaccaacctgccgggcatctggaagccgatgaaaccttagtggaagccgccgcccgtgaactgtgggaagaaaccggcatcagcgcgcagccgcaacactttattcgtatgcatcagtggattgcgccagataaaacgccgtttttgcgtttcctctttgccattgagcttgagcaaatatgcccgacccagcctcatgacagcgatatcgactgctgccgttgggtcagcgccgaagaaattttacaggcgtcaaatcttcgttcgccgctggtggcggaaagtattcgttgttatcaaagcgggcaacgttatccgctggagatgattggcgattttaactggccttttacaaagggtgtcatctaa

SEQ ID NO: 470169 - DNA, 1107 bp, Shigella flexneri
atgtctgaaaccgcaaaaaaagtaatcgtcggcatgtccggcggtgtcgattcctccgtttctgcctggctgttgcaacaacagggatatcaggtcgaaggcctgtttatgaagaactgggaagaagacgacggtgaggaatattgcacagcggcagcggatctggctgatgcccaggcggtctgcgacaagctcggcattgaactgcacaccgttaactttgctgccgagtactgggacaacgtcttcgaactgttccttgccgaatataaagccggtcgcacgccgaatccggatattctgtgcaacaaggagatcaaatttaaagccttcctcgaatttgccgccgaagatttaggtgccgattatatcgctaccggtcattacgtacgtcgggccgatgtcgatggcaagagccgcctgctgcgtggtctggacagcaataaagaccagagctacttcctttatacgctcagccatgagcagattgcgcaaagcctgttcccggtaggcgaactggaaaaaccgcaggtgcgtaagattgctgaagatcttggtctggtcaccgcgaagaaaaaagactctaccggtatttgcttcattggcgaacgtaaattccgcgagttcctgggccgttatctcccggcgcaaccgggcaaaatcattaccgtcgatggcgatgaaattggtgagcaccaggggctgatgtatcacactctcggtcagcgtaaaggtctgggtatcggtggcaccaaagaaggcaccgaagaaccgtggtatgtggtggacaaagacgtcgaaaacaacattctggttgtcgctcagggccatgaacacccgcggctgatgtctgtcgggttgattgcccagcagctgcactgggtcgatcgcgaaccattcaccggcactatgcgttgcacggtaaaaacccgctatcgccagaccgacattccgtgcaccgtcaaggcgctggacgacgatcgcattaaagtgattttcgatgagccggttgccgccgtgacgccgggccagtctgccgtcttctataacggtgaagtgtgcctcggtggcggtattattgagcagcgtctgccgctgccggtctga

SEQ ID NO: 470170 - DNA, 642 bp, Shigella flexneri
gtggcaaagaattactatgacatcaccctcgccctggccggtatttgtcagtcggcacgcctggtgcaacaactcgctcaccaggggcattgtgatgccgatgcgctacacgtctcactcaacagtattattgatatgaaccccagctcgacgctggcggtttttggcggtagcgaagccaacctgcgcgtcgggctggaaaccctgctcggcgtgctcaatgccagcagttgccagggcttaaacgccgaattaacccgctacacactcagcttgatggtgcttgagcgcaaactctcctcagcgaaaggcgcgctcgacactctgggcaaccggatcaacggcctgcaacgccagctcgaacacttcgatttacagtccgaaacgctgatgagcgcgatggctgctatctatgttgatgtgatcagcccgcttggcccgcgcattcaggtcaccggttcccctgctgtactgcaaagcccacaagtgcaggcgaaagttcgcgcaaccctgctggcaggcattcgcgccgccgtgctctggcaccaggtcggcggcggacgtctacaactgatgttttctcgtaatcgcctgaccactcaggcaaaacaaattcttgctcatttaaccccggagttgtga

SEQ ID NO: 470171 - DNA, 1371 bp, Shigella flexneri
atggaattatcctcactgaccgccgtttcccctgtcgatggacgctacggcgataaagtcagcgcgctgcgcgggattttcagcgaatatggtttgctgaaattccgtgtacaagttgaagtacgttggctgcaaaaactggccgcgcacgcagcgatcaaggaagttcctgcttttgctgccgacgcaatcggttaccttgatgcaattgtcgccaatttcagcgaagaagatgccgcacgcatcaaaaccatcgagcgtaccactaaccacgacgttaaagcggttgagtatttcctgaaagaaaaagtggcggagatcccggaactgcacgcggtttctgaattcatccactttgcctgtacttcggaagatatcaataacctctcccacgcattaatgctgaaaaccgcgcgtgatgaagtgatcctgccgtactggcgtcaactgattgatggcattaaagatctcgccgttcagtaccgcgatatcccgctgctgtctcgtacccacggtcagccagccacgccgtcaaccatcggtaaagagatggcaaacgtcgcctaccgtatggagcgccagcaccgccagcttaaccaggtggagatcctcggcaaaatcaacggcgcggtcggtaactataacgcccacatcgccgcttacccggaagttgactggcatcagttcagcgaagagttcgtcacctcgctgggtattcaatggaacccgtacactacccagattgaaccgcacgactacattgccgaactgtttgattgcgttgcgcgcttcaacaccattctgatcgactttgaccgtgacgtctggggttatatcgcccttaaccacttcaaacagaaaaccattgctggtgagattggttcttccaccatgccgcataaagttaacccgatcgacttcgaaaactccgaagggaatctgggcctttccaacgcggtattgcagcatctggcaagcaaactgccggtttcccgctggcagcgtgacctgaccgactccaccgtgctgcgtaacctcggcgtgggtatcggttatgcgctgattgcgtatcaatccaccctgaaaggcgtgagcaaactggaagtgaaccgtgaccatctgctggatgagctggatcacaactgggaagtgctggcagaaccaatccagacagttatgcgtcgctatggcatcgaaaaaccgtacgagaagctgaaagagcttactcgcggtaagcgcgttgacgccgaaggcatgaagcagtttatcgatggtctggcgttgccagaagaagagaaagcccgcctgaaagcgatgacgccggctaactatattggtcgagctatcacgatggttgatgagctgaaataa

SEQ ID NO: 470172 - DNA, 672 bp, Shigella flexneri
atgcgcgtactggttgttgaagacaatgcgttgttacgtcaccaccttaaagttcagattcaggatgctggtcatcaggtcgatgacgcagaagatgccaaagaagccgattattatctcaatgaacatttaccggatattgcgattgtcgatctcggattgcctgacgaggacggtctgtcactgattcgccgctggcgtagcaacgatgtttcactgccgattctggtattaaccgcccgtgaaagctggcaggacaaagtcgaagtattaagtgccggtgctgatgattacgtgactaaaccgtttcatattgaagaggtgatggcgcgaatgcaggcattaatgcggcgtaatagcggtctggcttcacaggtcatttcgctccccccgtttcaggttgatctctctcgccgtgaattatctattaatgacgaagtgatcaaactgaccgcgttcgaatacaccattatggaaacgttgatacgcaataatggcaaagtggtcagcaaagattcgttaatgctacaactctatccggatgcggagctgcgggaaagccataccattgatgtactgatgggacgtctgcgcaaaaaaattcaggcacaatatccgcaagaagtcattaccaccgttcgcggccagggctacctgttcgaattgcgctga

SEQ ID NO: 470173 - DNA, 1461 bp, Shigella flexneri
atgaaaaaattactgcgtctttttttcccgctctcgctgcgggtacgttttctgttggcaacggcagcggtagtactggtgctttcgcttgcctacggaatggtcgcgctgatcggttatagcgtcagtttcgataaaactacgtttcggctgttacgtggcgagagcaatctgttctatacccttgcgcagtgggaaaacaataagttgcatgtcgagttacccgaaaatatcgacaagcaaagccccaccatgacgctaatttatgatgagaacgggcagcttttatgggcgcaacgtgacgtgccctggctgatgaaaatgatccagcctgactggctgaaatcgaatggttttcatgaaattgaagcggatgttaacgataccagcctcttgctgagtggagatcattcgatacagcaacagttgcaggaagtgcgggaagatgatgacgacgcggagatgacccactcggtggcggtaaacgtctacccggcaacatcgcggatgccaaaattaaccattgtggtggtggataccattccggtggagctaaaaagttcctatatggtctggagctggtttatctatgtgctctcagccaatctgctgttagtgatcccgctgctgtgggtcgccgcctggtggagtttacgccccatcgaagccctggcaaaagaagtccgcgaactggaagaacataaccgcgaattgctcaatccagccacaacgcgagaactgaccagtctggtacgaaacctgaaccgattgttaaaaagtgaacgcgaacgttacgacaaataccgtacgacgctcaccgacctgacccatagtctgaaaacgccactggcggtgctgcaaagtacgctgcgttctctgcgtagtgaaaagatgagcgtcagtgatgctgagccggtaatgctggagcaaatcagccgcatttcacagcaaattggctactacctgcatcgtgccagtatgcgcggcgggacattgctcagccgcgagctgcatccggtcgccccactgctggacaatctcacctcagcgctgaacaaagtgtatcaacgcaaaggggtcaatatctctctcgatatttcgccagagatcagctttgtcggtgagcagaacgattttgtcgaggtgatgggcaacgtgctggataatgcctgtaaatattgcctcgagtttgtcgaaatttctgcaaggcaaaccgacgagcatctctatattgtggtcgaggatgatggccccggtattccattaagcaagcgagaggtcattttcgaccgtggtcaacgggttgatactttacgccctgggcaaggtgtagggctggcggtagcccgcgaaatcaccgagcaatatgagggtaaaatcgtcgccggagagagcatgctgggcggtgcgcggatggaggtgatttttggtcgccagcattctgcgccgaaagatgaataa

SEQ ID NO: 470174 - DNA, 282 bp, Shigella flexneri
atgacagaagccgaaatactgcgattaatccgccgcgtctctggaatcagccagcaggctgacgaacagaccacgcagccggacagcgtgacagccgaaaattatgcgcgtgttgttgctgaggtgatgcgccgtgatggtatccagcttaatgatgcggatatgcgcgacatacggatccgcgttctggaaatgctggcctacaatcgccgcgttgaactgtatcgggagaaggagaaaatcacgtaccactggaagaagccggagcggttacggcggtaa

SEQ ID NO: 470175 - DNA, 1662 bp, Shigella flexneri
ttgaccgcctggaataagtacgcagaagacgtaaaaacgggcaaaattccggcctgtaaacggttaaaacaggctgttaaacggtacttttcggaccttaaaagccccctttacacgttcgatcgtgaggttgtggagcggtttattgccttttccagggtgtgcccgcacgtaaaaggaccgatgcgtggcagacccattgagctggagccgtggcagcagttcgcctttgcgtgcatcctcggctttaaggttaaggccaccggacggcgcaaatacacgagcgcctttatcgaagtgccgcgcaaaaatgcgaaatccacgaccgccgcgattctggctaactggtttctgattatggagaacggtcagcaggatatctacaccgcagcggtgagccgtgaccaggcgcggatcgtgtttgataatgcgcgtcagatgtgccttttatcccgaccgttacgcaggcgggtgaatattcaggcgcataaggtgatacacccgaaaagcaacagcctgttaaagccgctggcagcaaaagcggcaaccatcgaggggacaaaccccagtctttccatcgtggacgaataccacctacaccccgataacggcgtttattccgcgcttgagctggggatgggcgcacgtcccgaagggctgttatttgccattaccacatcgggcagtaacgtcgtttcagcctgtaaacagcactatgattattgctgccagatcctggacggcgaagaggtcaacgattcaatttttgtactgatttacgaactggacgacgaaaacgaggttgatgatccggcgatgtggataaaggcgaaccctaatattgatgtttccgtggatcgtgaaaaactggcctcaaccatccagaaagcgcggggtattccgtcgcagtgggtggagatgatgacaaagcgatttaatatctggtgtcaggggactaccccgtggatgggtaatggtgcatgggctgagtgtgccggaacgttcacggaggaagatttacacggtcaggagtgttacgcggggctggacttatcatcaaccagcgatatttccagcgtatgctatgcctttccggtcggtaaaaccattatgctgatttcccgtcattatctgccggagttccagctacagaaccccgccaataaaaaccgcgctgtctatcgccagtgggctaaagcgggctggatacgcacaacgccaggtgactgcattgattacgaccggatcagagatgacatcatgcaggatgcggagaaatttaatatcaggctggtgggctttgatacgtggaacgccacgcatctcaggacgcaattacagggggctggttttgaggtggagccgttcccgcaaacctaccccagattcagtccggcggcgaaatcgttcgaagtttttgttaaccgcagggtgattgtgcatcgtggcgatccggtgttgtcctggtcgatgagtaacgtcgtgatgcagagtgacgcgaacgccaatatcaagccgaacaagaaaaaatcaccgaacaagatagacccgagcgtagcggcgctgatggcgtttggtacattccaggcagagcatgaggattttgcttttgatataagcgacagccaccgccagaaactggaagaatttagcggggtgtaa

SEQ ID NO: 470176 - DNA, 312 bp, Shigella flexneri
gtgaagcagtggcgggaaaaatcgcggcagcttgcggaacggggagacctgacccccgccgactggagcaatctggaactgtattgcgtcaactactccatttaccggaaagccgttgcagaccttgcggcgcgcgggttcagcattgttaacagtcagggcggcgagagcagaaaccccgcattaagcgcaaaatccgacgctgaaagagtgatgataaaaatggcctccttgctcggttttgacccgataagccgccgtaaaaatccaccggaaacagaagaagaggacgagcttgaccgcctggaataa

SEQ ID NO: 470177 - DNA, 441 bp, Shigella flexneri
atgccgtggcaaccattaagacgatgcacagaaccaggctgtaacaggcgcgttaaatccggcaagtgtgaggagcacaggcgggcggcatggcgtgcagaggatgccagacgaggacaccgccgcgcgcgtggatattccagacagtgggacaaataccgcgccatgtatctgagtaaaaacccgttatgcgtgcgatgccttgagaaggggatatatacgcccgccgtggtggtggatcacattatcccgattaatggcggtgatgatgttctcttctggcccgaatggaaccatcaaccattgtgccaggcgtgtcataaccagaaaacgaaatggcttgatccggcaacaaaaagcaagcgtgccgcaggtggatttcgtgaagaggaagaacgggctgctaaccgcaataactggatgtatgacgctgatgaatga

SEQ ID NO: 470178 - DNA, 297 bp, Shigella flexneri
atgacagaagaacttatcaccctggaagaagtgaaactccattgccgcatcgatggcgacgatgaagaccagttaatcagcggatacattgccgcatcgcttgaggcgtgccagatacacataggcaggcgctttgatgacgggctggcgttcacgccagccataaagattggctgcatgatgtttatcgctcacctgtatgaaaatcgccagattgtcgcggataacgcaaaaacacgcgtacccatgacgataggcgcactctggacggcttaccgtgatgtgggggggtactga

SEQ ID NO: 470179 - DNA, 339 bp, Shigella flexneri
atgaacatagggcgactgcgtgacaggataacgattcagaccctgaaacagaccagggatataaccggcgaaatactcgaaacgtgggaggacggtcacacactctgggcaagcgtgaacatggtcagcagcaaggaggccatttcatcgggcgcagagctggcgattggtaccgtaaggatctggatacggtaccggaaggacatcaacgccaccagccggataaaggtcagtacggggccgctggcggggcgtgtactgaatatcatcgggcagccgctgccggatgccgccaggacacgccttgaaattctttgtcgtgagggcgcggaaaaatga

SEQ ID NO: 470180 - DNA, 1176 bp, Shigella flexneri
atgacgcttgatgaatttatggcgctggccggcacatcgaacacgggggcgggtgagtacgtatcatctgggacagcggaatcactccccgccgtcatgaacgccgtcacggtcatctctgacgcggtggctaccatgccgtgttacctgtacctggtacgcaatgagaaggggaaggaggcccgcgaatggcttgattctcatccggtcgatcacatcctcaacgagcgcccgaacgcgtggcagacaccctaccagtttaagcgaatgatgatccgctactgcctgttaagtggtaatgcttatgcggttattcagtgggggcgtgatggttttccggcggctttacatccttacccgccgcagtcggtgaacgtggatcagacaggtgatcataactggcgctactgcatcactgacgcctacaccggaaacacccgcaactatttaccgtgggaggttctccaccttcgttactccacggatgacggttttatggggcgctcacctgtaaccatctgccgcgaatcgctggggcttgggctggcccaacaacgccacggcgcgagcgtgatgcgtgatggcatgatggcggcaggggttatcacgtcaggcgaatggctggacggcgtgaagggcaaacaggcattagccgcactggaacgctacaaaggggccagaaacgccggaaaaacgcccatccttgaaggggggatgagctatcagcagctgggcatgagtaatcaggatgccgaatggctggcctcccgtcgcttcaccattgaagacatcgcccgaatgttcaacgtctcgccgatttttttgcaggaatacagcaacagcacctacagcaacttcagcgaggcaagccgcgcatttctcaccatgacgatgcgcccgtggctggcgaactttgagcagcagataaaaaacgccttgctggtggcctcgcctgtacctggtatccggtatcaggtggagtttgacagcgcggacctgttacgggccacacctggcgaacgctttgccacctatgagcgcggcataaaatccgacgttatgtgtccgaacgaagcccgcgaacgtgaagggctgtcaccgcgtgatggtggtgatgagttcagccaggcatggaaacaggaagtaaaaatcagcgagggagaaaaaccggaatga

SEQ ID NO: 470181 - DNA, 573 bp, Shigella flexneri
atgggtgaaaaaattatgaagagtatggaaatccggtcatcggaaatcaccaccagcggagccggtacgctgacgggctacgttgttcgctgggataagctttcagaactgttatggggtgagttttacgaaaaattccagcggggggcgtttactgaatggcttgcggcgggtaatgacgttcgcggcctgtatgagcatgaccacagcatgttactggggcgcacccgttccggcacgctgaaactggaagaggacgaaacagggttacgctttgaactgaccccaccggatcccagtacagggcgcgacgttatcgaactggttaagcgtggggacatctcggggatgagctttggctttcgctcccgtaaggatgtatgggataccacaacagatccatgcgtgcgcaccgtgctggtggcggaactgtacgaaattaccgttacatcggtaccggcttaccccgattccggcgtggagctggcccgccgttccctgtatgagcagcaccccgaaaaaatgccgcgtgcggataatcgccgctggtgggcggatttagcgggggtgtga

SEQ ID NO: 470182 - DNA, 330 bp, Shigella flexneri
gtggttaactccacgacggcggcaaaacttcagaaggtgaagaacgcgaacggtgattatatctggcgcgaccgtttacaggcgggtgatcctgatacgttgctgggccttccggtcgaatatctggagtttatgcctgataacgttattgccctgggtgacttcaaacgcggttactacattgttgatcacgaaacaggtgttcgcaccagaccggacaacctgacagaaccaggattcatcaaaattttcacgcaaaaatatttaggcggtggcgtggtggattcgaacgcgatcaagattctggcactgccggaagacgacgattaa

SEQ ID NO: 470183 - DNA, 828 bp, Shigella flexneri
atgcagagaataatcgaattacgccagcagaaaaccgccattaaaaatcagatgcgcgacatgctggagaacgctgaaaaagaaaaccgcagtcttaacgatgctgagggcacaaaatttgacgaattacgcgctaaagctgaatccctcgataaagacatttcccgccttgaagccattgcagacgaagagcgcagcaagccaggtaaaagcagccagaccactgaccccgcagaactacgcaactacattctgaccggtgaaacccgcgcattaagtacaggcgttcccgctgatggtggttataccgttatccctgaactgaacaccgaaatcatgcgaatgctggcggatgaatccaccatgcgtcgcatctgtaccgtgaagaaaatcagcagcaacgagtttaagcagcttgtttccgctggcggtgcgaccgttaaccacggtgaagagggtaaggcacgcgaacagaccagcaccccgcagattaacgaggtgagcattaagctgtatccggtctatgcgtacccgcgcaccacacaggaaatcgtggatttttccgatgtggacatcctttcatggctgacgggtgagattggcgacaccttcacggaaaccgaagaaagcgatctggttgtgggcgacggtgacaaaaaagcaaaaggttttttatccgtaccccgtgcagagaagaacgacaaagagcgtgattttggtacgttgcaggtaattaaaccttccgaatctctggcgtggacatctgcggacccgctgatcgacctgaaatttgcattacgtaaaaaataccgcaaaaacgcggtctga

SEQ ID NO: 470184 - DNA, 225 bp, Shigella flexneri
atgccgatgaaatttgatgagatacttaaacagcgtgataaataccatgctgacaacatggagacgatgaatatcactgattaccgcgcatttctggaaacgggggcgctgattgaaaaggatcatcatggttttgttcgttgcgcgctatccggtgaaatgctggcagtaaatcctgaacagacagatgcattgatagaatttctgaaagggatcagagactga

SEQ ID NO: 470185 - DNA, 162 bp, Shigella flexneri
atgacagcacaaattgcagcttacgggcggctggtgggcgacccgctggtaaaacagagcagcaagggcacaccggagccgccaacggagaactacgcagacctgagaaatgcagtaaatcgcacttacgcagacatggggctgagcaaattagcagagtag

SEQ ID NO: 470186 - DNA, 306 bp, Shigella flexneri
atgagcgaaccaaaatttggtgaaaaattttacaagcacaacggacggatcacgattctgcaaataagcgcagctacaccaggctggtgggttgaaacagacgaaggatcctcacccgtggcatcatgggcgctttgtgtgcttagttaccctgaccgcgatgtgtatcaggatattctgcctgtgatatccactgacaaaggcatgaaacccgtagacatcaaaaacatggggtttcagtgcgtaatgctcactgaaaaaatgatggaagagatgaaaaagaacaatgccggatcgcttcactga

SEQ ID NO: 470187 - DNA, 279 bp, Shigella flexneri
atgcacacttcagggaaatttaataaatcattcaaaaaacgcagagacagaacagaaccgaaatatcgcgcgttagacatgacagagcacgctttaaaggtggcaatcagaacgatagaccgccacgcgggggaaggatacgcgaaagcacatcccgaactgataagcgcattcatgaccacgacggcggcaaattttgccacgctgacagagcgggagattgccgaagcggaacaggtaacaacaatcaacgttaaaaccggagaggtggaatcatga

SEQ ID NO: 470188 - DNA, 1749 bp, Shigella flexneri
atgaaactggcaccgaacgtaaaaaaacagccacgcggaataaaacacaaagacacagaggtaattatctttgcgggtagtgatgcctggtcgcacgcgaaacaatggcaggagcaggatggccccgcatccggcgataatgtgccgcctgtgtggcttgggccaaatcagcttgccgaacttgatgcactgaaaattgttccggatggaaaaaaacgcgtaaggctgtaccaggccggagaactggatttggtggagaccaaaaagattggtcagaagctggcggcggcagatattcaggacgcaaatttttaccccgaaggaatgcacgtccagaagtgtgaaaactggcggcgctatctgaatgctgagcgtgaaaatattgccgcagggcttaccatgccggagcagaaaaatacgcaactggcacaaatggcagacagtgagcgcgcgcagctgcttgccgagcgctttgatggcgtttgtgtgcatcaggaaagtgaaatcgttcacgtatggcgcggcggggtatggtgtccggtcagcacaatggaacttagccgcgaaatggtggcgatctattcagagcacagggccactttcagcaagcgcgtaatcaataacgccgtggaagcgttaaaagttattgccgaaccaatgggcgagccgtccggcgatttgctgccgttcgccaatggtgcgcttgacctgaaaacgggggaattttccccgcacacgccggagaactggatcaccacgcacaacggcattgagtacacgccaccagcaccaggggagaacatccgcgataacgcgctaaactttcataaatggcttgagcacgcagccggaaaagaccagcgcaagatgatgcgtatatgtgccgcgctgtacatgattatggcgaaccggtacgactggcagatgtttattgaggccaccggagacggcgggagcggtaaaagtacattcacacacatagccatccttctggcagggaaacagaacacggtaagcgctgaaatgacatcgcttgatgatgctggtggacgtgcgcaggttgtcgggagtcgtcttatcgtcctggctgaccagccgaaatatacaggcgaaggaacgggcatcaagaaaatcacgggcggtgaccccgtggaaattaacccgaaatacgaaaagcgtttcacggctgtaatcagggcggtggtgctggcgaccaacaataacccgatgatattcaccgaacgggccggaggtgtggcacgtcgtcgcgtgattttccgtttcgacaatatcgttagtgaggccgaaaaagacagggagctaccggaaaagattgcggctgaaatccctgtcattatccgccgattgctggcgaactttaccgactctgagaaagcacgggctttactactggaacagcgtgacggtgatgaagctctggcaataaagcaacagacggatccggttattgagttttgccagttcctgaattttctggaggaagcacgcggcctgatgatgggcggcggtggcgattcagtgaagtacacgaccagaaacagcctttaccgcgtctatctggcgtttatggcgtacgcaggcaggagcaaaccgctaaacgtaaatgactttggcaaggctatgaagccagccgcgaaagtttacggacatgaatatattacgcggaaagttaagggagtaacgcagactaacgcaataacaacagacgagtgcgacgcgtttttataa

SEQ ID NO: 470189 - DNA, 300 bp, Shigella flexneri
atgaaacttaaatattctggcttaactgccagtggcaacactcaccctaaatttacgcgcggtgatatttaccgcgaccagtacggcggcatggtaacgattaaaggcgtggcagaacggcgcatcacctaccgccgtgaaggttacgaatatgattgcgtgatgcctgtttatcaattccggcgtgatttcacgctggtacaggcagcgccccgcagtaaaccaaccagcagggagaaagcacgcgccaatattcaggaaataaaaaagatgcttaacgtattcaggggtaaaaaatga

SEQ ID NO: 470190 - DNA, 234 bp, Shigella flexneri
atgcgtgatatttaccacgaaacaatagaccgcgcatttcttgcactttctcacagtgaaaacatgctggaaatattgcgcatatggcttgaaacacttggcgacaatgaacgcgacaaacaaaaatcaagaattgccacggcattaataacgcttcttgagcctgtaataatggaactgcaagaaatagatctattgcacgacagatataaagaacaacacaccggagaataa

SEQ ID NO: 470191 - DNA, 222 bp, Shigella flexneri
atgcacaataaaaccacaccgaacgcagcagccgccgcactcactacgctgatgcacgcgcttattgatattgaatgcacggcagagcttgcgcagggagaagaacagaaagaccggacacagttcgccctggaatgtatccgatacatcgcaacgcggtcactgaatgacgctaaaaatattcttgttgccgattgtgaaaatggggggggttatgcgtga

SEQ ID NO: 470192 - DNA, 201 bp, Shigella flexneri
atggttgccgtaaatcatataccacaccttgtacacacacaaacggcctttgtgtggcgttttctggcactgagtgccggagaatcccaaatcatccacgtaaccgcttggacggaacgcgaagcgcgtagccgttgcccgtccggttgtgttgctgtattcgccgcccgtattcgtcagggggaaacctatgcacaataa

SEQ ID NO: 470193 - DNA, 747 bp, Shigella flexneri
atgaagattgaatatacgccagaacgtgggcggggattcgttcgccctggtgaaactggaaaaccacaaaattggggtttttcaggcataaaaaaagcggccccgaaatggagccgcctttctgaacagataacccgctgcgccgtttgtgtgtgtgatcccaaacataagcacggggatgatagccgctatcaggctggtgggcaatgcaatcagtctggttcagtgcgttgccataactgcgaagttctctcctttgatgagtattctttaaggtacttctcaagggcaaaagaacacggcgcgaatcgttctgattcatgctctttctttctgcgtcgtctttttcgtgcaggtgatgttttttcggttgattcttcgttggtcattgtgtgcgcctgtaaagcaatgcgccgtagtacctcacaccacggcgctgatagtttttatcctttgggttctatgccgcgttgctgtaattctttgcggattattcgctttatccaggcagcaagagaatcatcgccgtcctgttgttgtgccttttccatcttttcccgtaagtcaggatctaaacggaactggaacggaggattaccacgcctttcgtttttgtgtgttgacacgttaattacacctcaggtaatgtatttatgtgtagtgacacattacacacaatcaacacaaaaagcaaagccccgcactgtaggagcagtaacggggcttctaaccaacaacgtaaactag

SEQ ID NO: 470194 - DNA, 1230 bp, Shigella flexneri
atgagcagagcacttaacaaactgagcgatacacagctgaggaaaatcaacggcacacccgcccaaaaaacagcctttcttaatgacggtggaaacctgagcgtcaggcattcaaccagtggccttttaacctggtatttcacttacagggccggaacgggaaggggggcaccaccggaacgcattaagctgggaaattatcctgatctgaacctgaaatcagccagggaaaaagccgcccagtgtcgcgcatggctggcagaggggaaaaatccacgtcatgagcttaattacaccgtacaggaagcgttaaagccggtaacggttggcgatgcgctcacctactggcttgagtcgtacgcaaaggaaaaccgcgtggattatgccgccctgaaaaagcgccttaataatcacgtaatacagcacattggtgctatgccgctggataaatgcgagctacggcactggctggcctgttttgaccaggtggcaaagcgaacgcctgttactgccggattcttgctacagacgtgcaaacaggcgcttaagttctgccggaggcggcgctatgcaatcagcaacgttcttgatgatatgagtgtggcggacgttgggaaaaaaccggatataagcgagcgtgtcttaagcaccaaagaactgggcgaattattgcaggcactggacaaaaaaatattctccccctactacatcgcgttaatccgcctcctgattgtgttcggatgccggacggtagaactgaggttatcggagatcagcgagtgggattttaccgaaatgctctggaccgtgccgaaagaacacagcaaaacgaaggtggcaatattccggcccataccggaagcaatactgccgttcgtcacgcagctggtggagcagaacaggcacacgggcttattgctgggggaagtgaaacaggaaacaagcgtgtcgcagtacggcagattagcgcacaggaggctaaatcaccctcactggtcactacatgacatccggcgcacctttacaacgatgctgaacgatttaggcgtggatcctcacgtcgtggagcagcttacaggccaccagatgccaggaatgcagcgagtttataatcattcccgttatctggatgctaaacgcaatgcgctggatatgtggacggagcggttagggatactggcgggaacacatgaaaacgtaaccacgctaccagtagccagaagaaaataa

SEQ ID NO: 470195 - DNA, 1122 bp, Shigella flexneri
atggaataccaactcactcttaactggcccgattttcttgaacgtcactggcagaaacgcccggtggtgttaaaacgcggctttaataattttattgacccgatctctccagacgagttggcgggtctggcgatggaaagcgaagttgacagtcgactggtcagtcaccaggatggcaaatggcaggtcagccacggcccgttcgaaagctacgatcatctcggtgaaaccaactggtcattactggtacaggcagtaaaccactggcatgagccgaccgccgcgctgatgcgaccgttccgtgaactaccggactggcgtattgatgatctgatgatttctttttctgtacctggcggcggcgtcggcccgcatctcgatcagtacgacgtgtttatcattcagggtaccggacgtcgtcgctggcgagtgggcgaaaagctgcaaatgaaacagcactgcccacatccggatctgttacaggtcgatccgttcgaagccatcatcgatgaagagctggagcctggtgatattctttatattccgccaggattcccgcatgaaggctacgcgctggaaaatgcgatgaactattccgtgggttttcgcgcgccaaatacgcgggaattaattagcggatttgccgattatgtgctgcaacgtgaactgggcggcaactactacagcgatccggatgttccacctcgtgctcatcctgcggatgttctgccgcaagagatggataaactgcgtgagatgatgctcgaattgatcaaccagccggaacactttaagcaatggtttggcgagtttatatcccagtcacgtcatgaactggatatcgcgccgccggaaccgccttatcagccagatgaaatctacgatgcgctgaaacaaggtgatgtgctggtgcgcctgggtggtctgcgcgtattgcgcattggcgacgacgtgtatgccaatggtgagaagatcgattccccgcaccgtccggcactggatgcactcgccagcaacattgcgctgactgcggagaattttggcgatgcgctggaagatccgtcattcctcgcgatgctcgcggcgctggtcaatagcgggtattggttcttcgaagggtaa

SEQ ID NO: 470196 - DNA, 1227 bp, Shigella flexneri
atggataaactacttgagcgatttttgaactacgtgtctctggatacccaatcaaaagcaggggtgagacaggttcccagcacggaaggccaatggaagttattgcatctgctgaaagagcagctcgaagaaatggggcttatcaatgtgaccttaagtgagaagggcactttgatggcgacgttaccggctaacgtccctggcgatatcccggcgattggctttatttctcatgtggatacctcaccggattgcagcggcaaaaatgttaatccgcaaattgttgaaaactatcgcggtggcgatattgcgctgggtatcggcgatgaagttttatcaccggttatgttcccggtgctgcatcagctactgggtcagacgttgattaccaccgatggtaaaaccttgttaggtgctgatgacaaagcaggtattgcagaaatcatgaccgcgctggcggtattgcaacagaaaaacattccgcatggtgatattcgcgtcgcctttaccccggatgaagaagtgggcaaaggggcgaaacattttgatgttgatgccttcgatgcccgctgggcttacactgttgacggtggtggcgtaggcgaactggagtttgaaaacttcaacgccgcatcggtcaatataaaaattgtcggtaacaatgttcatccgggcacggcgaaaggagtgatggtaaatgcgctgtcgctggcggcacgtattcatgcggaagttccggcggatgaaagcccggaaatgacagaaggctatgaaggtttctatcacctggcgagcatgaaaggcaccgttgaacgggccgatatgcactacatcatccgtgatttcgaccgtaaacagtttgaagcgcgtaaacgtaaaatgatggagatcgccaaaaaagtgggcaaagggttacatcctgattgctacattgaattggtgattgaagacagttactacaatatgcgcgagaaagtggttgagcatccgcatattctcgatatcgcccagcaggcgatgcgtgactgcgatattgaaccggaactgaaaccgatccgcggcggtaccgacggcgcgcagttgtcgtttatgggattaccttgcccgaacctgttcactggcggttacaactatcatggtaagcatgagtttgtgattctggaaggtatggaaaaagcggtgcaggtgatcgtccgtattgccgagttaacggcgcaacggaagtaa

SEQ ID NO: 470197 - DNA, 1137 bp, Shigella flexneri
atgggacagagtaaaaaattgaataaacaaccgagttcgctttcaccgctggtgcaattggcgggaattcgcaaatgctttgatggtaaagaggtcattccccagctggatctgactatcaacaatggcgagttcctcacgctgcttggcccttctggctgcggtaaaacaaccgttcttcgcctgattgcaggtctggaaactgttgattccggacgcatcatgctggataacgaggacatcacccacgttccggcggaaaaccgctatgtgaacactgttttccaaagctatgcacttttcccccacatgaccgtgttcgaaaatgtggcctttgggttgcgcatgcaaaaaacccccgctgctgaaattacgccccgcgtgatggaagccctgcggatggtgcagctggaaaccttcgctcaacgtaaaccgcatcagctctctggtggtcaacagcaacgcgtcgccattgctcgcgcggtggttaacaagcctcgtctgttgttgctggatgagtcgctctcagcgctggattacaaactgcgtaagcaaatgcagaacgagctgaaagcgttacagcgtaagcttggcattacattcgttttcgtgactcacgaccaggaagaagcactcaccatgtcggacaggattgtggtgatgcgcgatggtcgcattgagcaagacggcacgccgcgtgaaatctacgaagagccgaaaaacctgtttgttgccgggttcattggcgaaattaatatgtttaacgccacggtgatcgagcgactcgacgagcagcgcgtacgcgccaacgttgaaggccgcgaatgtaatatctacgttaacttcgccgttgaaccggggcaaaaactgcatgttctgctgcgcccggaagacttacgtgttgaagagattaacgacgacaaccacgctgaagggctgattggttacgttcgtgagcgtaactacaaaggcatgacgctggagtcggttgttgaactggaaaatggcaagatggtgatggtcagcgaattcttcaatgaagacgatcctgactttgaccactctctcgaccaaaaaatggccattaattgggtagaaagctgggaggtcgtactggctgatgaagaacacaagtaa

SEQ ID NO: 470198 - DNA, 858 bp, Shigella flexneri
atgaagaacacaagtaagttccagaatgtagtgattgtcactattgtcggttggcttgtgttgtttgtctttctgcccaacctgatgatcattggcaccagctttttgacccgcgacgacgccagtttcgtcaaaatggtctttacgctggataactacacgcgtctgctcgatccgctctattttgaagtgctattgcactcgctgaatatggcgctgatcgccaccctcgcctgcctggtgctgggctatccatttgcctggtttctggcgaagctgccacacaaggtgcgtccgctgctgctgtttctgctgattgttccgttctggaccaactcattgattcgtatctacgggctgaaaattttcctcagcaccaaaggctatctcaacgagtttttgctctggctgggcgttatcgacacaccaatccgtatcatgttcacgcccagtgcggtgattatcggtctggtttacattctgctgccgtttatggtgatgccgctgtactccagtatcgaaaaactggataagccgttgcttgaggcggcgcgcgatctcggtgccagcaagttacagacttttatccgcatcattattccactgacgatgccggggattattgccggatgtctgctggtgatgctgccagcgatgggcctgttctatgtgtccgacctgatgggcggtgcgaaaaacctgctgatcggtaacgtcatcaaggtacagttcctcaatattcgtgactggccgtttggtgcagccaccagcattacgctgactatcgtaatgggcctgatgttgctggtttactggcgcgcttctcgtttgctgaataagaaggtggaactcgaatga

SEQ ID NO: 470199 - DNA, 795 bp, Shigella flexneri
atgatcggtcgactgcttcgcggcggttttatgaccgctatctacgcgtacctgtatatcccaatcattattttgattgtgaactcctttaacagctcgcgctttggcatcaactggcagggttttaccaccaaatggtatagcctgctgatgaacaacgacagcctgttacaggcagcgcagcattcactaacaatggcggtgttttcggcgacgtttgctacgcttatcggttcactgacggcagttgcgctgtaccgttatcgctttcgcggtaagccgttcgttagcggaatgctgtttgtggtaatgatgtcaccagatatcgtgatggcaatttcgctgctggtgctgtttatgctgctgggtattcagcttggcttctggtcgctgctgttctcgcatatcaccttctgcctgccatttgtggtggtgacggtgtattcgcgcctgaaaggttttgacgtgcggatgctggaagcggcgaaagatctcggtgccagcgaatttaccattctgcgaaaaatcattctgccactggcaatgccagcggtggcggcgggctgggtgttaagctttaccctgtcgatggacgatgtggtagtttcttcattcgtcaccggaccaagttatgaaattctgccgttaaaaatttattcgatggtcaaagtcggcgtatcgccggaagttaacgcgctggcaaccatattactggtgctgtcgctggtgatggttattgccagccagcttattgctcgtgataaaacgaaaggtaacacaggggacgttaaatga

SEQ ID NO: 470200 - DNA, 1047 bp, Shigella flexneri
atgaaaaaatggtcacgccacctgctcgcggcgggtgctctggcactgggcatgagcgccgctcacgccgatgacaacaacacgctgtatttctacaactggaccgagtacgtgccgccaggactgcttgaacagttcaccaaagaaaccggtattaaggttatctattcgacttacgagtcgaacgaaaccatgtacgccaagctgaaaacgtacaaagacggtgcctatgacctggtggttccttcaacctattacgtcgataaaatgcgtaaagaggggatgatccagaagatcgacaagtcgaagttaacgaacttcagcaatctcgatccagacatgctcaacaagccttttgacccgaataacgactactccattccgtatatctggggtgcgacggcgattggtgttaacggtgatgcggtggatccgaaatctgtcaccagctgggccgatctgtggaagccagagtacaaaggcagcctgctgttgaccgacgatgcccgtgaagtgttccagatggcgctgcgtaagctgggctactccggtaacaccaccgatccgaaagagattgaagctgcatataacgagctgaaaaaactgatgccaaacgtcgcagcgtttaactccgataacccggctaacccgtacatggaaggcgaagttaacctcggcatgatctggaacggttctgctttcgttgcacgccaggcgggtacgcctattgacgtggtgtggccgaaagaaggcggcatattctggatggacagcctggcgatcccggcaaatgccaaaaacaaagaaggcgcgctgaaattgatcaacttcctgctgcgcccggatgtggcaaaacaggttgctgaaactatcggttatccaacgccaaaccttgcggcgcgtaagctgttaagtccagaagtggcaaacgataagacgctctacccggatgctgaaaccattaaaaatggcgaatggcagaatgacgttggcgcagccagcagcatttatgaagagtattatcagaagctgaaagcaggacgttaa

SEQ ID NO: 470201 - DNA, 822 bp, Shigella flexneri
atgctgtcgcgtcggggtcatcggttaagtcgttttcgtaaaaataaacgtcgcctgcgcgagcgtttgcgtcagcgtatttttttcagagataaagtggtgccggaagcaatggaaaaaccaagagtactcgtactgacaggggcaggaatttctgcggaatcaggtattcgtacctttcgcgccgcagatggcctgtgggaagaacatcgggttgaagatgtggcaacgccggaaggtttcgatcgcgatcctgaactggtgcaagcgttttataacgcccgtcgtcgacagctgcagcagccagaaattcagcctaacgccgcgcatcttgcgctggctaaactgcaagacgctctcggcgatcgctttttgctggtaacgcagaatatagacaacctgcatgaacgcgcaggtaataccaatgtcattcatatgcatggggaattgctgaaagttcgttgttcgcaaagtggtcaggttctcgactggaccggagacgttacgccagaagataaatgccattgttgccagttcccggcacccttgcgcccgcacgtcgtttggtttggcgaaatgccactcggcatggatgaaatttatatggcgttgtcgatggcggatgtctttattgccattggtacttccgggcatgtctatccggcggctgggtttgtacacgaagccaaactacatggtgctcacaccgttgaactgaatcttgaaccgagtcaggttggtaatgaatttgccgagaaatattacggcccggcaagccaggtggtgccagaatttgttgaaaagttgctggagggattataa

SEQ ID NO: 470202 - DNA, 912 bp, Shigella flexneri
atgtattacgggtttgatattggtggaacaaaaattgcgcttggcgtgtttgatagcggtcggcagttgcagtgggaaaagcgggtgccgacaccgcgtgacagctatgacgcatttttagatgcagtgtgtgagctggtagctgaagctgaccaacgttttggctgtaaaggttctgtcggcatcggtattccgggaatgccggaaacagaagatggtaagctgtatgccgctaatgtccccgctgccagcggcaaaccgctgcgtgccgacctgagcgcacgtcttgatcgcgatgtacgccttgataacgatgccaactgttttgccctttcagaagcctgggatgatgaatttacgcaatatccactggtgatggggttaattctcggcaccggcgttggcggcgggctggttttcaacggcaaaccgattactggtaaaagctacattaccggcgagtttggccatatgcgtctgccggttgatgcgttaaccatgatggggttggatttcccgttacgccgctgcggctgtggtcagcatggctgcattgaaaattatctgtctggtcgcggttttgcgtggctgtatcaacactattatcatcaaccgttgcaggctcccgaaattattgcgctttatgatcaaggcgatgagcaggcaagggcgcacgttgagcgttatctggatttattagcggtttctctgggaaatatcctgaccattgttgaccctgacctggtcgtcattggtggtggcttatcgaatttcccggcaatcacaacgcaactggcggacaggttgccttgtcatctcttacctgtagctcgtgttccgcgcattgaacgcgcgcgccacggtgatgcgggaggaatgcgtggtgcggccttcctacatctaaccgattaa

SEQ ID NO: 470203 - DNA, 1239 bp, Shigella flexneri
atgcctttatcgttattgattggcctgcgttttagtcgcggacggcgacgcggcggcatggtgtcgctaatctctgtcatttctaccattggcattgccctcggcgtggcggtattgatcgtcggcttaagcgcgatgaacggctttgaacgcgaactgaataaccgcattctggcggtggtgccgcatggcgaaatcgaagcggtaaatcagccatggactaactggcaggaagcactggataacgtgcagaaagtgccgggtattgccgccgctgcgccgtatatcaatttcaccggtctggtggaaagtggagcgaatctgcgcgcaatccaggtgaagggcgttaacccacaacaggaacagcgtctgagcgcattaccctcgtttgttcagggggatgcgtggcgcaattttaaagcgggcgaacagcaaattatcatcggcaaaggcgtggcggatgcgctgaaagtgaagcagggcgattgggtgtcgatcatgatccccaactcgaatcccgagcataaactgatgcagccaaaacgtgtgcgtttgcacattgccggtattttgcagttgagtggtcaactcgatcacagttttgccatgatcccgctggcggatgcccaacaatatcttgatatgggttccagcgtgtcaggtattgcccttaaaatgacggatgttttcaacgccaataagctggtacgcgatgcgggtgaagtgaccaacagctatgtttatattaaaagttggattggtacttacggctatatgtatcgcgatatccagatgatccgcgccattatgtatctggcgatggtactggtgattggcgtggcctgtttcaacatcgtctccaccttagtgatggcggtgaaagacaagagtggcgatatcgcagtattaagaacgctgggggcgaaagatggtttaattcgcgccatctttgtctggtatggattgctggcagggctgttcggcagcctgtgtggggtggttatcggcgtagttgtttcactgcaacttaccccgattattgagtggattgaaaagctgatcggtcatcagttcctctccagcgatatttattttattgacttcctgccatcggaattgcactggctggacgtcttctacgtactggtcacagcattgttgctgagtcttttggcaagttggtatccggcgcggcgcgccagtaatattgaccctgcgcgagtccttagcggccagtaa

SEQ ID NO: 470204 - DNA, 702 bp, Shigella flexneri
atgaataagatcctgttgcaatgcgacaacctgtgcaaacgctatcaggaaggcagtgtgcaaaccgatgtgctgctcaatgtcagtttcagcgtgggcgaaggtgaaatgatggcaattgtcggtagctctggttccggtaaaagtaccttgctgcacctgttaggcgggctggatacgccaacctccggcgatgtgatctttaacggtcagccgatgagcaaactgtcttcagcggcgaaagcagaactgcgcaaccagaagctgggctttatttatcagtttcaccacctgctgccggattttactgccctggaaaacgtggctatgccactgctgattggcaagaaaaagcccgctgaaatcaacagctgtgcactggagatgttaaaagcggtggggctggagcatcgtgcgaatcaccgcccatctgaactttctggcggcgaacgccagcgtgtagcgattgcccgtgcgctggtcaataatccgcgtctggtactggcggatgaacctaccggtaacctcgatgcgcgtaacgccgacagcatcttccagttgcttggggagttgaatcgcttgcagggcaccgctttcctggtggtcactcacgacctgcaactggcgaaacgtatgagccgccaactggaaatgcgtgatggacgtctgacggcggaactgagcctgatgggggcggagtaa

SEQ ID NO: 470205 - DNA, 1200 bp, Shigella flexneri
atgtaccaacctgtcgctctatttattggcctgcgttacatgcgtgggcgtgcagtggatcgcttcggtcgtttcgtctcctggctttctaccatcggcattaccctcggggtgatggcgctggtcacagtattgtcagtgatgaacggctttgagcgtgagctgcaaaacaacatccttggcctgatgccacaggcaattctctcttctgagcatggctctcttaacccgcagcaactcccggaaacggcagtcaaactggacggcgttaatcgcgtcgcacctattactaccggtgatgtggtactgcaaagcgcgcgcagcgtggcggtcggggtgatgctcggtatcgacccggcgcaaaaagatccactaacgccgtatctggtcaatgtgaaacaaactgacctcgagccggggaaatataatgtcatcctcggcgaacaacttgcctcacagttgggcgtcaatcgcggtgatcaaatccgcgtgatggtgccatctgccagccagttcacgccgatggggcgtattccaagtcagcgcctgttcaatgtgattggcactttcgccgccaacagtgaagtcgatggctatgaaatgctggtgaatattgaggatgcctcgcgtctgatgcgttatccggcagccaatattaccggctggcgtttgtggctggatgagccgctgagagttgactctttaagtcagcaaaaactgcctgaaggcagcaaatggcaggactggcgtgaccgtaaaggcgagctgttccaggccgtacgcatggaaaaaaatatgatgggcttactgctgagcctgattgtcgctgttgcggcgtttaacattattacctcgctggggctgatggtgatggagaagcagggcgaagtcgcgatcctgcaaacgcaaggcttaactccgcgacaaatcatgatggtctttatggtgcaaggggctagcgccgggattatcggtgcaatcctcggagcggcgcttggcgcactgcttgccagccagttaaataatctgatgccgataatcggcgtcctgcttgatggcgcggcgctgccggtggctatcgaacctttacaggtcattgttattgcgctggtggcgatggctatcgcgctgctgtctacgctttacccttcatggcgcgctgccgccacacaacccgctgaggctttacgttatgaataa

SEQ ID NO: 470206 - DNA, 1074 bp, Shigella flexneri
atgaaacaaaaagagctatggattaaccagatcaaagggttatgtatttgtctggtggtgatttatcactcggtcattaccttttatccgcatatgaccacttttcagcatccgttatcggaagtcctgagcaaatgctggatctatttcaatctttaccttgccccctttcgtatgccggtttttttctttatatccggctatttgattcgccgctatatcgacagcgtaccgtggggaaattgtctcgataaacggatctggaacatcttctgggtgctggcgctttggggcgtggtgcagtggctggcgttaagtgcgctgaaccagtggctggcacctgagcgcgatttaagcaatgcctccaatgccgcttatgccgattccaccggtgagttcctgcacgggatgatcaccgccagcaccagcttgtggtatctgtatgcgttaattgtctatttcgtggtatgtaaaatttttagccgtctggcgctgccactattcgccttgtttgtactgctgagtgtggcggttaatttcgttcccacgccgtggtggggaatgaacagtgtgatacgcaatttgccttattacagccttggcgcatggtttggcgcaacaataatgacctgtgttaaagaggtgccgttgcgccgccatctgctgatggcttctttgcttaccgttctggcggtcggtgcctggttgtttactatctcgctgctgttgtcgctggtatcgattgtggtgatcatgaagctgttttatcagtacgagcaacgattcggtatgcgctccaccagcctgctgaatgtgattggctccaacaccattgctatctacaccacccatcgcattctggttgaaatattcagcttaactctgcttgcgcaaatgaacgcagcacgctggtcgccgcaagtcgaactgacactcctgctggtttatccctttgtcagtttgttcatctatactgttgcgggcttgctggtaagaaaactttcacagcgtgcattcagcgatctgttgttctccccgccttcactgcccgctgccgtcagttactctcgttaa

SEQ ID NO: 470207 - DNA, 3495 bp, Shigella flexneri
atgcccccatatgttgaggcatatcctaacgagaatctgacaaccgttatgcctgaacaatatcgttatacgctgcccgtcaaagcgggtgagcagcgtctgctgggcgagttaaccggcgcagcctgtgcaacgctggtagcggaaattgccgaacgtcacgccggtccggtggtactcattgcaccagatatgcaaaatgctctgcgtttgcatgatgaaatcagccagttcaccgatcagatggtgatgaatctggcggactgggaaactcttccctacgacagtttttcgcctcatcaggacattatctcctcgcgcctttccaccctttaccagctaccgacgatgcagcgtggcatactgattgttccggtgaatacgcttatgcagcgcgtttgcccacacagttttctccacggtcatgcgctggtgatgaaaaaaggtcagcgcctgtcacgagatgcattacgaacccaactggacagcgccggttatcgccatgttgaccaggtgatggagcacggcgaatacgccacgcgcggcgcgttgctggatctcttcccgatggggagtgagctgccttatcgtcttgatttctttgatgatgaaatcgacagcctgcgggtgtttgacgtcgacagccagcgcacgctggaggaagtagaagcgatcaatctgctgcccgcgcacgaatttccgaccgataaagcggcaattgaactgttccgcagccagtggcgcgataccttcgaagtgaagcgcgatccggaacatatttaccagcaagtgagtaaaggcacattacctgctgggatcgagtactggcagccattgttcttcagcgaaccactgccgccgctgttcagttatttccctgccaataccttgctcgtgaatactggcgatctggaaaccagtgccgaacgtttccaggctgacacgctggcgcgttttgagaatcgcggcgtcgatccgatgcgcccgctgttgccaccacaatcgctctggctgcgggtggacgagctcttctcagagctgaaaaactggccccgagtgcagctaaaaactgaacatttaccgacaaaagccgcgaatgccaatttaggtttccagaaactgccagacctggccgttcaggcgcaacaaaaagcgccgctggatgcgctgcgtaagttcctcgagactttcgacggtccggtggtgttctcggtagaaagtgaaggtcgccgtgaagcgctgggtgaactgctcgcacgaattaaaattgctccgcaacgcattatgcgtcttgatgaagccagcgaccgtgggcgttatctgatgattggcgctgccgaacatggttttgtcgataaggcgcgtaatctggcgctgatctgcgaaagcgatctgctcggtgaacgtgttgcccgccgtcgtcaggattctcgccgcaccatcaaccccgatacactgatccgtaaccttgcggagctgcatattggtcagccggtggtccatctggagcacggcgtcggtcgctatgccggaatgaccacgctggaagctggcggcattactggcgagtacctgatgctcacctatgccaacgacgccaaactgtatgttccggtgtcgtcactgcatctgattagccgttacgcaggtggcgcggaagaaaacgccccgctgcataaacttggcggcgatgcgtggtcacgcgcgcggcagaaagcggcggaaaaagtgcgtgatgtggcggcggaattgctggatatctacgcgcaacgcgccgccaaagagggcttcgcgtttaaacacgatcgtgagcagtatcagttattctgcgacagcttcccgtttgaaaccacgccggatcaggcgcaggccattaatgcggtacttagcgacatgtgtcagccgctggcaatggatcgtctggtgtgcggcgatgttggctttggtaaaacagaagtggcgatgcgcgccgctttcctggcagtagataaccacaagcaggtagcggtgttggtgcctaccacccttcttgcgcagcagcattacgacaacttccgcgaccgtttcgccaactggccggtacgtatcgaaatgatctcccgtttccgcagcgccaaagagcagacgcaaatccttgcggaagtggcggaagggaaaatcgatattctgatcggtacgcacaaactgctgcaaagtgacgtcaagtttaaagatttaggcctgctgattgtcgatgaagaacaccgcttcggggtgcgtcataaagagcgcattaaagcgatgcgcgcgaacgtggatattctgacgcttactgcaacgccgatcccacgtacgctgaatatggcaatgagcggaatgcgtgacctgtcgattatcgccacgccgcccgcccgtcgtctggcagttaaaacctttgtccgtgagtatgacagcctggtggtccgggaggcgatcctgcgtgaaattttgcgcggaggacaggtttattatctctacaatgatgtggaaaacattcagaaagccgccgaacggctggcagaactggtgcctgaagcacggattgccatcggtcacgggcagatgcgcgagcgcgaactggaacgggtgatgaatgatttccatcatcaacgtttcaacgtgctggtttgtaccaccattatcgaaaccgggatcgacatcccgacagccaacaccattatcattgaacgtgcggatcacttcggtctggcgcagctgcaccagttacgcggtcgcgtcggacgttcacatcatcaggcatatgcatggctgctgacgccgcatccaaaagcgatgactaccgatgcacaaaaacgtcttgaagcgattgcctcgctggaagatctcggggcaggttttgcgctggcaacgcacgatctggagattcgcggcgcgggtgaactgcttggcgaagaacaaagcggctcaatggaaaccatcggtttctcgctgtatatggagttgctggaaaacgccgtcgatgcactgaaagccggacgcgagccgtcgctggaagatctcaccagccagcaaacagaagtcgagctgcggatgccgtcgctattgccagatgatttcatccctgacgtgaacacgcgtctgtcgttctacaaacgtattgccagcgccaaaacggaaaacgaactggaagagatcaaagtcgagcttatcgatcgcttcggcctgctgccagatccggcgcgtaccctgctggatattgcccgtctgcgccagcaagcgcagaaactggggatcaggaagctggaaggtaatgagaaaggcggggtgatcgaatttgccgagaagaatcacgttaatccggcctggttgattggtttgctgcaaaaacagccgcagcattaccgccttgatggtccgacgcgcctgaaatttattcaggatttgagtgagcggaaaacgcgtatcgaatgggtacgccagtttatgcgtgaactggaagagaacgcgatcgcttaa

SEQ ID NO: 470208 - DNA, 960 bp, Shigella flexneri
atgatcaaaacgcgtttttctcgctggctaacgttttttacgttcgccgctgccgtggcgctggcgctaccggcaaaagccaacacctggccgctgccgccagcgagcagtcgtctggttggcgaaaacaaatttcatgtggtggaaaatgacggtggttctctggaagccatcgccaaaaaatataacgtcggctttctcgctctgttacaagctaaccccggcgttgatccttacgtaccgcgcgcgggcagcgtgttaacgatcccgttgcaaaccctacttccagacgcgccgcgcgaaggcattgtgatcaacattgcggagctgcgtctctattactacccgccgggtaaaaattcggtaaccgtgtatccaataggtattggtcagttaggtggtgacacgctgacaccgacaatggtgaccaccgtttcagacaaacgtgcaaacccaacctggacgccaacggcaaacatccgcgcccgttataaagcacagggaattgagttgcctgcggtagtgccggctggaccggataacccaatgggccatcatgcgattcgtctggcggcctatggcggcgtttatttgcttcacggtacgaacgccgatttcggcattggcatgcgggtaagttctggctgtattcgtctgcgggatgacgatatcaaaacactctttagccaggtcaccccaggcaccaaagtgaatatcatcaacactccgataaaagtctctgccgaaccaaacggtgcgcgtctggttgaagtacatcagccgctgtcagagaagattgatgacgatccgcagctgctgccaattacgctgaatagcgcaatgcaatcatttaaagatgcagcacaaactgacgctgaagtgatgcaacatgtgatggatgtccgttccgggatgccggtggatgtccgccgtcatcaagtgagcccacaaactctgtaa

SEQ ID NO: 470209 - DNA, 213 bp, Shigella flexneri
atgtcatttgccaactttgcggctgtcgaagttcagtcaacgccagaaggccaacaaaaagtcggtactatcagtgctaacgcggggacaaatctgggatcgctggaagagcagctggcgcaaaaagcggatgagatgggcgcaaaatctttccgtattacttctgtaaccggtccgaataccctccatggaacagcagtaatttataaataa

SEQ ID NO: 470210 - DNA, 696 bp, Shigella flexneri
gtgaacggaggtgattatttttataataacctttcattcacagtcaccaggtacaacggcatcatggcaactgactcaacacaatgtgtaaaaaaaagccgtggccgcccaaaagtgttcgacagggatgccgcgcttgataaggccatgaaattgttctggcaacacggttatgaagcgacttctcttgcggacctcgtcgaagcaaccggagccaaagcgcccacgctatacgcggaatttaccaacaaagaggggttatttcgtgccgttctcgaccgctatatcgatcgttttgccgctaagcatgaagcacagctgttttgtgaagagaaaagcgtggagtctgcgctggctgactattttgctgccatcgccaactgctttaccagcaaagacaccccggcaggctgcttcatgatcaacaactgcaccaccctctccccagattcaggagatatagccaatacgttgaaatcacgccatgcgatgcaagagcgcactttgcagcagtttttatgtcaacgacaagcgcgcggggaaatcccgacccactgtgacgtgacacatctggcagaattccttaattgtattattcaggggatgtcgatcagcgcacgcgaaggtgcatcgctggaaaaactgatgcagattgccggaacgactttgcgtttatggcccgaactggtgaaataa

SEQ ID NO: 470211 - DNA, 432 bp, Shigella flexneri
gtgaataaatcaatgttggcgggtatcgggattggtgtcgcagctgcgttgggcgtagcggcagtggccagtctgaacgtgtttgaacggggcccgcaatacgctcaggttgtttctgcaaccccaatcaaggaaacggttaaaacaccgcgtcaggagtgtcgcaacgtcacagtgacccatcgtcgaccggtgcaggatgaaaatcgcattaccgggtcggtgctcggcgctgttgctggtggcgtgatagggcatcagtttggtggtggtcgcggtaaagatgtcgccactgttgtggggcgctgggtggtggatatgccggtaaccagatccagggctatctccaggaaagcgatacttacacgactacgcaacagcgttgtaaaacggtgtatgacaagtcagaaaaaatgctcggttatgatgtga

SEQ ID NO: 470212 - DNA, 1305 bp, Shigella flexneri
ttgactacgccattgaaaaagattgtgattgtcggcggcggtgctggtgggctggaaatggcaacacagctggggcataagctgggacgtaagaaaaaagccaaaattacgctggtcgatcgtaaccacagccacctgtggaaaccactgctgcacgaagtggcgactggctcgcttgatgaaggcgtcgatgcgttgagctatctggcccatgcgcgcaatcatggtttccagttccagttgggttccgtcattgatattgatcgtgaagcgaaaacaatcactattgcagaactacgcgacgagaaaggtgaactgttggttccggaacgtaaaatcgcctatgacaccctggtcatggcgctgggtagcacctctaacgatttcaatacgccaggcgtcaaagagaactgcattttcctcgataacccgcaccaggcgcgtcgcttccaccaggagatgctgaatctgttcctgaaatactctgccaacctgggcgcaaatggcaaagtgaacattgcgattgtcggcggcggcgcgacgggtgtagaactctccgctgaattgcacaacgcgatcaagcaactgcacagctacggttacaaaggcctgaccaacgaagccctgaacgtaacgctggtagaagcgggagaacgtattttgcctgcattaccgccacgtatctctgctgcggcccacaacgagctaacgaaacttggcgttcgcgtgctgacgcaaaccatggtcaccagtgctgatgaaggcggcctgcacactaaagatggcgaatatattgaggctgatctgatggtatgggcagccgggatcaaagcgccagacttcctgaaagatatcggtggtcttgaaactaaccgtatcaaccagctggtggtggaaccgacgctgcaaaccactcgcgatccagacatttacgctattggcgactgcgcgtcatgcccgcgtccggaagggggctttgttccgccgcgtgctcaggctgcacaccagatggcgacttgcgcaatgaacaacattctggcgcagatgaacggtaagccgctgaaaaattatcagtataaagatcatggttcgctggtatcgctgtcgaacttctccaccgttggtagcctgatgggtaacctgacgcgcggctcaatgatgattgaaggacgaattgcgcgctttgtatatatctcgctataccgaatgcatcagattgcgctgcatggttactttaaaaccggattaatgatgctggtggggagtattaaccgcgttatccgtccgcgtttgaagttgcattaa

SEQ ID NO: 470213 - DNA, 543 bp, Shigella flexneri
atgattatctatttacacggttttgactctaacagtccgggtaaccacgagaaagtcttacaattgcagtttattgacccggatgtacgcttgataagctacagtacgcggcatccgaaacatgatatgcagcatctgcttaaagaagtggacaaaatgttgcaactgaacgttgacgagcgtccgctaatttgcggcgttggcctgggcggatactgggcggaacggattggttttctttgcgatatccgccaggtgatcttcaaccctaatttgttcccttatgagaacatggaaggcaagattgatcgcccggaagagtatgccgatattgccactaagtgtgtgaccaacttccgcgagaagaatcgcgatcgttgtctggttattttgtcgcgtaatgatgaagcacttaacagccagcggacatctgaagagttgcatcattattacgagattgtctgggacgaagagcagacgcacaaattcaagaatatctccccgcatttacagcgcattaaagcgttcaaaaccctcgggtaa

SEQ ID NO: 470214 - DNA, 1026 bp, Shigella flexneri
gtgggtccagtaatgttggatgtcgaaggttacgaactggacgcggaagagcgtgaaatactggcgcatccgctggtgggagggctgattctctttacgcgtaactatcatgatcctgcccagttacgtgaactggtgcgccagatccgcgcagcatcgcgcaatcatctggtggtggcggtagatcaggaaggtggacgtgtgcagcgttttcgcgaaggttttacccgcttaccggcagcacaatcctttgctgcgctgttgggaatggaagagggcggcaaactggcgcaagaggcgggttggctgatggccagcgaaatgatcgctatggatattgatatcagctttgcgccagtgctggatgtcgggcatatcagcgcggcgattggcgagcgttcttatcatgccgatccacaaaaagccctggcaattgccagccggtttattgatggtatgcatgaagccggaatgaaaacgaccgggaaacacttcccaggacacggtgcagtaacggcagactcacacaaagaaacaccgtgcgatccacgtccacaagcggagattcgcgctaaagatatgtcggtcttcagttccttaatccgcgaaaataaactcgacgccattatgcctgcgcatgtgatctacagtgatgttgatccgcgtccggcgagcggttctccctactggctgaaaaccgttttgcgtcaggaactgggttttgacggcgtgattttctctgacgatttatcgatggaaggtgccgcgattatgggcagttatgccgaacgcgggcaggcatcactggatgcgggttgcgatatgatcctggtctgcaataatcgtaaaggggccgtcagcgtgttagataatctgtcaccgatcaaggcagaacgtgttacacgtttgtatcataaaggttcattttcgcgacaggaactgatggactcggctcgctggaaagcgatcagcacccgtctgaatcagttacatgaacgctggcaggaagagaaagcaggtcactaa

SEQ ID NO: 470215 - DNA, 825 bp, Shigella flexneri
gtgccgtttcgcagcaataatcccatcacgcgcgacgaattgctgtcgcgctttttcccgcagtttcatcccgtcacgacgtttaatagtgggcttagtggcggtagttttctcattgaacatcagggccagcgttttgttgtgcgtcagccgcacgatcctgatgcgccgcagtccgcgttcttgcgccagtatcgggctttatcacaactacccgcaagcattgcaccgaagccgcatttatatctccgtgactggatggtagtcgactatctgcccggcgcggtaaaaacgtatttgccggataccaacgaactggcaggcttgctgtattatctacatcaacaaccacgttttggctggcgaataacgctgttgcccttactggaactgtactggcagcaaagcgatccggcgcggcggactgtgggttggctgcgaatgttaaaacgtctgcgcaaagcgcgggaaccacgacctttacgcttaagtccattgcatatggatgtccacgccggaaatttagtgcatagcgcatcagggttaaaactcatcgactgggagtatgctggagatggtgatatcgcgctggaactggcggcggtgtgggtggaaaatactgaacagcaccggcaattggtcaatgactatgccactcgcgcgaagatttatccggcgcaattatggcgtcaggtcaggcgatggtttccctggctgctgatgctcaaaggagggtggtttgagtaccgctggcgacaaaccggcgatcaacaatttatcaggctggccgatgacacctggcggcagctattaataaaacaataa

SEQ ID NO: 470216 - DNA, 642 bp, Shigella flexneri
atgacaaaaatgagtcgctacgccttgattaccgcgctggcgatgtttctcgccgggtgtgtggggcaacgtgaacctgcaccggtagaagaagtgaaaccagcgccggaacaaccagccgagccacaacagcctgtccccacagtgccctcggtgccgacgatcccgcagcagccaggcccaattgagcacgaagatcgaacggcaccgcctgcgccgcatattcgccattatgactggaatggcgcaatgcagccgatggtcagtaagatgcttggggctgacggggtgactgcgggtagcgtcctgctggttgatagcgttaacaaccgtactaacggttcgctgaatgccgcagaagcgaccgaaacgctgcgaaatgcgctggctaataacgggaaatttaccctggtttccgcccagcaactgtcgatggctaagcaacagttaggtttgtcgccgcaggacagtttaggcacccgtagtaaagccataggcattgcccgcaatgtcggcgctcattacgtgctgtactccagcgcctctggcaacgttaacgctccgaccctacaaatgcagctgatgctggtgcagacgggcgaaattatctggtcaggtaaaggtgccgtttcgcagcaataa

SEQ ID NO: 470217 - DNA, 378 bp, Shigella flexneri
atgagaaaaggatgctttgggctggtgtctctggtgttgttactgctggtgggctgtcgttcacatccggaaattccggtgaatgatgagcaatcgctggtgatggagtcatctttattggctgcgggcatcagtgcagaaaagcccgtcctttcgacgtctgatattcaaccttcagcatcctcaacgctttataacgaaaggcaagaacccgttaccgttcattatcgtttttactggtatgacgccagagggctggagatgcatcctctggaaaggccacgcagcgttaccattcccgcacattcggcggtaacgctgtacggcagcgccaattttctgggggcgcacaaagtcagactttatctatatttgtaa

SEQ ID NO: 470218 - DNA, 360 bp, Shigella flexneri
gtggcagaagaaactatattcagcaaaattattcgtcgtgagatcccctccgatatcgtctaccaggatgatctggtaacggcgtttcgcgatatttcgccgcaagcgccaacgcatattctgatcattccgaatattctcattccgactgtgaacgacgtgtcagctgagcatgagcaggcgctgggacgcatgatcaccgtagcggcaaaaattgctgagcaagaaggtattgccgaagatggctatcgtctgatcatgaataccaaccgccatggcggacaagaggtttaccacatccatatgcacttgttgggtggccgtccgctgggaccaatgctggcgcataaaggtctgtaa

SEQ ID NO: 470219 - DNA, 1116 bp, Shigella flexneri
atgctttcaacacaatttaacagggataatcaatatcaagtcatcaccaaaccgtcactacttgccggttgcatagcactggcactattaccttctgccgcttttgctgcaccagccactgaagaaacggtgattgttgagggttcagccacagctccagatgatggcgaaaatgattacagcgtaacgtctacctctgcgggtaccaaaatgcagatgactcaacgtgatattcctcagtcggtcactattgttagccagcagcggatggaagatcagcagttacaaacgctgggcgaagtgatggaaaacacgctggggatcagcaaaagtcaggcggattccgatcgtgctctttattattcccgcggattccagatcgataactatatggttgatggtatccccacctattttgaatcgcgctggaatctgggcgacgcactttctgatatggcactgtttgaacgcgtagaagtagtgcgtggcgcgacaggactcatgaccgggacgggtaatccatctgcggcaattaatatggttcgaaaacacgcgacctgtcgtgaatttaaaggcgatgtctcggcggaatacggtagctggaacaaagaacggtatgtggcggatttacaaagcccactcaccgaagacggtaaaatccgcgcgcgaattgtcggcggctaccagaataacgactcatggctggaccgctacaatagtgaaaagaccttcttctcgggcattgtcgatgctgatttaggcgatcttacgacgctttcagccggttacgaatatcagcgcattgatgttaatagcccaacctggggcggtttaccgcgctggaatactgatggcagcagcaacagttacgatcgcgcacgcagtaccgcacctgactgggcgtacaacgataaagagatcaacaaggtctttatgaccctgaagcagcggtttgctgatacctggcaagcgacactgaatgccacccactctgaagtcgaatttgacagcaaaatgatgtatgtcgatgcctatgtaaacaaagcggatggtatgctggttgggccatacagtaattatggacctggctttgatcatgtcggcggcaccggttga

SEQ ID NO: 470220 - DNA, 837 bp, Shigella flexneri
atgaaatcgttatatgctgccactcgtgtcacccttgccgatccgctgcatctgatcctcggcgcacgttataccaactggcgggttgatacgctgacttacagcatggagaaaaaccacaccacgccttacgctggtctggtgtttgacatcaatgacaactggtcgacctacgccagctatacctctattttccagccgcaaaatgatcgtgacagttcaggcaaatatctggctccaatcaccggtaacaactacgagctgggtctgaaatcggactggatgaatagccgtctgaccaccacgttagccatcttccgtattgagcaggataatgtcgctcagtccaccggtacacctatccccggcagcaacggcgaaaccgcctataaagcggtggatgggacagtcagtaaaggggtggaatttgaactcaacggcgcaattaccgacaactggcagctgacatttggcgcaacgcgctatcttgcagaggataacgaaggaaacgccgttaatcctaatctgccacgcaccacggttaaaatgttcaccagctatcggttgcctgtcatgccagagttgacagtcggcggtggtgttaactggcaaaatcgcgtgtataccgacaccgtgacaccgtatggcaccttccgcgccgagcaaggtagctacgcgctggtggatctcttcacccgctaccaggtgacgaaaaacttctcgttacaggggaacgtcaataacctgttcgacaaaacctacgataccaacatggaaggttctatcgtctacggcgcaccgcgtaatttcagcattaccggcacgtatcaattctga

SEQ ID NO: 470221 - DNA, 1434 bp, Shigella flexneri
atgtttaagaatgcatttgctaacctgcaaaaggtcggtaaatcgctgatgctgccggtatccgtactacctatcgcaggtattctgctgggcgtcggttccgcgaatttcagctggctgcccgccgttgtatcgcatgttatggcagaagcaggcggttccgtctttgcaaacatgccactgatttttgcgatcggtgtcgccctcggctttaccaataacgatggcgtatccgcgctggccgcagttgttgcctatggcatcatggttaaaaccatggccgtggttgcgccactggtactgcatttacctgctgaagaaatcgcctctaaacacttggcggatactggcgtactcggagggattatctccggtgcgattgcagcgtacatgtttaaccgtttctaccgtattaagctgcctgagtatcttggcttctttgccggtaaacgctttgtgccgatcatttctggcctggctgccatctttactggcgttgtgctgtccttcatttggccgccgattggttctgcaatccagaccttctctcagtgggctgcttaccagaacccggtagttgcgtttggcatttacggtttcatcgaacgttgcctggtaccgtttggtctgcaccacatctggaacgtacctttccagatgcagattggtgaatacaccaacgcagcaggtcaggttttccacggcgacattccgcgttatatggcgggtgacccgactgcgggtaaactgtctggtggcttcctgttcaaaatgtacggtctgccagctgccgcaattgctatctggcactctgctaaaccagaaaaccgtgcgaaagtgggcggtattatgatctccgcggcgctgacctcgttcctgaccggtatcaccgagccgatcgagttcttcttcatgttcgttgcgccgatcctgtacatcatccacgcgattctggcaggcctggcattcccaatctgtattcttctggggatgcgtgacggtacgtcgttctcgcacggtctgatcgacttcatcgttctgtctggtaacagcagcaaactgtggctgttaccgatcgtcggtatcggttatgcgattgtttactacaccatcttccgcgtgctgattaaagcactggatctgaaaacgccgggtcgtgaagacgcgactgaagatgcaaaagcaacaggtaccagcgaaatggcaccggctctggttgctgcatttggtggtaaagaaaacattactaacctcgacgcatgtattacccgtctgcgcgtcagcgttgctgatgtgtctaaagtggatcaggctggcctgaagaaactgggcgcagcgggcgtagtggttgctggttctggtgttcaggcgattttcggtactaaatccgataacctgaaaaccgagatggatgagtacatccgtaaccactaa

SEQ ID NO: 470222 - DNA, 798 bp, Shigella flexneri
atgtttttagtcgactcacactgccatctcgatggtctggattatgaatctttgcataaggacgtggatgacgttctggcgaaagccgccgcacgcgatgtgaaattttgtctggcagtcgccacaacattaccgggttatttacatatgcgggatctggtaggcgaacgtgacaacgtcgtattttcttgtggcgtgcatccactcaaccagaatgatccctacgatgtagaagatttacgccgtctggcggcagaagagggtgttgtagcgctgggtgaaactgggctggattattattacacaccggaaactaaagtacgtcagcaagagtccttcatccatcatatccagattggtcgtgaactgaacaagccggttatcgtccatacccgtgacgcccgtgccgatacgctggcaattctgcgcgaagaaaaagtgacggattgcggtggcgtactacactgttttacagaggacagagaaacggcgggtaaattactggatctcggattttacatctccttttccggcattgtgaccttccgtaatgcggagcaactgcgcgatgctgcgcgttatgtccccctggatcgattactggtggaaactgactcaccttaccttgcgccggtaccgcatcgaggaaaagagaatcaacctgcgatggttcgtgacgttgcagaatacatggctgtgttgaaaggtgttgccgttgaagaactggcgcaggtaaccaccgataacttcgcccgtctgtttcacatcgacgcttcccgccttcaatccatccgttga

SEQ ID NO: 470223 - DNA, 1005 bp, Shigella flexneri
atgagatggtatccatggttacgacctgatttcgaaaaactggtagccagctatcaggccggaagaggtcaccatgcgctactcattcaggcgttaccgggcatgggcgatgatgctttaatctacgccctgagccgttatttactctgccaacaaccgcagggccacaaaagttgcggtcactgtcgtggatgtcagttgatgcaggctggcacgcatcccgattactacaccctggctcccgaaaaagggaaaaatacgctgggcattgatgcggtacgtgaggtcaccgaaaagctgaatgagcacgcacgcctaggtggtgcgaaagttgtctgggtaaccgatgctgccttactgaccgacgccgcggctaacgcattgctgaaaacgcttgaagagccaccagcagaaacctggtttttcctggctacccgcgagcctgaacgtttactggcaacattacgtagtcgttgtcggttacattaccttgcgccgcctccagaacagtacgccgtgacttggctttcacgcgaagtgacaatgtcacaggatgcattacttgccgcattgcgcttaagcgccggttcgcctggcgcggcactggcgttgtttcagggagataactggcaggctcgtgaaacattgtgtcaggcgttggcatatagcgtgccatcgggcgactggtattcgctgctggcggcccttaatcatgaacaagctccggcgcgtttacactggctggcaacgttgctgatggatgcgctaaaacgccatcatggcgctgcgcaggtgaccaatgttgatgtgccgggcctggtcgccgaactggcaaaccatctttctccctcgcgcctgcaggctatactgggggatgtttgccacattcgtgaacagttaatgtctgtcacaggcatcaaccgcgagcttctcatcaccgatcttttactgcgtattgagcattacctgcaaccgggcgttgtgctaccggttcctcatctttaa

SEQ ID NO: 470224 - DNA, 642 bp, Shigella flexneri
atgcgcagtaagtatatcgtcattgaggggctggaaggcgcaggcaaaactaccgcgcgtaatgtggtggttgagacgctcgagcaactgggtatccgcgacatggttttcactcgggaacctggcggtacgcaacttgccgaaaagttaagaagcctggtgctggatatcaaatcggtaggcgatgaagtcattaccgataaagccgaagttctgatgttttatgccgcgcgcgttcaactggtagaaacggtcatcaaacctgcgctggctaacggcacctgggtgattggcgatcgccacgatctttccactcaggcgtatcagggcggaggacgtggtattgaccaacatatgctggcaacactgcgtgatgctgttctcgggggttttcgcccagacttaacgctctatctcgatgttaccccggaagttggcttaaaacgcgcgcgtgcgcgcggcgagctggatcgtattgagcaagagtctttcgatttctttaatcgcacccgcgcccgctatctggaactggctgcacaagataaaagtattcataccattgatgccacccagccgctggaggccgtgatggatgcaatccgcactaccgtgacccactgggtgaaggagttggacgcatga

SEQ ID NO: 470225 - DNA, 1023 bp, Shigella flexneri
atgaaaaaagtgttattgattatcttgttattgctggtggtactgggtatcgccgctggtgtgggcgtctggaaggttcgccatcttgccgacagcaaattgcttatcaaagaagagacgatatttaccctgaagccagggaccggacgtctggcgctcggtgaacagctttatgctgataagatcatcaatcgcccacgggtttttcaatggctgctgcgtatcgaaccggatctttctcactttaaagccgggacttaccgctttacaccgcagatgaccgtgcgcgagatgctgaaattgttggaaagcggtaaagaagcacagttcccgctgcgactggtagaagggatgcgtctgagcgactacctcaagcaattgcgtgaggctccgtatatcaagcacacgctgagtgacgataagtacgccaccgtagcgcaggcacttgaactggaaaatccggagtggattgaaggttggttctggccagacaccttgatgtataccgccaataccaccgatgtcgcgttactcaagcgagttcacaagaaaatggtgaaagcggtcgatagcgcctgggaagggcgtgcggacggtctgccttataaagataaaaatcagctggtgacgatggcatcaattatcgaaaaagaaaccgccgttgccagtgaacgcgatcaggttgcctcggtatttatcaaccgtttacgcattggtatgcgcctgcagaccgacccaaccgtgatttacgggatgggagagcgttataatggcaaactttctcgtgcagacctggaaacgccgacagcgtataacacctataccattaccggtttgccgccgggtgcgatagctacgccgggggcggattcgctgaaggctgctgcgcatccggcaaaaacgccgtatctctattttgtggccgatggtaaaggtggtcacacgtttaataccaatcttgccagtcataacaagtctgtgcaggattatctgaaagtgcttaaggaaaaaaatgcgcagtaa

SEQ ID NO: 470226 - DNA, 810 bp, Shigella flexneri
atgttcttaattaacggttataagcaggaatcgctggcagtaagcgatcgggcaacgcagtttggtgatggttgttttaccaccgccagagttatcgacggtaaagtcagtttgttatcggcgcatatcctgcgactacaggatgcttgtcagcggttgatgatttcctgtgacttctggcctcagcttgaacaagagatgaaaacgctggcagcagaacagcaaaatggtgtgctgaaagtcgtgatcagtcgcggtagtggcgggcgagggtacagcacattgaacagcggaccagcaacgcggattctctccgttacggcttatcctgcacattacgaccgtttgcgtaacgaagggatgacgttggcgctaagcccggtgcggctggggcgcaatcctcatcttgcaggtattaaacatcttaatcggcttgagcaagtattgattcgctctcatcttgagcagacaaacgctgatgaggcgctggtccttgacagcgaagggtgggttacggaatgctgtgcggctaatttgttctggcggaagggcaatgtagtttatacgccgcgactggatcaggcaggtgttaacggcattatgcgacaattctgtatccgtttactggcacaatcctcttatcagcttgtcgaagtgcaagcctcgctggaggaggcgttgcaggcagatgagatggttatttgtaatgcgttaatgccagtgatgcccgtacgtgcctgtggcgatgtcaccttttcgtcagcaacgttatatgaatatttagccccactttgtgagcgcccgaattag

SEQ ID NO: 470227 - DNA, 1242 bp, Shigella flexneri
gtgtctaagcgtcgtgtagttgtgaccggactgggcatgttgtctcctgtcggcaataccgtagagtctacctggaaagctctgcttgccggtcagagtggcatcagcctaatcgaccatttcgatactagcgcctatgcaacgaaatttgctggcttagtaaaggattttaactgtgaggacattatctcgcgcaaagaacagcgcaagatggatgccttcattcaatatggaattgtcgctggcgttcaggccatgcaggattctggccttgaaataacggaagagaacgcaacccgcattggtgccgcaattggctccgggattggcggcctcggactgatcgaagaaaaccacacatctctgatgaacggtggtccacgtaagatcagcccattcttcgttccgtcaacgattgtgaacatggtggcaggtcatctgactatcatgtatggcctgcgtggcccaagcatctctatcgcgaccgcctgtacttccggcgtgcacaacattggccatgctgcgcgtattatcgcgtatggcgatgctgacgtgatggttgcaggtggcgcagagaaagccagtacgccgctgggcgttggtggttttggcgcggcacgtgcattatctacccgcaatgataacccgcaagcggcgagccgcccgtgggataaagagcgtgatggcttcgtactgggcgatggtgccggtatgctggtacttgaagagtacgaacacgcgaaaaaacgcggtgcgaaaatttacgctgaactcgtcggctttggtatgagcagcgatgcttatcatatgacgtcaccgccagaaaatggcgcaggcgcagctctggcaatggcaaatgctctgcgtgatgcaggcattgaagcgagtcagattggctacgttaacgcgcacggtacttctacgccggctggcgataaagctgaagcgcaggcggtgaaaaccatcttcggtgaagctgcaagccgtgtgttggtaagctccacgaaatctatgaccggtcacctgttaggtgcggcgggtgcagtagaatctatctactccatcctggcgctgcgcgatcaggctgttccgccaaccatcaacctggataacccggatgaaggttgcgatctggatttcgtaccgcatgaagcacgtcaggtcagcggaatggaatacacgctgtgtaactccttcggcttcggtggcactaatggttctttgatctttaaaaagatctaa

SEQ ID NO: 470228 - DNA, 237 bp, Shigella flexneri; identical to SEQ ID NO: 3538

SEQ ID NO: 470229 - DNA, 735 bp, Shigella flexneri
atgaattttgaaggaaaaatcgcactggtaaccggtgcaagccgcggaattggccgcgcaattgctgaaacgctcgcagcccgtggcgcgaaagttattggcactgcgaccagtgaaaatggcgctcaggcgatcagtgattatttaggtgccaacggcaaaggtctgatgttgaatgtgaccgacccggcatctatcgaatctgttctggaaaaaattcgcgcagaatttggtgaagtggatatcctggtcaataatgccggtatcactcgtgataacctgttaatgcgaatgaaagatgaagagtggaacgatattatcgaaactaacctttcatctgttttccgtctgtcaaaagcggtaatgcgcgctatgatgaaaaagcgtcatggtcgtattatcactatcggttctgtggttggtaccatgggaaatggcggtcaggccaactacgctgcggcgaaagcgggcttgatcggcttcagtaaatcactggcgcgcgaagttgcgtcacgcggtattactgtaaacgttgttgctccgggctttattgaaacggacatgacacgtgcgctgagcgatgaccagcgtgcgggtatcctggcgcaggttcctgcgggtcgcctcggcggcgcacaggaaatcgccaacgcggttgcattcctggcatccgacgaagcagcttacatcacgggtgaaactttgcatgtgaacggcgggatgtacatggtctga

SEQ ID NO: 470230 - DNA, 930 bp, Shigella flexneri
atgacgcaatttgcatttgtgttccctggacagggttctcaaaccgttggaatgctggctgatatggcggcgagctatccaattgtcgaagaaacgtttgctgaagcttctgcggcgctgggctacgacctgtgggcgctgacccagcaggggccagctgaagaactgaataaaacctggcaaacccagccagcgctgttgactgcatctgttgcgctgtatcgcgtatggcagcagcagggcggtaaagcaccggcaatgatggccggtcacagcctgggggaatactccgcgctggtttgcgctggcgtgattgatttcgctgatgcggtgcgtctggttgagatgcgcggtaagttcatgcaagaagccgtaccggaaggcacgggcgctatggcggcaatcatcggtctggatgatgcgcctattgcgaaagcgtgtgaagaagctgcagaaggtcaggtcgtttctccggtaaactttaactctccgggacaggtggttattgccggtcataaagaagcggttgagcgtgctggcgctgcctgtaaagctgctggcgcaaaacgcgcgctgccgttaccagtgagcgtaccgtctcactgtgcgctgatgaaaccagcagccgacaaactggcagtagaattagcgaaaatcacctttaacgcaccaacagtttctgttgtgaataacgttgatgtgaaatgcgaaaccaatggtgatgccatccgtgacgcactggtacgtcagttgtataacccggttcagtggacgaagtctgttgagtacatggcagcgcaaggcgtagaacatctctatgaagtcggcccgggcaaggtgcttactggcctgacgaaacgcattgtcgacaccctgaccgcctcggcgctgaacgaaccttcagcgatggcagcggcgctcgagctttaa

SEQ ID NO: 470231 - DNA, 954 bp, Shigella flexneri
atgtatacgaagattattggtactggcagctatctgcccgaacaagtgcggacaaacgccgatttggaaaaaatggtggacacctctgacgagtggattgtcactcgtaccggtatccgcgaacgccacattgccgcgccaaacgaaaccgtttcaaccatgggctttgaagcggcgacacgcgcaattgagatggcgggcattgagaaagaccagattggcctgatcgttgtggcaacgacttctgctacgcacgctttcccgagcgcagcttgtcagattcaaagcatgttggacattaaaggttgcccggcatttgacgttgcagcagcctgtgcaggtttcacctatgcattaagcgtagccgatcaatacgtgaaatctggggcggtgaagtatgctctggtcgtcggttccgatgtactggcgcgcacctgcgatccaacagatcgtgggactattattatttttggcgatggcgcgggcgctgcggtgctggctgcctctgaagagccgggaatcatttccacccatctgcatgccgacggtagttatggtgaattgctgacgctgccaaacgccgaccgcgtgaatccagagaattcaattcatctgacgatggcgggcaacgaagtcttcaaggttgcggtaacggaactggcgcacatcgttgatgagacgctggcggcgaataatcttgaccgttctcaactggactggctggttccgcatcaggctaacctgcgtattatcagtgcaacggcgaaaaaactcggtatgtcgatggacaatgtcgtagtgacgctggatcgccacggtaatacctctgcggcctctgtcccgtgcgcgctggatgaagctgtacgcgacgggcgcattaagccggggcagttggttctgcttgaagcctttggcggtggattcacttggggctctgcgctggttcgtttctag

SEQ ID NO: 470232 - DNA, 1041 bp, Shigella flexneri
atgggaggggattttggcccttccgtgacagtgcctgcagcattgcaggcactgaattctaattcgcaactcactcttcttttagtcggcaatcccgacgccatcacgccattacttgctaaagctgactttgaacaacgttcgcgtctgcagattattcctgcgcagtcagttatcgccagtgatgcccggccttcgcaagctatccgcgccagtcgtgggagttcaatgcgtatggccctggagctggtgaaagaaggtcgagcgcaagcctgtgtcagtgccggtaataccggggcactgatggggctggcaaaattattactcaagcccctggaggggattgagcgtccggcgctggtgacggtattaccacatcagcaaaagggcaaaacggtggtcctcgatttaggggccaacgtcgattgtgacagcacaatgttggtgcaatttgccattatgggctcagttctggctgaagaggtggtggaaattcccaatcctcgcgtggcgttgctcaatattggtgaagaagaagtaaagggtcttgacagtattcgggatgcctcagcggtgcttaaaacaatcccttctatcaattatatcggctatcttgaagccaatgagttgttaactggcaagacagatgtgctggtttgtgacggctttacaggaaatgtcacgttaaagacgatggaaggtgttgtcaggatgttcctttctctgctgaaatctcagggtgaagggaaaaaacggtcgtggtggctactgttattaaagcgttggctacaaaagagcctgacgaggcgattcagtcacctcaaccccgaccagtataacggcgcctgtctgttaggattgcgcggcacggtgataaaaagtcatggtgcagccaatcagcgagcttttgcggtcgcgattgaacaggcagtgcaggcggtgcagcgacaagttcctcagcgaattgccgctcgcctggaatctgtatacccagctggttttgagctgctggacggtggcaaaagcggaactctgcggtag

SEQ ID NO: 470233 - DNA, 174 bp, Shigella flexneri; identical to SEQ ID NO: 3543

SEQ ID NO: 470234 - DNA, 522 bp, Shigella flexneri
atgcaaaaggtaaaattacccctgactctcgatccggttcgtacggctcaaaaacgccttgattaccagggtatctatacccctgatcaggttgagcgcgtcgccgaatccgtagtcagtgtggacagtgatgtggaatgctccatgtcgttcgctatcgataaccaacgtctcgcagtgttaaacggcgatgcgaaggtgacggtaacgctcgagtgtcagcgttgcgggaagccgtttactcatcaggtctacacaacgtattgttttagtcctgtgcgttcagacgaacaggctgaagcactgccggaagcgtatgaaccgattgaggttaacgaattcggtgaaatcgatctgcttgcaatggttgaagatgaaatcatcctcgccttgccggtagttccggtgcatgattctgaacactgtgaagtgtccgaagcggacatggtctttggtgaactgcctgaagaagtgcaaaagccaaacccatttgccgtattagccagcttaaagcgtaagtaa

SEQ ID NO: 470235 - DNA, 624 bp, Shigella flexneri
atggctatcatcaatacgctatatctgatggaaaaaaatatgcctaaacttattttagcctccacctcgccatggcgtcgcgctcttctggaaaaactgcaaatctcttttgaatgtgcagcacctgaggtcgacgaaaccccacgcagcgacgaatcaccgcgacagttggtgcttcgactggcacaagaaaaagcgcaatctctggcgtcacgttatccggatcatttaattattggttcagaccaggtatgtgttcttgatggcgaaatcaccggtaaaccgttaacggaagaaaatgcccgtctgcaattacgcaaagccagcggcaatatcgtcaccttctatactggactggcgttgtttaattcggcgaatgggcatctacaaacagaagtggagccttttgacgtccatttccgtcacctaagcgaggcggagattgataattacgtgcgtaaggagcatcccctgcactgcgcgggtagctttaagagtgaaggatttggcattacgctgtttgagcgtttagagggacgtgaccctaacacgctggttggtttaccgctaatcgcgctgtgtcagatgttacgtcgggaagggaaaaacccgctgatgggatag

SEQ ID NO: 470236 - DNA, 960 bp, Shigella flexneri
atgaaaacagagactccatccgtaaaaattgttgctatcaccgctgacgaagcggggcaacgtatcgataactttttgcgtacccaattgaaaggcgtaccaaaaagtatgatttaccgtattttgcgtaaaggtgaagtgcgggtgaacaaaaaacgtattaagcctgaatataaactcgaagcgggtgatgaggtgcgtatcccaccggttcgcgttgctgagcgggaagaagaggcggtttcgccacatctgcaaaaggtggcggcgctggcggacgtcatcttatatgaagatgatcatatcctggtgctgaataaaccttccggtacggcggtacatggcggcagtggtttaagcttcggcgttatcgaaggtttgcgggcgttgcgcccggaagcgcggttccttgaactggttcatcgtctcgaccgggacacttcaggtgtgttgctggtagcgaaaaaacgctcggcgttgcgttctctgcatgagcaattacgtgaaaaaggaatgcaaaaagattacctggcgctggtgcgcggtcagtggcagtcgcatgtgaagagcgttcaagcgccgttattgaaaaatattctgcaaagcggcgaacgtatcgtgcgtgtcagtcaggaaggcaaaccgtcggaaacacgctttaaagtggaagaacgctatgcatttgccaccctggtgcgttgtagcccggtaaccggacgtactcatcagatccgtgtgcatacacagtatgcgggtcatccgattgcctttgacgatcgctacggtgaccgtgaatttgacagacagctcactgaagcaggcacgggattaaatcgtctgttcctgcacgccgcagcgttgaagtttacccatccggggaccggtgaggtgatgcgtatcgaagcgccgatggatgaaggtttgaagcgttgtttgcaaaagctgcgtaacgcgcgctaa

SEQ ID NO: 470237 - DNA, 3186 bp, Shigella flexneri
atgaaaagaatgttaatcaacgcaactcagcaggaagagttgcgcgttgcccttgtagatgggcagcgtctgtatgacctggatatcgaaagtccagggcacgagcagaaaaaggcaaacatctacaaaggtaaaatcacccgcattgaaccgagtctggaagctgcttttgttgattacggcgctgaacgtcacggtttcctcccactaaaagaaattgcccgcgaatatttccctgctaactacagtgctcatggtcgtcccaacattaaagatgtgttgcgtgaaggtcaggaagtcattgttcagatcgataaagaagagcgcggcaacaaaggcgcggcattaaccacctttatcagtctggcgggtagctatctggttctgatgccaaataacccgcgcgcaggtggcatttctcgccgtatcgaaggcgatgaccgtaccgaattaaaagaagcactggcaagccttgaactgccggaaggcatggggcttatcgtgcgcaccgctggcgtaggcaaatctgctgaggcgctgcaatgggatttaagcttccgcctgaaacactgggaagccatcaaaaaagccgctgaaagccgcccggctccgttcctgattcatcaggagagcaacgtaatcgttcgcgccttccgcgattatttacgtcaggatatcggcgaaatccttatcgataacccgaaagtcctcgaactggcacgtcagcatatcgctgcattaggtcgcccggatttcagcagcaaaatcaaactgtacaccggcgagatcccgctgttcagccactaccagatcgagtcgcagatcgagtccgccttccagcgtgaagtccgtctgccatccggtggttccattgttatcgacagcaccgaagcgttaacagccatcgacatcaactccgcacgcgcgacccgcggcggcgatatcgaagaaactgcgtttaacaccaacctcgaagccgccgatgagattgctcgtcagctgcgcctgcgtgacctcggcggcctgattgttatcgacttcatcgacatgacgccagtacgccaccagcgtgcggtagaaaaccgtctgcgtgaagcggtgcgtcaggaccgtgcgcgtattcaaatcagccatatttctcgctttggcctgctggaaatgtcccgccagcgcctgagcccatcactgggtgaatccagccatcacgtctgcccgcgctgctccggtaccggtaccgtgcgtgacaacgaatcgctgtcgctctctattctgcgtttgatcgaagaagaagcgctgaaagagaacacccaggaagttcacgccattgttcctgtgccaatcgcttcttatctgctgaatgaaaaacgttctgcggtgaatgcgattgaaacgcgtcaggacggtgttcgctgcgtgattgtgccaaacgatcagatggaaaccccgcactaccacgtgttgcgcgtgcgcaaaggggaagaaacgccgaccttaagctacatgctgccgaagctgcatgaagaagcgatggcgctgccgtctgaagaagagttcgctgaacgtaagcgtcctgaacaacctgcactggcaacctttgccatgccggatgtaccgccagcgccaaccccagctgaacctgccgcgactgtcgtagccccagcaccgaaagctgcaacggcaacaccagcagctcctgcacaacctgggctgttaagccgcttcttcggcgcactgaaagcgctgttcagcggtggtgaagaagccaaaccgaccgagcaaccaacaccgaaagcagaagcgaaaccggaacgtcaacaggatcgtcgcaaacctcgtcagagcaaccgccgtgaccgtaatgagcgccgcgacacccgtagtgaacgtactgaaggcagcgataatcgcgaagaaaaccgtcgtaatcgtcgccaggcacagcagcaaactgccgagacgcgtgagagccgtcagcaggctgaggtaacggaaaaagcacgtaccaccgacgagcagcaagcgccgcgtcgtgaacgtagccgccgccgtaacgatgataaacgtcaggcgcaacaagaagcgaaggcgctgaatgttgaagagcaatctgttcaggaaaccgaacaggaagaacgtgtacgtccggttcagccgcgtcgtaaacagcgtcagctcaatcagaaagtgcgttacgagcaaagcgtagccgaagaagcggtagtcgcaccggtggttgaagaaactgccgctgccgaaccaattgttcaggaagctccagctccacgcacagaactggtgaaagtcccgctgccagtcgtagcgcaaactgcaccagaacagcaagaagagaacaatgctgataaccgtgacaacggtggcatgccgcgtcgttctcgccgctcgcctcgtcacctgcgcgtgagtggtcagcgtcgtcgtcgctatcgtgacgagcgttatccaacccagtcgccaatgccgttgaccgtagcgtgcgcgtctccggaactggcctctggcaaagtctggatccgctatccaattgtacgtccgcaagatgtacaagttgaagagcagcgcgaacaggaagaagtacaagtgcagccgatggtgactgaggtccctgtcgccgccgctgtcgaacctgttgttagcgcgccagttgttgaagaaatggctgaagtcgtagaagcccccgtaccggttgccgaaccgcaaccggaagtggttgaaacgacgcatcctgaagtgattgccgccgcggtaactgaacagccgcaggtgattaccgagtctgatgttgccgtagcccaggaagtcgcagaacacgcagaaccggtggttgaaccgcaggaagagacggcagatattgaagaagttgccgaaactgctgaggttgtggttgctgaacctgaagttgttgctcaacctgccgcgccagtcgtcgctgaagtcgcagcagaagttgaaacggtggccgcggttgaaccagagatcaccgttgagcataaccacgctaccgcgccaatgacgcgcgctccggcaccggaatatgttccggaggcaccgcgtcacagtgactggcagcgccctacttttgccttcgaaggtaaaggtgccgcaggtggtcatacggcaacgcatcatgcctctgccgctcctgcgcgtccgcaacctgttgagtaa

SEQ ID NO: 470238 - DNA, 954 bp, Shigella flexneri
atgcgtttcagtacccagatgatgtaccagcaaaacatgcgcggcatcaccaattctcaggcagaatggatgaagtacggcgagcagatgtcgacgggtaagcgagtcgttaacccttcagacgatcccattgctgcatcacaagctgttgttctctcccaggcacaggcgcaaaacagccagtacacgctggcacgtactttcgccactcaaaaagtgtcactggaagagagtgtacttagccaggtcaccactgctatccagaatgctcaggaaaaaattgtctacgccagcaatggcaccttgagtgacgatgaccgggcctcgctggctacggatattcaggggcttcgtgaccagttgctgaatctggcgaacaccactgacggtaatgggcgctacatttttgccggttataaaacagagactgcgccgtttagtgaggctaacggtgattatgttggcggaacagaaagtattaagcaacaggtcgatgcttcgcgttcgatggtgataggacatacgggcgacaaaattttcgacagtattaccagtaacgcggtagcggaaccagacggtagcgcttctgaaaccaatctttttgccatgctggatagcgccatcgcagccctgaaaacgccggtcgcggatagcgaagcggataaagaaatcgccgctgcggcattggataaaaccaaccgtggactgaaaaactcgctgaataatgtccttaccgttcgcgcggaattaggcacgcagctgaacaaactggagtcgctggattccttaggtagcgatcgcgctttagggcaaacgcagcagatgagcgatctggttgatgtggactggaatgcaactatttcatcttacatcatgcagcaaacggcattgcaggcatcgtataaagcatttaccgatatgcagggattgtcgctcttccagctcaacaaataa

SEQ ID NO: 470239 - DNA, 579 bp, Shigella flexneri
gtggtactggcgacagattacaaaatctcgttcgataataatcagtggcaggtcacccgccttgccagcaataccacttttacggcgacaccagatgccaacggtaaagtggcatttgatggtctggagttgacgtttacaggaacgcctgccgttaacgacagcttcacgctgaaaccagtaagtgacgccatcgtcaacatggatgtattaatcaccgacgaagcgaaaatcgcgatggcgagcgaagaagatgcgggtgatagcgacaaccgcaacggtcaggccctgctggatctgcaaagcaacagtaaaacggtgggcggtgcgaaatcctttaacgacgcttatgcctcgttagtgagtgatatcggtaataaaaccgcgacgttgaaaaccagtagcaccacgcaaggtaatgtggtgacgcagctttccaatcagcagcagtcgatttccggtgtcaatctcgatgaggagtacggaaatctgcaacgttttcagcagtattacctggcgaatgcgcaggttctgcagacggcaaacgcgatttttgatgcgctgattaacattcgctaa

SEQ ID NO: 470240 - DNA, 825 bp, Shigella flexneri
atgtccagcttgatcaataacgccatgagcggactgaacgcggcccaggcggcgttaaatacggcaagtaataatatctccagctataacgttgccggatatacccgccaaaccactattatggcgcaggccaatagcacgttgggcgctggcggctgggttggcaatggcgtctacgtttctggtgtgcagcgtgagtatgatacgtttattaccaaccagttacgtgctgcgcagacgcaaagtagcggcctgaccgcccgctatgagcagatgtcgaaaatcgacaatatgctctccaccagtacctcttcgctggcaacacagatgcaggatttcttcaccagcctgcaaacgctggtgagtaacgcggaagacccggcggcgcgccaggcgctgattgggaaatcagaagggttggtgaatcagtttaaaaccaccgatcaatatctgcgcgaccaggacaaacaggtcaatatcgcgataggtgccagcgttgatcagatcaacaattacgctaaacaaattgccagcctgaacgatcaaatctcgcgcctgacaggcgtgggggcaggggcgtcacctaacaatctgctggatcaacgcgatcaactggtgagcgaattaaaccagattgttggcgtagaagtcagcgttcaggatggcggtacttataacatcacgatgccaatggttactcactggttcagggaagtacggcgcggcaactggcggcagttccttccagcgccgacccttctcgtacgactgtcgcttacgttgatgggacggcaggcaatattgagatcccggagaaattactga

SEQ ID NO: 470241 - DNA, 942 bp, Shigella flexneri
atgatcagcgacagcaaactactggcaagtgcggcctgggatgcgcaatcactcaacgaactaaaggcgaaagcgagcgaagatccggcggcaaatatccgtccggtggcccgtcaggtggaagggatgttcgtgcagatgatgttgaaaagcatgcgcgacgctttaccaaaagatggcctgttcagcagcgagcacactcgtctgtataccagtatgtatgaccagcaaattgcccaacagatgacggcgggcaaaggtctggggcttgcagagatgatggttaaacagatgatgccagaacaaccattgccagaggagtccacgccagcagcaccgatgaaattcccgctcgaaaccgtggtgcgttatcaaaaccagacgctttcgcagctggtgcaaaaggccgtaccacgtaactacgatgattcgctgccgggtgacagtagagcattcctcgcgcaactctcgctgcccgcccaactggcaagccagcaaagcggtgtgccacatcatttgatcctcgctcaggctgcgcttgaatctggttgggggcaacggcaaatccgccgcgaaaacggcgagccaagctataacctgtttggtgtcaaagcctctggcaactggaaagggcaagtcactgaaatcaccacgactgaatatgaaaacggcgaagcgaagaaagtaaaagcgaagtttcgggtctacagctcgtatctggaagcattgtcggattacgttgggctgttaacacgtaacccgcgctacgccgccgtgacgaccgccgcgagtgcggaacagggggcgcaggtcctacaggacgcgggctatgctaccgatcctcactatgcccgtaaactcaccaacatgatccagcagatgaaatcgataagcgacaaggtgagcaaaacctacagcatgaacattgataatctgttctga

SEQ ID NO: 470242 - DNA, 1098 bp, Shigella flexneri
gtgattaaatttctctctgcattaattcttctactggttacgacggcggctcaggctgagcgtattcgcgatctcaccagtgttcagggggtaaggcaaaactcactgattggctatggcttggtagtggggctggatggcactggtgaccagacaacccagacgccgtttaccacacaaacgcttaataacatgctctcacagctgggaattaccgttccgacgggcaccaatatgcagctaaaaaacgtcgctgcggtaatggtgacagcgtcacttcctccgtttggacgtcaggggcaaaccatcgatgtggtggtttcttccatgggtaatgccaaaagcttgcgtggaggtacgttgttgatgacaccgcttaagggcgttgacagtcaggtgtatgcgctggcgcagggcaatattctggttggcggcgcaggagcctccgcaggcggtagcagtgttcaggttaaccaactgaacggtggacggatcaccaatggtgcggttattgaacgtgaattgcccagccagtttggcgtcgggaatacccttaatttgcaacttaacgacgaagatttcagcatggcgcagcaaatcgctgacaccatcaaccgcgtgcgtggatatggcagcgccaccgcgttagatgcgcggactattcaggtgcgcgtaccaagtggcaacagttcccaggtccgtttccttgccgatatccagaatatgcaggttaatgtcaccccgcaggacgctaaagtagtgattaactcgcgcaccggttcggtggtgatgaatcgcgaagtgaccctcgacagctgcgcggtagcgcagggaaatctctcagtaacagttaatcgtcaggccaatgtcagccagccagatacaccgtttggtggtggacagactgttgttactccacaaacgcagatcgatttacgccagagcggcggttcgctgcaaagcgtacgttccagcgccagcctcaataacgtggtgcgtgcgctcaatgcgctgggcgctacgccgatggatctgatgtctattttgcaatcaatgcaaagtgcgggatgtctgcgggcaaaactggaaatcatctga

SEQ ID NO: 470243 - DNA, 699 bp, Shigella flexneri
atgcaaaaaaacgctgcgcatacttatgccatttccagcttgttggtgctttcactaaccggctgcgcctggataccctccacgccgctggtgcagggggcgaccagtgcacaaccggttcccggtccgacgcccgtcgccaacggttctattttccagtctgctcagccgattaactatggctatcaaccgctgtttgaagatcgtcgaccacgcaatattggcgatacgctgaccatcgtgttgcaggagaacgtcagcgccagcaaaagctcctctgcgaatgccagccgtgacggtaaaactaattttggctttgatactgtgccgcgctatttgcaggggctgtttggtaacgctcgtgccgatgtcgaagcctccggtggtaacacgttcaacggaaagggcggggccaatgccagcaatacctttagcggcacgttgacggtgacggttgaccaggtactggtcaacggcaacctgcatgtggtgggtgaaaaacagattgccattaatcagggtaccgaatttattcgcttctcgggcgtggttaatccacgcactatcagcggcagcaataccgtaccgtctactcaggtggcggatgcgcgtattgaatacgtaggcaatggctacattaacgaagcgcaaaatatgggctggttgcagcgtttcttccttaacctgtcgccaatgtaa

SEQ ID NO: 470244 - DNA, 783 bp, Shigella flexneri
atgatcagttcattatggatcgccaaaacgggccttgacgcccagcaaaccaatatggacgtcattgccaacaacctggcaaacgtcagtactaacggttttaagcgtcagcgcgcggtgtttgaagatctgctttatcaaaccattcgccagccgggggcacagtcttccgaacaaaccaccttaccctccggattacaaatcggcacgggggtacgcccggtcgccactgaacgcttacacagccagggcaatctgtcgcagaccaataacagcaaagatgtcgcgattaaagggcagggctttttccaggtaatgttgccagatggctcatcagcctatatccgtgacggctctttccaggtggatcagaacgggcagctggtgacggctggtggttttcaggtgcagccagcgatcaccattccggcgaatgcgttaagtatcaccatcggtcgtgatggcgtggtcagcgtaacccaacaaggccaggcagctccggttcaggttgggcagctcaatctcaccacctttatgaatgataccggactggagagcattggcgaaaacctctacaccgaaacgcaatcctccggtgcaccgaacgaaagcacgccgggcctgaacggcgcgggactgctgtatcaagggtatgttgaaacgtctaacgtcaacgtggcggaagaactggtcaatatgattcaggtgcaacgcgcttacgaaatcaacagtaaagcggtgtccaccaccgatcagatgctgcaaaaactgacgcaactctaa

SEQ ID NO: 470245 - DNA, 489 bp, Shigella flexneri
gtgcagaccgctgacggcagcgaagggtatacgcgtaatggcagcattcaggttgatcccaccgggcaactgacaattcaggggcatccggtgataggcgaggcggggccaattgctgtgccggaaggggcggaaatcacgattgctgccgatggcacaatctcggcgctcaatccgggcgatccggcaaatacagttgcgccagtagggcgtctgaaactggtgaaagccacgggcagcgaagtgcagcgcggtgacgacggcatttttcgtttaagcgcagaaacccaggccacgcgagggccggtactgcaggcagatccaaccttgcgtgtgatgtcgggggttctggaaggcagtaacgtcaatgccgttgcggcaatgagcgacatgattgccagcgcgcggcgttttgaaatgcagatgaaggtgatcagcagcgtcgatgataacgcaggccgtgccaaccaactgctgtcgatgagttaa

SEQ ID NO: 470246 - DNA, 1209 bp, Shigella flexneri
atggccttttctcaagcggttagcggattaaacgctgccgccaccaacctcgatgttattggcaacaatatcgccaactccgccacctacggctttaaatcaggcacggcctcttttgccgatatgtttgccggttcgaaagtgggactgggggtaaaagttgccggtatcactcaggactttaccgatggcacgaccaccaacaccgggcgaggtctggacgttgctatcagccagaacggttttttccgtctggtagacagcaacggttcggtgttctacagccgtaacggacaatttaagctggatgaaaaccgtaacctgttgaatacgcaaggtttacagctgacgggttacccggtaaccggtacgccgccgactattcagcaaggggcgaatccgaccaatatttcgatcccgaataccctgatggcagcgaaaactaccaccacggcgtcgatgcagatcaacctgaattccagtgatccgcttcctactgttacgccattcagcgccagcaatgcggatagctataacaaaaaaggttcggtgactgttttcgacagtcagggtaatgctcatgacatgagcgtctattttgtgaagaccggggataataactggcaggtctacacccaggatagcagtgatccaaacagcattgcgaagacagcgacaacactggaatttaatgctaatggcacattagtggatggtgcgatggcgaataatatcgcaaccggcgcaattaacggtgcagaacccgccacgtttagtctgagcttcctcaactccatgcagcaaaataccggcgctaacaacattgtggcaaccacccagaatggctacaaaccgggcgatctggtgagttatcaaatcaatgatgacggtacggttgtcggcaacaattccaacgaacaaacccaactgctggggcagattgtactggcgaactttgccaacaacgaaggtctggcatccgaaggcgacaacgtctggtctgcgacgcaatcttctggcgtggcgctgttggggacagccgggacgggaaactttggcaccctgaccaacggtgcgctggaagcgtccaacgtcgatctcagtaaagaactggtcaatatgatcgttgcccagcgtaactataagtctaacgcccagaccatcaaaacccaggaccagatcctcaacacgcgggttaacttacgctaa

SEQ ID NO: 470247 - DNA, 696 bp, Shigella flexneri
atgtccattgcggtaaccaccaccgatccgacaaataccggcgtcagtaccaccagcagtagttcgctcacgggcagcaacgccgcagatttacaaagcagttttctgactttgctggtggcgcagctgaaaaaccaggacccgaccaatccaatggaaaacaacgagctgacgtcgcaattggcacaaatcagcacggtcagcgggattgaaaaactcaataccacgctcggatctatttccggacagattgataacagccagtcgttacaggccagtaacctgatcggtcacggcgtgatgatccccggcacaactgttcttgcgggaaccggcagtgaagaaggggctgtgaccacgaccacgccgtttggtgttgagctgcaacaggcggcagacaaagttacggccaccatcaccgataaaaatggcgcggttgtgcgcaccattgatattggtgaactgaccgccggagttcacagtttcacctgggacggttcgttgactgatggcagcactgcggcgaacggttcttacaatgtagcgattagcgccagtaacggtggtacacaactggttgcccagccgctgcagtttgctctggtgcagggtgtgatccgcggcaacagcggtaatacgctggatctcggcacttacggcaccaccaccctcgacgaagtacggcagataatttaa

SEQ ID NO: 470248 - DNA, 129 bp, Shigella flexneri
atgccgaacgttgatgtcgtcggggagatggttaacaccatgtcggcgtcacgcagctatcaggccaatgttgaagtgctcaacacggtgaaaagcatgatgctgaaaacccttacgctcggtcaataa

SEQ ID NO: 470249 - DNA, 273 bp, Shigella flexneri
atggcactgctgaatatttttgatatcgccgggtcggcgttaactgcccagtcccagcgcctgaacgtggcggccagtaatctggcaaatgctgatagcgtgaccggtcctgatggacagccatatcgggcaaaacaggtggtattccaggttaacgctgcaccaggtgctgcgacaggcggcgtaaaggttgccgatgttaagaaagtcaggccccggacaaactggtttatgaaccaggtaatccgctggcagatgcaaagggctacgtaa

SEQ ID NO: 470250 - DNA, 417 bp, Shigella flexneri
atgctcgataagctcgacgccgccttacgttttcaacaagaggcgctcaatctgcgcgcccagcgtcaggaagtgctggcagcaaacatcgccaatgccgatacccctggttatcaggcgcgcgatatcgattttgccagtgaacttaaaaaagtcatgcaacgtggacgggatgcaaccagtgtggttgcactgacgatgacctcaacgcaacacatcccggcgcaggcgctgacgcctcctaccgcagaactgcaataccgtattccggaccagccttcgcttgacggtaataccgtcgatatggatcgcgaacgcacccagtttgccgataacagcctgcaataccagatgagccttagcgcgttgagcgggcaaatcaaaggcatgatgaacgttttacagagcggaaattaa

SEQ ID NO: 470251 - DNA, 660 bp, Shigella flexneri
atgctgacaataaaacgtagcatggcgatcatcgcgatactgttcagtccgttaagtacggcgagcaatctcacatcgcaattgcacaacttttttagcacccaactcgcgggggtaagtgatgaggttcgtgtttctattcgtacagcgcccaatctactaccgccatgcgagcagccattgctttcgatgagcaataattcccgcctgtggggcaatgtgaatgtgttggcacgctgcggtaacgacaaacgatatttacaggttaatgtgcaggccacaggaaattatgtggttgccgcgatgcctattgtgcggggaggaaagctggaagctggcaatgtcaaactgaaacgtggacgcctggataccctgccaccgcgtacggtgctggatatcaatcaacttgttgatgccgttagcctgcgcgatctatcacccgatcaacctatccagttaacccagtttcgccaggcatggcgggtaaaagcgggacaacgcgtcaatgtgatcgccagcggtgatgggtttagcgccaacgcagaaggtcaggcgctgaacaatgcagccgtcgcacagaatgcgcgggtgcgcatggtatcgggacaggtagtcagcggcgttgttgatgcagatgggaatattcttataaacctgtaa

SEQ ID NO: 470252 - DNA, 294 bp, Shigella flexneri
atgagtattgatcgcacttcgcctctgaagcctgtaagcaccgttcaaccgcgcgaaaccaccgacgcgccggtaacgaacagccgggcggcaaaaacaaccgcctccaccagcaccagtgtgacgttaagcgacgcgcaagcaaaactgatgcaacccggcagcagtgatatcaatcttgaacgtgtcgaagcgttaaaactggcgattcgtaacggtgaactaaaaatggacaccggcaaaattgccgatgcgctgatcaacgaagcgcagcaagacttgcagagtaactga

SEQ ID NO: 470253 - DNA, 417 bp, Shigella flexneri
atgacacgtcttgcagagatcctcgaccagatgtccgctgtgcttaacgatctcaaaacggtaatggatcaagagcagcaacatctctctatggggcagatcaacggcagccagttgcaatggattacagaacaaaaaagctcactgctggcgacgctggattacctcgaacagttacgcaagaaagaacccaatacagcaaatagcgttgatattagtcaacgctggcaggaaattactgtgaaaacgcagcaactacgccaaatgaatcaacataacggctggttactggaaggacagattgagcgcaatcaacaggcgctggaaatgttgaaaccgcatcaggaaccgacgctatatggggcgaacggtcagacctcaacaccccatcgcggcagtaaaaagatttcgatctga

SEQ ID NO: 470254 - DNA, 1536 bp, Shigella flexneri
atgaatttattaaaatcgctggccgccgtcagctcgatgaccatgttttcgcgtgtgcttggcttcgcacgagacgcaattgtcgccagaatctttggcgcagggatggcaaccgacgcctttttcgtcgcttttaaacttcctaacttgttacgccgtatctttgccgaaggggcattttcccaggcatttgtaccgattctggcggaatataaaagtaagcagggtgaagacgccacgcgggtctttgtctcttatgtttctggcctgctgacacttgcgctggcggttgtgacggtcgctggcatgctcgccgcaccgtgggtgatcatggtgaccgcgccaggcttcgctgacacagctgacaaatttgccctgaccagccagctactaaagattacctttccctatatcttgctgatctccctggcgtcgctggtgggagcgattctgaatacgtggaaccgcttctcgattccggcgtttgcgccaacactgcttaacatcagcatgattggtttcgcgctgtttgccgcaccgtactttaacccaccggtgctggcgctggcgtgggctgttacggtcggcggcatcctgcagctggtgtatcagctaccgcacctgaagaagatcggcatgctggtcctgccgcgcattaacttccacgatgctggagcaatgcgcgtggtgaaacagatgggaccggcgatccttggcgtctctgtgagccagatctccttaatcatcaacaccatttttgcctcgtttcttgcttccggttcggtgtcttggatgtattacgccgaccgcttaatggagtttccctccggtgtgctgggcgtggcgcttggcaccattttgctgccgtcgctgtcgaaaagttttgccagtggcaatcatgatgaatacaaccgtttgatggactgggggttgcgtctttgtttcctgttggcactgccgagtgcggttgcgttgggcattctttcaggtccgttaaccgtttcgctgttccagtacggtaaatttaccgcgtttgatgcgctgatgacccagcgggcgttaattgcctactcggtgggtttgattggcctgattgtagtgaaagtgttggctcctggcttttattcccgccaggacattaaaacgccagtgaaaattgccatcgttacgctgattttaacgcaattgatgaacctggcgtttattggtccgttgaaacatgccgggctgtcactttctattggtctggcggcgtgtctgaatgcttcgctgctttactggcagttgcgtaagcagaaaatctttactccgcaacccggctggatggcgtttctgttgcgtctggtggtggcggtactggtgatgtctggcgtgcttttaggtatgttacatatcatgccggagtggtcattgggtaccatgccctggcgcttactgcgtttaatggcggtcgtgctggcggggattgccgcgtacttcgctgcactggcggtactgggcttcaaagttaaagaatttgcccgccggacggtgtaa

SEQ ID NO: 470255 - DNA, 867 bp, Shigella flexneri
gtgaaaaaattacgtatcggcgtagtgggattaggcggcattgcgcaaaaagcgtggttaccggtgctggcggcagcgtctgactggacgttacaaggagcctggtcgcctacgcgcgccaaagccctgccaatttgtgacagctggcgcattccttatgccgattcgttatccagccttgccgccagttgtgatgcggtttttgtgcactccagcaccgccagccactttgacgtggtcagtacgttactcaatgcgggggtacatgtctgtgtcgataaaccgctggcagaaaatctgcgcgatgctgaaaggctggtggaactggcggcgcggaaaaaactgacgttgatggtcggttttaaccgtcgtttcgcaccactctacggtgagttaaaaacgcaactcgccaccgcagcctcgctaagaatggataaacatcgtagcaatagcgtcgggccacacgatctttatttcacgttgctggatgattatctgcatgtggtggataccgcgctgtggttgtcgggcggcaaagcctctctggatggcggtacgctactgactaacgacgctggcgaaatgctgtttgccgagcaccatttttcggccggtcctttgcagatcaccacttgtatgcatcgccgtgccggaagtcagcgtgaaaccgtgcaggccgtgactgacggtgcgctcatcgacattacggatatgcgcgaatggcgtgaggagcgcgggcagggtgtagtgaataaaccgattcctggttggcagagcactcttgagcaacgtggatttgtcggctgtgcgcggcacttcattgaatgcgtgcaaaatcagacagttccgcaaaccgccggcgaatag

SEQ ID NO: 470256 - DNA, 648 bp, Shigella flexneri
atgaaatatcaacttactgccctggaagctcgcgtaattggttgcttgctggaaaagcaggtgaccacgccggagcaatacccgctctcagtcaatggtgtagtcacggcctgtaatcagaaaacgaaccgtgaaccggtcatgaatctgagtgaatccgaagtgcaggaacagctggataatctggtcaaacgtcattatctacgcacagtgagcggttttggtaatcgggtcaccaaatatgagcaacgtttttgtaattcagaatttggcgatctgaaactgagcgccgcagaagtggcgttaatcaccacgttgttattgcgtggtgcccagacgccgggtgaactgcgcagccgcgccgcgcgaatgtatgaattcagcgatatggcggaagtggagtcgacgctggaacaactggcgaatcgcgaagatggtccttttgtggtgcgtctggcccgcgaaccgggtaaacgcgaaagccgctacatgcatcttttcagtggtgaggttgaagatcagccggcggtaacggctatgtcgaacatggttgacggtgatttacagacccgcgtcgaagccctggaaatcgaagtggcagaactgaaacaacgtctttattcgttgctggcccatctgggagattaa

SEQ ID NO: 470257 - DNA, 585 bp, Shigella flexneri
atgtttggctatcgcagtaacgtgccaaaagtgcgcttaaccacagaccgactggtcgtgcgtctggtgcatgatcgtgatgcctggcgtctggcggattattacgcagagaatcgccatttcctcaagccctgggagccagtgcgcgacgaaagccactgttatccatcaggctggcaggccaggctagggatgattaacgaatttcataaacaaggttcagctttctactttggcttattcgacccggacgaaaaagagattattggcgttgccaatttttccaatgttgttcgcggctcttttcatgcctgctatctcggttattcgattgggcaaaaatggcagggcaaaggactcatgtttgaagccctgaccgcagccattcgttatatgcagcgcacccaacatattcatcgcattatggctaattatatgccgcacaataaacgcagcggtgatttactggcgcgactgggttttgaaaaagaaggctatgcgaaagactatctgttgattgatggacaatggcgcgatcacgtactgacggcattaactaccccagactggacgcccggccgctaa

SEQ ID NO: 470258 - DNA, 1209 bp, Shigella flexneri
atgtcccgcgtatcgcaggcgaggaacctgggtaaatatttcctgctcatcgataatatgctggtcgtgctggggttctttgttgtcttcccgctgatctctatccgcttcgttgatcaaatgggctgggccgccgtcatggtcggtattgctctcggtctacgccagtttattcagcaaggtctgggtattttcggcggcgcaattgccgaccgctttggtgccaaaccgatgattgttaccggtatgctgatgcgcgccgccggattcgccacaatgggtatcgcccacgaaccgtggctattgtggttttcatgcctgctctcgggactcggcggcacgttgtttgatccgccgcgttcggcgctggtggtgaaactaatccgtccacaacaacgtggtcgttttttctcgctgttgatgatgcaggacagtgccagtgcggtcattggcgcattgttggggagctggctgttgcaatacgactttcgcctggtctgcgccacaggggccgttttgtttgtgctatgtgcggcgttcaatgcgtggttgttaccggcatggaaactctccaccgtacgcacgcccgttcgcgaaggcatgacccgcgtgatgcgtgacaagcgttttgtcacctatgtcctgacgctggcgggttactacatgctggctgtacaagtgatgctgatgctgccaattatggtcaacgacgtggctggcgcgccctctgccgttaaatggatgtatgccattgaagcgtgtctgtcgttaacgttgctctaccctatcgcccgctggagtgaaaagcattttcgtctggaacaccggttgatggctgggctgttgataatgtcattaagcatgatgccggtgggcatggtcagcggcctacaacaacttttcaccctgatttgtctgttttatatcgggtcgatcattgccgagcctgcgcgtgaaaccttaagtgcttcgctggcggacgcaagagctcgcggcagctatatggggtttagccgtctgggtctggcgattggcggcgctattggttatatcggtggtggctggctgtttgacctgggcaaatcggcgcaccagccagagcttccgtggatgatgctgggaattattggcatcttcactttccttgcgctgggttggcagtttagtcagaaacgcgccgcgcgtcgtttgctggaacgcgacgcctga

SEQ ID NO: 470259 - DNA, 648 bp, Shigella flexneri
gtgaagctatacatttacgatcactgcccttactgcctcaaagcccgcatgattttcggcctgaaaaatatccccgtcgaattacatgttctgctcaacgacgacgcagaaacacccacccggatggtcggtcaaaaacaggttcccattctgcaaaaagatgacagccgctatatgccagaaagcatggatatcgttcactatgtcgataaactcgacggcaaaccgttactgaccggcaaacgttcccctgccattgaagagtggctgcgcaaggtcaatggctacgccaacaaactgctgttgccgcgttttgccaaatcggcatttgatgagttttctactcccgccgcgcgcaaatatttcgtcgacaagaaagaggccagcgcgggtaattttgccgacctgctggcccactctgacggtctgattaagaatatcagcgatgatttgcgtgcgctggacaaactgatcgtcaaaccgaacgccgtgaatggcgaactttcggaagatgatattcagctatttccgctactgcgtaatctgacgctggtagccggaatcaactggccaagccgcgttgctaattaccgcgataatatggcgaaacagacacaaatcaatttgttatcatcaatggcgatttaa

SEQ ID NO: 470260 - DNA, 561 bp, Shigella flexneri; identical to SEQ ID NO: 458738

SEQ ID NO: 470261 - DNA, 1047 bp, Shigella flexneri
atgactgcaccatcccaggtattaaagatccgccgcccagacgactggcaccttcacctccgcgatggcgacatgttaaaaactgtcgtgccgtataccagcgaaatttatggacgggctatcgtaatgcccaatctggctccgcccgtgaccacagttgaggctgccgtggcgtatcgccaacgtattcttgacgccgtacctgccgggcacgatttcaccccattgatgacctgttatttaacagattcgctggatcctaatgagctggagcgcggatttaatgaagccgtgttcaccgctgcaaaactttacccggcaaacgcaaccactaactccagccacggcgtgacgtcaattgacgcaatcatgccggtacttgagcgcatggaaaaaatcggtatgccgctactggtgcatggtgaagtgacacatgcagatatcgacatttttgatcgtgaagcgcgctttatagaaagcgtgatggaacctctgcgccagcgcctgactgcgctgaaagtcgtttttgagcacatcaccaccaaagatgctgccgactatgtccgtgacggaaatgaacggctggctgccaccatcactccgcagcatctgatgtttaaccgcaaccatatgctggttggtggcgtgcgtccgcacctgtattgtttacccatcctcaaacgcaatattcaccaacaggcattgcgtgaactggtcgccagcggttttaatcgagtattcctcggtacggattctgcgccacatgcacgtcatcgcaaagagagcagttgcggctgcgcgggctgcttcaacgccccaaccgcgctgggcagttacgctaccgtctttgaagagatgaatgctctgcagcactttgaagcattctgttctgtaaacggcccgcagttctatggcttgccggtcaacgacacattcatcgaactggtacgtgaagagcaacaggttgctgaaagcatcgcactgactgatgacaccctggtgccattcctcgccggggaaacggtacgctggtccgttaaacaataa

SEQ ID NO: 470262 - DNA, 246 bp, Shigella flexneri; identical to SEQ ID NO: 261771

SEQ ID NO: 470263 - DNA, 255 bp, Shigella flexneri; identical to SEQ ID NO: 263920

SEQ ID NO: 470264 - DNA, 1119 bp, Shigella flexneri
atgaaatacgatctcatcattattggcagcggttccgtaggcgctgccgccgggtattatgcaacccgcgccggtttaaacgtgctaatgaccgacgcccatatgccaccgcatcaacacggcagccaccacggcgatacgcgattaattcgccatgcttatggtgaaggcgaaaagtatgtcccgttggtcctccgcgcgcaaacgctgtgggatgaactttcccgccacaacgaagatgatcccatttttgtacgctctggtgtcattaacctcggcccggctgactccgcatttctcgccaacgtcgcccacagcgccgaacagtggcaactcaacgttgaaaagctcgatgcgcaagggattatggcccgctggccagaaatacgcgtcccggacaactacatcggcttatttgagactgattccggttttttgcgcagcgaactggcgattaaaacctggatccaactggcgaaggaagcgggctgtgcgcaactgttcaactgcccggtcaccgcaattcgtcatgacgatgatggcgtaactattgaaacggttgacggtgagtatcaggcgaaaaaagcgattgtctgcgcgggaacatgggtaaaagacctgctcccggagctgcctgtccagcccgtacgtaaagtatttgcctggtatcaggccgatggccgctatagcgtgaagaataaattcccggcgtttaccggtgaactgcccaatggcgatcaatattatggttttccggcagaaaacgacgcgttgaagattggcaaacataacggaggccaggttatccattcagcggatgaacgtgttccgtttgcggaagtggccagtgatgggtcagaagccttcccgttcttgcgcaatgtattgccgggtatcggttgctgcctgtacggcgctgcctgcacctatgataattcgcctgacgaagattttattatcgataccctacccggccacgataatacactgctcattaccggcctgagtgggcacggttttaaatttgcgtcagttttaggggaaatagctgccgattttgcgcaagaccaaaaaagcgattttgatttgacgccattcaggctttcccgcttccaataa

SEQ ID NO: 470265 - DNA, 567 bp, Shigella flexneri
atgtcattcacaaatacccctgaacgctatggtgttatatctgcggccttccattggctaagcgcaattattgtctacggcatgtttgctttaggtctgtggatggtcacgctcagttattacgatggctggtatcacaaagcacccgaactgcataaaagcatcggtattttgttaatgatggggctggttattcgcgttctgtggcgtgtcatatctccaccgccgggtccgctgccgagttattcgcccatgactcgtcttgccgcaaaagctggacatctcgcattgtacctattgctgttcgccatcggcatcagcggctatctgatctcaactgccgatggtaaaccgatcagcgtttttggctggtttgacgtccccgcgacccttgccgacgctggcgcacaggcagactttgccggtgccctgcatttttggctcgcgtggagcgtcgtagtactgtctgttatgcacggatttatggccctgaagcatcatttcatcgataaagacgacactctgaagcgcatgctgggaaagtcgtcatctgactatggagtataa

SEQ ID NO: 470266 - DNA, 576 bp, Shigella flexneri
atgaaaaaaagcctgcttggtttaaccttcgcgtccctgatgttctctgccggttcagcggttgccgccgattacaaaattgacaaagaaggtcagcacgcctttgttaacttccgcatacagcatcttggctatagctggttatatggcacctttaaagatttcgacggtacttttacctttgatgaaaaaaatccggctgccgataaagtgaatgtgacaattaacaccaccagcgtcgatactaaccacgccgaacgcgataaacatcttcgcagtgcggattttctcaataccacaaaatatccacaggcaacattcacctccaccagcgtgaagaaagacggtgacgaactggatattaccggcgatctgacgctgaatggcgtaaccaaacccgtcacgctggaagcgaaattaattggtcagggcgacgacccatggggcggtaaacgtgcaggctttgaggccgaaggcaaaattaagctcaaagacttcaatatcaagacagatttaggtccagcttctcaggaagtggatctgattatttcagtggaaggcgtacagcagaagtaa

SEQ ID NO: 470267 - DNA, 1053 bp, Shigella flexneri
atgccagtgttacacaaccgcatttccaacgacgcgttaaaagccaaaatgttggctgagagcgaaccgcgaaccaccatttcgttttacaagtatttccacatcgccgatcctaaggcgacccgtgacgctttatatcagctgtttaccgcgctgaatgtttttgggcgagtgtatctggcgcatgagggcattaacgcgcaaatcagcgtacctgcgagcaatgttgaaacatttcgcgcgcagctctatgccttcgacccggctttagagggtttacgcctgaatatcgcgttggatgatgacgggaaatccttctgggtactgcgcatgaaggtacgcgatcgcattgttgccgacggtattgacgatcctcactttgatgccagcaatgttggtgagtatctgcaagcggcggaagtgaacgccatgcttgacgatcccgatgcactatttatcgacatgcgtaaccactatgagtatgaagtggggcactttgaaaacgcgctcgaaattccggcagataccttccgtgagcagctgccaaaagcagtcgagatgatgcaggcacataaagataaaaaaatcgtcatgtactgcaccggcggcattcgttgtgaaaaggccagtgcctggatgaaacataacggattcaacaaagtctggcatatcgagggcggaattattgaatacgcccgtaaggcgcgcgagcagggcttgccggtgcgttttattggcaaaaattttgtttttgacgagcggatgggcgaacgtatatcggatgagattatcgcgcattgccaccagtgcggcgcgccgtgcgacagccataccaactgtaaaaatgatggctgccacctgctgtttattcagtgtccagtatgcgcggaaaaatacaaaggttgttgtagtgagatttgctgcgaagaaagcgcgttaccgccagaagaacagcgacgccgtcgggcaggacgtgaaaatggcaataagatctttaataagtctcgtggacgtctgaatacaacactgggtattcctgatccaacagaataa

SEQ ID NO: 470268 - DNA, 921 bp, Shigella flexneri
atgacgaatctacccaagttctccaccgcactgcttcatccgcgttattggttaacctggttgggtattggcgtactttggttggtcgtgcaattgccctacccgattatctaccgcctcggttgtggattaggaaaactggcgttacgttttatgaaacgacgcgcaaaaattgtgcatcgcaacctggaactgtgcttcccggaaatgagcgaacaagaacgccgtaaaatggtggtgaagaatttcgaatccgttggcatgggcctgatggaaaccggtatggcgtggttctggccggaccgccgaatcgcccgctggacggaagtgatcggcatggaacacattcgtgacgtgcaggcgcaaaaacgcggcatcctgttagttggcatccattttctgacactggagctgggcgcgcggcagtttggtatgcaggaaccggggattggcgtttaccgcccgaacgataatccactgattgactggctacaaacctggggccgtttgcgctcaaataaatcgatgctcgaccgcaaagatttaaaaggcatgattaaagccctgaaaaaaggcgaagtggtctggtacgcaccagatcatgattacggcccgcgctcaagcgttttcgtcccgttatttgccgttgagcaggctgcgaccacgaccggaacctggatgctggcacggatgtccggcgcatgtctggtgcccttcgttccacgccgtaagccagatggcaaagggtatcaattgattatgctgccaccagagtgttctccgccactggatgatgccgaaactaccgccgcgtggatgaacaaagtggtcgaaaaatgcatcatgatggcaccagagcagtatatgtggttacaccgtcgctttaaaacacgcccggaaggcgttccttcacgctattaa

SEQ ID NO: 470269 - DNA, 198 bp, Shigella flexneri
atgtcaccctgtgaaaatgacacccctataaactggaaacgaaacctgatcgtcgcctggctaggctgttttcttaccggggccgccttcagtctggtaatgcccttcttacccctctacgttgagcagcttggtgttaccggccactccgccctgaatatgtggtccggtattgtcttcagtataatgggttcctaa

SEQ ID NO: 470270 - DNA, 933 bp, Shigella flexneri
atgagacgggcaatcagctacatcagattttcaagtgaacgacaactgaaaggggactctgtacgccgacaatctaagctggttactgactggcttgataagaaccctgagttttacttggattcatccttgagctttaaagatttggggaaaagtgcttttagtggtaagcacctgaaaggtggtctaggtgactttttaaccgctatcgagaaagggcttgttaaagctggtgatacgctactaatcgagagtttagaccgtctgtcacgtcaggatattgatattgcttctgagctattacgccgtatcttaagggctggtgtagatgtagtcacactgagcgatggagaacattacacacgagaaagtttaaaagacccgttagccctgattaaaagcattctgataatgcagcgggcgcatgaggaaagtttgagaaagtctgagcgtgtccaagctgcatggaaccgtaaaaaagaactcatctccgaaggtatcaaggtatctaggcgttgtcctgcatggttaaggctgaatgatgaccgtcgaacattcacaatcattcctgataaagtggaagttgttaaacgagcatttgacctgagattacagggtttaagcttttgggctatcaccagaactttaaacgatgaaggtcacttgtcattgaatcaatacacacccaaacaaaaggggtggtctgatactgctgtaaagaaactgctcagaaatcgtgctgtgattggatgtttcacacctgctggacgtgaagaagttcagggttactaccccgcaataatcagtgagtcactattctatcgagtacagcaactgaacacagggcaatatggtagggcttctgtatcaagtaatccgctatcagtcaacttgttcaggggtatcatcaaatgtgaggtgtactggcaatag

SEQ ID NO: 470271 - DNA, 225 bp, Shigella flexneri; identical to SEQ ID NO: 133446

SEQ ID NO: 470272 - DNA, 207 bp, Shigella flexneri
atggaactctacagagaatatcctgcatggcttatctttttacgccgtacatatgcggttgcagcgggcgttctggcgctgcctttcatgcttttctggaaagaccgcgcccgcttttacagctacctgcaccgcgtctggtcgaaaaccagcgataaaccggtgtggatggatcaggccgaaaaggcaaccggtgatttttactga

SEQ ID NO: 470273 - DNA, 1674 bp, Shigella flexneri
atggctgcgcaagggttcttactgattgccacgtttttactggtattaatggtgctggcgcgtcctttaggcagcgggctggcgcggctgattaatgacattcctcttccaggtacagcgggcgttgaacgtatactctttcgtttacctggcgtctctgaccatgagatgaactggaagcaatatctttgtgccattctcggcctgaacatgctggggctggcggtgctgttttttatgttgctcggtcagcactatctgccgcttaatccacagcagttgccggggctgtcgtgggatctggcgctgaataccgccgtcagctttgtcacgaataccaactggcaatcttatagcggtgaaaccacgttgagctatttcagccagatggcaggcttaacggtacaaaactttctttctgccgccagcgggattgcggtgatttttgccttcatccgtgcgtttactcgccagagcatgagcacactcgggaatgcctgggtcgatctgctacgcatcacgttatgggtgctagtccctgtggcgttgttgatcgcactgttttttattcaacaaggtgcgcagcaaaactttctgccctatcaggcagtgaataccgttgaaggagcgcaacagctgttacccatgggaccagtagcttctcaggaagcgatcaagatgctcggtactaacggcggtggcttctttaatgccaactcgtcgcatccgtttgaaaacccaaccgcactgaccaacttcgtgcagatgctggcgatcttcttgatcccaacagcgctgtgctttgcctttggtgaagtgacgggcgatcgccgccaggggcgcatgttgctgtgggcgatgtcagtgatttttgtcatctgcgtaggcgtggttatgtgggcagaagttcagggtaatcctcatctgctggcgctcggcgcagacagcagcatcaatatggaaggtaaagagagccgtttcggcgtgctggtcagtagcctgtttgcggtcgtgactacggcggcgtcctgtggcgcggtgattgcgatgcatgattcgtttaccgctctcggcggcatggtgccgatgtggctaatgcaaattggtgaagtggtgttcggcggtgtcggttctggtctttacggcatgatgctgtttgtcctgctggcggtgtttattgccgggctgatgattggtcgtacaccggaatatctgggtaaaaaaatagacgtacgcgagatgaaactgactgcactggcgattctggttactccaacactggtactgatgggcgcggcgttggcgatgatgaccgacgccggacgtagcgccatgcttaaccctagcccgcatggttttagcgaagtgctgtacgccgtgtcgtccgccgctaacaacaacggcagcgcctttgccggattaagcgccaactctccgttctggaactgtttactggcgttctgcatgtttgtcggtcgcttcggggtgattatcccggtgatggcaattgccggttcgctggtgagtaaaaagagccaacccgccagctccggcacgctgccaacgcacggcccgctgtttgttggcctgttaatcggcaccgtgttgctggttggcgcactgacctttatccctgccctggcgcttggtccggtggcggaatatctctcctga

SEQ ID NO: 470274 - DNA, 1404 bp, Shigella flexneri
atgagtcgtaaacaactggcgctattcgaaccaacacttgtcgttcaggcgctgaaagaagcggtgaaaaaattaaacctgcaggcgcaatggcgcaatccggtgatgtttatcgtctggatcggcagtctgctgaccacctgtattagcatcgcgatggcaagcggtgcgatgcctggcaatgcgctgtttagcgcggcaattagcggctggctgtgggtcaccgtactgttcgctaatttcgccgaggcgctggcagaaggccgcagtaaagcgcaggccaacagtcttaaaggggtgaaaaaaactgcctttgcccgcaagctgcgtgagccgaaatatggcgctgcggcggacaaagttcctgccgatcaactgcgtaaaggtgacatcgtgctggtagaagctggcgatattatcccctgcgatggtgaagtcattgaaggcggcgcatcggtcgatgaaagcgccatcaccggggaatcggcaccggtgatccgtgaatccggcggcgattttgcctccgtcaccggcggcacgcgtattctttctgactggctggtgattgagtgtagcgttaaccccggtgagacatttctggatcggatgatcgcgatggtggaaggcgcacagcgacgcaaaacaccgaacgagattgccctgactatcctgctgattgctctgaccatcgtctttttactggcaaccgccacgctgtggccgttttccgcgtggggcggtaatgccgtgagtgtaacggtactggtggcgctgctggtctgtctgatcccaaccactattggtggcctgttgtcagcgatcggcgtcgccgggatgagtcggatgctgggcgcgaatgtgattgccaccagcggacgtgcagttgaagcggcaggtgacgttgacgttctgctactggataaaaccggcaccatcacactcggtaaccgtcaggcgtcggagtttatccccgcgcagggcgtggatgaaaaaacgctggctgacgccgcacaactggcttcgctggctgatgaaacgccggaaggtcgcagtattgtgatcctcgccaagcaacgttttaacctgcgcgagcgcgatgtgcagtcgctccatgccacctttgtaccgtttactgcgcaaagccggatgagcgggatcaacatcgacaaccgcatgatccgtaaaggttctgtcgatgccattcgccgccatattgaggctaacggcggtcacttccctgccgatgttgatcaaaaagtcgatcaggttgcgcgtcaaggagccacgctgctggtggtggtggaaggttctcgtgtgctgggcgttattgcgctgaaagatatcgtcaaaggcggtattaaagagcgcttcgcccagctgcgcaaatgggcattaaaacggtga

SEQ ID NO: 470275 - DNA, 645 bp, Shigella flexneri
atgattaccggcgataaccgtctgactgccgccgcgatagctgcggaagcgggtgtcgatgattttctcgccgaagcgacaccggaggccaagctggcattgatccgtcagtatcaggcggaaggtcgtttggtagcgatgaccggtgacagcaccaacgatgctacggcgctggcgcaggcagatgtcgcggtggcgatgaactccggcacccaggcggctaaagaggcgggcaatatggtggatctcgactctaacccgaccaagttgatcgaggtggtgcacattggcaaacagatgctgatgacccgtggctcgctgaccaccttcagcattgccaacgatgtggcgaaatacttcgccattattccggcggcgttcgcggcaacatatccgcagttaaatgcgctgaacatcatgcgcctgcattcgcccgactccgccattctcagtgcggtcattttcaacgccttgattatcgtctttttgattcctctggcgttaaaaggcgtgagttataaaccgcttaccgcttctgccatgttgcgccgtaacttatggatttacggtctgggtgggctgctggtgccgtttattggtatcaaagtcattgatttactgctaaccgtttgtagtctggtgtga

SEQ ID NO: 470276 - DNA, 573 bp, Shigella flexneri
atgagtggattacgtccggtattatcgacatttctctttctgttattgattactggcggcgtttacccgctgctgaccaccgcactggggcaatggtggtatccctggcaggccaacggttcgttgattcgtgaaggtgatacggtgcgcggttcggcattaatcgggcaaaattttaccggcaacggctattttcatggtcgcccgtcggcaacagcagaaatgccctataatccacaggcttctggcgggagcaatctggcagtcagtaacccggagctggataaacagatagccgcacgcgttgccgcattacgggccgctaacccggacgccagcacgaacgttccggttgaactggtgacggcgtcggcaagcggactggacaataacatcaccccgcaagcggcggcctggcagatcccacgcatcgcaaaagcgcgtaatctcagcgttgaacagctcacgcagctgatcgcaaaatacagccaacaaccgctggtgaaatatatcggccagccggtcgtcaacattgtcgaactcaatctggcactggataagcttgatgaataa

SEQ ID NO: 470277 - DNA, 819 bp, Shigella flexneri
atgaataacgaacccttacgtcccgaccccgaccgtctgctggaacaaactgccgcgccgcatcgggggaagctgaaagttttcttcagtgcctgtgcaggcgtcgggaagacctgggcgatgctggcagaagcccagcgactgcgggcgcaagggctggatattgtggttggtgtggtagaaacccatgggcggaaagataccgccgccatgcttgaagggctggctgttctgcctctgaaacgccaggcgtaccgtgggcggcatatcagcgagtttgatctcgatgccgccctcgcccgccgtccggcgctgatcttaatggacgaactggcgcacagtaatgcgccaggttctcgtcatcctaaacgctggcaggatatcgaagaactgctggaagctggcattgatgttttcacaaccgtcaacgttcagcatctggaaagtctgaatgatgtggtcagcggcgtcaccggaattcaggtacgggaaaccgtgcccgatccttttttcgatgccgccgacgacgtggtgctggtggacttgcccccggacgatctgcgccagcggctgaaagaaggcaaagtctatattgccgggcaggcggagcgcgccattgaacattttttccgcaaaggcaatctgatcgccctgcgcgaactggcactgcgccgtactgccgatcgcgttgatgagcaaatgcgcgcctggcgggggcatcctggcgaagagaaagtctggcacacgcgcgacgcgatccttttatgcatcggccataacaccggcagcgaaaactggtccgcgcggcggcgcggctga

SEQ ID NO: 470278 - DNA, 1833 bp, Shigella flexneri
gtgtatgttgaaacccctgccctgcatcgcttaccggagaaaaaacgtcgggcaattctcagcgccttacgtctggcgcaggagctgggcgcggagacggcaacactttctgatccagcggaagagaaagcggtagtgcgttatgcccgtgaacataatctcggcaagattattctcggtcgcccagcctcgcgccgctggtggcgtcgggaaacatttgctgaccgactggcgcgcatcgcccccgatctcgatcaggtgctggtcgcgcttgatgaaccacccgcccgcacgattaacaacgcgccggatagccgctcatttaaagacaagtggcgggtacagattcagggatgcgtggttgccgccgcgttatgcgccgttatcaccttaattgccatgcagtggctgatggcgtttgatgccgccaacctggtgatgctgtatctgcttggcgtggtggtggcgctattttatggacgctggccttcggtggttgccaccgtcattaatgtggtgagtttcgatctcttttttatcgccccacgcggcacgctcgccgtctctgatgtgcaatatctgctgaccttcgcggtgatgttaaccgtcgggctggtgatcgggaaccttactgctggcgtgcgttatcaggcgcgggtagcccgttaccgcgagcaacgcacacggcacttatatgaaatgtcgaaagctctggcggtgggccgcagtccgcaggacatcgccgccaccagcgaacaatttattgcctccacgtttcatgcccgcagtcaggtgttgttgcccgatgacaacggtaaattgcagccgttaacacatccgcaaggagttacgccatgggacgatgccatcgcgcagtggagttttgataaaggcctgcctgcgggcgcgggcaccgacacgttacccggtgtaccgtaccagattttgccgctaaaaagcggcgagaaaacctacgggctggtggtggtggagccggggaatctgcgccagttgatgatcccggaacagcagcgcctgctggagacttttacgctgttagtcgccaatgcccttgagcggctgacgctaaccgccagcgaagaacaggcgcggatggcaagcgaacgtgaacagatccgcaacgccctgctggcagcgctttcgcatgatttacgcacgccgcttacggtgctgtttggtcaggcagaaatcttaacgctcgatctggcaagcgaaggatcaccccacgcccgccaggccagcgagattcgtcagcatgtgctgaacactacccgactggtgaataatctactggatatggcgcgaattcagtccggcggctttaatttgaagaaagagtggttaacgctggaagaagtagtcggcagcgcgctgcaaatgccggaaccgggtttatcgtcgcccatcaatctttctctgccagaaccgctgaccttaatccacgttgacgggctactctttgaacgggtgctgattaatctgctggagaacgcggtgaaatatgcgggtgcgcaggccgaaattggtatcgatgcccacgttgagggcgaaaatctacaactggatgtctgggataacggccccggtcttccgccaggccaggagcagacgatatttgataagtttactcgcgggaataaagagtcggcggtgccgggtgtcgggcttgggttggcaatttgtcgggcgattgtggatgtacacggcggcaccattaccgcgttcaaccgaccggaaggtggtgcctgttttcgtgttacacttccccagcaaaccgctcctgaacttgaagactttcatgaggatatgtga

SEQ ID NO: 470279 - DNA, 678 bp, Shigella flexneri
gtgacaaacgttctgattgttgaagatgaacaggctattcgtcgctttctgcgcacggcgctggagggcgacgggatgcgcgtctttgaggccgaaactctgcaacgcggcttgctggaagcggcaacccgtaagccagatttgattattctcgatctcggcctgcccgatggtgatgggattgagtttatccgcgacctgcgccagtggagcccggtgccggtgattgtgctttccgcacgcagcgaagagagcgacaagatcgccgcgctggatgccggagcggatgattatctgagtaagccgtttggtattggcgaattgcaggcccgtctgcgcgtcgctttacgccgccactccgccaccgccgcgcccgatccgctggtgaaattttccggtgttaccgtcgatttagccgcccgcgtgattcaccggggtgaggaagaggtgcatctcacaccaattgagttccgcctgctggcggtgctgctcaacaatgccggaaaagtactcacccagcgccagctccttaaccaggtgtgggggccaaacgcggtcgaacacagtcactatttgcgtatttatatgggacatctgcgacaaaaactggaacaggatccggcccggcctcgccacttcattactgaaaccggtattgggtatcggtttatgctttga

SEQ ID NO: 470280 - DNA, 1716 bp, Shigella flexneri
atgtcagaattaaaaattgccgttagccgttcttgcccggattgtttttccactcatcgtgcatgcgtgaatattgacgaaagtaattatattgacgttgccgccattattttatcagtcaatgatgttgaacgtggaaaactcgataaaatagacgctactggctatggcattcctgtttttattgcaacggaaaatgaagaacgtgtaccagcagaatatctgccacgtatttctggtgtcttcgagcattgcgaatcacggaaagagttttatggacgtcagttagaaaccgctgctagccattatgaaacgcaactgcgcccgcccttcttccgcgcactggtcgattatgtcaatcagggcaatagcgcttttgactgcccgggtcatcagggaggtgagtttttccgtcgtcatccggcagggaatcagttcgtggagtacttcggagaaacgctgttccgttccgacttatgcaacgcagacgtagcaatgggcgatctgctgattcacgaaggcgcgccatgcattgcacagcaacatgcggcaaaagtgtttaatgccgataaaacatacttcgttctaaatggcacttcatcttctaacaaagtggttttaaacgccctgctaacaccgggtgatctggtgctgtttgatcgcaataaccacaaatctaaccaccacggagcgttgctacaggctggtgcaacaccggtttatctggaaacggcacgtaacccgtatggctttatcggtggcattgatgcgcactgttttgaagaaagttacctgcgtgagctgatcgcggaagtcgcaccgcagcgggcaaaagaggctcgtcctttccgcctcgctgtgattcagttaggcacctacgacgatacgatttataacgcccgccaggtggtggataaaattggtcatctgtgtgactacattctgtttgactccgcatgggttggctatgagcaatttatcccgatgatggctgactgttcgccgctgttgctggatcttaatgagaacgatccgggtattctagttacgcaatccgtacataaacagcaggctggtttttctcaaacttcacaaatccataaaaaagacagccacatcaaagggcaacagcgttatgtaccgcacaaacgcatgaacaacgcctttatgatgcacgcctccaccagcccgttctatccgctgtttgccgcactggatatcaacgccaaaatgcatgaaggtgtcagcggtcgtaatatgtggatggattgtgtggtaaatggcattaatgcccgcaaactgatcctcgataactgtcagcatattcgtccgttcgtacctgaactggtggatggtaaaccctggcagtcgtatgaaacagcgcaaattgcggttgatctgcgcttcttccagtttgtaccaggggaacactggcattcttttgaaggctatgcagagaatcaatactttgtcgatccttgcaaactgttgctgacaaccccaggtattgatgcacgtaacggcgaatatgaagcgttcggtgtacccgcgacgattcttgctaacttcctgcgcgaaaatggcgtagtgccggaaaaatgcgatcttaactccatcctcttcctgctgactccggcagaagatatggccaaacttcagcaacttgtgccctgctggtacgcttcgaaaaactgcttgagtccgacgcgccattag

SEQ ID NO: 470281 - DNA, 477 bp, Shigella flexneri
gtgctgccttccatctacaaacagcatgaagagcgctacgccggttataccctgcgtcagttgtgccaggaaatgcatgatttgtatgcccgccacaacgtgaaacaactgcaaaaagagatgttccacaaagcgcacttcccacacgtcagcatgaatccgcaagaagccaactacgcctatttacgcggtgaagtggagctggttcgtctgccggatgccgaaggtcgtatcgctgccgaaggggcgcttccttatcctccgggtgtgctgtgtgttgttccgggtgaaatctggggtggtgctgttttgcgttacttcagcgctctggaagaagggatcaacctgctgccaggttttgcaccggagctgcagggtgtctatatcgaagaacatgatggtcgtaagcaagtttggtgctatgtcatcaagcctcgtgatgcgcaaagcaccctgttgaaaggggaaaaattatga

SEQ ID NO: 470282 - DNA, 1320 bp, Shigella flexneri
atgagtcaggctaaatcgaacaaaatgggcgtcgttcagttaaccatactgacgatggtcaacatgatgggctccggtatcatcatgctgccgacaaagcttgccgaagttgggacaatttcaattatctcctggctggtgacagccgtaggctcaatggcactggcatgggcattcgcaaaatgcggtatgttcagccgtaaatcaggtggtatgggcggttatgccgagtatgctttcggtaaatccggtaactttattgcgaactatacctacggcgtctcactgctgattgctaacgtcgcgattgctatttcggcggttggttacggcaccgaactgctcggcgcgagtttgtcgccagtgcagattggtcttgcgaccatcggggtgctgtggatttgtaccgtggctaactttggtggtgcgcgcattaccgggcaaatcagtagcattaccgtgtggggggtcattattccggtggtaggcctgtgcattatcggctggttctggtttagcccgacgctttacgttgattcctggaatccgcatcatgcaccgttcttcagtgcagtaggttcttccatcgctatgacgctgtgggcttttcttggtctggagtctgcgtgtgcgaatactgatgtagtggaaaacccggaacgtaatgtgccaatcgcggtactcggcggtacgttaggtgcggcggtgatttatatcgtctccaccaacgtgattgcagggattgtgcctaatatggagctggcaaattcaacggcaccatttggcctggccttcgcacagatgtttacaccagaagtgggtaaagtcattatggcgctgatggtgatgtcctgctgcggttcgctgcttggctggcagttcaccattgcccaggtgtttaaatcttcatctgatgaaggctacttccctaaaattttctcccgtgtaaccaaagtggatgcaccggtgcagggaatgttgaccattgtgattatccagagcgggttggcgctgatgacgattagcccgtcgctaaacagtcagttcaacgtgctggttaacctggccgtggtgaccaatatcattccgtatattctgtcaatggcggcattagtcattattcagaaggtcgctaatgtgcccccctcaaaagcgaaagttgcaaactttgttgcttttgttggcgcgatgtatagcttttatgcgctgtactcatccggggaagaagccatgctgtacggttccatcgtgaccttccttggttggacactgtatggtctggtatcaccacgctttgaactgaaaaataaacacggttaa

SEQ ID NO: 470283 - DNA, 1641 bp, Shigella flexneri
atggcaatccacaatcgtgcaggccaacctgcacaacagagtgatttgattaacgtcgcccaactgacggcgcaatattatgtactgaaaccagaagcagggaatgcggagcacgcggtgaaattcggtacttccggtcaccgtggcagtgcagcgcgccacagctttaacgagccgcacattctggcgatcgctcaggcaattgctgaagaacgtgcgaaaaacggcatcactggcccttgctatgtgggtaaagatactcacgccctgtccgagcctgcgttcatttccgtactggaagtgctggcagcgaacggcgttgatgtcattgtgcaggaaaacaatggcttcactccgacgcctgccgtttccaatgccatcctggttcacaataaaaaaggtggcccgctggcagacggtatcgtgattacaccgtcccataacccgccggaagatggtggtatcaagtacaatccgccaaatggtggcccggctgatactaacgtcaccaaagtggtggaagacagggccaacgcactgatggccgatggcctgaaaggcgtgaagcgtatctccctcgacgaagcgatggcatccggctatgtgaaagagcaggatctggtgcagccgttcgtggaagggctggccgatatcgttgatatggcggcgattcagaaagcgggcctgacgctgggcgttgatccgttgggcggttccggtatcgaatactggaagcgcattggcgagtattacaacctcaacctgaccatcgttaacgatcaggtcgatcaaaccttccgctttatgcacctcgataaagacggtgcgatccgtatggactgctcctccgagtgtgcgatggcgggtctgctggcactgcgtgataagttcgatctggcgtttgctaacgacccggattatgaccgtcacggtatcgtcactccggcaggtttgatgaatccgaaccactacctggcggtggcgatcaactacctgttccagcatcgtccgcagtggggcaaagatgttgctgtcggtaaaacgctggtttcttctgcgatgatcgaccgtgtggtcaatgacttgggccgtaagctggtagaagtaccggtaggtttcaaatggtttgttgatggtctgttcgacggcagcttcggctttggcggcgaagagagcgcaggggcttccttcctgcgtttcgacggcacgccgtggtccaccgacaaagacggcatcattatgtgtctgctggcggcggaaatcaccgctgtcaccggtaagaacccgcaggaacactacaacgaactggcaaaacgctttggtgcgccgagctacaaccgtttgcaggcagctgcgacttccgcacaaaaagcggcgctgtctaagctgtctccggaaatggtgagcgccagcaccctggcaggtgacccgatcaccgcgcgcctgactgctgctccgggcaacggtgcttctattggcggtctgaaagtgatgactgacaacggctggttcgccgcgcgtccgtcaggcacggaagacgcatataagatctactgcgaaagcttcctcggtgaagaacatcgcaagcagattgagaaagaagcggttgagattgttagcgaagttctgaaaaacgcgtaa

SEQ ID NO: 470284 - DNA, 546 bp, Shigella flexneri
atgaaaacgattgaagttgatgatgaactctacagctatattgccagccacactaagcatatcggcgagagcgcatccgacattttacggcgtatgttgaaattttccgccgcatcacagcctgctgctccggtgacgaaagaggttcgcgttgcgtcacctgctatcgtcgaagcgaagccggtcaaaacgattaaagacaaggttcgcgcaatgcgtgaacttctgctttcggacgaatacgcagagcaaaagcgagcggtcaatcgctttatgctgctgttgtctacactatattctcttgacgcccaggcgtttgccgaagcaacggaatcgttgcacggtcgtacacgcgtgtactttgcggcagatgaacaaacgctgctgaaaaatggtaatcagaccaagccgaaacatgtgccaggcacgccgtattgggtgatcaccaacaccaacaccggccgtaaatgcagcatgatcgaacacatcatgcagtcgatgcaattcccggcggaattgattgagaaggtttgcggaactatctaa

SEQ ID NO: 470285 - DNA, 765 bp, Shigella flexneri
atgaaattaaatatccgcgcgcaaactgcacaaaaccagcacaataattctcccatcgttcttgtccatggtctgtttggtagcctcgacaaccttggcgtactggctcgcgatctggtaaacgatcacaatatcatccaggttgatatgcgtaaccacggtctttcaccgagagagccggtaatgaattacccggcgatggcgcaggatcttgttgataccctggatgcactgcagatcgacaaagcaacatttatcggtcactccatgggcggtaaagcggtaatggcacttactgcactggcccccgatcgcatcgataaactggtggcgatcgatatcgcaccggtcgactatcacgtacgccgtcatgatgagattttcgcagctatcaacgcggtcagtgaatcggacgcacaaactcgccagcaagcagcagcaataatgcgccagcatcttaatgaagaaggggtgattcagtttctgttgaaatcttttgttgacggggagtggcgctttaacgtgccggtattgtgggatcagtatccgcatattgtgggttgggagaaaatcccggcatgggatcaccctgccctgtttatccctggcggcaattctccgtatgttagcgagcagtaccgtgatgatttactggcacaatttccacaggcacgggcgcatgtgattgcaggcgcgggtcactgggtccatgctgaaaaaccggatgcggtattacgcgctatccgtcgctatctcaatgattaa

SEQ ID NO: 470286 - DNA, 363 bp, Shigella flexneri
atgtattatggcgcgctatccatccgggcagaggcctggctgattgtttcccccgaagtcaccaagatcatggccaaagaacaaacggaccgtacgacattagatctgttcgcgcacgagcgtcgaccgggacgaccgaaaactaatccgctttcgcgcgatgaacagctgcgtattaataaacgcaaccagctaaaacgcgacaaagtacgtggccttaagcgtgtcgaactgaagctgaacgcggaagctgtcgaggcgctgaacgagctggcggaatcgcgtaatatgagccgtagcgaactgatcgaagagatgttaatgcagcaactggcggcgctgcgtagtcagggcatcgtttaa

SEQ ID NO: 470287 - DNA, 531 bp, Shigella flexneri
atggctatcactggcatctttttcggcagcgacaccggtaataccgaaaatatcgcaaaaatgattcaaaaacagcttggtaaagacgttgccgatgtccatgacattgcaaaaagcagcaaagaagatctggaagcttacgacattctgctgctgggcatcccaacctggtattacggcgaagcgcagtgtgactgggatgacttcttcccgactctcgaagagattgatttcaatggtaaactggttgcgctgtttggttgtggtgaccaggaagattacgccgaatatttctgcgacgcattgggcaccatccgcgacatcattgaaccgcgcggtgcaaccatcgttggtcactggccaactgcgggctatcatttcgaagcatcaaaaggtctggcagatgacgaccactttgtcggtctggctatcgacgaagaccgtcagccggaactgaccgctgaacgtgtagaaaaatgggttaaacagatttctgaagagttgcatctcgacgaaattcttaatgcctga

SEQ ID NO: 470288 - DNA, 447 bp, Shigella flexneri
atgactgataacaataccgccctaaagaaagctggcctgaaagtaacgcttcctcgtttaaaaatcctggaagttcttcaggagccggacaaccatcacgtcagtgcggaagatttatacaaacgtctgatcgatatgggtgaagaaattggtctggctacggtatatcgcgtactgaaccagtttgacgacgctggtatcgtcacccgccacaattttgaaggcggtaaatccgtatttgaactgacacagcaacatcaccacgatcacctgatttgcctcgactgcggcaaggttatcgaatttagtgatgattccatcgaagcgcgtcagcgtgaaattgccgcaaaacatggcattcgcctgactaaccacagtctctatctttacggtcactgtgccgaaggcgattgccgcgaagatgagcacgcgcacgaaggcaaataa

SEQ ID NO: 470289 - DNA, 327 bp, Shigella flexneri
atgaaaaaactgattctcatcgccatgatggcatcggggctggtagcttgtgcgcaatcaaccgcaccacaggaagacagccgtctgaaagaggcatacagcgcctgtatcaacaccgcgcaaggttcgccagaaaaaattgaagcctgccagagcgtgttaaacgtgctgaagaaagagaaacaacatcagcagtttgccgaccaggaaagtgtacgcgtactggattatcagcagtgtctgcgtgcaacgcaaaccggaaatgatcaggcggtgaaagccgattgtgataaggtctggcaggaaatacgcagtaataacaaataa

SEQ ID NO: 470290 - DNA, 1407 bp, Shigella flexneri
atgcgtacgtttagtggcaaacgtagtacgctggcgctggctattgccggtgttacagcaatgtcgggctttatggcaatgccggaggctcgcgccgaaggattcatcgacgattcaaccttaaccggcggtatctattactggcagcgtgaacgcgaccgtaaagatgttaccgacggcgacaaatacaaaaccaacctttctcactccacctggaatgccaacctcgattttcagtccggttatgctgctgatatgttcggccttgatattgctgcgtttacggcgattgaaatggcggaaaacggcgacagctcccacccgaacgaaatcgcgttttcaaaaagtaataaagcctatgacgaagactggtccggcgacaaaagcggtataagcctgtataaagctgcggccaaatttaaatacggtccggtttgggcgagggcaggttacattcagccaaccggtcaaacgctgttagcgccgcactggagctttatgccgggtacttatcagggggcggaagccggggcgaattttgattacggcgatgctggtgccttgagtttctcctacatgtggaccaacgaatacaaagcgccgtggcatctggaaatggatgagttttatcagaacgataaaaccaccaaagttgattatctgcactccatcggtgcgaaatacgacttcaaaaataacttcgtactggaagcggcatttggtcaggcggaagggtatatcgatcaatattttgccaaagccagctacaaatttgatatcgccggtagcccgttaaccaccagctaccagttctatggtacccgcgataaagttgacgatcgcagcgtcaacgatctttatgacggcaccgcctggctgcaagcgttgacctttggttaccgggcggctgacgtagtggatttgcgcctcgaaggcacctggattaaggctgacagtcagcagggatacttcctgcaacgtatgaccccaacctacgcttcctccaacggccgcctggatatctggtgggataaccgttccgacttcaacgctaacggcgaaaaagcggtcttcttcagtgcgatgtatgacctgaaaaactggaatcttccaggcttcgccatcggcgcttcctacgtttacgcatgggatgctaaacctgcgacctggcagagcaatccggatgcgtactacgacaaaaaccggactattgaagagtctgcctacagcctggatgcggtctacaccattcaggacggtcgcgccaaaggcacgatgttcaaactgcacttcaccgaatacgacaaccactccgacatcccaagctggggcggcggttacggtaacatcttccaggatgagcgtgacgtgaaatttatggtaatcgcaccattcaccatcttctga

SEQ ID NO: 470291 - DNA, 1665 bp, Shigella flexneri
atgagtgaggcagaagcccgcccgactaactttatccgtcagatcatcgatgaagatctggccagtggtaagcacatcacagtacacacccgtttcccgccggagccgaatggctatctgcatattggccatgcgaaatctatctgcctgaacttcgggatcgcccaggactataaaggccagtgcaacctgcgtttcgacgacactaacccggtaaaagaagatatcgagtatgtcgattcgatcaaaaacgacgtagagtggttaggttttcactggtctggtaacgtccgttactcctccgattattttgatcagctccacgcctatgcgatcgaactgatcaataaaggcctggcgtacgttgatgaactgacaccggaacagatccgcgaataccgcggtaccctgacgcagccgggtaaaaacagcccgtaccgcgaccgcagcgttgaagagaacttggcgctgttcgaaaaaatgcgtgccggtggttttgaagaaggtaaagcctgcctgcgtgcgaaaatcgacatggcgtcgccatttatcgtaatgcgcgatccggtgctgtaccgcattaaatttgctgaacaccaccagactggcaacaagtggtgcatctacccgatgtacgacttcacccattgcatcagcgatgcgctggaaggtattacgcactctctgtgtacgcttgagttccaggacaaccgtcgtctgtacgactgggtactggataacatcaccattcctgttcatccgcgccagtacgaattctcgcgcctgaatctggaatacactgtgatgtccaagcgtaagctgaacctgctggtgaccgacaagcacgttgaaggctgggatgacccgcgtatgccgaccatttccggtctgcgtcgtcgtggttacactgcggcttctattcgtgagttctgcaaacgcatcggcgtgaccaagcaggacaacaccattgagatggcgtcgctggaatcctgcatccgtgaagatctcaacgaaaatgcgccgcgcgcaatggcggttatcgatccggtgaaactggttatcgaaaactatcagggcgaaggcgaaatggtcaccatgccgaaccatccgaacaaaccggaaatggggagccgtcaggtgccgtttagcggtgaaatttggatcgatcgcgccgatttccgcgaagaagctaacaagcagtacaaacgtctggtgctgggtaaagaagtgcgtctgcgtaatgcttacgtcattaaggctgaacgcgtggagaaagatgccgaaggtaatatcaccaccatcttctgtacttatgacgccgacaccttaagcaaagatccggcagatggtcgtaaagtcaaaggtgttattcactgggtgagcgcggcacatgcgctgccggttgaaatccgtttgtatgatcgtctgttcagcgtgcctaacccaggtgctgcggatgatttcctgtcggtgattaacccggaatcgctggtgatcaaacagggctttgctgaaccgtcgctgaaagatgcggttgcgggtaaagcattccagtttgagcgtgaaggttacttctgcctcgacagccgccattccacggccgaaaaaccggtatttaaccgcaccgttgggctgcgtgatacctgggcgaaagtaggcgagtaa

SEQ ID NO: 470292 - DNA, 123 bp, Shigella flexneri
atgattgatgaaaaaaaaagcggcagagaagatctccaccgcttgtcattgttggatgcgacgctgccgtgtcgcatcaggcataaagcagattactttttgatttcatacagcggtgtttga

SEQ ID NO: 470293 - DNA, 1947 bp, Shigella flexneri
atgaatattttaggttttttccagcgactcggtagggcgttacagctccctatcgcggtgctgccggtggcggcgctgttgctgcgattcggtcagccagatttacttaacgttgcgtttattgcccaggcgggcggtgcaatttttgataacctcgcattaatcttcgccatcggtgtggcatccagctggtcgaaagacagcgcaggtgcggcggcgctggcgggtgcggtaggttactttgtgttaaccaaagcgatggtgaccatcaacccagaaattaacatgggtgtactggcgggtatcattaccggtctggttggtggcgcagcctataaccgttggtccgatattaaactgccggacttcctgagcttcttcggcggcaaacgctttgtgccgatcgccaccggcttcttctgtctggtgctggcggccatttttggttacgtctggccgccggtacagcacgctatccatgcaggcggcgagtggatcgtttctgcgggcgcgctgggttccggtatctttggtttcatcaaccgtctgctgatcccaaccggtctgcatcaggtgctgaacaccatcgcctggttccagattggtgaattcaccaacgcggcgggtacggttttccacggcgacatcaaccgtttctacgctggtgacggcaccgcggggatgttcatgtccggcttcttcccgatcatgatgttcggtctgccgggtgcggcgctggcgatgtacttcgcagcaccgaaagagcgtcgtccgatggttggcgggatgctgctttctgttgctgttactgcgttcctgaccggtgtgactgagccgctggaattcctgttcatgttccttgcgccgctgctgtacctcctgcacgcactgctgaccggtatcagcctgtttgtggcaacgctgctgggtatccatgccggcttctctttctctgcgggtgctatcgactacgcgttgatgtataacctgcctgccgccagccagaacgtctggatgctgctggtgatgggcgttatcttcttcgctatctacttcgtggtgttcagtttggttatccgcatgttcaacctgaaaacgccgggtcgtgaagataaagaagacgagatcgttactgaagaagccaacagcaatactgaagaaggtctgactcaactggcaaccaactatattgctgcggttggcggtactgacaacctgaaagcgattgatgcctgtattacccgtctgcgcctgaccgtggctgactctgcccgcgtcaacgatacgatgtgtaaacgtctgggtgcttctggtgtagtgaaactgaacaaacagactattcaggtgattgttggcgcgaaagcagaatccatcggcgatgcgatgaagaaagtcgttgcccgtggtccggtagccgctgcgtcagctgaagcaactccggcaactgccgcgcctgtagcaaaaccgcaggctgtaccaaacgcggtatctatcgcggagctggtatcgccgattaccggtgatgtcgtggcactggatcaggttcctgacgaagcattcgccagcaaagcggtgggtgacggtgtggcggtgaaaccgacagataaaatcgtcgtatcaccagccgcagggacaatcgtgaaaatcttcaacaccaaccacgcgttctgcctggaaaccgaaaaaggcgcggagatcgtcgtccatatgggtatcgacaccgtagcgctggaaggtaaaggctttaaacgtctggtggaagagggtgcgcaggtaagcgcagggcaaccgattctggaaatggatctggattacctgaacgctaacgcccgctcgatgattagcccggtggtttgcagcaatatcgacgatttcagtggcttgctcattaaagctcagggccatgttgtggcgggtcaaacaccgctgtatgaaatcaaaaagtaa

SEQ ID NO: 470294 - DNA, 801 bp, Shigella flexneri
atgagactgatccccctgactaccgctgaacaggtcggcaaatgggctgctcgccatatcgtcaatcgtatcaatgcgttcaaaccaactgccgatcgtccgtttgtactgggcctgccgactggcggcacgccgatgaccacctataaagcgttagtcgaaatgcataaagcaggccaggtcagctttaagcacgttgtcaccttcaacatggacgaatatgtcggtctgccgaaagagcatccggaaagctactacagctttatgcaccgtaatttcttcgatcacgttgatattccagcagaaaacatcaaccttctcaacggcaatgccccggatatcgatgccgagtgccgccagtatgaagaaaaaatccgttcttacggaaaaattcatctgtttatgggcggtgtaggtaacgacggtcatattgcatttaacgaaccggcgtcttctctggcttctcgtactcgtatcaaaaccctgactcatgacactcgcgtcgcgaactctcgtttctttgataacgatgtcaatcaggtgccaaaatatgccctgactgtcggtgttggtacactgctggatgccgaagaagtgatgattatggtgctgggtagccagaaagcactggcgctgcaggccgccgttgaaggttgcgtgaaccatatgtggaccatcagctgtctgcaactgcatccgaaagcgatcatggtgtgcgatgaaccttccaccatggagctgaaagttaagactttaagatatttcaatgaattagaagcagaaaatatcaaaggtctgtaa

SEQ ID NO: 470295 - DNA, 1149 bp, Shigella flexneri
atgtatgcattaacccagggccggatctttaccggccacgaatttcttgatgaccacgcggttgttatcgctgatggcctgattaaaagcgtctgtccggtagcggaactgccgccagagatcgaacaacgttcactgaacggggccattctctcccccggttttatcgatgtgcagttaaacggctgcggcggcgtacagtttaacgacaccgctgaagcggtcagcgtggaaacgctggaaatcatgcagaaagccaatgagaaatcaggctgtactaactatctgccgacgcttatcaccaccagcgatgagctgatgaaacagggcgtgcgcgttatgcgtgagtacctggcaaaacatccgaatcaggcgttaggtctgcatctggaaggtccgtggctgaatctggtaaaaaaaggcacccataatccgaattttgtgcgtaagcctgatgccgcgctggtcgatttcctgtgtgaaaacgccgacgtcattaccaaagtgaccctggcaccggaaatggttcctgcggaagtcatcagcaaactggcaaatgccgggattgtggtttctgccggtcactccaacgcgacgttgaaagaagcaaaagccggtttccgcgcggggattacctttgccacccatctgtacaacgcgatgccgtatattaccggtcgtgaaccgggcctggcgggcgcgatcctcgacgaagctgacatttattgcggtattatcgctgatggcctgcatgttgattacgccaacattcgtaacgctaaacgccttaaaggcgacaaactgtgtctggttaccgacgccaccgcgccagcaggtgccaacattgaacagttcatttttgcgggtaaaacaatatactaccgtaacggactttgtgtggatgagaacggtacgttaagcggttcatccttaaccatgattgaaggcgtgcgtaatctggtcgaacattgcggtatcgcactggatgaagtgctgcgtatggcgacgctctatccggcgcgtgcgattgacgttgaaaaacgtctcggcacgctcgccgcaggtaaagtagccaacctgaccgcattcacacctgattttaaaatcaccaagaccatcgttaacggtaacgaggtcgtaactcaataa

SEQ ID NO: 470296 - DNA, 1221 bp, Shigella flexneri
atgacaccaggcggacaagctcagataggtaatgttgatctcgtaaaacagcttaacagcgcggcggtttatcgcctgattgaccagtacgggccaatctcgcggattcagattgccgagcaaagccagcttgcccccgccagcgtaaccaaaattacgcgtcagcttatcgaacgcgggctgatcaaagaagttgatcagcaggcctccaccgggggccgccgcgctatctccatcgtcaccgaaacccgcaatttccacgcaatcggcgtacggcttggtcgtcatgacgccaccatcactctgtttgatctcagcagcaaagtgctggcagaagaacattacccgctgccggaacgtacccagcagacgctggaacatgccctgctgaatgccattgctcagtttattgatagctaccagcgcaagctgcgcgagctaatcgccatttcggtgatcctgccagggcttgttgacccggacagcggcaaaattcattacatgccgcatattcaggtagaaaactgggggctggtagaagcactggaagaacgttttaaagtgacctgtttcgttggtcacgatatccgtagtctggcgctggcggagcactacttcggtgcaagtcaggattgcgaagactccattctggtgcgtgtccatcgcggaaccggggccgggattatctctaacgggcgcatttttattggccgcaacggtaacgtcggtgaaattggccatattcaggtcgaaccgctgggtgaacgctgccactgcggcaactttggctgcctggaaactatcgccgccaacgctgccattgaacaacgggtgttgaatctgttaaagcagggctaccagagccgtgtgccactggacgactgcaccatcaaaactatctgcaaagccgcgaacaaaggcgatagcctggcctcggaagtgattgagtatgtcggtcgtcatctgggtaaaaccatcgccattgctatcaacttatttaatccgcaaaaaattgttattgctggtgaaatcaccgaagccgataaagtgctgctccctgctattgaaagctgcattaatacccaagcgctgaaggcgtttcgtactaatctgccggtggtacgttctgagctggatcaccgctcggcaatcggcgcttttgcgctggtaaaacgcgccatgctcaacggtattttgctccagcatttgctggaaaattaa

SEQ ID NO: 470297 - DNA, 753 bp, Shigella flexneri
atgaccattaaaaatgtaatttgcgatatcgacggcgtgctgatgcacgataacgtcgccgtaccgggtgcagcggaatttttgcacgggattatggataaaggcctgccgctggtgttgctgaccaactatccttcgcagactgggcaagatctggcgaaccgctttgccactgccggtgtcgatgtgccggatagcgtgttttatacctctgcgatggcgaccgccgatttcctgcgtcgccaggaaggcaagaaagcgtatgtggtgggcgaaggcgcactgattcatgaactgtacaaagccggtttcactattaccgatgtgaaccctgatttcgtgattgttggcgaaacacgttcttacaactgggacatgatgcataaagcagcctatttcgtcgctaacggtgcacgctttatcgccaccaacccggacacccacgggcgcggtttttatcccgcttgtggcgcgttgtgtgcagggattgagaaaatctccgggcgcaaaccgttctatgttggtaagcccagcccgtggatcatccgcgcggcattaaacaaaatgcaggcgcattcggaagaaacagtgattgtcggcgataacctgcgtaccgatattctggcgggcttccaggccggtctggagacgattctggtgctttctggtgtttcatcgctcgacgatatcgacagtatgccgttccgcccaagctggatttacccgtcagtcgctgaaatcgacgttatctga

SEQ ID NO: 470298 - DNA, 1665 bp, Shigella flexneri
atgtgttcaatttttggcgtattcgatatcaaaacagacgcagttgagctgcgtaagaaagcactcgagctgtcacgcctgatgcgtcatcgtggcccggactggtccggtatttatgccagcgataacgccattctcgctcacgaacgtctgtcaattgttgacgttaacgcgggggcgcaacctctctacaaccaacaaaaaaaccacgtactggcggtaaacggtgaaatctacaaccaccaggcattgcgcgctgaatatggcgatcgttatcagttccagacagggtctgactgtgaagtgatcctcgcgctgtatcaggaaaaagggccggaatttctcgacgacttgcagggcatgtttgcctttgccctgtacgacagcgaaaaagatgcctacctgattggtcgcgaccatctggggatcatcccactgtatatggggtatgacgaacacggtcagctgtatgtggcctcagaaatgaaatcgctggtgccagtttgccgcacgattaaagagttcccggcggggagctatttgtggagtcaggacggcgaaatccgttcttattatcatcgcgactggttcgactttgatgcagtgaaagataacgtgaccgacaaaaacgagctgcgtcaggcactggaagattccgttaaaagccatctgatgtctgatgtgccttacggtgtgctactttctggtggtctggattcctcaattatttccgctatcaccaagaaatacgcagcccgtcgcgtggaagatcaggaacgctctgaagcctggtggccgcagttacactcctttgctgtaggtctgccgggttcaccggatcttaaagcagcccaggaagtggcaaaccatctgggcacggtgcatcacgaaattcacttcactgtacaggaaggtctggatgccatccgcgacgtgatttaccacatcgaaacttatgatgtgaccactattcgcgcttcaacaccgatgtatttaatgtcgcgtaagatcaaggcgatgggcattaaaatggtgctgtccggtgaaggttctgatgaagtgtttggcggttatctttacttccataaagcgcccaacgctaaagaactgcatgaagagacggtgcgtaaactgctggccttgcatatgtatgactgcgcgcgcgccaacaaagcgatgtcagcctggggcgtggaagcacgcgttccgttcctcgacaaaaaattccttgatgtggcgatgcgcattaacccgcaggataaaatgtgcggtaacggcaaaatggaaaaacacatcctgcgtgaatgttttgagtcatacctgcccgcaagcgtggcctggcggcagaaagagcagttctccgatggcgtcggttacagttggatcgacaccctgaaagaagtggcggcgcagcaggtttctgatcagcaactggaaactgcccgcttccgcttcccgtacaacacgccgacctcaaaagaagcgtatctgtaccgcgagatctttgaagaactgttcccacttccgagtgccgctgagtgcgtgccgggcggtccttccgtcgcgtgttcttcagctaaagcgatcgaatgggatgaagcgttcaaaaaaatggacgatccgtctggtcgtgcggttggcgttcaccagtcggcgtataagtaa

SEQ ID NO: 470299 - DNA, 1176 bp, Shigella flexneri
atgacaaatcaaccaacggaaattgccattgtcggcggaggaatggtcggcggcgcactggcgctggggctggcacagcacggattttcggtaacggtgatcgagcacgcagaacctgcaccgtttgtcgctgacagccaaccggacgtgcggatctcggcgatcagcgcggcttcggtatcattgcttaaagggttaggggtctgggatgcagtacaggctatgcgttgccatccttaccgcagactggaaacctgggagtgggaaacggcacatgtggtatttgacgcagccgaattaaagttgccgttgcttggctacatggtggaaaacacagtcctgcaacaggcgttgtggcaggcgctggaagcgcatccgaaagtaacgttacgtgtgccaacctcgctgattgcattacatcgagataatgatcttcaggagctggaactgaagggcggtgaaacgatccgcgcgaaactggtgattggtgccgacggcgcaaattctcaggtgcggcagatggcgggaattggcgttcatgcctggcagtatgcgcagtcgtgcatgttgattagcgtacagtgtgagaacgatcccggcgacagcacctggcagcaatttaccccggacggaccgcgtgcgtttctgccgttgtttgataactgggcatcgctggtgtggtatgactctccggcgcgtattcgccagttgcagaatatgaatatggcgcaactccaggcggaaatcgcgaagcatttcccgtcgcgtctgggttacgttacaccgcttgccgctggtgcgtttccgctgacgcgccgacatgcgttgcagtatgtgcagccggggcttgcgctggtgggcgatgccgcgcataccatccatccgctggcggggcagggggtgaatcttggttatcgtgatgtcgatgccctgattgatgttctggtgaatgcccgcagctacggtgaagcgtgggccagttatcctgtcctcaagcgttaccagatgcggcgcatggcggataacttcattatgcaaagtggtatggatctgttttatgccggattcagtaataatctgccgccgctgcgttttgtgcgtaatctcgggttaatggcggcagagcgtgctggcgtgttgaaacgtcaggcgctgaaatatgcgttagggttgtag

SEQ ID NO: 470300 - DNA, 1425 bp, Shigella flexneri
atgaccaaaaaactccatattaaaacctggggctgtcagatgaacgagtacgattcatcgaagatggccgatctgctggatgccacccacggctatcaactgaccgacgtggcggaagaagcggatgtgctactgctgaacacctgctcaatccgcgagaaggctcaggaaaaagtcttccatcagttgggtcgctggaaactgttaaaagagaagaatccagacctgattatcggcgtcggtggctgcgtggcatcgcaagaaggcgagcacattcgccagcgcgcccactatgtcgatattatttttgggccgcaaacgctgcaccgtctgccggagatgatcaactccgtgcgcggcgaccgcagcccggttgtagatatcagcttcccggaaatcgagaagtttgaccgtctgccggaaccgcgcgccgaagggccgaccgcgtttgtctccatcatggaaggctgcaataaatattgcacctactgcgtggtgccttacacccgtggtgaagaggtaagccgtccgtctgacgatattctgtttgagattgcccagcttgcggctcagggcgtgcgtgaagtcaacctgctcggtcagaatgtgaatgcctggcgtggtgagaactacgacggcaccaccggatcgtttgccgatctgttgcgtctggttgctgcgatcgacgggatcgatcgtattcgctttaccaccagccatccgatcgaattcaccgacgatatcatcgaagtgtaccgcgacacgcctgagctggtgagcttcctgcatctgccggtacagagcggttccgatcgcattctgaacctgatgggacgtacccatacggcgctggagtacaaagcgatcatccgtaaactgcgtgcggcgcgtccggatattcagatcagttctgacttcattgttggcttccctggcgaaaccaccgaagacttcgagaaaacgatgaagctgattgccgacgtcaatttcgacatgagctacagctttatcttctctgcacgtccaggaacgcctgccgccgatatggttgatgatgttccggaagaagagaagaagcagcgtctgtatattctgcaagaacgtatcaatcagcaagcgatggcatggagccgtcggatgctcggcaccacccagcgtattctggtagaagggacttcgcgtaagagcatcatggagctttccgggcgtaccgaaaataaccgcgtggtcaacttcgagggcacaccggatatgatcggtaaattcgtcgatgtagaaattaccgacgtctacccgaactctctgcgcggtaaagtggtgcgaactgaagatgaaatgggtctgcgcatggcagaaacaccggagtcggtgattgcccgcacccgcaaagaaaacgaccttggcgtgggttattatcagccgtaa

SEQ ID NO: 470301 - DNA, 1080 bp, Shigella flexneri
atgttcagcttccggcggcatacagataagaggaacggtttgaacatagacactcgcgaaatcaccctggagccagcagacaatgcgcgtctgttgagcctgtgcggcccgtttgatgacaacatcaagcagctcgaacgccgtctcggcatcgagatcaatcgccgcgataaccactttaaactgaccggccgtccgatttgcgtcaccgctgcggcagacattctgcgtagcctgtatgtcgatactgccccgatgcgcggtcagattcaggatatcgaaccggaacagatccaccttgcgattaaagaagcgcgggtactggagcaaagcgcggagagcgtgccggagtacggcaaagcggtcaatatcaaaactaaacgcggcgtaattaagccgcgcacgccaaaccaggcgcagtacatcgccaatattctcgaccatgacattaccttcggcgttggcccggcgggtacgggtaaaacctacctggcagtggctgcggcagttgatgccctggagcgtcaggaaattcgccgtattctgctgactcgtccggcggtcgaagccggtgagaaactgggcttcctgcctggcgatttaagccagaaagtagacccgtatctgcgcccactgtacgacgcgctgtttgaaatgctgggctttgagaaagtcgagaaactgattgagcgcaacgttattgaagtcgcgccgctggcctatatgcgtggtcgtacgctgaacgacgcgtttatcattctcgatgagagccagaacactaccatcgaacagatgaagatgttcctgacccgtatcggttttaactcaaaagcggttatcaccggcgacgtcacacagatcgacctgccgcgtaatactaaatcaggcttacgtcatgccattgaagtgctggccgatgtcgaagagatcagctttaacttcttccacagcgaagacgtggttcgtcacccggtggtggcgcgtatcgttaacgcttatgaagcctgggaagaagcagaacaaaaacgtaaagcggcgctggcagcagaacgcaagcgcgaagaacaggaacaaaaatga

SEQ ID NO: 470302 - DNA, 468 bp, Shigella flexneri
atgagtcaggtgatcctcgatttacaactggcatgtgaagataattccgggttaccggaagagagccagtttcaaacatggctgaatgcggtgatcccgcagtttcaggaagagtcggaagtgactattcgcgtggtcgataccgccgaaagccacagtctgaatctgacctatcgcggtaaggataagccgaccaacgtgctctccttcccgtttgaagtgccgcctggcatggagatgtcgctactgggcgatctggttatctgccgtcaggtggttgagaaggaagctcaggagcaaggcaaaccactggaggcgcactgggcgcatatggtggtgcacggcagtctgcatttgttaggttacgatcacattgaagatgacgaagcagaagaaatggaagccctcgaaacagagattatgcttgctctgggctatgaggatccgtacattgccgagaaagaataa

SEQ ID NO: 470303 - DNA, 879 bp, Shigella flexneri
atgagcgacgacaattcacacagtagtgacacgataagcaacaagaagggatttttctccctgttactcagccaacttttccacggtgaaccgaaaaaccgtgacgaactgctggcgctgatccgtgattccgggcagaacgaccttatcgacgaagatacgcgcgatatgctcgaaggggtgatggacatcgcagaccaacgcgttcgcgacatcatgatcccccgctcccagatgattaccctgaaacgcaaccagacgctggacgaatgccttgatgtcatcatcgagtccgcccactcacgtttcccggtgattagcgaagacaaagatcacattgaagggattctgatggcgaaagacttgctgccgtttatgcgcagcgatgctgaagccttcagcatggacaaagtgttacgtcaggcggttgtcgttcctgaaagtaagcgcgtagaccggatgctgaaagagtttcgctctcagcgttaccacatggcgatcgttattgacgaattcggtggggtttccggtctggtgaccattgaagacatcctggaactgattgttggtgagattgaagacgagtatgacgaagaagatgatatcgacttccgtcagctgagtcgtcatacctggaccgtgcgcgcactggcttccattgaagacttcaacgaagcgttcggcacccactttagcgatgaagaagtcgacactatcggtggtctggtgatgcaggcgtttgggcatcttccggcgcgtggcgaaactatcgacatcgacggttaccagttcaaagtggcgatggccgatagtcggcgtattattcaggttcatgtcaaaatcccggatgactcaccccagccaaagctggatgaataa

SEQ ID NO: 470304 - DNA, 1539 bp, Shigella flexneri
atggcttttgcctcattaattgaacgccagcgcattcgcctgctgctggcgttattattcggtgcctgcggaacgctggccttctctccttacgacgtctggcctgcggcgattatttcgctgatggggcttcaggcgttgacctttaaccgtcgcccactccagtctgccgctattggcttttgctggggatttggcctctttggcagcggtattaactgggtctatgtcagcatcgcgacctttggcgggatgcctggcccggttaacatcttcctggtggtgctgctggcggcgtatttgtcgctgtataccggactgtttgctggcgtgctgtcgcgtctgtggccgaaaaccacctggctgcgcgtggcgattgccacccctgctctctggcaagtgaccgagtttctgcgcggttgggtgctgactggcttcccgtggttacagttcggctatagccagattgatggcccgttaaaagggctggcaccgctaatgggcgtggaagccattaacttcctgctgatgatggttagtggcctgctggcactggcgttggtcaaacgcaactggcgtccgctggtggtggccgtcgtgctgtttgccctacccttcccgctgcgttacatccaatggtttaccccgcaaccggagaaaaccattcaggtttcgatggttcagggcgatattccgcaatcgctgaaatgggacgaaggccagcttcttaatacgctaaagatttactacaacgcaacggcaccgctgatgggcaaatcatcgttgattatctggccggagtcggcgataaccgatctggaaattaatcagcaaccgttcctcaaagcactggacggtgagttgcgtgataaaggtagctcgctggtaaccgggattgtcgacgcgcgtctcaataagcagaaccgctacgatacctacaacaccatcatcacgctgggtaaaggtgcaccgtacagctacgaatcagccgatcgctataacaaaaaccatctggtgccgtttggcgagtttgtcccgctggagtcgattctgcgtccgttagcaccgttctttgatctgccgatgtcgtcgttcagccgtgggccatatatccagccgccgctgtcggcaaatggtattgagcttactgcggctatttgctacgagatcattctcgccgagcaagtgcgcgataacttccgcccggataccgactacctgctgactatctccaacgatgcgtggtttggtaaatctattggtccatggcaacacttccagatggcgcgaatgcgtgcgctggagctggcgcgcccactgttgcgcagcaccaacaacggcattacggcggtgattggcccgcagggtgagattcaggcgatgatcccgcagttcgcccgcgaggtgttaaccactaacgtgacgccgaccaccggactcacaccatacgcacgtaccggcaactggccgctgtgggtgctgacggcactgtttggttttgctgctgtgttgatgagtctgcgtcagcgacgtaaataa

SEQ ID NO: 470305 - DNA, 909 bp, Shigella flexneri
atgcaattacgtaaacctgccacagcaatcctcgccctggcgctttccgcaggactggcacaggcagatgacgccgccccggcagcaggcagtacgctggacaaaatcgccaaaaacggtgtgattgtcgtcggtcaccgtgaatcttcagtacctttctcttattacgacaatcagcaaaaagtggtgggttactcgcaggattactccaacgccattgttgaagcagtgaaaaagaaactcaacaaaccggacttgcaggtaaaactgattccgattacctcacaaaaccgtattccactgctgcaaaacggcactttcgattttgaatgtggttctaccaccaacaacgtcgaacgccaaaaacaggcggctttctctgacactattttcgtggtcggtacgcgcctgttgaccaaaaagggcggcgatatcaaagattttgccgacctgaaaggcaaagccgtagtcgtcacttccggcactacctctgaagttttgctcaacaaactgaatgaagagcaaaaaatgaatatgcgcatcatcagcgccaaagatcacggtgactctttccgcaccctggaaagcggtcgtgccgttgcctttatgatggatgacgctctgctggccggtgaacgtgcgaaagcgaagaaaccagacaactgggatatcgtcggcaagccgcagtctcaggaagcctacggttgcatgttgcgtaaagacgatccgcagttcaaaaagctgatggatgacactatcgctcaggtgcagacctccggtgaagcggaaaaatggtttgataaatggttcaaaaatccaattccgccgaaaaacctgaacatgaatttcgaactgtcagacgaaatgaaagcactgttcaaagaaccgaatgacaaggcactgaactaa

SEQ ID NO: 470306 - DNA, 741 bp, Shigella flexneri
atgtctatagactggaactggggtatttttttacaacaagccccgttcggcaataccacctatcttggttgggtctggagtggttttcaggtgacgatcgctttgtcgatctgcgcctggattatcgctttcctcgtcggttcatttttcggcattttacgtaccgttccaaaccgttttctctccggtctgggtacgttgtatgttgaactgttccgcaacgtgccgttgattgtgcaattctttacctggtatctggtgatcccggagctgctgccggagaaaatcggcatgtggtttaaggccgagctggatcccaatattcagtttttcctttcatccatgctctgcctggggctgtttaccgccgcccgtgtttgcgaacaggtacgcgccgctattcagtcgctaccgcgtgggcagaagaatgccgcgctggcgatgggcctgacgctaccgcagacttatcgatacgtactgctgcctaatgcttatcgcgttatcgtcccgccgatgacttccgagatgatgaacctggtgaaaaactccgccatcgcctcgaccatcggtctggtggatatggcggcgcaggcgggtaaattgctcgactactcggctcacgcctgggagtcgtttaccgccatcacgcttgcgtatgtgttgattaacgcttttatcatgctggtgatgacgctggttgaacgtaaagttcgcctgcccggcaacatggggggcaaataa

SEQ ID NO: 470307 - DNA, 675 bp, Shigella flexneri
atgtacgagtttgactggagttccattgttccttccctgccatatctgctcgacgggctggtgatcaccctgaaaatcaccgtcacggcagtcgtgattggtattttgtggggtaccatgctggcggtgatgcgcttgtccagcttcgcgcctgtttcgtggtttgccaaagcctacgttaacgtattccgctcgattcctttagtcatggttttgctgtggttttacttgattgtgccgggatttctgcaaaatgtgctgggattatcgccaaaaaatgatattcgtttaatttcggcgatggtggcgttttcgatgtttgaagcggcctactattcagagattatccgtgccggtattcaaagtatttcccgtggtcagtcgagcgccgcgctggcgttggggatgactcactggcagtcgatgaaactgattattctgccgcaggctttccgcgcgatggtgccgctgctgctcactcagggcatcgtactgttccaggatacctcgctggtgtatgtgttatctctggccgatttcttccgtaccgcctcaaccattggtgagcgtgatggtacgcaggtcgagatgatcctgtttgccggatttgtttatttcgttattagccttagcgcgtcgttgttggtcagctacttgaaaagaaggacagcataa

SEQ ID NO: 470308 - DNA, 726 bp, Shigella flexneri
atgattaccctgaaaaatgtttcaaaatggtatggtcactttcaggtgctgaccgactgctcaaccgaagtgaaaaaaggcgaagtggtggtggtttgcggcccgtctggttccggcaaatcaacgctgattaaaaccgtcaacggcctcgaaccagtgcagcaaggtgaaatcaccgtcgatggtatcgtggttaacgacaagaaaaccgatctggcaaagctgcgctcccgcgtcgggatggtattccagcatttcgagctgttccctcatctgtcgattatcgaaaacctgaccctggcgcaggtgaaagtgcttaaacgcgataaagcgcccgctcgtgaaaaagcattgaaattgctggagcgcgtgggactttccgcacatgccaataaatttccggcgcagctttccggcggtcagcagcagcgcgtggcaatcgctcgcgcattgtgtatggctcctattgcgatgctgttcgacgaaccgacatcggcgctggatccggagatgatcaacgaagtgctggacgtgatggtggaactggcgaacgaaggaatgaccatgatggtggtgacccacgaaatgggctttgcccgcaaagtggcgaatcgggtgatctttatggacgagggtaaaattgtcgaagactcgccgaaagacgctttcttcgatgatccgaaatcggaccgcgcaaaagacttcctcgcgaaaatcctgcattaa

SEQ ID NO: 470309 - DNA, 936 bp, Shigella flexneri
atggcactgccaattctgttagattgcgacccaggtcatgatgacgctatcgcaatagttctcgcactcgcctcaccagagcttgatgtcaaagcaattacgtcttccgccggaaaccagacaccagaaaaaaccttacgcaatgttctgcgtatgctgaccttgcttaatcgcaccgatattccggtggcaggcggcgcggtaaaaccgttaatgcgtgagttgattatcgcggacaatgtgcacggcgaaagcggtctcgacggcccggcattaccggaaccgacgttcgcaccgcaaaactgtacggcggtggagctgatggcgaaaacgctgcgcgaaagtgcggaacctgtcacgattgtttctaccggaccgcaaactaacgttgccttgctgctcaatagccatccggaactgcatagcaaaattgcccgtatcgtgattatgggcggcgcaatggggcttggtaactggacgcctgcggctgaatttaatatttacgttgacccggaagcggcagaaattgtcttccagtcagggatcccggtggtgatggccggtctggatgttactcataaagcgcaaatccacgttgaagacaccgagcgtttccgcgcgattggcaaccctgtttcaaccattgttgccgaactgctggatttcttcctcgaatatcataaagacgaaaaatggggctttgtcggcgcaccgctgcatgacccatgcaccatcgcctggctgttgaaacccgagttgtttaccactgttgagcgctgggttggcgtggaaacacaggggaaatatacccagggtatgacggttgttgattattattatctgactggcaataaaccgaatgccactgtaattgtcgatgttgatcgtcagggctttgttgatttactggctgatcgtctgaaattttacgcttaa

SEQ ID NO: 470310 - DNA, 759 bp, Shigella flexneri
atggataatgcagaactcgccataggtatcgatctcggcactaccaatagtttaattgccgtctggaaagacggtgccgcgcaattaattccaaataagttcggtgaatatttaacaccatccataattagcatggatgaaaataatcatattttagtcggaaaaccggctgtatcacggcgtacttcgcatccggataaaacggcagcgttatttaaacgtgcaatgggcagtaataccaactggcggttaggcagcgacacatttaacgcgccagaactgtcctctttggtattacgctcattaaaagaagatgccgaagaatttctgcaacgtccgattaaagatgtggtgatctccgttccggcttatttcagcgatgaacaacgcaagcatacccgtttagcagcggacttagccgggttaaatgcggtacgcttaattaatgaacccacagcagctgcgatggcgtatggcctgcatacccaacaaaatacccgttcgctggtgtttgatctcggtggcggcacgtttgacgttacggtgcttgagtacgccacgccggtgattgaagttcacgcctccgctggcgacaacttcctcggtggcgaagattttacccatatgttggtcgatgacgttttaaagcgcgcggatgtcacaaggaccacgcttaacgagagtgaactggcagccttgtacgcctgtgtggaagcggcaaaatgtagcaatcaatcgccaatgcacattcgctggtag

SEQ ID NO: 470311 - DNA, 855 bp, Shigella flexneri
ttgccgctgctcaatcgcttgcgagtgccgattgaacaggcgttgcgcgatgcgcgtctgaagccgagtcaaatcgacagtctggtgctggttggcggcgcgtcacaaatgccgctggtgcagcgaatcgccgtgcgtctgtttggcaaattaccgtatcaaagttacgatccgagcaccattgtcgcgctgggcgcagcaatccaggccgcctgccgcttacgcagtgaagatattgaagaagtgatcctcactgatatttgcccttactcgttgggcgttgaggttaaccgccagggcgtttccggcattttctcgccgattattgaacgaaacaccactgtgcccgtgtcgcgtgtagaaacttattcaaccatgcacccggaacaggattcaattacggttaacgtctatcagggagaaaaccacaaagttaaaaacaacattctggtggaatccttcgatgtgccgttgaagaaaaccggtgcttatcagtcgattgatattcgctttagttatgatatcaacgggttgcttgaagttgacgtgcttctggaagacggcagcgttaagtccagagtgattaaccacagcccggtaacattgagcgcgcagcagattgaagagagtcggacgcggttatccgcattgaaaatttatccgcgcgatatgctcatcaatcgcacctttaaagccaaactggaagagttgtgggcgcgggcgctgggtgacgagcgagaagagattggccgggtgatcaccgattttgatgcggcgctgcagtcaaacgatatggcccgcgtcgatgaggtcaggcggcgggcgagcgtttatttagccattgagacctcataa

SEQ ID NO: 470312 - DNA, 1452 bp, Shigella flexneri
atgaaaacatgttggcaaatcctcgaaattgaaagcacgacgcaaatagacattatccgccaggcttatcttgctcgcttaccgttgtgtcatcccgaaaccgatccgcaggggtttaaagcattacgccaggcctatgaagaggcgctgcgactggcggtaaatcctgtcgaggaagcagatgatgaagaaaaagatgccaccgctgaacatgaaatactacgtgcattcaggacattactggattcagaaagtgatcgttttcagccctccgcctggcagaaatttattcagcaattaaatacctggaacatggaggatgtcgatcaattacgctggccgctgtgtgcaatcgctatagaagcgcgatatctgtcattaaattgtgcttctttgttggcagagcgtttgaactggcattcgtttaatgacagcgaaggaatggatgaggaagaaagggaggcttttcttgaggccattcaggctggtgattgtttcgatttccttagccttctggaatatcccgtcgcgttacagaaccagactgttgaatattacttcgcgctggaacgttgctgccgttaccatcctgactatgtcactgcgtttttggcgatggaaggaccgtggttcattcctgatgatgcaaagttacatcgcaaactgttgcgctggtacagctcggtgcaaacaggtatggtggaactcattcctgtagccaaacagtggcaagcggaagaaccagaaagcgaagatgcccggtattaccagtgtgcacaacgtttgtactgcggcgagggggaaagcctgcttgctgatctcggcgcgtactgggaaagttacccatctacacaagctgataatttgttgttgcagtggagcaagcgtcattgcccggattatttcgcgttattagtgatggttatcgaagcgcggagcatggtagatgcgcaaggtcaaccgctgaaatatgttcctggtgagagcgcccggacgcggctgttatgggcggaaattttacatagcggaaaattatcgccgttaggtcaatcgtttattgagtcgttattcttcaaacgcaaagcatgggcgtggtggaaatcgagagtcggtagcgagacagaagaagattcaccgttactggatttgtatcgggtagcggaacaggtagtacttgaagcgtttccgaaacaagagatgctggcccgtcttaatacaaggctggaaggcggagatgctcatccattagaggccattatcacccggatgctgttgacgaaagtaaaactcgagccggaggatgaagatgtcgatgagccaacacctgaaaaccatgaagaaaaaaatgatgagggtgaaaaaccacagagcattaccagcattatcaaaatcagtttaacggtgctggttataggttatgctctcggcaaaatcgcgatgttgtttagttga

SEQ ID NO: 470313 - DNA, 708 bp, Shigella flexneri
atgaataaggaagaacaatatcttctttttgcgctttctgcgcccatggaaatacttaatcagagttgcaaacccgcgcatgactcgccaaaaatgtataccgggataaaagaattcgatctctcatcatcctggggaataaataatcgtgatgatttaattcagactatttatcagatgactgatgatggtcatgccaatgatttagctggcttatatctgacatggcaacgctcttcccctgaagagtggaaagcattaattgctggtggctcggagagagggttgatttatacccaattcgttgcccaaaccgctatgtgctgtggagaagggggaatcaaagcctgggattatgttcgaatggggtttctgtcacgggccggtgtgctcaacaactggctgacggaagaagagagtttatggctgcaatcgcgcgtctatgcacgagctcaccattactatcacagctggatgcactatttttctgcctattcactagggcgtctctactggcaatcttctcagtgcgaagacaacgcttcgctacgcgaggcgctaaccctgtacaaatacgatagcgccgggagtcggatgttcgaagagctggcagcgggaagcgaccgtttctatgccacgcttccctggcagccattaactgtccagcctgaatgcccggtaacgcttaaggatgtgagcgacctatga

SEQ ID NO: 470314 - DNA, 555 bp, Shigella flexneri
atgaataaaaaattaatgtatatattcgcaatttttatagttgcagcaattacctgtattagccaacccaagaaaacgatgttgcgtgataaagccatggtgaattatgcctttgattatttaagatcaccaggcagtctaccgttaaccacggcagccacggagctttccgcgattcatggtcactcaacatcgcaatatcgccttggcgaattttatcttcatggtagcgacggtaaaccactggattatacacaggcgagatactggtatgagcaatcagcagaacaggaaaatccgcgcgcacaaagcaaactggggtggatctacctgaaaggcctgggagtcaaacccgatacccgtaaagcaattctctggtataaggaagcagctgaacaagggtatgctcatgctcaatatactttgggtttgatctacagaaatggcactggtattaatgttaaccattatgaatctcaaaaatggttaaaactggccgccaaacaacattacaaaaatgcggaaagattacttgccggacttcccgcacattaa

SEQ ID NO: 470315 - DNA, 1428 bp, Shigella flexneri
atgaaaaattgctggaagatcctcgatatagaggaaacgactgacgtcgatattatccgccgcgcttatctggcgctgttaccgtcctttcatccagaaaccgatccgcagggttttaaacaacttcgtcaggcgtatgaggaggcgctacggattgcgcagtcgcctgctaaatctgtttggcaaccagaagaatatgaggtagcagaacatgaaattctgctcgcctttcgcgcgttacttgcctctgatagcgaacgttttctgtcctccgcctggcagcgattcattcagcaattaaattattgctcgatggaagagattgatgaattacgctggtcgctgtgcacaatcgccatgaacactgcccatttatccttcgagtgcgtggtgttattagcagaaagattgcggtggttgcaggaggaaaacgtcggggaaatagacgaagaagaactggaatcctttttatatgccattgcgaaggggaatgtttttaacttccagaccattctgcatctgccagttgccgtgcaaaatgacaccatcgatttttaccaaatgttcgctcggatttggtcatcgcatccagaatggctgacattgtatttagcgcaacatcgcgcagtgattatccccgatgatgcaaaactgcacagaaatttactccgctggtatagcgcaagccgcctgggaatccccgaactcctggattacgcccggtcgtggcgggaagctgaacctgataatgaagatgcgcgttattatgaatacgcacaacgcgtctattgtggagaaggcgaaagcctgctggcagaactttgttactactggcgcgagtatccctccacccaggcggatgctttaatgttgcaatggtgccgtcagcatcgggtctattattacccattagtggtgatgatgattgaagcgcgtgatctggttaacgatcagggaaaaccgctactttatgtccccggcgacagcgcccgtacgcgttttcatttatacgaaatactcagcgatgaaaaactctctgcgctggggcgttcactggtcgagatggttttgcacaaaggacgtaagccgcggatctcactcacgcgtgatacagaacatcccttatggccattatatttagttgccaaacaattagtgcaggccagccaaccgacagaagaatcattaatgccgattgtgagccgccttgatgcagaagatcgttgtccactggaagcattaattattcgtcgattattaattcaggcggcgaattttaccggtcaggaaaccgtcgagccggagccgcaaccgcagccaatgcccgttgatgatggcgggctgggctgtctgggcgtcatcaaaattattttctacatttttatctttgccggtttgatagggaaaatactccatctcttcgggtga

SEQ ID NO: 470316 - DNA, 708 bp, Shigella flexneri
atggacatggggtcgcaaaaaatattgtttgcactttccactccgatggaaatacgcaatgaatgctgtttaccttcgcattcatcccccaaaatgtatttaggtacatgcttttttgacctttcttcctcatggggaattgatgaccgtgatgacctgctgcgcataattcaccgaatgatcgagaacggtcatgccgctcggttggcagggttttatcaccgctggtttcgttattctccatgtgaatggcgtgactatcttgctgaattaaatgagcaaggtcaggcttatgcgcaatttgtcgccagcacagccgaatgctgtggtgagggaggaattaaagcatgggattatgtccggatgggttttttaagtcgaatgggcgtacttaataactggttgagtgaagaagaaagtctatggatccagtcgcgtattcatctacgggctctacgttattatagtaactggcggcaatactttgccggttatacctttggtcggcaatattggcagtctcccgaagatgatcatctgcctttattacgcgaattcttagcgcgtaaagaatacgacgattccggcaatgatatgttttatcaattatttgccagtgatgatgcgtattaccctaccttgtcctggcaaccactggctgactaccccacatgcccggaaacgcttaaggatatgagcgacttatga

SEQ ID NO: 470317 - DNA, 978 bp, Shigella flexneri
atgatttttacgtcaagttgctgcgataatttatcaatagatgagattatcgaacgtgctgaaaaaggcgattgcgaggctcaatatattgttgggttttattataatcgcgatagcgcaattgactctccggacgacgaaaaggccttttactggctgaagctggccgctgagcaaggtcattgtgaagcacagtattccttagggcaaaagtataccgaggataaaagccgtcataaagataatgagcaagccatcttctggctgaaaaaagctgccctacaaggccatactttcgcttccaacgcccttggctggatactggatcgtggagaagaccccaactataaagaagcggttacctggtatcagatagccgcggagagcggaatgtcttatgcgcaaaataatcttggatggatgtacagaaatggcaacggagtcgcacaagactatacgctggcatttttctggtacaaacaagctgcattacaaggccatagttacgcacaagacaatctggccgatctttataaagacggagaaggcgttgctcaaaacaagacactcgccgcattctggtatttgaaaagcgcacagcagggtaatcggcacgcccagtttcaaattgcatgggattataacgctggcgaaggggtggaccaggactataagcaagcgatgtactggtatctgaaggctgccgctcaggaaagcgtcggcgcttacgtcaacatcggttatatgtataaacacggacaaggcgttgagaaagattatcaggctgcctttgaatggtttacgaaagccgctgaatgcaatgacgccactgcctggtataacctggccattatgtatcactacggagaaggaagacctgtcgatctccgacaggctctcgacctgtatcgtaaagttcagtcatccggaaccagagatgtcagtcaggaaattcgtgagactgaagctttactgtag

SEQ ID NO: 470318 - DNA, 483 bp, Shigella flexneri
atgaacaaggttgctcaatattaccgtgaactggtcgcgtcactgaacgaacgcctgcgcaatggcgaacgtgatatcgacgcactggtggaacaggcgcgcgagcgcgtaataaaaacaggggagttaacgcgaaccgagatcgatgagctgacgcgagctgtcagacgtgacttggaagagttcgccatgagctatgaagagagcctgaaagaagaatctgacagcgtctttatgcgggtgattaaagaaagcttgtggcaggagctggcagacatcaccgataaaacgcagcttgaatggcgcgaaattttccaggacctcaatcatcatggggtttatcacagcggagaagtggtcgggctgggaaatctggtctgcgagaaatgtcacttccatctcccgatctacacaccggaagtgctgacgctatgcccgaaatgtggttatgaccagttccagagacgcccgtttgagccgtaa

SEQ ID NO: 470319 - DNA, 2583 bp, Shigella flexneri
atgcaagagcaataccgcccggaagagatagaatccaaagtacagcttcattgggatgagaagcgcacatttgaagtaaccgaagacgagagcaaagagaagtattactgcctgtctatgcttccctatccttctggtcgactacacatgggccacgtacgtaactacaccatcggtgacgtgatcgcccgttaccagcgcatgctgggcaaaaacgttctgcagccgatcggctgggacgcgtttggtctgcctgcggaaggcgcggcggtgaaaaacaacaccgctccggcaccgtggacgtacgacaacatcgcgtatatgaaaaaccagctcaaaatgctgggctttggttatgactggagccgcgagctggcaacctgtacgccggaatactaccgttgggaacagaaattcttcaccgagctgtataaaaaaggcctggtatataaaaagacttctgcggtcaactggtgcccgaacgaccagaccgtactggcgaacgaacaagttatcgacggctgctgctggcgctgcgataccaaagttgaacgtaaagagatcccgcagtggtttatcaaaatcactgcttacgctgacgagctgctcaacgatctggataaactggatcactggccagacaccgttaaaaccatgcagcgtaactggatcggtcgttccgaaggcgtggagatcaccttcaacgttaacgactatgacaacacgctgaccgtttacactacccgcccggacacctttatgggttgtacctacctggcggtagctgcgggtcatccgctggcgcagaaagcggcggaaaataatcctgaactggcggcctttattgacgaatgccgtaacaccaaagttgccgaagctgaaatggcgacgatggagaaaaaaggcgtcgatactggctttaaagctgttcacccattaacgggcgaagaaattcccgtttgggcagcaaacttcgtattgatggagtacggcacgggcgcagttatggcggttccgggtcacgaccagcgcgactacgagtttgcctctaaatacggcctgaacatcaaaccggttatcctggcggctgacggctctgagccagatctttctcagcaagccctgactgaaaaaggcgtgctgttcaactctggcgagttcaacggtcttgaccatgaagcggccttcaacgccatcgccgataaactgactgcgatgggcgttggcgagcgtaaagtgaactaccgcctgcgcgactggggtgtttctcgccagcgttactggggcgcgccgattccgatggtgacgctggaagacggtaccgtaatgccaaccccggacgaccagctgccggtgatcctgccggaagatgtggtgatggacggcattaccagcccgattaaagcagatccggagtgggcaaaaactaccgttaacggtatgccagcgctgcgtgaaaccgacactttcgacacctttatggagtcctcctggtactatgcgcgctacacttgcccagagtacaaagaaggtatgctggattccgaagcggctaactactggctgccggtggatatctacattggtggtatcgaacacgccattatgcacctgctctacttccgcttcttccacaaactgatgcgtgatgcaggcatggtgaactctgacgaaccagcgaaacagttgctgtgtcagggtatggtgctggcagatgccttctactatgttggcgaaaacggcgaacgtaactgggtttccccggttgatgctatcgttgaacgtgacgagaaaggccgtatcgtgaaagcgaaagatgcggcaggccatgaactggtttataccggcatgagcaaaatgtccaagtcgaagaacaacggtatcgacccgcaggtgatggttgaacgttacggcgcggacaccgttcgtctgtttatgatgtttgcttctccggctgatatgactctcgaatggcaggaatccggtgtggaaggggctaaccgcttcctgaaacgtgtctggaaactggtgtacgagcacacagcaaaaggtgatgttgcggcactgaacgttgatgcgctgactgaagatcagaaagcgctgcgtcgcgatgtgcataaaactatcgctaaagtgaccgatgatatcggccgtcgtcagaccttcaacaccgcaattgcggcgattatggagctgatgaacaaactggcgaaagcaccgaccgatggcgagcaggatcgcgctctgatgcaggaagcactgcaggccgttgtccgtatgctcaacccgttcaccccgcacatctgcttcacgctgtggcaggaactcaaaggcgaaggcgatatcgacaacgcgccgtggccggttgctgacgaaaaagcgatggtggaagactccacgctggtcgtggtgcaggttaacggtaaagtccgtgccaaaatcaccgttccggtggacgcaacggaagaacaggttcgcgaacgtgctggccaggaacatctggtagcaaaatatcttgatggcgttactgtacgtaaagtgatttacgtaccaggtaaactcctcaatctggtcgttggctaa

SEQ ID NO: 470320 - DNA, 582 bp, Shigella flexneri
gtgcgatatctggcaacactgttgttatctctggcggtgttaatcaccgccgggtgtggctggcatctgcgtgacaccacgcaggttccttccactatgaaggtcatgatcctggactcaggcgatccgaacgggccattaagccgtgcggtgcgtaaccagttacgtctgaatggtgtcgagttgcttgataaagaaaccacgcgtaaggacgttccatccctgcgtttgggtaaagtgagcatcgcgaaagataccgcatcggtattccgtaacggtcaaacagcagagtatcagatgatcatgacggtgaatgcgaccgtgttgatccccggccgtgatatctacccgattagcgccaaagtcttccgttcattcttcgataacccgcaaatggcgttagcgaaagataacgaacaagacatgatcgtaaaagagatgtacgaccgtgctgccgaacagctgattcgtaagctgccaagcatccgtgctgcggatattcgttccgacgaagaacagacgtcgaccacaacggatactccggcaacgcctgcacgcgtctccaccatgctgggtaactga

SEQ ID NO: 470321 - DNA, 1032 bp, Shigella flexneri
atgattcggttgtacccggaacaactccgcgcgcagctcaatgaagggctgcgcgcggcgtatcttttacttggtaacgatcctctgttattgcaggaaagccaggacgctgttcgccaggtagctgcggcacaaggattcgaagaacaccacactttttccattgatcccaacactgactggaatgcgatcttttcgttatgccaggctatgagtctgtttgccagtcgacaaacgctattgctgttgttaccagaaaacggaccgaatgcggcgatcaatgaacaacttctcacactcaccggacttctgcatgacgacctgctattgatcgtccgcggtaataaattaagcaaagcgcaagaaaatgccgcctggtttactgctcttgcgaatcgcagcgtgcaggtgacctgtcagacaccggagcaggctcagcttccccgctgggttgctgtgcgcgcaaaacagctcaacttagaactggatgacgcggcgaatcaggtgctctgctactgttatgaaggtaacctgctggcgctggctcaggcactggagcgtttatcgctgctctggccagacggcaaactgacattaccgcgcgttgaacaggcggtgaatgatgccgcgcatttcaccccttttcattgggttgatgctttgttgatgggaaaaagtaagcgcgcgttgcatattcttcagcaactgcgtctggaaggcagcgagccggttattttgttgcgcacattacaacgtgaactgttgttactggttaacctgaaacgccagtctgcccatacgccactgcgtgcgttgtttgataagcatcgggtatggcagaaccgccggggcatgatgggcgaggcgttaaatcgcttaagtcagccgcagttacgtcaggccgtgcaactcctgacacgaacggaactcaccctcaaacaagattacggtcagtcagtgtgggcagagctggaagggttatctcttctgttgtgccataaacccctggcggacgtatttatcgacggttga

SEQ ID NO: 470322 - DNA, 642 bp, Shigella flexneri
atgaaatctttacaggctctgtttggcggcacctttgatccggtgcactatggtcatctaaaacccgtggaaacgctggcgaatttgattggtctgacgcgggtcacaatcatccctaataatgttcctccgcatcgtccccagccggaagcgaacagcgtgcagcgtaaacacatgcttgaactggcgattgccgacaagccattatttactcttgatgaacgcgagctaaagcgcaatgccccctcttacactgcgcaaacactgaaagagtggcggcaggaacaaggaccggacgtgccgctggcgtttattattggtcaggattcattgctgacctttccgacctggtacgaatacgaaacgatactcgacaatgcacatttgatcgtctgtcggcgtccaggttacccacttgaaatggcgcaaccgcaataccagcaatggctggaagatcatttgacacataacccggaagatcttcaccttcagcctgccggtaaaatttatctggctgaaacgccgtggtttaacatctcggcgaccatcatccgcgaacgtttgcaaaacggtgaatcgtgtgaggatttattgccggaaccggtattgacttacattaaccaacaaggcttgtatcgctga

SEQ ID NO: 470323 - DNA, 612 bp, Shigella flexneri
atgcgactgtggttaattcgtcatggcgaaacacaagcgaatgtcgatggtctgtacagcggtcatgcgcccacacccctgaccgcacgcggtattgagcaagcgcaaaatctgcatacactgctagatgatgtttcctttgacctggttttatgcagtgaactggaacgggcacagcataccgcgcgactggttctcagtgaccgccagctccccgttcatatcatccctgaactcaacgaaatgttttttggcgactgggagatgcgacatcatcgcgacctcatgcaagaagatgccgaaaactatagcgcgtggtgcaatgactggcagcatgctatccccacgaacggtgaaggatttcaggcattttcgcaacgtgtggaacgctttatcgcaaggcttagtgaatatcagcactatcagaatattttaatcgtcagccatcagggcgtactgagtctgttaattgctcgtttaattggcatgcctgccgagtctatgtggcattttcgcgttgaccaggggtgttggagcgccattgatatcaaccaaaaattcgcgacgctacgcgtcctcaatagccgtgccatcggggtcgagaacgcatga

SEQ ID NO: 470324 - DNA, 318 bp, Shigella flexneri; identical to SEQ ID NO: 459634

SEQ ID NO: 470325 - DNA, 468 bp, Shigella flexneri
gtgaagctgcaacttgtcgccgtgggaacgaaaatgccggactgggtacaaaccggttttaccgagtacctgcgtcgttttccgaaagatatgcccttcgagctgattgaaattccggccggcaaacgcggcaagaatgcggacatcaagcgcatactcgacaaagagggtgagcagatgttggcggccgcaggcaaaaaccgcattgtcaccctcgatattccaggcaagccctgggatacgccgcagttagccgctgagctggaacgctggaagctggatggtcgcgacgtaagtctactgattggcgggcctgaagggttgtcgcctgcctgtaaagcggcggctgagcagagctggtcgctgtcggcgcttaccctcccccatccgctggttcgcgtgctggtcgcagagagtctgtaccgggcgtggagcatcaccaccaaccatccttatcaccgtgagtga

SEQ ID NO: 470326 - DNA, 1902 bp, Shigella flexneri
atgaaactacagaactcttttcgcgactatacggcagagtccgcgctgtttgtgcgccgggcgctggtcgcctttttggggattttgctgctgaccggcgtgcttatcgccaacctgtataatctgcaaattgttcgctttaccgactaccagacccgctctaatgaaaaccgcattaagctggtgcctatcgcgcccagccgcggcattatctacgaccgtaacggtatccctctggccctcaaccgcactatctaccagatagaaatgatgccggagaaagtcgataacgtgcagcaaacgctggacgctttgcgcagcgtggtagatctgaccgatgacgatattgctgcattccgaaaagagcgcgcacgttcacaccgtttcacctctattccggtgaaaactaacctaaccgaagtacaagtagctcgctttgccgtcaatcagtaccgttttccgggtgtcgaagttaaaggctataaacgtcgttactatccttacggttcggcgttgacccacgtcatcggctatgtgtcgaaaatcaacgataaagacgtcgaacgcctgaataatgacggcaaactggccaactatgcggcaacgcatgatattggtaagctgggcattgagcgttactatgaagacgtgctgcacggtcagaccggttatgaagaggttgaagttaacaaccgtgggcgtgttatccgccagttaaaagaagtaccaccgcaagccggacacgatatttacctgacgctggatctcaaactccagcaatatattgaaacgctgctggcgggtagccgcgcagctgtggttgttaccgaaccgcgtacaggtggggtgctggcgctggtttccacgcctagttatgacccaaacctgtttgttgacggtatctccagcaaagattattccgccttgctgaacgacccgaatacaccgctggtgaaccgcgccacacagggggtttatcctcccgcgtctacagttaaaccctatgtggcggtttcggcattaagcgccggggtgatcacgcgcaatacgacgctgtttgacccaggctggtggcaactaccagggtcggaaaaacgttatcgtgactggaaaaaatggggccacgggcgtctgaatgtcacaagatcgctggaagaatctgcggataccttcttctatcaggtggcctacgatatggggatcgatcgcctctccgaatggatgggtaaattcggttatggtcattacaccggtatcgacctggcggaagaacgttccggcaacatgcctacccgcgaatggaaacagaaacgctttaaaaaaccgtggtatcagggtgacaccattccggttggtatcggccagggttactggaccgcgaccccaatccagatgagtaaggcactgatgatcctgattaatgacggtatcgtgaaggttccgcatttgctgatgagcaccgccgaagacggcaaacaggtgccatgggtacaaccgtatgaaccgcccgtcggcgatattcattccggttactgggagctggcgaaagacggtatgtacggtgttgctaaccgccctaatggtacggcgaataaatactttgccagcgcaccgtacaaaattgcggcgaaatctggtaccgctcaggtcttcggtctgaaagcgaacgaaacctataatgcgcacaaaattgccgagcgtttacgtgaccacaaactgatgaccgcctttgcgccatacaacaatccgcaagtggctgtcgccatgattctggagaacggcggcgcgggtccggcggttggtacgctgatgcgccagatcctcgaccacattatgctgggtgataacaacaccgatctgcctgcggaaaatccagcggttgccgcagcggaggaccattaa

SEQ ID NO: 470327 - DNA, 1113 bp, Shigella flexneri
atgacggataatccgaataaaaaaacattctgggataaagtccatctcgatcccacaatgctgctgattttactggcattgctggtttacagcgccctggttatctggagcgccagcggtcaggatattggcatgatggagcgtaaaatcggccaaatcgcgatgggtctggtcatcatggtggtgatggcgcaaattcctccacgcgtttatgaaggctgggccccctatctctatatcatctgtattattttgctggtggcggtagatgctttcggagccatctctaaaggcgctcaacgctggctggacctcggtattgttcgttttcagccgtcggaaattgccaaaatagccgtaccactgatggttgcgcgctttatcaaccgcgacgtttgcccgccatcgttgaagaatactggcatcgcgctggtgctgatatttatgcccacgctgctggtggctgcacagcctgacctgggaacatcaatcctcgttgcgctttccggtctgtttgtactgttcctctctggccttagctggcgtctgattggcgtcgcagtagtgctggtagcggcgttcattccgattctgtggttcttcctgatgcatgattaccagcgccagcgcgtaatgatgctcctggacccggaatcagacccactcggcgcgggctatcacattattcagtctaaaattgctattggctccggcggattacgcggcaaaggctggctgcacggcactcagtcacagcttgaatttctccccgaacgccatactgactttatcttcgcggtactggcggaagagctgggattagtgggcattctgattctgctcgctctctacattctgctgatcatgcgcgggctgtggatagccgccagagcgcaaaccacctttggtcgcgtcatggctggtggcttaatgctgatattattcgtttatgtcttcgtaaatattggtatggtaagcggtattctgccggttgtaggggttccgctcccactggtcagttatggaggatcggcgctaattgtgctgatggctgggttcgggattgtaatgtcaatccacacccacaggaaaatgttgtcgaaaagcgtgtaa

SEQ ID NO: 470328 - DNA, 1089 bp, Shigella flexneri
atgcgtaagcagtggctcgggatctgcatcgcggcaggaatgctcgcggcatgtacaagcgatgatggtcagcaacagacggtaagtgtaccgcagcctgcggtatgtaacggccccatagttgaaattagcggggcggacccgcgtttcgaaccactgaacgcgacggcaaatcaggattaccagcgcgacggtaaaagctacaaaatcgtgcaggatccgtctcgatttagccaggcgggactggcggcaatctatgatgccgaaccaggcagtaacctgacggcctctggcgaagctttcgatccgacaaagctgacggcggcccatccaacgcttccgatccccagctacgccagaatcactaacctggctaacgggcgaatgatcgtggtgcgcattaatgatcgcggcccttacggcaacgaccgcgttatttcgctttctcgcgcggcagctgaccgtcttaacacgtcaaacaacaccaaagttcgtatcgatccgattattgtcgcccaggatggttcgctttctggtcctggtatggcttgtaccacagtcgccaaacagacttacgccctgcctgcacctcccgatttaagcggtggagcgggaacaagttcagtgtctggcccgcagggtgacattcttccggtcagtaattcgacgctaaaaagcgaagatccgaccggcgcgccggtaaccagtagcggtttcctcggcgctccaacgaccttagcgcctagtgtactggaaggcagcgaaccgacgcctgcgccacagcccgttgttacagcttcgtcgacaacgcctgcaacctcgcctgcaatggtgacaccgcaagccgcctcgcaaagcgccagcggcaactttatggtgcaagtcggggccgtaagcgatcaggctcgtgcgcaacagtaccaacagcaactgggacagaagttcggcgtccccggtcgcgtaactcaaaatggcgcggtctggcggatccagcttggcccattcgccagcaaagccgaagccagtaccttgcagcaacgtttgcaaaccgaagcccaattacagtcatttattactaccgcgcagtag

SEQ ID NO: 470329 - DNA, 1284 bp, Shigella flexneri
atgcctgccggtagtgcatttgctatagtagggcacttttttaattccatcacggatgtcgtagttcagaccatgaataccattttttccgctcgtatcatgaagcgcctggcgctcaccacggctctttgcacagcctttatctctgctgcacatgccgatgacctgaatatcaaaactatgatcccgggtgtaccgcagatcgatgcggagtcctacatcctgattgactataactccggcaaagtgctcgccgaacagaacgcagatgtccgccgcgatcctgccagcctgaccaaaatgatgaccagttacgttatcggccaggcaatgaaagccggtaaatttaaagaaactgatttagtcactatcggcaacgacgcatgggccaccggtaacccggtgtttaaaggttcttcgctgatgttcctcaaaccgggcatgcaggttccggtttctcagctgatccgcggtattaacctgcaatcgggtaacgatgcttgtgtcgccatggccgattttgccgctggtagccaggacgcttttgttggcttgatgaacagctacgttaacgcactgggcctgaaaaatacccacttccagacggtacatggtctggatgctgatggtcagtacagctccgcgcgagatatggcgctgatcggccaggcattgatccgtgacgtaccgaatgaatactcgatctataaagaaaaagaatttacgtttaacggtattcgccagctgaaccgtaacggcctgttatgggataacagcctgaatgtcgacggcatcaaaaccggacacactgacaaagcaggttacaatcttgttgcttctgcgactgaaggccagatgcgcttgatttctgcggtgatgggtggacgtacttttaaaggccgtgaagccgaaagtaaaaaactgctaacctggggcttccgtttcttcgaaaccgttaacccactgaaagtaggtaaagagttcgcctctgaaccggtttggtttagtgattctgatcgcgcttcgttaggggttgataaagacgtgtacctgaccattccgcgtggtcgcatgaaagatctgaaagccagctatgtgctgaacagcagtgaattgcatgcgccgctgcaaaagaatcaggtcgtcggaactatcaacttccagcttgatggcaaaacgatcgagcaacgccctctggttgtgttgcaagaaatcccggaaggtaacttcttcggcaaaatcattgattacattaaattaatgttccatcactggtttggttaa

SEQ ID NO: 470330 - DNA, 264 bp, Shigella flexneri; identical to SEQ ID NO: 299

SEQ ID NO: 470331 - DNA, 642 bp, Shigella flexneri
ttgtatcaggataaaattcttgtccgccagctcggtcttcagccttacgagccaatctcccgggctatgcatgaattcaccgatacccgcgataatagtacccttgatgaaatctggctggtcgagcactatccggtattcacccaaggtcaggcaggaaaagcggagcacattttaatgccgggtgatattccggtgatccagagcgatcgcggtgggcaggtgacttatcacgggccgggacaacaggtgatgtatgtgttgcttaacctgaaacgccgtaaactcggtgtgcgtgaactggtgaccttgcttgagcaaacagtggtgaataccctggctgaactgggtatagaagcgcatcctcgggctgacgcgcctggtgtctatgtcggggaaaagaaaatttgctcactgggtttacgaattcgacgcggttgttcattccacggtctggcattaaacgtcaatatggatctttcaccatttttacgtattaatccttgtgggtatgccggaatggaaatggctaaaatatcacaatggaaacccgaagcgacgactaataatattgctccacgtttactggaaaatattttagcgctactaaacaatccggacttcgaatatattaccgcttaa

SEQ ID NO: 470332 - DNA, 954 bp, Shigella flexneri
gtggatagtaataatcaaattgaaccctgtttaagcagaaagtcgtcagaaggtaaaccacaaatatttacaaccttacgaaatattgatcttaaccttctgactatttttgaagctgtatatgtacataaagggatcgttaatgcagcgaaagtgcttaatctgaccccctcggcaatcagtcagtctattcagaaactgcgcgttatattccctgacccattgtttattcgcaaaggccagggtgtcactcctaccgcatttgcgatgcatctacatgagtatatcagtcagggccttgagtccattcttggcgcgctggatatcgaaggaagctatgataagcaacgaacgataactattgcgaccactccctcggtcggagccctggtccttcctgtcatctatcgggcgattaaaactcactatccgcagcttttactgcgcaacccgcccatcagcgacgcggaaaaccaactcagtcagtttcaaaccgatctcatcatcgataacatgttttgcaccaatcgtacggtgcaacatcatgttctgttcaccgacaatatggtgttaatttgccgcaagggaaatccactactctctttagaagatgacagagagactatcgacaacgctgcgcatgtacttctgttaccggaagggcaaaatttcagcggtctgcggcagagagttcaagagatgtttccggaccggcaaatcaatttcaccagctacaacattttgacaatcgctgcactggttgccaacagtgacatgttagcgattattcccagccgtttttataacctgtttagtcgttgctggccgctggaaaaactgccttttccgtccttaaatgaggagcaaatagatttctctatccactacaacaaattcatcctgcgtgatcccatcctgcacggagtaatagatgttatccgtaatgcattttga

SEQ ID NO: 470333 - DNA, 966 bp, Shigella flexneri
atgagtaaacccattgtgatggaacgcggtgttaaataccgcgatgccgataagatggcccttatcccggttaaaaacgtggcaacagagcgcgaagccctgctgcgcaagccggaatggatgaaaatcaagcttccagcggactctacacgtatccagggcatcaaagccgcaatgcgcaaaaatggcctgcattctgtctgcgaggaagcctcctgccctaacctggcggaatgcttcaaccacggcacagcaacgtttatgatcctcggcgctatttgtacccgccgttgtccgttctgtgatgttgcccacggtcgcccggtagctcctgatgccaatgaaccagtgaaactggcgcagaccattgccgatatggcgctgcgttatgtggttatcacctccgttgaccgtgatgacctgcgcgatggcggtgcccaacactttgcggattgtattactgccattcgggaaaaaagcccgcaaatcaaaattgaaactctggtgccggatttccgcggtcgaatggatcgtgctctggatattctgactgcaacgcccccagatgtgttcaaccataacctggaaaacgtaccgcgtatttaccggcaggtacggcctggcgcagattacaactggtcgctgaagctgctggaacgctttaaagaagcgcatccggaaatcccgaccaagtctggtctgatggtggggctgggtgaaaccaatgaagaaattattgaggtaatgcgcgacctgcgccgtcatggtgtgacgatgttaacgctggggcaatatttgcagccaagccgccatcacctgccggttcaacgttacgttagcccggatgagttcgacgaaatgaaagccgaagcgctggcgatgggctttacccatgctgcatgcggtccgtttgtccgctcttcttaccacgccgatttgcaggcgaaaggaatggaagttaagtaa

SEQ ID NO: 470334 - DNA, 204 bp, Shigella flexneri; identical to SEQ ID NO: 294

SEQ ID NO: 470335 - DNA, 789 bp, Shigella flexneri
atgctggttgctgcaggacagtttgctgttacatctgtgtgggaaaagaacgctgagatttgtgcctcgttgatggcgcaggcggcggaaaacgacgtatcgctgtttgtcctgccggaagcattgctggcgcgcgatgatcatgatgcagatctatcggttaaatcagcacagctgctggaaggcgaattcctcggacgtttacggcgagaaagtaaacgtaacatgatgacgacaattctgacgattcatcttccttcaacgccggggcgcgcatggaatatgctggtggcacttcaggcaggaaacatcgtcgcccgttatgccaaactgcatctctatgatgcatttgccattcaggaatcacgccatgttgatgctggtaatgaaatagctccgttactggaggtggaagggatgaaggtcggtctgatgacctgttatgacttacgctttccagagctggcgctggcacaggctttacagggagctgaaatcctggtacttcctgccgcctgggttcgtgggccgctcaaagagcatcactggtcaacgttgcttgccgctcgtgcgctggataccacctgttatatggtggcggcgggggagtgcgggaacaaaaatatcgggcaaagccggattatagatccctttggcgtcaccattgcggcagcgtcagaaatgcctgcactcattatggcggaagtgacgcccgaacgtgtgcgtcaggtgcgcgcgcaactgcccatcttaaacaaccgtcgctttgcgccgccgcaattattatga

SEQ ID NO: 470336 - DNA, 384 bp, Shigella flexneri
gtgttacaacttcttttagcagtttttattggcggtggtacgggaagcgtagcgagatggctgttaagtatgcgatttaacccgctgcatcaggcgattccgttggggacgctggcagcaaacctgattggggcattcatcataggaatgggattcgcctggttcagcaggatgacgaacattgatccagtgtggaaagtattaatcaccaccggattttgtggcggtctaacaaccttctcaacattttcggcagaagtggtgtttttgttacaagagggccgctttggctgggcattactgaacgttttcgtcaaccttctggggtcttttgccatgaccgcactggcattctggctgttttcggcctcaaccgtacactaa

SEQ ID NO: 470337 - DNA, 210 bp, Shigella flexneri; identical to SEQ ID NO: 291

SEQ ID NO: 470338 - DNA, 561 bp, Shigella flexneri
atgaacgtgagtaaatatgtcgctatcttttcctttgtttttattcagttaatcagcgttggtaaagtttttgctaacgcagatgagaggatgacaacgtttagagaaaatattgcacaaacctggcaacagcctgaacattatgatttatatattcctgccatcacctggcatgcacgtttcgcttacgacaaagaaaaaaccgatcgctataacgagcgaccgtggggtggcggttttggcctgtcgcgttgggatgaaaaaggaaactggcatggcctgtatgccatggcatttaaggactcgtggaacaaatgggaaccgattgccggatacggatgggaaagtacctggcgaccgctggcggatgaaaattttcatttaggtctgggattcaccgctggcgtaacggcacgcgataactggaattacatccctctcccggttctactgccattggcctccgtgggttatggcccagtgacttttcagatgacctacattccgggtacctacaacaatggcaatgtgtactttgcctggatgcgctttcagttttga

SEQ ID NO: 470339 - DNA, 1386 bp, Shigella flexneri
atgctgacattcattgaactccttattggggttgtggttattgtgggtgtggctcgctacatcattaaagggtattccgccactggtgtgttatttgtcggtggcctgttattgctgattatcagtgccattatggggcacaaagtgttaccgtccagccaggcttcaacaggctacagcgccacggatatcgttgaatacgttaaaatattactaatgagccgcggcggcgacctcggcatgatgattatgatgctgtgtggctttgccgcttacatgacccatatcggcgcgaatgatatggtggtcaagctggcgtcaaaaccattgcagtatattaactccccttacctgctgatgattgccgcctattttgttgcttgtctgatgtcactggccgtctcttccgcaaccggtctgggtgttttgctgatggcaaccctgtttccggtgatggtaaacgttggtatcagtcgtggcgcagcagctgccatttgtgcctccccggcggcgattattctcgcaccgacttcaggggatgtggtgctggcggcgcaggcttccgaaatgtcgctgattgacttcgccttcaaaacgacgctgcctatctcaattgctgcaattatcggcatggcgatcgcccacttcttctggcaacgttatctggataaaaaagagcacatctctcatgaaatgttagatgtcagtgaaatcaccaccactgcccccgcgttttatgccattttgccgttcacgccgatcatcggtgtactgatttttgacggtaaatggggtccgcaattacacatcatcactattctggtgatttgtatgctgattgcctccattctggagttcctccgcagctttaatacccagaaagttttctctggtctggaagtggcttatcgcgggatggcagatgcgtttgctaacgtggtgatgctgctggttgccgctggggtattcgctcaggggcttagcaccatcggctttattcaaagtctgatttctatcgctacctcgtttggttcggcgagtatcatcctgatgctggtattggtgattctgaccatgctggcggcagtcacgaccggttcaggcaatgcgccgttttatgcgtttgttgagatgatcccgaaactggcgcactcttccggcattaacccggcgtatttgactatcccgatgctgcaggcgtcaaacctgggtcgtaccctatcacccgtttctggcgtagtcgttgcggttgccgggatggcgaaaatctcaccatttgaagtcgtaaaacgcacctcggtgccggtgcttgttgggctagtgattgttatcgttgctacagagctgatggtgccaggaacggcagcagcggtcacaggcaagtaa

SEQ ID NO: 470340 - DNA, 303 bp, Shigella flexneri
atgctggaaagtattgatagcgccagccagaagcaaattgatgagatgtttaatgcctatgctcgcggtgaacccaaagacgaactgccgaccggcattgaccccttgacgctaaacgcggtgcgaaaactgtttaaagagcctggtgtgcaacatacggcagaaacggtggcgcaggcactgaccatcagccgcaccactgccaggcgttatcttgaatattgcgccagccgccatctgattattgctgaaattgttcacggcaaagttggcagaccacaacgcatataccacagtgggtga

SEQ ID NO: 470341 - DNA, 480 bp, Shigella flexneri
atgacacccaaacaaattactgaactggatggaatgccagggacaatacagggggtgcataaacgagcaaagaaagaaggatggccgaagcgttcacaagaagggcgtcgcgggcctggggttgaatatatcccggcaataccggctatgcaaaaaattgctatcgaagaaatgaatgctgatacattgaaaatgttctccctgttaatcaataaactaggagaaaatgaagtccgagagatagagctaaacatggctaaatatgggctttccggattaatgcaagaacgcccctccatctccgttgacaccctattggcaacgctgggtattgatcgccaaacactacaaacagctttggcgctgcataaattacctccagaaactcgccaagagattttgtcaatgtatggtgttcataaacaggaagagcctgtagctcctttgttggaaccacaagatgcgaaaaaagccgtataa

SEQ ID NO: 470342 - DNA, 2115 bp, Shigella flexneri
atggctcgtacaacacccatcgcacgctaccgtaacatcggtatcagtgcgcacatcgacgccggtaaaaccactactaccgaacgtattctgttctacaccggtgtaaaccataaaatcggtgaagttcatgacggcgctgcaaccatggactggatggagcaggagcaggaacgtggtattaccatcacttccgctgcgactactgcattctggtctggtatggctaagcagtatgagccgcatcgcatcaacatcatcgacaccccggggcacgttgacttcacaatcgaagtagaacgttccatgcgtgttctcgatggtgcggtaatggtttactgcgcagttggtggtgttcagccgcagtctgaaaccgtatggcgtcaggcaaacaaatataaagttccgcgcattgcgttcgttaacaaaatggaccgcgtgggtgcgaacttcctgaaagttgttaaccagatcaaaacccgtctgggcgcgaacccggttccgctgcagctggcgattggtgctgaagaacatttcaccggtgttgttgacctggtgaaaatgaaagctatcaactggaacgacgctgaccagggcgtaaccttcgaatacgaagatatcccggcagacatggttgaactggctaacgaatggcaccagaacctgatcgaatccgcagctgaagcttctgaagagctgatggaaaaatacctgggtggtgaagaactgactgaagcagaaatcaaaggtgctctgcgtcagcgcgttctgaacaacgaaatcatcctggtaacctgtggttctgcgttcaagaacaaaggtgttcaggcgatgctggatgcggtaattgattacctgccatccccggttgacgtacctgcgatcaacggtatcctggacgacggtaaagacactccggctgaacgtcacgcaagtgatgacgagccgttctctgcactggcgttcaaaatcgctaccgacccgtttgttggtaacctgaccttcttccgtgtttactccggtgtggttaactctggtgataccgtactgaactccgtgaaagctgcacgtgagcgtttcggtcgtatcgttcagatgcacgctaacaaacgtgaagagatcaaagaagttcgcgcgggcgacatcgctgctgctatcggtctgaaagacgtaaccactggtgacaccctgtgtgacccggatgcgccgatcattctggaacgtatggaattccctgagccggtaatctccatcgcagttgaaccgaaaaccaaagctgaccaggaaaaaatgggtctggctctgggccgtctggctaaagaagacccgtctttccgtgtatggactgacgaagaatctaaccagaccatcatcgcgggtatgggcgaactgcacctcgacatcatcgttgaccgtatgaagcgtgaattcaacgttgaagcgaacgtaggtaaaccgcaggttgcttaccgtgaaactatccgccagaaagttaccgatgttgaaggtaaacacgcgaaacagtctggtggtcgtggtcagtatggtcatgttgttatcgacatgtacccgctggagccgggttcaaacccgaaaggctacgagttcatcaacgacattaaaggtggtgtaatccctggcgaatacatcccggccgttgataaaggtatccaggaacagctgaaagcaggtccgctggcaggctacccggtagtagacatgggtattcgtctgcacttcggttcttaccatgacgttgactcctctgaactggcgtttaaactggctgcttctatcgcctttaaagaaggctttaagaaagcgaaaccagttttgcttgagccgatcatgaaggttgaagtagaaactccggaagagaacaccggtgacgttatcggtgacttgagccgtcgtcgtggtatgctcaaaggtcaggaatctgaagttactggcgttaagatccacgctgaagtaccgctgtctgaaatgttcggatacgcaactcagctgcgttctctgaccaaaggtcgtgcatcatacactatggaattcctgaagtatgatgaagcgccgagtaacgttgctcaggccgtaattgaagcccgtggtaaataa

SEQ ID NO: 470343 - DNA, 471 bp, Shigella flexneri
atgccacgtcgtcgcgtcattggtcagcgtaaaattctgccggatccgaagtttggatcagaactgctggctaaatttgtaaatatcctgatggtagatggtaaaaaatctactgctgaatctatcgtatacagcgcgctggagaccctggctcagcgctctggtaaatctgaactggaagcattcgaagtagctctcgaaaacgtgcgcccgactgtagaagttaagtctcgccgcgttggtggttctacttatcaggtaccagttgaagtccgtccggttcgtcgtaatgctctggcaatgcgttggatcgttgaagctgctcgtaaacgcggtgataaatccatggctctgcgcctggcgaacgaactttctgatgctgcagaaaacaaaggtactgcagttaagaaacgtgaagacgttcaccgtatggccgaagccaacaaggcgttcgcacactaccgttggtaa

SEQ ID NO: 470344 - DNA, 375 bp, Shigella flexneri; identical to SEQ ID NO: 459879

SEQ ID NO: 470345 - DNA, 288 bp, Shigella flexneri
atgctgcacacgttacatcgttcaccctggctgacggattttgctgcgctgctgcgtctgctcagtgaaggagacgaactgctattattgcaagatggcgtaactgccgcagttgacggtaaccgctaccttgaaagtctgcgtaatgcccccattaaggtctatgccctgaacgaagaccttattgcccgcggtttgactggtcaaattttgaacgacatcattcccattgactatactgatttcgtcagacttacggttaagcactccagccagatggcctggtga

SEQ ID NO: 470346 - DNA, 360 bp, Shigella flexneri
atgaaacgaattgcgtttgttttttctactgcacctcatggtacagctgctggtcgggaaggtttagatgctttactggcaacttccgcattaactgacgatctggccgtcttctttattgctgatggcgtttttcagctgctgtcaggacaaaagcccgatgcagtgctggcgcgtgattacattgccacttttaaattgttgagtctgtacgacattgaacagtgctgggtttgtgcggcttcactgcgcgaacgcgggttagatccgcagacaccctttgttgtcgaagccacgccgctcgaagcagatgccttacgccgcgaactcgccaactacgatgttattttgaggttttga

SEQ ID NO: 470347 - DNA, 387 bp, Shigella flexneri
atgcgttttgccatcgtggtgaccgggccagcatacggtacgcaacaggcgagtagtgcttttcagtttgcgcaggcgctgatagcagaaggccataagttaagcagcgtctttttctatcgggaaggggtctataacgctaaccaactgacctcaccggcaagcgacgaatttgaccttgtgcgcggctggcaacagttgaatgcgcaacatggtgtggcgctgaatatctgcgtagcggcagcgttacgccgcggtatcgtcgatgaaactgaagcaggaaggctggggctggcttcgtcaaaccttcagccgggatttaccttaagcggacttggcgcgctggcggaagcctcgctgacctgtgacagggtggtacagttctga

SEQ ID NO: 470348 - DNA, 723 bp, Shigella flexneri
atgtccaggtcgcttttaaccaacgaaaccagtgagttggatttactggatcaacgtcctttcgaccagaccgattttgatattctgaaatcctacgaagcggtggtggacgggttagcgatgcttattggctcccactgtgaaatcgttttgcactctttgcaggatctaaaatgttcagccattcgcattgctaacggtgaacatacaggccggaagattggttcgccaattactgacctggcgctacgtatgctgcacgatatggcgggagcggatagcagcgtttctaaatgctactttactcgcgccaaaagcggcgtattaatgaagtccctgactatcgcgattcgtaaccgcgaacagcgtgtaattggtctgctgtgcatcaatatgaatcttgatgttcccttctcgcagattatgagcacttttgtgccgccagaaaccccggatgtcggttcaagcgtcaactttgcctcttctgttgaagatctggttacccaaacgctggagttcaccatcgaagaagtgaatgccgatcgcaatgtttctaataacgccaaaaatcgtcagatcgtgctgaatctctacgagaaagggatcttcgatattaaagatgcgatcaaccaggttgctgaccgcctgaacatctccaaacacactgtctatctctacatccgccagttcaagagcggtgattttcaggggcaagataagtaa

SEQ ID NO: 470349 - DNA, 813 bp, Shigella flexneri
atgaaatcactgtttaaagtaacgctactggcgaccacaatggccgttgccctgcatgcaccaatcacttttgctgctgaagctgcaaaacctgctacaactgcagacagcaaagcatcgttcaaaaatgacgatcagaaatcagcttatgcactgggtgcttcgctgggtcgttacatggaaaactctcttaaagaacaagaaaaactgggcatcaaactggataaagatcagctgatcgctggtgttcaggatgcatttgctgataagagcaaactctccgaccaagagatcgaacagactctgcaagcattcgaagctcgcgtgaagtcttctgctcaggcgaagatggaaaaagacgcggctgataacgaagcaaaaggtaaagagtaccgcgagaaatttgccaaagagaaaggtgtgaaaacctcttcaactggtctggtttatcaggtagtagaagccggtaaaggcgaagcaccgaaagacagcgatactgttgtagtgaactacaaaggtacgctgatcgacggtaaagagttcgacaactcttacacccgtggtgaaccgctttctttccgtctggacggtgttatcccgggttggacagaaggtctgaagaacatcaagaaaggcggtaagatcaaactggttattccaccagaactggcttacggcaaagcgggtgttccggggatcccaccgaattctaccctagtgtttgacgtagagctgctggatgtgaaaccagcgccgaaggctgatgcaaagccggaagctgatgcgaaagccgcagattctgctaaaaaataa

SEQ ID NO: 470350 - DNA, 219 bp, Shigella flexneri; identical to SEQ ID NO: 459885

SEQ ID NO: 470351 - DNA, 591 bp, Shigella flexneri
atgaaagtagcaaaagacctggtggtcagcctggcctatcaggtacgtacagaagacggtgtgttggttgatgagtctccggtgagtgcgccgctggactacctgcatggtcacggttccctgatctctggcctggaaacggcgctggaaggtcatgaagttggcgacaaatttgatgtcgctgttggcgcgaacgacgcttacggtcagtacgacgaaaacctagtgcaacgtgttcctaaagacgtatttatgggcgttgatgaactgcaggtaggtatgcgtttcctggctgaaactgaccagggtccggtaccggttgaaatcactgcggttgaagacgatcacgtagtggttgatggtaaccacatgctggccggtcagaacctgaaattcaacgttgaagttgtggcgattcgcgaagcgaccgaagaagaactggctcatggccacgttcacggcgcgcacgatcatcaccacgatcacgaccacgacggttgctgcggcggtcatggccacgatcacggtcatgaacacggtggcgaaggctgctgtggcggtaaaggcaacggcggttgtggttgccactaa

SEQ ID NO: 470352 - DNA, 201 bp, Shigella flexneri
atggcaatccgaaaacgttttatagcgggcgcaaaatgcccggcctgtcaggcgcaggattcaatggcgatgtggcgcgaaaataatattgatattgttgaatgtgttaagtgcggacatcagatgcgagaagcagacaaagaagcccgcgatcacgttcacaaagatgagcaagtgatcgggatttttcatccggactag

SEQ ID NO: 470353 - DNA, 1674 bp, Shigella flexneri
gtgttgggatatttgctggcggggattgcaattggcccgtgggggctggggtttattagcgacgtcgatgagatcctccacttttcggaactcggcgtggtattcctgatgtttatcatcggccttgagttgaatccctccaaactttggcaactgcggcgttcgatttttggcgtaggcgcggcacaggtgctgttaagcgcggcgttgctggcgggattattgatgctgacggatttcgcctggcaggcggcggtggtcggtggcattggctttgcgatgtcttcaactgcaatggcgttgcaattgatgcgtgagaaagggatgaatcgcagcgaatccggccagctcgggttttcggttctgctgtttcaggatctggcagtgatcccagcactggcgttagtgccgttgttggcggggtcggcagacgaacatttcgactggatgaagatcggcatgaaggtgctggagtttgtcggcatgctgattggtgggcgctatttactgcgtccggtattccgctttattgcagcttctggcgtgcgggaagtgttcaccgccgcgacgctgctgctggtgttgggttccgcattgtttatggatgcgctggggctgtcgatggcgctcggtacatttattgcgggcgtgctgctggcggaaagtgaatatcgccatgaactggaaacggctatcgatcccttcaaaggcttgctgctcggtttgttctttatctctgtcggcatgtcgctcaacctcggggtgctttatacccatctgttgtgggtagtgataagcgtggttgtgctggtggcggtgaaaattctcgtgctgtatctgctggcgcgattgtatggcgtgcgtagctcagagcggatgcagtttgctggcgtgttgagtcagggcggtgagtttgcctttgtcctcttttctaccgcttcttcacaacgtttattccagggcgaccagatggcgccgttgctgatgaagctggtggataaatggctatcccgccagtttaacggaccggaagaagaagacgaaaaaccgtgggtcaacgatgataaaccccaggtcattgtcgtgggcttcgggcgttttggtcaggtgattggtcgtttgctgatggcaaataaaatgcgcattaccgtgctggagcgggatatcagcgccgttaacctgatgcgtaaatatggctacaaagtttattacggcgacgccacgcaggtcgatcttttacgttctgcgggtgcagaggccgctgagtctatcgtcattacctgtaacgagccggaagacaccatgaagctggtggaaatatgccagcagcactttccgcatttgcatattcttgcgcgagcgcgcggacgtgtggaagcgcatgagttattacaggcaggggtgacgcagttttcccgtgaaacattctccagtgcgttagagctggggcgcaagacgctggtcacgcttggcatgcatccgcatcaggcacagcgggcgcaactgcattttcgccgcctggatatgcgaatgctgcgggagttaatcccgatgcatgctgataccgtacaaatttctcgcgccagggaagcccgacgcgaactggaagagattttccagcgtgaaatgcaacaagaacgacgccagctggacggctgggatgaatttgagtag

SEQ ID NO: 470354 - DNA, 123 bp, Shigella flexneri
atggaaggttccgattttttactcgcaggagtgctgtttctcttcgcggctggggattggcgctgtgttgggatatttgctggcggggattgcaattggcccgtgggggctggggtttattag

SEQ ID NO: 470355 - DNA, 552 bp, Shigella flexneri
atgtctcagccagcgaaagttttgctgctgtatgcccatccggaatctcaggactcggtggcaaaccgggtactgcttaaaccggccacgcagctcagcaatgttaccgtgcacgacctttacgcgcactatcccgatttttttattgatatcccccgtgagcaggcattactgcgcgagcacgaggtgattgtctttcagcatcctctttatacctatagctgcccggcgctactgaaagagtggctggaccgggtattaagtcgtggttttgccagcgggccgggaggaaaccaactggcgggaaagtactggcgtaacgtgattaccaccggcgagccggaaagtgcttaccgttatgacgcgctgaatcgctacccgatgagcgatgtgctgcgcccctttgaactggcggcgggcatgtgccggatgcattggttaagtcccatcattatttactgggcgagacggcaaagcgcaaaggagctggcgagccacgccagagcctacggtgactggttggcaaatccgctgtctccaggaggccgctga

SEQ ID NO: 470356 - DNA, 1914 bp, Shigella flexneri
atgattgttttctcctcgttacaaattcgtcgcggcgtgcgcgtcctgctggataatgccaccgccaccatcaaccccgggcagaaagtcggcctggtgggtaaaaacggctgtggtaaatctaccctgctggcattgctgaaaaatgaaatcagcgccgacggcggcagctacacctttccgggaagctggcaactggcgtgggtgaatcaggaaacgccagcgttaccgcaagcggcgctggaatatgtcattgacggcgaccgtgaatatcgtcaactggaagcgcagctgcacgacgccaacgaacgtaacgacgggcacgccattgcgaccattcatagcaagctggatgctattgacgcatggagtattcgctcccgtgccgccagcctgctgcacggcctcggtttcagcaatgaacaactggagcgcccggtaagtgatttctccggtggctggcgtatgcgtcttaaccttgcccaggcgctgatttgccgttcagacttgctgctgctcgacgaaccgactaaccacctcgatctcgatgccgttatctggctggaaaaatggttgaagagctatcagggcacgctgatcctgatctctcacgaccgcgacttcctcgatccgatcgttgataaaattattcatatcgaacaacaaagcatgttcgagtacaccggcaactacagttcgtttgaagtacagcgcgccacccgtctggcgcagcaacaagcgatgtacgaaagccagcaggaacgcgtggcacatctgcaaagttatatcgatcgtttccgtgccaaagccaccaaagcgaagcaggcccagagccgcattaagatgctggaacgtatggagctgattgcccccgcacacgtcgacaacccgttccgctttagcttccgcgcgccggaaagcctgccaaatccgttactgaagatggaaaaggtcagcgcaggctatggcgatcgcattattctcgactcgattaaattgaatctggtccccggctcgcgcattggtctgttaggccgcaacggcgcaggtaaatcgacattaatcaaactgttagccggtgaacttgcgccagtcagcggtgaaattggtctggcgaaagggatcaagctcggctacttcgcccagcatcaacttgaatacctgcgcgccgacgaatcacctattcaacatctggcacgtttagcgccgcaggagctggaacaaaaactgcgtgactacctcggcggctttggtttcctgggcgataaagtaaccgaagaaacgcgccgcttctccggtggggaaaaagcccgcctggtgctggcattaattgtctggcagcgtccgaatctgctgctgctcgacgaaccgactaaccaccttgacctcgacatgcgtcaggcactcaccgaagcattaatcgagtttgaaggcgcgctggttgtcgtttcgcacgaccgtcatttgctgcgttccaccactgacgatctctacctggttcacgatcgtaaagtcgaaccgttcgacggcgatctggaagattatcaacagtggttgagcgacgtacaaaagcaggaaaaccagaccgacgaagcgccaaaagagaacgcgaacagcgcccaggcacgtaaagatcagaagcgtcgggaagcggagctgcgtgcgcaaacccagccgctgcgtaaagagattgcccgtctggaaaaagagatggagaagctgaacgcgcaactggcgcaggcggaagagaaactcggcgacagcgaactgtatgaccagagccgtaaagcggagttgaccgcctgcctgcaacagcaagccagcgccaaatccggcctggaagagtgcgaaatggcgtggctggaagcccaggagcagcttgagcagatgctgctggaaggccaaagcaactga

SEQ ID NO: 470357 - DNA, 1023 bp, Shigella flexneri
atggcgcagataacgacgaccgatgccaatgaatttagcagcagtgctgaattcacccctatgcgcggctttagcaattgtcatctacaaactatgctgccgcgtttgtttcgtcgtcaggtgaaattcaccccgtactggcagcggctggagttgcccgacggcgattttgtcgatctcgcgtggagtgaagaccccgcacaggcgaaacataaaccgcgtttagtggtgtttcacgggctggaaggcagtctcaatagcccttacgcccacggtctggttgaggcggcgcaaaagcgcggctggctgggcgtggtgatgcattttcgcggatgcagcggtgaaccaaaccgtatgcaccgcatttaccattcgggcgaaaccgaagacgccagttggtttttacgctggctgcaacgcgaatttggtcatgcgccaacggctgccgtcggctattcgctcggcggtaatatgctggcctgtttgctggcaaatgaaggcaatgatctcccggttgatgcggcggtgattgtctctgcgccgtttatgctggaagcctgtagctatcatatggaaaagggcttttcccgcgtttatcagcgttacttgctgaacctgttaaaagccaatgccgcgcgcaagctggcagcctaccccggaacgctgccgattaatctcgcgcagttaaaatcggtacgtcgcatccgtgaatttgacgatctaatcaccgccagaattcacggctacgccgacgctatcgactattatcgtcagtgtagcgccatgccaatgctgaaccggatcgccaaaccgacgctgattattcacgccaaagacgatccgtttatggatcatcaggtgatcccaaaaccggaaagtctcccctcgcaggtggagtatcaactgactgaacatggcggtcatgttggctttattggcggtacattacttcatccgcaaatgtggctggagtcacgcattcctgactggttaacaacgtatctggaggcgaaatcatgttga

SEQ ID NO: 470358 - DNA, 219 bp, Shigella flexneri; identical to SEQ ID NO: 459892

SEQ ID NO: 470359 - DNA, 870 bp, Shigella flexneri
atgtctgccaaacatccggtcattgcggtaacaggatccagcggcgcggggaccaccaccaccagcctcgcgtttcgtaaaatattcgcgcagttaaatctgcatgcagctgaggtggaaggcgacagttttcaccgttacacccgcccggaaatggacatggcgatccgcaaagcgcgcgacgccgggcggcatatcagctacttcggccccgaagcgaacgacttcggcctgctggaacaaaccttcattgaatacggtcagagcggcaaagggaaatctcgcaaatatctgcatacctacgacgaagccgtaccctggaatcaggtaccgggaacattcaccccctggcaacctttaccagaacccactgatgtactgttttatgaaggtttacacggcggcgtagtcacgccacagcataacgttgcgcagcatgtggacttactggtcggcgtagtgcctatcgttaaccttgagtggattcaaaaactgatccgcgacaccagcgagcgcgggcactcacgagaaacagtgatggactcggtagtgcgttcaatggaagactatatcaactacatcacaccgcagttttcccgcacccatcttaacttccagcgcgttcccaccgtcgacacttcaaacccgttcgcggcaaaaggtatcccgtcgctggatgaaagctttgtggtgatccattttcgtaatctggaagggatcgatttcccttggctgctggcgatgttgcaaggctcattcatttcccacatcaatacgttagtggtacctggcggcaaaatggggctggcaatggaattaattatgctgccgctggtgcaacgattgatggaaggaaagaaaatcgagtaa

SEQ ID NO: 470360 - DNA, 405 bp, Shigella flexneri
atgcaagcgcgagtgaagtgggtcgaagggttaacttttctgggcgaatccgcctctggtcaccagattttaatggacggcaactcaggcgataaagcaccaagtccgatggaaatggtgttgatggcggcgggtggttgcagtgccatcgatgtggtttcgatcctgcaaaaagggcgtcaggatgtggtcgattgtgaagtaaaattgacctctgaacgccgcgaagaggcaccacgcctgtttacgcacattaatctgcattttatcgtcaccggtcgcgacctgaaagacgcagcggttgcgcgtgcggttgatctctctgccgagaaatattgttcagtggcgttgatgctggaaaaagcggtgaatattactcactcgtatgaagtggttgccgcgtga

SEQ ID NO: 470361 - DNA, 633 bp, Shigella flexneri
atggtgcttggcaaaccgcaaacagacccgactctcgaatggttcttgtctcattgccacattcataagtacccatccaagagcacgcttattcaccagggtgaaaaagcggaaacgctgtactacatcgttaaaggctctgtggcagtgctgatcaaagacgaagagggtaaagaaatgatcctctcctatctgaatcagggtgattttattggcgaactgggcctgtttgaagagggccaggaacgtagcgcatgggtacgtgcgaaaaccgcctgtgaagtggctgaaatttcgtacaaaaaatttcgccaattgattcaggtaaacccggacattctgatgcgtctgtctgcacagatggcgcgtcgtctgcaagtcacttcagagaaagtgggcaacctggcgttcctcgacgtgacgggccgcattgcacagactctgctgaacctggcaaaacaaccagatgctatgactcacccggacggtatgcaaatcaaaattacccgtcaggaaatcggtcagattgtcggctgttctcgtgaaaccgtgggacgcattctgaagatgctggaagatcagaacctgatctccgcacacggtaaaaccatcgtcgtttacggcactcgttaa

SEQ ID NO: 470362 - DNA, 2091 bp, Shigella flexneri
atgtggcgcagactgatttatcaccccgatatcaactatgcacttcgacaaacgctggtgctatgtttgcccgtggccgttgggttaatgcttggcgaattacgattcggtctgctcttctccctcgttcctgcctgttgcaatattgcgggccttgatacgcctcataaacgttttttcaaacacttaatcattggtgcgtcgctgtttgccacctgtagcttactgacacagctgctactggtaaaagatgttcccctgccctttttgctgaccggattaacgctggtacttggcgtcactgctgagctggggccattgcacgcaaaattgcttcctgcatcgctgctcgccgccatttttaccctcagtctggcgggatacatgccggtctgggaaccattgctcatctatgcgttgggcactctctggtacggattgtttaactggttttggttctggatctggcgcgaacaaccgctgcgcgagtcactacgtctgctgtaccgtgaactggcagattattgtgaagccaaatacagcctgcttacccagcacaccgatcctgaaaaagcgctgccaccgctgctggtgcgccagcaaaaagcggtcgatttaattactcagtgctatcagcaaatgcatatgctttccgcgcaaaacaataccgattacaagcggatgctgcgtattttccaggaggcgctggatttgcaggaacatatttcggtcagtttgcatcagccggaagaggtgcaaaaactggtcgagcgtagccatgcggaagaagttatccgctggaatgcgcaaaccgtcgccgctcgcctgcgcgtgctggctgatgacattctttaccatcgcctgccaacgcgttttacgatggaaaagcaaattggcgcactggaaaaaatcgcccgccagcatccggataatccggttgggcaattctgctactggcatttcagccgcatcgcccgcgtgctgcgcacccaaaaaccgctctatgcccgtgacttactggccgataaacagcggcgaatgccgttgcttccggcactgaaaagttatctgtcactaaagtctccggcgctacgcaatgccggacgactcagtgtgatgttaagcgttgccagcctgatgggcaccgtgctgcatctgccgaagtcgtactggatcctgatgacggtattgctggtgacacaaaatggctatggcgcaacccgtctgaggattgtgaatcgctccgtgggaaccgtggtcgggttaatcattgcgggcgtagcgctgcactttaaaattcccgaaagttacaccctgacgttgatgctgattaccaccctcgccagctacctgatattgcgcaaaaactacggctgggcaacggtcggttttactattaccgcagtgtataccctgcaactgttgtggctgaacggtgagcagtacatccttccacgtcttatcgataccattattggttgtttgatcgctttcggtggtaccgtctggctgtggccgcagtggcagagcgggttattgcgtaaaaacgcccatgatgctttagaagcctatcaggaagcgattcgcttgattctgagcgaggacccgcaaccaacgccactggcctggcagagaatgcgggtaaatcaggcgcataacactctgtataactcattgaatcaggcgatgcaggaaccggcattcaacagccattatctggcagatatgaaactgtgggtaacgcacagccagtttattgttgagcatattaatgccatgaccacgctggcgcgggaacaccgggcattgccacctgaactggcacaagagtatttacagtcttgtgaaatcgccattcagcgttgtcagcagcgactggagtatgacgaaccgggtagttctggcgatgccaatatcatggatgcgccggagatgcagccgcacgaaggcgcggcaggtacgctggagcagcatttacagcgggttattggccatctgaacaccatgcacaccatttcgtcgatggcatggcgtcagcgaccgcatcacgggatttggctgagtcgcaagttgcgggattcgaaggcgtaa

SEQ ID NO: 470363 - DNA, 1221 bp, Shigella flexneri
atggcaattgaacaaacagcaattacacgcgcgactttcgatgaagtgatcctgccgatttatgctccggcagagtttattccggtaaaaggtcagggcagccgaatctgggatcagcaaggcaaggagtatgtcgatttcgcgggtggcattgcagttacggcgttgggccattgccatcctgcgctggtgaacgcgttaaaaacccagggcgaaactctgtggcatatcagtaacgttttcaccaatgaaccggcgctgcgtcttgggcgcaaactgattgaggcgacgtttgccgaacgcgtggtgtttatgaactccggcacggaagctaacgaaaccgcctttaaactggcacgccattacgcctgtgtgcgtcatagcccgttcaaaaccaaaattattgccttccataacgcttttcatggtcgctcgctgtttaccgtttcggtgggtgggcagccaaaatattccgacggctttgggccgaaaccggcagacatcatccacgttccctttaacgatctccatgcagtgaaagcggtgatggatgatcacacctgtgcggtggtggttgagccgatccagggcgagggcggtgtgacggcagcgacgccagagtttttgcagggcttgcgcgagctgtgcgatcaacatcaggcattattggtgtttgatgaagtgcagtgcgggatggggcggactggcgatttgtttgcttacaggtactacggtgtgacgccggatattctgacttctgcgaaagcgttaggcggcggcttcccgattagcgccatgctgaccacggcggaaattgcttctgcgtttcatcctggttctcacggttccacctacggcggtaatcctctggcctgtgcagtagcgggcgcggcgtttgatatcatcaatacccctgaagtgctggaaggcattcaggcgaaacgccagcgttttgttgaccatttgcagaagatcgatcagcagtacgatgtgtttagcgatattcgcggtatggggctgttaattggcgcggagctgaaaccacactacaaaggtcgggcgcgtgatttcctgtatgcgggtgcagaggttggcgtaatggtgctgaatgccggaccggatgtgatgcgtttagcaccgtcgctggtggtggaagatgcggatatcgatgaagggatgcaacgtttcgcccacgcggtggcgaaggtggttggggcgtaa

SEQ ID NO: 470364 - DNA, 564 bp, Shigella flexneri
atgatcctgcttatagataactacgattcttttacctggaacctctaccagtacttttgtgaactgggggcggatgtgctggttaagcgcaacgatgcgttgacgctggcggatatcgacgcccttaaaccacaaaaaattgtcatctcacctggcccctgtacgccagatgaagccgggatctcccttgacgttattcgccactatgccgggcgcttgccgattcttggcgtctgcctcggtcatcaggcaatggcgcaggcatttggcggcaaagttgtgcgcgccgcaaaggtcatgcacggcaaaacctcgccgattacacatagcggtgagggcgtatttcgggggctggcaaatccacttaccgtgacacgctaccattcgctggtggtggaacctgactcattaccagcgtgctttgacgtgacggcctggagcgaaacccgcgagattatggggattcgccatcgccagtgggatctggaaggtgtgcagttccatccagaaagtattcttagcgaacaaggacatcaactgctggctaatttcctgcatctctga

SEQ ID NO: 470365 - DNA, 603 bp, Shigella flexneri
atgagcgataaattcggcgaagggcgcgatccgtatctttatcctggccttgatatcatgcgtaaccggctgaacatccgccagcagcagcggctggaacaggccgcttacgaaatgacggcgctgcgtgctgcgaccattgagcttggtccgctggtgcgcggtttaccgcatttgcgcactatccatcgccagctgtaccaggatattttcgactgggcagggcaactgcgtgaagttgatatttatcagggcgatacgccgttctgccactttgcttatatcgaaaaagagggcaatgccctgatgcaggatctggaggaagaaggttatctggttggcctggagaaagcgaagttcgtcgagcggctggcgcattactattgtgaaatcaacgtgctgcatcccttccgggtgggaagtggtctggcacagcggatcttcttcgagcaactggcgattcatgccggatatcaactgagctggcagggtatcgaaaaagaggcctggaatcaggcaaatcagagtggggcaatgggggatctcaccgcactgcagatgatatttagcaaagtggtaagcgaagccggggaatctgagtaa

SEQ ID NO: 470366 - DNA, 168 bp, Shigella flexneri; identical to SEQ ID NO: 260864

SEQ ID NO: 470367 - DNA, 582 bp, Shigella flexneri
atgttcaaatcgaccctggcggcgatggctgctgttttcgctctttctgctctttctgctctttctcccgcagcaatggcagcgaaaggggacccgcacgtattgttgacaacctcagctggtaacatcgaactggagctggataaacaaaaagcgccagtgtctgtgcaaaactttgtcgattatgtgaacagcggtttttataacaacactacctttcaccgcgtcattcctggctttatgattcagggcggcggtttcaccgagcagatgcagcagaaaaaaccaaacccgccaatcaaaaatgaagccgataacggcctgcgcaacacgcgtggcaccatcgcgatggcgcgtaccgctgacaaagacagcgccaccagccagttctttatcaacgttgccgataacgccttccttgaccatggtcagcgtgatttcggttacgcggtatttggtaaagtggtgaaaggcatggacgttgccgataagatttcccaggtgccgactcatgatgttggtccgtaccagaatgtgccgtcaaaaccggtagttatcctttccgctaaagtcctgccgtaa

SEQ ID NO: 470368 - DNA, 1182 bp, Shigella flexneri
atgactaacagcaatcgcatcaagctcacatggattagctttctctcctacgcactgactggtgcgttggttattgtcaccgggatggtgatgggaaatatcgccgattatttcaatctgcctgtttccagtatgagtaacaccttcaccttcctcaacgccggcattttaatctctatcttcctcaacgcctggctgatggaaatcgtcccgttgaaaacgcagttacgttttggctttctcctgatggtgctggcggttgccggtttgatgttcagccacagcctggcgctgttctcgacggcgatgttcattctcggggtggtcagcggcattactatgtcgattggtacattcctgataacacaaatgtatgaagggcgtcagcgcggttcccgcctgttatttactgactccttcttcagtatggctgggatgattttcccaatgatcgccgcgtttctactggcgcgcagcattgagtggtactgggtttatgcctgcatcgggctggtgtatgtcgctatttttattctgaccttcggctgtgagttcccggcactgggcaaacgtgcaccaaaaacggatgctccggtagagaaagaaaagtgggggatcggcgtactgtttctctctgttgcggcgctgtgctacatcctcggtcagttaggttttatctcctgggtgcctgagtatgccaaaggcctgggcatgagcctgaacgacgcgggcacgctggtgagtaacttctggatgtcatacatggtcggcatgtgggcgttcagctttattcttcgcttctttgatttgcaacgcattctgaccgtactggctggtctggctgcgattctgatgtacgtctttaacaccggaacaccagtacatatggcgtggtcaattctcgctctgggcttcttctccagcgcgatctataccaccatcatcaccctgggttcacagcagaccaaagtaccgtcgccaaaactggttaactttgtcctgacctgcggaaccatcggtactatgttgacctttgtggttaccggcccgattgttgaacatagcggtccgcaggcggcactgcttacagcaaacggtctgtacgctgtcgtctttgtgatgtgcttcctgttaggtttcgtcagccgtcaccgtcagcataacaccctgacctctcattaa

SEQ ID NO: 470369 - DNA, 2544 bp, Shigella flexneri
atgagcaaagtcagactcgcaattatcggtaacggtatggtcggccatcgctttatcgaagatcttcttgataaatctgatgcggccaactttgatattaccgttttctgtgaagaaccgcgcatcgcttatgaccgcgtacacctctcgtcttacttctctcaccacaccgccgaagagctgtcgctggtgcgcgaaggcttctacgagaaacacggcatcaaagttctggtcggcgaacgcgctatcaccatcaaccgtcaggagaaggtgattcactccagcgccggacgtaccgttttttatgacaagctgatcatggcaaccggttcctacccgtggatcccaccaatcaaaggttctgatactcaggactgctttgtctatcgcaccattgaagacctcaacgccattgaatcctgcgcccgtcgcagcaaacgcggtgccgttgttggtggcggcctgttaggtctggaagccgctggcgcgctgaaaaacttaggtattgaaacccacgttatcgaatttgcccctatgctgatggcggaacagcttgatcagatgggtggcgagcagctgcgtcgcaaaatcgaaagtatgggcgtgcgcgttcacaccagcaaaaacacccttgagattgtgcaggaaggtgtcgaagcgcgtaaaaccatgcgttttgccgacggcagcgaactggaagtcgactttatcgtcttctctaccggtatccgtccgcgcgataagctggcaacccagtgtggtctggacgttgctccgcgtggggggattgtcattaatgattcctgccagacttccgatccggatatctacgccatcggtgaatgcgcaagctggaacaaccgtgtatttggtctggtagcaccaggctacaaaatggcgcaggtcgccgttgaccatattctgggtagcgaaaacgcctttgaaggtgctgaccttagcgccaagctgaaactgctgggcgtagacgtaggtggtattggtgatgcgcacggtcgcacgcctggcgcacgtagctatgtttacctcgacgaaagtaaagagatctacaaacgcctgattgtcagcgaagacaacaaaaccctgctcggtgcggtactggtgggcgataccagcgactacggcaacctgctgcaactggtgctgaacgctatcgagctgccggaaaacccggattctctgattctgccggcgcactcgggtagcggtaagccgtctatcggtgttgataaactgccggacagcgcgcaaatctgctcctgcttcgacgtcactaaaggtgatctgattgctgccatcaacaaaggctgccacacagttgcggcgctgaaagctgaaaccaaagcgggtactggctgcggtggctgtatcccgctggtcactcaggtactgaacgcggaactggcgaaacagggcatcgaagttaacaacaacctgtgcgaacactttgcttattcgcgtcaggaactgttccatttgatccgcgttgaaggcattaaaaccttcgaagaactgctggcgaaacacggcaaaggctacggttgtgaagtttgtaaaccaaccgtcggttcgctgctggcctcctgctggaacgaatacattctgaagccggaacatactccgctgcaggattctaacgacaacttcctcgctaacatccagaaagacggcacctactcggtgatcccgcgttctccgggcggtgaaatcaccccggaagggctgatggcagtgggtcgtatcgcgcgtgaatttaatctctacaccaaaatcaccggctcccagcgcctggcgatgtttggcgcacagaaagacgatctgccggaaatctggcgtcagctgattgaagctggcttcgaaaccggtcatgcctatgcgaaagcactgcgtatggcgaaaacctgcgtgggtagcacctggtgccgctacggtgttggcgatagcgtcggcctcggcgtggaactggaaaaccgctacaaaggcatccgtacgccgcacaaaatgaagttcggtgtctccggctgtacccgtgaatgttcagaagctcagggtaaagacgtgggtattatcgccactgaaaaaggctggaacctgtatgtttgcggtaacggcggcatgaaaccgcgtcatgcggatctgctggcagcggatatcgatcgcgaaacgctgatcaaatatctcgaccgcttcatgatgttctacatccgtaccgccgacaaactgacgcgtaccgcgccgtggttagaaaacctcgaaggcggcatcgattacctgaaagcggtgatcattgacgacaaactggggctgaacgctcatctggaagaagagatggcgcgcctgcgtgaagcggtagtgtgtgagtggactgaaacggtcaatacaccgtccgcgcagactcgcttcaaacacttcatcaacagcgacaagcgtgacccgaacgtgcagatggtgccagagcgcgaacagcaccgtccggcaacgccgtatgaacgtatcccggtaactctggtggaggacaacgcatga

SEQ ID NO: 470370 - DNA, 327 bp, Shigella flexneri
atgagccagtggaaagacatctgcaaaatcgatgacatcctgcctgaaaccggcgtctgcgcactgttaggtgacaagcaggtagcgattttccgcccgtatcacagcgaccaggtgtttgcgatcagcaacattgatccgttcttcgagtccagcgtgctatcacgcgggctgattgcggaacaccagggcgagctgtgggtcgccagcccgctgaaaaaacagcgttttcgcttaagtgatggcttgtgcatggaagacgaacagttttccgtcaaacattacgaagcacgagtgaaagacggcgtggtgcagctgcgcggttaa

SEQ ID NO: 470371 - DNA, 807 bp, Shigella flexneri
atgtttacagacactattaataagtgtgcggctaatgctgcgcgcattgcacgcctgtcggcaaataacccgctcggcttttgggtcagctccgccatggcgggcgcatatgtgggtcttgggatcatcctgattttcacgctcggtaatttgctcgacccgtccgtacgtccgctggtgatgggcgcgacctttggtatcgccttaacgctggtgattatcgccggttctgaactgttcaccggacacaccatgttcctcacctttggggtaaaagcgggcagcatcagccacgggcaaatgtgggcaatcctgccgcaaacctggctgggtaacctggtcggttccgtcttcgttgccatgctctatagctggggcggcggtagcctgctgccggtagataccagcatcgttcactccgtcgcgctggctaaaaccactgcaccggcaatggtactgttcttcaaaggtgcattgtgtaactggctggtttgcctggcaatctggatggcgctgcgcactgaaggggcggcgaaatttatcgctatctggtggtgtctgctggcatttatcgcgtccggctacgagcactctatcgctaacatgacgctgttcgcgctctcctggttcggcaaccacagcgaagcctacacgctggcgggtattggtcataacctgctgtgggtgacgctgggtaatactttatcaggtgccgtattcatgggattgggttattggtatgctacgccgaaagcgaatcgtccggttgcggacaaatttaatcaaactgaaacagctgccggttaa

SEQ ID NO: 470372 - DNA, 1374 bp, Shigella flexneri
gtggatcatttgcctatattttgccaattacgcgatcgcgactgtctgattgtcggcggtggtgatgtcgcggaacgcaaagcaaggttgctgttagacgcaggcgctcgcttaacggtgaatgcattagcgtttattccacagttcaccgcatgggcagatgcaggcatgttaaccctcgtcgaagggccatttgatgaaagccttctcgacacctgctggctggcgattgcagcgacggatgatgacacgcttaaccagcgcgtcagcgaagccgctgaagctcgtcgcatcttctgtaacgtagttgatgcgccgaaagccgccagctttattatgccgtcgattattgaccgctcaccgctaatggtagcggtctcctctggcggcacctctccggttctggcgcgcctgttgcgcgaaaaactcgaatcactgctgccgttgcatctgggccaggtggcgaaatatgccgggcaattacgcgggcgagtgaaacaacagttcgccacgatgagtgagcgtcgccgtttctgggagaaattgttcgttaacgaccgcctggcgcagtcgctggcaaacaacgatcagaaagccattactgaaacgaccgaacagttaatcaacgaaccgctcgaccatcgcggtgaagtggtgctggttggtgcaggtccgggcgatgccgggctgctgacgctgaaaggactgcaacaaattcagcaggcagatgtggtggtctacgaccgtctggtttctgacgatattatgaatctggtacgccgcgatgctgatcgcgttttcgtcggcaaacgcgcgggataccactgtgtaccgcaggaagagattaaccagatcctgctgcgggaagcgcaaaaaggcaaacgcgtggtgcggctgaaaggtggcgatccgtttatttttggccgtggtggcgaagagctggaaacactgtgcaacgcgggtattccgttctcggtggttccgggtattaccgcagcttctggttgctctgcctattcgggtattccactcacgcatcgcgattatgcccagagcgtacgcttaattaccggacacttaaaaaccggtggcgagctggactgggaaaacctggcggcagaaaaacagacgctggtgttctatatggggttgaatcaggccgcgactattcagcaaaagctgattgaacacggtatgcctggcgaaatgccggtggcaattgtcgaaaacggaacggcagtcacgcagcgcgtgattgacggtacgctcacgcaactcggtgaacttgctcagcaaatgaacagtccatcgctaattattattggtcgggttgttggcctgcgcgataaactgaactggttctccaatcattaa

SEQ ID NO: 470373 - DNA, 168 bp, Shigella flexneri; identical to SEQ ID NO: 460788

SEQ ID NO: 470374 - DNA, 867 bp, Shigella flexneri
atgactgcaaactctcccctacaacgtattggacaagaaaaaggtatcgctatgggaagccaggaactccaacgcaagctcggattttgggccgttcttgcaatcgccgtcgggacaaccgtcggctccggtatttttgtatctgtgggtgaagtggcaaaagcagcgggcacgccgtggcttacggtgctcgcgtttgtcattggcgggttaattgtgatcccgcaaatgtgcgtctatgcggaactatccaccgcttatccggaaaatggcgcagattatgtttatctgaaaaatgccggaagccgaccgctggctttcctctccggctgggccagcttctgggccaacgatgcgccgtcattgtcgattatggcgctggcgattgtcagcaatcttggctttttaacgcctatcgatccgttgctcggtaaatttatcgccgccggattaattatcgcctttatgttgctacacctgcgctccgttgaaggcggcgcagcgtttcagacgctaattaccatcgccaaaattatcccgttcactatcgtcattggccttgggatcttctggtttaaagcagagaattttgccgcccttaccaccactgcgattggcgcaacgggcagctttatggcgctgctggcggggatctctgccaccagttggtcgtataccggcatggcctctatctgttatatgaccggcgaaattaaaaaccccggaaaaaccatgccacgagcgctgattggttcctgtctgctggttctggtgctctacaccctgctggcgctggtgatttccggcctgatgcccttcgacaaactcgccaattctgaaacgccgatttccgacgccctgacctag

SEQ ID NO: 470375 - DNA, 474 bp, Shigella flexneri
atgatcgtcattcttggttcgctttccagctgcgtgatgtaccagccgcggctggaatacgcgatggcgaaagacaacctgttctttaaatgcttcggccatgtgcatccgaaatacaacacgccggatgtctccatcatcctgcaaggggcgctggggatcttcttcatcttcgtttccgatctcaccagcctgctgggttatttcaccctggtgatgtgtttcaaaaataccctcaccttcggctccatcatctggtgtcgtaaacgcgacgattacaaaccgctgtggcgtactccggctttcgggctgatgaccaccctcgccattgcgtcaagcctcattctggtcgcctcaacctttgtctgggcaccgattcccggccttatctgcgccgtcatcgttattgctactggtctgcctgcttacgccttctgggcgaagcgtagccgccagctcaacgctttgtcgtaa

SEQ ID NO: 470376 - DNA, 1044 bp, Shigella flexneri
atgttatctgaagaaaataaaatgttggatattgataaaagcaccgtggactttctggtcaccgaaaatatggttcaggaagtggaaaaagttctcagccatgacgttccgctggtgcacgccatcgtggaagagatggtgaagcgcgacattgatcgtatttatttcgttgcctgcggctcgccactcaacgcggcgcaaacggcgaaacatctggcggatcgcttttccgatcttcaggtctacgccatttccggctgggagttctgcgataacaccccgtatcgcctcgacgatcgttgcgcggtgattggcgtttctgactacggtaaaacggaagaggtaatcaaagcgctggagctgggccgggcctgcggcgcactcactgcggcgttcaccaaacgcgcggacagcccgattacctcggcggcggaatttagcattgattatcaggccgactgtatctgggaaattcacctgctgctctgctacagcgtggtgctggagatgatcacccgcctcgcgccgaacgcggaaatcggcaagatcaaaaacgatctcaagcagttgccgaatgcgctcggtcatctggtacgcacctgggaagaaaaaggccgccagcttggtgaactggccagccagtggccgatgatttataccgttgctgcgggtccgctgcgtccgctgggttacaaagaaggcattgtaacgctgatggaatttacctggacgcacggctgcgtgattgagagcggagagttccgccatggcccgctggagattgtcgaaccgggcgttccgttcctgttcctgctcggcaatgatgaaagtcgccacaccaccgaacgcgccattaactttgttaaacagcgtactgacaacgtgatcgtcatcgattacgccgaaatttcgcaagggctgcacccgtggctggcaccgttcctgatgttcgtgccaatggagtggctctgctactacctgtctatttacaaagatcacaacccggatgaacgccgctattacggtggtctggtggaatattaa

SEQ ID NO: 470377 - DNA, 831 bp, Shigella flexneri
atgaaaacaggtatgtttacctgcggccaccagcggctgcctattgaacacgcatttcgtgatgcaagcgagctgggttacgacggcatcgaaatttggggcggtcgcccgcacgcgttcgcgccggacttaaaagcgggcggcatcaaacaaatcaaggcgctggcgcagacgtatcagatgccgattatcggttacacgccagaaaccaacggctatccgtataacatgatgctgggcgatgaacatatgcgtcgtgaaagcctggacatgatcaagctggcgatagatatggcaaaagagatgaacgcgggttatacgctgatttctgcggcccacgcgggctatctcacgccgcctaacgttatctgggggcggctggcagagaacttaagcgaactgtgtgagtacgcggaaaacatcggcatggatctgatcctcgaaccgttaacgccgtatgaatcgaacgtcgtgtgtaatgctaatgatgtgcttcatgcgctggcgctggtgccttcgccgcgcctgttcagcatggtcgacatttgcgcgccgtatgtccaggcggaaccggtgatgagttatttcgacaaactgggcgataaattacgtcatctgcatattgtcgacagcgacggggccagcgacacgcattacattcctggagaaggcaaaatgccgctgcgggaactgatgcgcgatattattgatcggggctatgagggttactgtacggtggagctggtgacgatgtatatgaacgagcccagactctatgcccgccaggcgctggaacgctttcgcgcgctgctgccggaggatgagagatga

SEQ ID NO: 470378 - DNA, 786 bp, Shigella flexneri
atgaaaaccctggcgacaatcggcgataactgcgtcgatatctacccgcaactgaataaagcgttttctggcggtaatgcggtcaatgtggcggtgtactgcactcgctacggcatacagccgggatgcattacctgggtgggtgacgatgactacggcacaaagctgaagcaggatctcgcccgcatgggcgtcgatatcagccatgtccatacgaaacacggcgttaccgcacaaactcaggtggaactgcacgacaatgatcgcgtttttggcgactacaccgaaggcgtgatggccgactttgccctgagtgaagaggattacgcctggctggcgcagtatgacattgtgcacgcggcaatctggggacatgcggaagacgcattcccacagctgcacgctgcgggcaaacttaccgctttcgacttctccgacaagtgggacagcccgctctggcagacactggtgccgcatctcgattttgcctttgcctccgcaccgcaagaagacgaagcgctgcgtctgaagatgaaagcgattgttgcccgtggcgcaggaacagtgattgtcacgctgggtgaaaacggcagcattgcctgggatggcgcgcagttctggcgtcaggctcctgaaccggtgacggttatcgacaccatgggtgccggagattcgttcattgccggattcctttgcggctggtctgcggggatgacattaccgcaggcgatggcgcagggaacggcgtgcgcggcgaaaaccattcagtaccacggtgcctggtag

SEQ ID NO: 470379 - DNA, 732 bp, Shigella flexneri
atgtcagctacggaccgctactctcatcaactcctctacgctaccgtccgccagcggctgctggatgatatcgcgcagggggtttaccaggccgggcaacagatccctaccgaaaacgagctttgtacacaatataacgtcagccgcattaccattcgcaaagccatcagcgacttagtggcagacggcgtactgatccgctggcagggaaaaggcacctttgtacaaagccagaaagttgaaaacgccctgcttactgtcagtggttttaccgattttggcgtctcacaaggcaagtcgacgaaagagaaagtgatcgaacaggaacgggtcagcgccgcgccgttttgcgaaaagctgaacatccccggaaacagcgaagtgttccatctctgccgggtgatgtatctcgataaagagccgctgtttattgatagttcatggatcccgctgtcgcgttatcctgactttgatgagatttacgtcgaaggaagctccacctatcagttatttcaggagcgttttgacacgcgagtggtcagcgacaaaaagaccatcgatatctttgccgccacccgcccgcaggcaaaatggctgaaatgcgaactgggcgaaccgttgtttcgcatcagcaaaatcgcctttgatcagaatgacaaaccggtgcacgtctccgaactcttctgccgcgccaatcgcatcaccttaacgattgataataaaagacattaa

SEQ ID NO: 470380 - DNA, 1086 bp, Shigella flexneri
atgaagacgtttcctttgcaaagcctgactcttgctgaagcgcagcaaaagcagtttgcgctggtggacactatttgccgccattttccaggcagcgagtttcttgctggcggtgatttagggttaactccaagtctgaatcaaccgcgtattacccaacgggtggagcaggtgctggctgatgcatttcacgcacaggccgcggcgctggtgcagggcgcggggactggcgcgattcgcgccgggctggcggctttgctcaaaccggggcagcgtcttctggtgcatgacgcgcctgtttacccgacgacacgggttattattgagcagatggggctgacgcttattactgctgatttcaatgacctgtcggcactgaagcaggtcgtcgacgagcaacaacctgatgccgcgctggtgcagcatacgcgccagcagccgcaggacagctatgtgctggcagatgtgctggcaacgttgcgcgcggcaggtgttccagcgttaaccgatgataactatgcggtgatgaaggtagcgcgaatcggctgtgaatgcggcgcgaatgtctcgacattctcctgcttcaagctgtttgggccggagggcgttggtgcagtggttggcgatgccgatgttattagtcggattcgcgccacgctttactccggcggtagccagatccagggctcacaggcgctggaagtcttgcgtggtctggtgttcgcgccagtgatgcatgcggtgcaggcgggagtatccgaacggttgctggctttgcttaacggcggcgcggtggcggaagtgaaaagcgccgtcattgccaatgcgcagtcgaaggtgttgattgtcgagtttcatcagctgattgccgccagggtgctggaagaagcgcaaaagcgtggcgcgttgccttacccggtcggtgcagagtcgaaatatgaaatcccgccgctcttctatcgactttcaggaacgtttcgccaggcgaatccacaactcgaacattgtgcgattcgcattaacccgaatcgcagcggtgaagagacggtgctgcggattttgcgtgagagtattgcgagtatttaa

SEQ ID NO: 470381 - DNA, 1305 bp, Shigella flexneri
atggatctgtatattcagattatcgtggtggcgtgcctgacgggtatgacatcgcttctggcgcatcgctcggcggctgtttttcatgacggcatccacccgatcctgccgcaactgattgaaggctatatgaaccgtcgcgaggcggggagtatcgcttttggtctgagcattggttttgtggcctcggtggggatctcttttaccctgaaaaccgggctgctcaacgcatggttactctttcttcctaccgatatcctcggcgtactggcgataaacagcctgatggcgtttggtcttggcgctatctggggcgtgttgatccttacttgcctgttgccagttaaccagctgctgaccgcgctgccggtggatgtattaggtagcctcggggaattaagctcgccggtggtttctgcttttgcactgttcccgctggtggcgattttctaccagtttggctggaagcaaagtctggtcgccgccgtggttgttctgatgacccgtgtggtagtcgtgcgctatttcccacatcttaaccctgaatccatcgaaatctttattggcatggtgatgctgctggggatcgcgataactcacgacctgcgtcatcgtgatgaaaatgacatcgatgccagcgggctttcggtgtttgaagagcgcacgtcgcggattatcaaaaacttaccttatatcgccatcgtgggagcattgattgccgccgttgccagtatgaagatttttgctggtagcgaagtttcgatcttcacactggagaaagcgtattccgcaggcgtgacgccggaacaatcgcaaacgctgattaatcaggcggctctggcagaatttatgcgcggactggggtttgtgccgttgattgccaccaccgccttagcaacgggtgtgtatgcagttgcgggctttacctttgtttatgcggtgggctatctctcgccgaatccgatggttgcagcggtattaggcgcagtggttatttcggcggaagtcttgctgcttcgttcgatcggcaaatggctgggacgctacccgtcggtgcgtaatgcgtcggataacatccgtaacgccatgaatatgctgatggaagtggcgctgctggtcggttcgattttcgcagcaattaagatggcgggttataccggattctctatcgcggttgccatttacttcctcaacgaatccctgggccgtccggtacagaaaatggcggcaccggtcgtggcagtaatgatcaccggtattctgctgaatgttctttactggcttggcctgttcgttccggcttaa

SEQ ID NO: 470382 - DNA, 354 bp, Shigella flexneri
atgaaaaagattggcgttgcaggcttacagcgtgagcagattaaaaaaaccattgaagcgacggctcctggctgttttgaagttttcattcacaacgacatggaagcggcaatgaaggtgaaatccgggcaactagattattacattggcgcgtgtaataccggtgcgggcgcggcattgtcgattgccatcgcggtgattggctataacaaaagttgcaccattgccaaaccaggcattaaagcgaaagacgagcatatcgccaaaatgatcgctgaagggaaagtggcgtttggcctttccgttgagcacgtcgaacacgcgattccgatgttgattaaccatctgaaataa

SEQ ID NO: 470383 - DNA, 879 bp, Shigella flexneri
atgagttttgatccgacgggttacaccctggcccatgagcatctgcatattgatctctccggctttaaaaacaacgtggactgccgccttgatcagtatgcgttcatttgccaggagatgaacgacctgatgacccggggtgtacgtaatgtgattgagatgaccaaccgttacatggggcgcaatgcgcaatttatgctcgatgtaatgcgcgaaaccgggatcaacgtggtggcctgtactggttattaccaggatgcgtttttcccggaacatgtggtgacccgcagcgtgcaggaactggcgcaggagatggtcgatgaaattgaacagggtatcgatggcacggagctgaaagccgggatcatcgcggagatcggctccagcgaaggaaagattacgccgctggaagagaaggtatttattgccgctgcgctggcgcataaccagaccggacgcccgatctccacgcatacgtcgttcagcaccatggggctggaacaactggctctgttgcaagcccacggagttgatctttcgcgcgtcaccgttggtcactgcgatctgaaagacaacctcgacaacattttgaagatgatcgatctcggcgcgtacgtgcagttcgacaccattggtaagaacagttactacccggacgaaaagcgcattgcgatgctccacgcgctacgtgaccgtgggttgctgaaccgcgtcatgctgtcgatggatattacgcgccgctcccatttaaaagccaatggtggttatggctatgactatttattgaccacctttattccgcaattgcgccagtcaggattcagtcaggccgatgtggatgtgatgttacgtgaaaatccctctcaatttttccaataa

SEQ ID NO: 470384 - DNA, 1227 bp, Shigella flexneri
atggcgcgatttgtggtgttagtgattgatagctttggcgtaggggcaatgaaagatgtcacgctggtgcgcccgcaagatgccggggcgaatacctgtggtcacatcctgagccagttgccgcatttgcagctaccaacgctggagaagctggggctaatcaacacattgggttatgcgccaggcgatatgcagccgtcagattccgcaacctggggcgtggcagagctgcaacatgaaggtggcgatacctttatggggcatcaggaaattttaggcacgcgcccgttaccgccgctgcggatgccttttcgcgatgtgattgaccgtgttgagcaggcattagtttccgctggctggcaggtggagcgccgtggcgatgatctgcaatttctgtcggtcaatcaggcggttgcgattggcgataatctcgaggcggatttaggccaagtctataacattaccgccaatctctctgtgatctcttttgacgacgcaatcaaaattggtcgtatcgtgcgtgaccaggtacaggtcggtcgggtcattacatttggcggcctgttaaccaacagtcagcgtattctcgatgccgcagaaagcaaagaagggcgctttattggtattaatgcgccgcgttctggcgcttatgacaacggcttccaggtcgtgcatatgggctacggtgttgatgaaaaagtgcaggtgccgcaaaaactgtatgaagcgggcgtgccaaccgtgctggtgggtaaggtggcagatatcgtcagcaatccttatggtgtgagctggcaaaacctggtggatagccagcggattatggatatcaccctcgacgaatttaacacccatccgacggcgtttatttgcatcaatatccaggaaaccgacctcgctggtcatgcagaagacgtcgcacgttatgccgaacgtttgcaggtcgttgaccgtaaccttgcccggcttgttgaggcgatgcagccagatgattgcctggtcgtgatggcggatcacggtaacgatccgaccattggtcacagccaccatacccgtgaagtggtgccagtgctggtttatcagcaagggctggtcgccacgcagctcggtgtgcgcaccacgctttctgatgtgggagctaccgtgtgtgaatttttccgtgcgccaccgccacaaaatggtcgctcttttctttcctccctccggtttgcaggagacaccctatga

SEQ ID NO: 470385 - DNA, 1164 bp, Shigella flexneri
atgtttgtagaagcattgaaacgccagaacccggcgctgatttccgccgcactaagtttgtggcagcagggcaaaatcgccccggacagctgggtgatcgacgtggatcagatactggaaaacggtaagcggctcattgagacggcgcggctttacggcattgaactgtatctgatgaccaagcaatttggtcgtaatccgtggctggcggaaaaattgctggcattaggctacagcggcattgtggcggtggattacaaagaggcgcgagtcatgcgccgcgctggtttgccagtggcgcatcaggggcatctggtacaaatcccttgtcatcaggttgctgacgccgttgaacagggcaccgacatcatcaccgtgtttactctcgacaaagcgcgggaagtttctgcggcagcggttaaggccggacgggtccagcctgtgctgctcaaagtttatagcgacgatgattttctttatccggggcaggagagcggttttgtacagcattcgctgcacgaggtgattgctgaaattaagaaactgccggggctgcatttagccggactaacccatttcccttgcctgctttgggatgaggctgctgggaaagttttgccaacaccgaatcttcacacgctggtacaagcacgggatcaactggcgaaatctggtattgcgattgagcaactgaacgtaccttcagcgaccagctgcacttcgctgccattgctggcggaatacggtgcgactcatgccgaacccggtcatgcgctgaccggtactattccggcaaaccagcagggcgatcagcctgaacgtatcgcgatgctctggttaagtgaaatctcccatcatttccgtggcgacagctactgctacggcggcggttactaccgtcgtggtcatgcgcaacatgcgctggtgtttacgccagaaaatcaaaagattactgaaaccaatctcaaaactgtggatgacagcagtatcgactacaccctgccgctggcaggcgagtatccggtgagcagtgcagtggtgctctgttttcgcacgcagatttttgtcacccgtagcgatgtggtgctggtgtccggtattcagcgcggcgaaccagaaatagttggtcgttatgacagcctcggcaaccctctggaggcataa

SEQ ID NO: 470386 - DNA, 363 bp, Shigella flexneri
atggaaaccagactcaacctgctttgcgaggcaggcgttattgataaggacgtctgcaaaggcatgatgcaggtcgtcaacgtactggaaaaagagtgccatctgccggtgcgcagtgagcaaggaacgatggcgatgacacatatggcgagtgcactgatgcgcagtcgccgtggtgaagaaatagagccgctggataacgagttgctggcggaactggcgcaatccagccactggcaagccgttgtgcaattgcatcaggagttgttgaaggaattcgctctggaagttaacccgtgtgaagaaggctattttctggccaatctttatggattatggatggctgctaacgaagaggtttga

SEQ ID NO: 470387 - DNA, 906 bp, Shigella flexneri
atgcgtcgaacgtttatcaaaaaagaaggcgtcgtcatcacgacactggcccgttatttgttgggtgaaaaatgcggtaatcgactgaaaaccatagatgagctggcaactgaatgccgttcatcggttggcctgacgcaggccgcgttgaaaacgctggaatcaagcggagcgatacggattgaacgccgtgggcgcaatggcagttatcttgtcgagatggataacaaagcattgctgagtcatgtggatatcaacaacgtggtatgtgcgatgcctttgccctatacccgcttgtacgaaggtttagcgagcggattgaaagcccagtttgatggcattcctttttactatgcgcatatgcgcggcgcggatattcgcgtggagtgtttacttaacggtgtctatgacatggcagtagtttcccgcctggcggcggaaagttatctcagccaaaacaatttgtgcatcgccctcgagcttggcccgcatacgtatgttggtgaacatcaactgatatgccgcaaaggtgagtctggaaatgttaagcgagtaggtctcgatagtcgttcggcggatcagaaaatcatgaccgatgtcttttttggcgatagtgatgtggaacgagtcgatctctcttatcacgagagtttacaacgcattgttaaaggcgatgtcgatgcggtgatctggaacgtggtggcggaaaacgaactgaccatgctgggattagaggcgacgccgctaacagacgatccgcgatttttacaggccaccgaagccgtggtcctgacgcgagtcgatgattacccaatgcaacaattgctgcgtgctgttgtagataaacacgccctgcttgcccatcaacaacgggtggtgagtggggaacaggaacccagttattaa

SEQ ID NO: 470388 - DNA, 1005 bp, Shigella flexneri
atgactaagcccatcgtttttagtggcgcacagccctcaggtgaattgaccattggtaactacatgggtgcgctgcgtcagtgggtaaacatgcaggatgactaccattgcgtttactgtatcgttgaccaacacgcgatcaccgtgcgccaggatgcacagaagctgcgtaaagcgacgttggatacgctggccttgtatctggcttgtggtatcgatcctgagaaaagcaccatttttgttcagtcccacgtaccagaacatgcgcagttaggctgggcactgaactgctatacctacttcggcgaactgagtcgcatgacgcagtttaaagataaatctgcgcgttatgccgagaacatcaacgctggtctgtttggctatccggtgctgatggctgcggacatcctgctgtatcaaactaatctggtaccggtgggtgaagaccagaaacagcacctggaactgagtcgcgatatcgcccagcgtttcaacgcgctgtatggcgagatctttaaggtgccggagccgtttattccgaaatctggcgcgcgcgtaatgtcgctgctggagccgaccaagaagatgtccaagtctgacgataaccgcaataacgttatcggcctgctggaagatccgaaatcggtagtgaagaaaatcaaacgcgcggtcactgactccgacgagccgccggtagttcgctacgatgtgcagaacaaagcgggcgtttccaacctgctggatatcctttctgcggtaacgggccagagcatcccagaactggaaaaacagttcgaaggcaagatgtatggtcatctgaaaggtgaagtggctgatgccgtttccggtatgctgactgaattgcaggaacgctatcaccgtttccgcaacgatgaagccttcctgcaacaggtgatgaaagacggcgcagaaaaagccagtgtacacgcttcccgtacgctgaaagcggtgtacgaagcgattggttttgtggcgaagccgtaa

SEQ ID NO: 470389 - DNA, 759 bp, Shigella flexneri
atgaataagtttgaagatattcgcggcgtcgcttttgatcttgatggtacgctggtcgacagtgctcctggtcttgctgctgcggtagatatggcgctgtatgcgctggagttgcccgtcgcaggtgaagaacgcgttattacctggattggtaacggcgcagatgttctgatggagcgcgcattgacctgggcgcgtcaggaacgtgcgactctgcgtaaaacaatggggaaaccgcccgttgatgacgacattccggcagaagaacaggtacgtattctgcgtaaactgttcgatcgctactatggcgaggttgccgaagaggggacgtttttgttcccgcacgttgccgatacgttgggcgcgttgcaggctaaaggcctgccgctaggcttggtcaccaacaaaccgacgccgttcgtcgcgccgctgctcgaagccttagatattgccaaatactttagcgtggttatcggcggcgatgatgtgcaaaacaaaaaaccgcatccggacccgctgttactggtggctgagcggatgggaattgccccacaacagatgctgtttgtcggcgactcacggaatgatattcaggcggcaaaagcggcaggttgcccatcagttggcttaacctacggatacaactacggcgaggctatcgatctcagccagcctgatgtaatttatcagtctataaatgaccttctgcccgcattagggcttccgcatagcgaaaatcaggaatcgaaaaatgactaa

SEQ ID NO: 470390 - DNA, 678 bp, Shigella flexneri
atgaaacagtatttgattgccccctcaattctgtcggctgattttgcccgcctgggtgaagataccgcaaaagccctggcagctggcgctgatgtcgtgcattttgacgtcatggataaccactatgttcccaatctgacgattgggccaatggtgctgaaatccttgcgtaactacggcattaccgcccctatcgacgtacatctgatggtgaaacccgtcgatcgcattgtgcctgatttcgctgccgctggtgccagcatcattacctttcatccagaagcctccgagcatgttgaccgcacgctgcaactgattaaagaaaatggctgtaaagcgggtctggtatttaacccggcgacacctctgagctatctggattacgtgatggataagctggatgtgatcctgctgatgtccgtcaaccctggtttcggcggtcagtctttcattcctcaaacactggataaactgcgcgaagtacgtcgccgtatcgacgagtctggctttgacattcgtctggaagtggacggtggcgtgaaggtgaacaacattggcgaaatcgctgcggcgggcgcggatatgttcgtcgccggttcggcaatcttcgaccagccagactataaaaaagtcattgatgaaatgcgcagtgaactggcaaaggtaagtcatgaataa

SEQ ID NO: 470391 - DNA, 837 bp, Shigella flexneri
atgaagaaaaatcgcgcttttttgaagtgggcagggggcaagtatcccctgcttgatgatattaaacggcatttgcccaagggcgaatgtctggttgagccttttgtaggtgccgggtcggtgtttctcaacaccgacttttctcgttatatccttgccgatatcaatagcgacctgatcagtctctataacattgtgaagatgcgtactgatgagtacgtacaggccgcacgcgagctgtttgttcccgaaacaaattgcgccgaggtttactatcagttccgcgaagagttcaacaaaagccaggatccgttccgtcgggcggtactgtttttatatttgaaccgctacggttacaacggcctgtgtcgttacaatctgcgcggtgagtttaacgtgccgtttggccgctacaaaaaaccctatttcccggaagcagagttgtatcacttcgctgaaaaagcgcagaatgcctttttctattgtgagtcttacgccgatagcatggagcgcgcagatgatgcatccgtcgtctattgcgatccgccttatgcaccgctgtctgcgaccgccaactttacggcgtatcacacaaacagttttacgcttgaacaacaagcgcatctggcggagatcgccgaaggtctggttgagcgccatattccagtgctgatctccaatcacgatacgatgttaacgcgtgagtggtatcagcgcgcaaaattgcatgtcgtcaaagttcgacgcagtataagcagcaacggcggcacacgtaaaaaggtggacgaactgctggctttgtacaaaccaggagtcgtttcacccgcgaaaaaataa

SEQ ID NO: 470392 - DNA, 1287 bp, Shigella flexneri
atggatgaattcaaaccagaagacgagctgaaacccgatcccagcgatcgtcgtactggtcgttctcgtcaatcttctgaacgttctgagcgtactgaacgtggcgaaccgcagatcaattttgatgatattgaacttgatgacactgacgatcgccgtccgactcgtgcgcaaaaagagcgcaatgaggaaccggaaatcgaagaagaaattgacgaatccgaagatgaaaccgtggatgaagagcgcgtagagcgtcgtccgcgtaagcgcaaaaaagcagccagtaaacccgcttctcgtcagtatatgatgatgggcgtcggcattctggttctactgctgttgatcatcggtatcggttctgcgctaaaagccccctcgaccacttccagcgatcaaaccgcgtctggcgagaagagtattgatcttgctggcaatgcgaccgatcaggcgaatggcgtgcagccagcgccgggaaccacgtctgcggaaaatactcagcaggatgtttctctgccaccgatctcttctacgccgactcaagggcaaaccccggtggcaacggatggtcaacaacgtgttgaagtgcagggtgacctgaacaatgcgctgacccagccacaaaatcagcaacagctgaacaatgtggcggtcaattccacgttgccgactgaacccgcaacggttgcgcctgttcgcaatggcaatgcatcgcgtgacacggcgaaaacgcaaaccgctgaacgtccgtccactacgcgcccagttcgtcagcaggcggtgattgaaccgaaaaaaccgcaagcaaccgtgaaaacggagccgaagccggtagcacagacgccgaagcgtactgaaccagctgcccctgtggcgagcacgaaggcaccggctgcgacttctacgccagcaccaaaagagacggcgactacggctccagtacagacggcatccccggcgcaaaccacggcaacaccagccgctggagggaagaccgcaggtaatgttggttcgttgaaatcggcaccgtccagccattacactctgcagctgagcagttcctctaactacgacaacctgaacggttgggcgaagaaagagaatctgaaaaactacgttgtctatgaaacgacgcgtaatggtcagccgtggtatgtcctggtttctggcgtgtacgcttcgaaagaagaggcgaaaaaagcggtatctacattgccagcagatgttcaggccaaaaacccgtgggcgaaaccgctgcgtcaggtacaggccgatctgaagtaa

SEQ ID NO: 470393 - DNA, 1089 bp, Shigella flexneri
atggagaggattgtcgttactctcggggaacgtagttacccaattaccatcgcatctggtttgtttaatgaaccagcttcattcttaccgctgaaatcgggcgagcaggtcatgttggtcaccagcgaaaccctggctcctctgtatctcgataaggtccgcggcgtacttgaacaggcgggtgttaacgtcgatagcgttatcctccctgacggcgagcagtataaaagcctagctgtactcgataccgtctttacggcgttgttacaaaagccgcatggtcgcgatactacgctggtggcgcttggcggcggcgtagtgggcgatctgaccggcttcgcggcggcgagttatcagcgcggtgttcgtttcattcaagtcccgacgacgttactgtcgcaggtcgattcctccgttggcggcaaaactgcggtcaaccatcccctcggtaaaaacatgattggcgcgttctaccagcctgcttcagtggtggtggatctcgactgtctgaaaacgcttcccccgcgtgagttagcgtcggggctggcagaagtcatcaaatacggcattattcttgacggtgcgttttttaactggctggaagagaatctggatgcgttgttgcgtctggacggtccggcaatggcgtactgtattcgccgttgttgtgaactgaaggcagaagttgtcgccgccgacgagcgcgaaaccgggttacgtgctttactgaatctgggacacacctttggtcatgccattgaagctgaaatggggtatggcaattggttacatggtgaagcggtcgctgcgggtatggtgatggcggcgcggacgtcggaacgtctcgggcagtttagttctgccgaaacgcagcgtattataaccctgctcacgcgggctgggttaccggtcaatgggccgcgcgaaatgtccgcgcaggcgtatttaccgcatatgctgcgtgacaagaaagtccttgcgggagagatgcgcttaattcttccgttggcaattggtaagagtgaagttcgcagcggcgtttcgcacgagcttgttcttaacgccattgccgattgtcaatcagcgtaa

SEQ ID NO: 470394 - DNA, 522 bp, Shigella flexneri; identical to SEQ ID NO: 2435

SEQ ID NO: 470395 - DNA, 1209 bp, Shigella flexneri
atgctgatacccggcgtacaggcggcaaagccgcaaaaagtgacgctgatggtggatgacgttccggtagctcaggtgttgcaggcgctggctgaacaggagaagttgaacctggtcgtgtcgccagacgtcagcggtacggtgtcgttacatctaacagatgttccctggaagcaggcactacaaactgtagtgaaaagcgccggactgataacgtggcaggaaggcaacattctctcagtgcattccattgcctggcagaatgacaatatcgcccgccaggaggcggagcaggcgcgggcgcaggcaaatctgccgctggaaaatcgcagtataaccctgcaatacgccgacgcgggagaactggcgaaagcgggggagaagctactgagtgccaaagggagtatgaccgtcgataaacgcaccaatcgccttttgctacgagataacaaaacggcgttaagcgcgcttgaacagtgggtagcgcaaatggatctgccggtcgggcaggttgagctgtcggcgcatattgtcaccattaatgaaaaaagtttgcgtgagttaggcgtgaaatggacgctggccgatgcgcaacacgctggtggcgttgggcaagtcaccacgcttggtagcgacctctccgtagcgacggcgacaacgcatgtcggttttaacattgggcgcatcaacggacgcttgctggatcttgagctttccgcgctcgaacaaaaacagcagctggatattatcgccagtccgcgtctgctggcctcacatcttcagcctgccagcattaaacaggagagcgaaattccatatcaggtttccagcggggaaagtggcgcgacgtcggtggaatttaaagaggccgtcctggggatggaggtcacgcccacggtgttacaaaaaggtcgcatccggctgaaattacacatcagccagaacgttccggggcaggtgctacagcaggccgatggcgaagtgctggcgattgataagcaggagatcgaaacgcaggtcgaggtaaaaagcggagaaacgttggcgctgggcggcatttttacccgtaaaaataaatcgggtcaggatagcgtaccgttgcttggcgacattccctggttcgggcaattatttcgtcatgacggaaaagaagatgaacgacgcgagttagtggtgtttatcacgccacgactggtttccagtgagtaa

SEQ ID NO: 470396 - DNA, 405 bp, Shigella flexneri
atgagggttaaacgctggttgttggcaggtattgcattgtgccttttaaccggtatgcgtgacccttttaaatcgccggaagatctatgccggattagcgaacttagccagtggcgctatcaggggatggtagggcgaggcgagcgcatcatcggtgtaataaaagacgggcaaaagaaatggcgacgggtgcagcaaaacgatgtgctggaaaacggctggacaattttacagctgacgccagacgtactaacgctgggtaccgggacaaactgcgaaccgccacaatggttgtggcaacggcaaggagatacaaatgaagcaatggatagccgcactactgttgatgctgatacccggcgtacaggcggcaaagccgcaaaaagtgacgctgatggtggatga

SEQ ID NO: 470397 - DNA, 441 bp, Shigella flexneri
atgaacatgttctttgactggtggttcgccacatcaccccgcctccgccagttttgctgggcattctggttgctgatgttagttacgctcatttttctatcatcgacacaccatgaagagcgcgacgcattaattcgactacgggcaagtcatcaccagcagtgggccgcactgtatcgcctggtagacaccactcccttcagcgaggaaaaaacgctgcccttttcgccactggattttcagttatccggcgcgcaactggtttcctggcatccatccgcgcagggaggcgagttggcgttgaaaacgctgtgggaagcagtgccgtcggcatttacacggctggcagagcgcaacgtcagcgtgagccgtttttcgttaagcgtggaaggtgatgatcttttgttcacgctacaactggagatgccgcatgagggttaa

SEQ ID NO: 470398 - DNA, 540 bp, Shigella flexneri; identical to SEQ ID NO: 458329

SEQ ID NO: 470399 - DNA, 780 bp, Shigella flexneri
atgacatttaagatctggcaaattggtttgcatttacaacagcaagaagcggcagcggttgcgatcgtgcggggcgcaaaagaatgctttttgcaacgctggtggcggttgccgctggcgcacgacattatcaaagatgggcggattgttgatgcgcagcagctggctaaaacgttgttaccgtggagtcgcgaactgccgcagcgtcatcacattatgttggcgtttcccgccagtcgcacattacagcggtcatttccgcgcccgtcgatgtcccttggtgagcgggagcaaacggcctggctgtcagggacgatggcccgcgagctggatatggatccggactccctgcgcttcgattacagcgaagactcactcagccccgcttataacgtgactgccgcgcaaagcaaagagctggcaacgctgcttacgctggcagaaaggttgcgtgttcatgttagtgcgatcaccccggatgccagtgcattacagcgatacctgccttttttaccttctcatcagcaatgtctggcctggcgtgataacgaacagtggctgtgggcgacgcgctatagctgggggcgcaaactggcggtggggatgactagcgcgaaggagctggcggcagcgttatccgttgatcccgacagcgtcgcgatatgtggcgaaggcggatttgacccctgggaggccgtttctgttcgtcagccgccgctaccgccgcctggtggagactttgccatcgcgctggggctggcgcttgggaaggcgtactga

SEQ ID NO: 470400 - DNA, 2553 bp, Shigella flexneri
gtgaagttcgtaaagtattttttgatccttgcagtctgttgcattctgctgggagcaggctcgatttatggcctataccgctacatcgagccacaactgccggatgtggtgacattaaaagatgttcgcctgcaaattccgatgcagatttacagcgccgatggcgagctgattgctcaatacggtgagaaacgtcgtattccggttacgttggatcaaatcccaccggagatggtgaaagcctttatcgcgacggaagacagccgcttctacgagcatcacggagttgacccggtggggatcttccgtgcggcaagtgtggcgctgttctccggccacgcgtcacaaggggcgagtaccattacccagcagctggcgagaaatttcttcctcagtccagaacgcacgatgatgcgtaagattaaggaagtcttcctcgcgattcgcattgaacagttgctgacgaaagacgaaatcctcgagctttatctgaacaagatttaccttggttaccgcgcctatggtgtcggtgctgcggcacaagtctatttcggtaaaacggtcgaccaactgacgctgaacgaaatggcggtgatagccgggttgccgaaagcgccttccacctttaatccgctctactcaatggatcgtgccgtcgcgcggcgtaacgtcgtactgtcgcggatgctggatgaagggtatatcacccagcaacagttcgatcagacacgcactgaggcgattaacgctaattatcacgcgccggagattgctttctctgcgccgtacctgagcgaaatggtgcgccaggagatgtataaccgttatggcgaaagtgcctatgaagacggttatcgcatttacaccaccatcacccgcaaagtgcagcaggccgcgcagcaggcggtacgtaataacgtgctggactacgacatgcgccacggctatcgcggcccggcaaatgtgctgtggaaagtgggcgagtcggcgtgggataacaacaagattaccgatacgctgaaggcgctgccgacctatggtccgctgctgcctgccgcagtcaccagcgccaatcctcagggagcgacggcgatgctggcggacgggtcgaccgtcgcattgagtatggaaggcgttcgctgggcgcgtccttaccgttcggatactcagcagggaccgacgccgcgtaaagtgaccgatgttctgcaaacgggtcagcaaatctgggttcgtcaggttggcgatgcatggtggctggcacaagtgccggaagtgaactcggcgctggtgtcgatcaatccgcaaaatggtgccgttatggcgctggtcggtggctttgatttcaatcagagcaagtttaaccgcgccacccaggcactgcgtcaggtgggttccaacatcaaaccgttcctctacaccgcggcgatggataaaggtctgacgctggcaagtatgttgaacgatgtgccaatttctcgctgggatgcaggtgccggttctgactggcagccgaagaactcaccaccgcagtattctggtccaattcgcttacgtcaggggctgggtcagtcgaaaaacgtggtgatggtacgtgcaatgcgggcgatgggcgtcgactacgctgcagaatatctgcaacgcttcggcttcccggcgcaaaacattgtccacaccgaatcgctggcgctgggttcagcgtccttcaccccaatgcaggtggcgcgcggctacgcggtcatggcgaacggcggcttcctagtggacccgtggtttatcagcaaaattgaaaacgatcagggcggcgtgattttcgaagcgaaaccgaaagtagcctgcccggaatgcgatattccagtgatttacggtgatacgcagaaatcgaacgtgctggaaaataacgatgttgaagatgtcgctatctcccgcgagcagcagaatgtttctgtaccaatgccgcagctggagcaggcaaatcaggcgttagtggcgaagactggcgcgcaggagtacgcaccgcacgtcatcaacactccgctggcattcctgattaagagtgctttgaacaccaatatctttggtgaaccaggctggcagggtaccggctggcgtgcaggtcgtgatttgcagcgtcgcgatatcggcgggaaaaccggtaccactaacagttcgaaagatgcgtggttctcgggttacggtccgggcgttgtgacctcggtctggattggctttgatgatcaccgtcgtaatctcggtcatacaacggcttccggagcgattaaagatcagatctcaggttacgaaggcggtgccaagagtgcccagcctgcatgggacgcttatatgaaagccgttcttgaaggtgtgccggagcagccgctgacgccgcctccgggtattgtgacggtgaatatcgatcgcagcaccgggcagttagctaatggtggcaacagccgcgaagagtatttcatcgaaggtacgcagccgacacaacaggcggtgcacgaggtgggaacgaccattatcgataatggtgaggcacaggaattgttctga

SEQ ID NO: 470401 - DNA, 561 bp, Shigella flexneri
atgaacaaatcattacaaaaacccaccattctgaatgttgaaactgtagcccgttcccgactgtttaccgtcgagagcgtggatctggagttcagcaatggcgtgcggcgtgtttatgaacgaatgcgtccaaccaaccgggaagcagtgatgattgtgccgattgtggacgatcacctgatcctgatccgcgaatacgcagtgggaactgaatcctacgaattaggtttttcgaaaggattaattgatccgggtgaaagcgtctacgaagccgctaaccgcgagctaaaagaagaggttggatttggtgcgaacgatctgacttttttgaagaagctcagcatggcaccgtcttacttttccagcaaaatgaatatcgtggtcgcgcaagatctctacccggaatcgctggaaggcgatgagccagagccgctaccacaggtgcgctggccgctggcgcatatgatggatttgctggaagaccctgacttcaacgaagcgcgtaatgtcagcgcgctgttcctcgtgcgcgaatggttgaaagggcaggggcgagtgtaa

SEQ ID NO: 470402 - DNA, 2136 bp, Shigella flexneri
atgagcaccattgtgatttttttagctgctttgctggcctgctcactacttgcgggatggctgataaaagtgcgatccagacggcgtcagctgccctggaccaacgccttcgcggatgcgcaaacgcgtaaactcacacctgaagaacgtagcgccgttgaaaattatcttgagagcctgacgcaggtattacaggtgcctggcccaacgggagctagcgcggcaccgatctctctggcgctgaatgccgaaagcaacaacgtcatgatgctgacacacgctatcacacgttacggcatctctaccgacgatccgaataaatggcgttactacctcgattcggtagaagtccacctgccccccttctgggaacagtacatcaacgatgagaataccgttgaactgattcataccgattcgctgccgttggttatttcactcaacggtcatacgctgcaggagtacatgcaggaaacgcgcggctatgccttgcaacctgttccgtccacgcaggcgtcgattcgcggggaagagagtgagcaaatcgagctactcaatattcgcaaagaaacgcatgaagaatatgcgctgagtcgtccgcgcgggctgcgtgaagcgttgctgatcgtcgcctccttcctgatgttctttttctgcctgattaccccggatgtatttgttccgtggctggcaggcggcgcattactgctgctgggcgcaggtctgtgggggctattcgcgcccccggcaaaatcctccctgcgagaaattcattgtctgcgcggtacaccccgtcgttggggattgtttggcgaaaacgatcaggaacagatcaacaatatttcactcggtattatcgacctggtctatcccgcacactggcagccatacattgctcaggatctcggtcaacaaaccgatattgatatctatctcgaccgccacgtagtgcgtcaggggcgatatctttcgctgcatgatgaagtaaaaaactttccgttacagcactggctgcgcagtacgattatcgctgcgggctcgctgctggtgctgtttatgctgttattctggatcccgctggatatgccgctgaaattcactctctcatggatgaaaggcgcgcagaccattgaagccaccagcgtaaaacaactggctgacgctggcgtgcgggtaggcgatacattgcgtattagcggtacgggaatgtgtaatattcgcacttccggaacctggagcgcgaaaaccaattcaccttttttaccgtttgactgctcgcagatcatctggaatgacgcccgctcattaccattaccagaatctgaactggtcaacaaagcgacggcattgactgaagcagttaatcgccagctgcaccctaaaccggaagatgaatctcgcgtcagtgcctcattgcgttcagcgattcaaaaatccggcatggtattgcttgatgattttggcgacattgtactgaagacagcggatttatgttctgccaaagatgactgtgtgcgactgaaaaatgcgctggtcaatctcggcaacagtaaagactgggacgcgctggtaaaacgcgccaacgccgggaagctcgatggcgtgaatgtgttattacgcccggtgagtgcggaatcgctggataacctggtggcaacctccaccgcgccgtttatcacgcatgaaacggcgcgagcggcacaatcactaaacagtccggcccccggcggattcctgattgtcagcgacgaaggcagcgattttgttgatcagccctggccttcggcatcactttacgactacccgccgcaagaacagtggaacgctttccagaaactggcacaaatgctgatgcatacgccgtttaacgccgaaggtatcgtcacaaaaatcttcactgacgccaatggtacgcagcatattggccttcatccgatcccggatcgttccggcctgtggcgctatctcagcaccacattgctgctactgacgatgctgggtagcgccatttacaatggcgtacaggcctggcgtcgttaccagcgtcatcgcactcgcatgatggagattcaggcctattatgaaagctgcctgaacccgcaactgatcaccccttcagaaagccttatcgaataa

SEQ ID NO: 470403 - DNA, 669 bp, Shigella flexneri
atgcatatcaacattgcctggcaggacgtagataccgttctgctggatatggacggcacgttgctcgacctcgccttcgataactatttctggcaaaagctggtgcctgaaacatggggcgcgaaaaacggggttacgccacaggaagcgatggaatatatgcgccagcaatatcacgacgtacagcatacgctaaactggtactgtcttgattactggagtgagcaactgggtctggatatctgtgcgatgaccaccgagatgggaccgcgcgccgtactgcgtgaagataccattccgtttcttgaggcactgaaagccagcggtaagcagcgaattttgctcaccaatgctcatccgcacaacctggcggtaaaacttgagcatacgggtctggacgcacaccttgatttattactttccacccacacatttggttatccgaaagaggatcagcggttatggcatgcggtggccgaagctacgggtctgaaagctgaaagaacgctgtttattgatgacagcgaagcgattctcgatgctgccgcgcaatttggtattcgttactgcctcggcgtgactaatcctgattccgggattgccgagaaacagtatcaacgccatccgtcactgaatgactaccgccgcctgatcccctcgctaatgtga

SEQ ID NO: 470404 - DNA, 402 bp, Shigella flexneri; identical to SEQ ID NO: 458323

SEQ ID NO: 470405 - DNA, 870 bp, Shigella flexneri
atgccgcaacatgaccaattacatcgctatctgtttgaaaattttgccgttcgcggcgaactggtaaccgtttcggaaaccctgcaacagatccttgagaaccacgattatccgcagcccgttaaaaacgtgctggcagaactgctggttgcgaccagcctgttaaccgctacgctgaagtttgatggtgatatcaccgtacagctgcagggcgacggtccgatgaatctggcggttattaacggtaacaataaccagcaaatgcgcggtgtggcgcgcgtgcagggcgaaattccagaaaatgccgacctgaaaacgctggtcggcaatggttacgtggtgatcaccattaccccgagcgaaggcgaacgctatcagggcgtagttggtctggaaggtgataccctggcggcctgcctagaagattactttatgcgttctgaacagctgccgacgcgcctgtttattcgcaccggcgacgtagacggcaaaccggctgcaggcggtatgttgttgcaggtaatgcctgcgcaaaatacccaacaggacgactttgaccacctggcgacgctaaccgaaaccatcaaaaccgaagaactgctgaccttaccggcaaacgaagtgttgtggcgtttgtatcacgaagaagaggtgacggtttacgatccgcaggatgtggagttcaaatgcacctgctcgcgtgaacgttgcgccgatgcgctgaaaacgctgcctgatgaagaagttgatagcatcctggcggaagatggcgaaattgacatgcattgtgattactgcggtaaccactatctgttcaatgcgatggatattgctgaaatccgcaacaacgcgtctccggcagatccgtaa

SEQ ID NO: 470406 - DNA, 1725 bp, Shigella flexneri
atggataacgttgaactttcaccggcaacacgctgggggatgattgctaccggattacttcaggggctggtttgctacctgcttatcgcctggcttgccggaaaaaatcacagttggattgtttatggcgtgcctgcgaccgtcgcgttttcatccgttttactcttctccgtgatctcttttaaacagaagcgcctttggggatggctggcgctggtgtttattgccacgacagggatgagcggttggctgaagtggcaaactgatggcatgaacccctggagagctgaaaaggcgatttgggattttggctgctatctgctgttgatggcaatgttgttgctaccgtggatacaacaaagccttcgtatccgcaatggcagtagccgctatagctacttttaccagtcagtatggcataacgtacttatattactggtgatttttctctccaatggcctgacgtggctggtgcttttactgtggggtgagttgtttaaacttgttggcatcacgtttttcaatacgctcttttttgcaaccgactggtttatgtatcttacatttggtctggttaccgcactggcggtgatcctcgcgcgtacacagtcacgtttaatcgactctattcaaaagttgttcacgctaatcgccacggggttgctgccgttagtatcattgctaaccctgatgtttatcatcaccctgccgtttacgggcctgagcgcgatttctcgccacatctccgccgccgggttgctgttaacgctggcctttttgcaattgatcttaatggctattgtccgcgatccgcaaaaagcgtcacttccctggacggggccgttgcgttgcctgattaaaaccgctttgctggttgctccgctgtatgtgttcgtcgccacctgggggttatggctgcgggtcgctcagtacggctggactgtcgaccgcttgcagggcgcgctggcggagctggtgttactggtgtggtcgctggggtattttgtcagtattgtctggcgtaatgggcaaaatccccttgttcttcagggcaaagtgaaccttgcggtttcgttattggtgttggtgatactggtgcttcttaattcgccggtgctggacagtatgcgtattagcgtgaacagtcatatggcgcgttatcagagcggcaaaaacacgccagaccaggtaactatctacatgctcgaacagagcggtcgctatggacgtgcggcgcttgagtcgctgaaaagcgatgccgggtttatgaaagacccgaaacgcgcgcgggatctgctgatggcgttagatggagagcaacatcttcaggaacaggtatcggaaaaagtattcgccgaaaatgtgttaattgcccctggttctgttaaaccggatgcgacattctggtcggccttaatccaggatcgctataacgtgatgacctgtattgaaaaagacgcctgcgtactggtcgagcaagatctgaatagtgatggtcaggcggagcggatcctgtttgcttttaatgatgacagagtcattgtctatggctttgactcagacagaaaagaatgggacgcgcttgatatgagtttacttccgaacgaaataacgaaagaaaaattactcacagctgcgaaggatggaaaactggggacgaggccgaaagcgtggcgcgatctgacggtagatggtgaaacgctggaaataaacttaagtaagtga

SEQ ID NO: 470407 - DNA, 1623 bp, Shigella flexneri
atgcgcgttaacaatggtttgcccccgcaagaactcgaggcttatggtatcagtgacgtacatgatatcgtttacaacccaagctacgacctgctgtatcaggaagagctcgatccgagcctgacaggttatgagcgcggggtgttaactaatctgggtgccgttgccgtcgataccgggatcttcaccggtcgttcaccaaaagataagtatatcgtccgtgacgataccactcgcgatactttctggtgggcagacaaaggcaaaggtaagaacgacaacaaacctctctctccggaaacctggcagcatctgaaaggcctggtgaccaggcagctttccggcaaacgtctgttcgttgtcgacgctttctgtggtgcgaacccggatactcgtctttccgtccgtttcatcaccgaagtggcctggcaggcgcattttgtcaaaaacatgtttattcgcccgagcgatgaagagctggcaggtttcaaaccagactttatcgttatgaacggcgcgaagtgcactaacccgcagtggaaagaacagggtctgaactccgaaaacttcgtggcgtttaacctgaccgagcgcatgcagctgattggcggcacctggtacggcggcgaaatgaagaaagggatgttctcgatgatgaactacctgctgccgctgaaaggtatcgcttctatgcactgctccgccaacgttggcgagaaaggcgatgttgcggtgttcttcggcctttccggcaccggtaaaaccaccctttccaccgacccgaaacgccgcctgattggcgatgacgaacacggctgggacgatgacggcgtgtttaatttcgaaggcggctgctacgcaaaaactatcaagctgtcgaaagaagcggaacctgaaatctacaacgctatccgtcgtgatgcgctgctggaaaacgtcaccgtgcgtgaagatggcactatcgactttgatgatggttcaaaaaccgagaacacccgcgtttcttatccaatctatcacatcgataacatcgttaagccggtttccaaagcgggccacgcgactaaggttatcttcctgactgctgatgctttcggcgtgttgccgccggtttctcgcctgactgccgatcaaacccagtatcacttcctctctggcttcaccgccaaactggccggtactgagcgtggcatcaccgaaccgacgccaaccttctccgcttgcttcggcgcggcgttcctgtcgctgcacccgactcagtacgcagaagtgctggtgaaacgtatgcaggcggcgggcgcgcaggcttatctggttaacactggctggaacggcactggcaaacgtatctcgattaaagatacccgcgccattatcgacgccatcctcaacggttcgctggataatgcagaaaccttcactctgccgatgtttaacctggcgatcccaaccgaactgccgggcgtagacacgaagattctcgatccgcgtaacacctacgcttctccggaacagtggcaggaaaaagccgaaaccctggcgaaactgtttatcgacaacttcgataaatacaccgacacccctgcgggtgccgcgctggtagcggctggtccgaaactgtaa

SEQ ID NO: 470408 - DNA, 1353 bp, Shigella flexneri
atgaggcgattgcgcttctcgccacgaagttcatttgcccgtacgttattgctcatcgtcaccttgctgttcgccagcctggtgacgacttatctggtggtgctgaacttcgcgattttgccgagcctccagcagtttaataaagtcctcgcgtacgaagtgcgtatgttgatgaccgacaaactgcaactggaggacggcacgcagttggttgtgcctcccgctttccgtcgggagatctaccgtgagctggggatctctctctactccaacgaggctgccgaagaggcaggtctgcgttgggcgcaacactatgaattcttaagccatcagatggcacagcaactgggcggcccgacggaagtgcgcgttgaggtcaacaaaagttcgcctgtcgtctggctgaaaacctggctgtcgcccaatatctgggtacgcgtgccgctgaccgaaattcatcagggcgatttctctccgctgttccgctatacgctggcgattatgctattggcgataggcggggcgtggctgtttattcgtatccagaaccgaccgttggtcgatctcgaacacgcagccttgcaggttggtaaagggattattccgccgccgctgcgtgaatatggcgcttcggaggtgcgttccgttacccgtgcctttaaccatatggcggctggtgttaagcaactggcggatgaccgcacgctgctgatggcgggggtaagtcacgacttgcgcacgccgctgacgcgtattcgcctggcgactgagatgatgagcgagcaggatggctatctggcagaatcgatcaataaagatatcgaagagtgcaacgccatcattgagcagtttatcgactacctgcgcaccgggcaggagatgccgatggaaatggcggatcttaatgcagtgctcggtgaggtgattgctgccgaaagtggctatgagcgggaaattgaaaccgcgctttaccccggcagcattgaagtgaaaatgcacccgctgtcgatcaaacgcgcggtggcgaatatggtggtcaacgccgcccgttatggcaatggctggatcaaagtcagcagcggaacggagccgaatcgcgcctggttccaggtggaagatgacggtccgggaattgcgccggaacaacgtaagcacctgttccagccgtttgtccgcggcgacagtgcgcgcaccattagcggcacgggattagggctggcaattgtgcagcgtatcgtggataaccataacgggatgctggagcttggcaccagcgagcggggcgggctttccattcgcgcctggctgccagtgccggtaacgcgggcgcagggcacgacaaaagaagggtaa

SEQ ID NO: 470409 - DNA, 720 bp, Shigella flexneri
atgcaagagaactacaagattctggtggtcgatgacgacatgcgcctgcgtgcgctgctggaacgttatctcaccgaacaaggcttccaggttcgaagcgtcgctaatgcagaacagatggatcgcctgctgactcgtgaatctttccatcttatggtactggatttaatgttacctggtgaagatggcttgtcgatttgccgacgtcttcgtagtcagagcaacccgatgccgatcattatggtgacggcgaaaggggaagaagtggaccgtatcgtaggcctggagattggcgctgacgactacattccaaaaccgtttaacccgcgtgaactgctggcccgtattcgtgcggtgctgcgtcgtcaggcgaacgaactgccaggcgcaccgtcacaggaagaggcggtaattgctttcggtaagttcaaacttaacctcggtacgcgcgaaatgttccgcgaagatgagccgatgccgctcaccagcggtgagtttgcggtactgaaggcactggtcagccatccgcgtgagccgctctcccgcgataagctgatgaaccttgcccgtggtcgtgaatattccgcaatggaacgctccatcgacgtgcagatttcgcgtctgcgccgcatggtagaagaagatccagcgcatccgcgttacattcagaccgtttggggcctgggctacgtctttgtaccggacggctctaaagcatga

SEQ ID NO: 470410 - DNA, 477 bp, Shigella flexneri
atgaaaacgcccctggttacccgggaagggtatgaaaaactcaaacaagagcttaattatctctggcgtgaagaacgcccggaggtcacaaaaaaggtgacctgggccgcaagtctgggcgaccgcagcgaaaatgctgactatcagtataataaaaagcgtctgcgtgaaatcgaccgtcgcgtgcgctatctcactaaatgcctggaaaatctcaaaatcgtcgattactcccctcagcaggaaggcaaagtcttttttggcgcgtgggtggagattgaaaacgacgatggcgtgactcaccgtttccgtattgtcggctacgatgaaatttttggccgtaaagattacatctctatcgattccccgatggcccgcgcattgctgaaaaaagaagtcggcgatctggcggtggtgaatacccctgccggggaagcgaactggtatgttaatgctatcgagtacgtgaaaccgtaa

SEQ ID NO: 470411 - DNA, 2322 bp, Shigella flexneri
atgatgaatgattcgttctgccgcattattgcgggtgaaattcaggcgcgcccggaacaggttgacgctgccgttcgcctgcttgacgaagggaataccgtgccgtttatcgcacgttatcgtaaggaaatcaccggcggtctggatgacacgcagctgcgtaatctggaaacgcgtctgagctatctgcgcgagctggaagagagacgtcaggcgatcctcaaatccatttccgagcaaggcaaactcaccgatgatctggcgaaggccatcaacgccaccctaagcaaaaccgaactcgaagacctctacctgccctacaaacctaaacgccgcacccgcgggcaaatcgccattgaagcagggcttgagccgttggctgacctgctgtggagcgatccgtcacacacgccagaagtcgccgctgcacaatatgttgatgccgataaaggcgtggcagataccaaagccgcgctggatggcgcgcgctatatcctgatggaacggtttgccgaagatgccgcgctgctggcgaaagtgcgtgattatctgtggaagaacgcgcatttggtttctacggtggtgagcggtaaagaagaggaaggggcgaaattccgcgactatttcgatcatcacgaaccgttgtccacggtgccttctcaccgcgcgctggcgatgttccgtgggcgtaacgaaggcgtactccagctttcgctgaatgccgatccgcagttcgatgagccgcccaaagagagctattgcgagcaaatcatcatggatcaccttggcctgcgcctgaacaatgccccggcggatagctggcgcaaaagcgtagtgagctggacctggcgcatcaaggtgctgatgcatctggaaaccgaactgatgggtaccgtgcgcgaacgcgcggaagatgaagcaatcaacgtctttgcccgtaacctgcacgatctgctgatggcggcccctgccggactgcgtgcaacgatgggcctcgatccgggtctgcgtaccggggtaaaagtggcggtggtcgatgccactggcaaactggtggcgaccgataccatttacccgcacaccggacaagccgcaaaagcagcgatgaccgttgctgccttgtgtgaaaaacataacgttgaactggtggcgatcggcaacggtacagcttcccgcgaaactgaacgtttctatctcgacgtgcagaagcagttcccgaaagtgaccgcacagaaagtgatcgtcagcgaagctggcgcgtcggtttactcagcttccgagctggcagcgcaggagttcccggatctcgacgtttcgctgcgtggtgcggtatctatcgcccgccgtttgcaggatccgctggcggagctggtgaaaatcgatccgaaatctatcggcgtaggtcagtatcagcatgacgtcagccagacgcaactggcccgcaaactggatgcagtagtagaagactgcgtaaacgccgttggcgtcgatctcaacaccgcttctgttccgctattaacccgcgtggcgggcctgacgcgcatgatggcgcaaaacatcgtggcctggcgcgatgagaacggccagttccagaaccgtcagcaactgctgaaagtcagccgtctggggccgaaagccttcgagcagtgcgcgggcttcctgcgcattaaccacggtgataacccgctggacgcctctaccgttcatccggaagcctatccggtggtggaacgcattctggcagcaacacagcaggcactgaaagatctgatgggtaacagcagcgaactgcgtaacctgaaagcgtctgactttactgatgaaaaattcggtgtgccgacagtaactgacatcatcaaagagctggaaaaaccgggtcgcgatccgcgtccggaatttaaaaccgctcagtttgccgatggcgtcgagacaatgaacgacctgcaaccgggtatgatcctcgaaggcgcagtgaccaacgtcaccaactttggcgcgtttgtcgatattggcgtgcatcaggacggcctggttcacatctcttcattatcgaacaagtttgtggaagatccgcataccgtggtgaaagcgggcgacattgtgaaggtgaaagtgctggaagtggatcttcagcgtaaacgtatcgccctgactatgcgtctggacgagcagcctggcgaaaccaactctcgtcgcggcggcggtaatgaacgcccgcaaaacaaccgcccggcagccaaaccacgcggtcgtgaagcgcagcctgccggtaatagcgcgatgatggatgcgctggcggcagcgatgggtaaaaaacgttaa

SEQ ID NO: 470412 - DNA, 228 bp, Shigella flexneri
atgcaatacactccagatactgcgtggaaaatcactggcttttcccgtgaaatcagcccggcatatcgccaaaaactgctttctctaggcatgttacctggctcctcttttgatgtggtgcgcgtcgctccactcggcgaccccattcatatcgaaacccgtcgtgtgagcctggtattacgcaaaaaagatctggccttattagaagtggaagcggtttcctgttaa

SEQ ID NO: 470413 - DNA, 2322 bp, Shigella flexneri
atgaaaaaattaaccattggcttaattggtaatccaaattctggcaagacaaccttatttaaccagctcactggcgcacgtcagcgtgtaggtaactgggctggcgttaccgtcgaacgtaaagaagggcaattctccaccaccgatcatcaggtcacgctggtggacctgcccggcacctattctctgaccaccatctcatcgcagacctcgctcgatgagcaaatcgcctgtcactacattttgagtggcgacgccgacctgctgattaacgtggtggatgcgtctaaccttgagcgtaacctgtacctgacgctgcaactgctggaactcggcattccctgcatcgtggcgctgaacatgctcgacattgccgagaagcaaaatattcgtattgaaattgatgctctatcggcacgtcttggctgcccggtgatcccgctggtttcaacccgtggtcgcggtattgaagcgctcaagctggcgattgatcgctataaagctaacgagaatgtggaactggtgcattacgcacagccgctactcaacgaagcagattcactggcaaaagtgatgccttccgacatcccgctgaaacaacgtcgctggctgggcctgcaaatgctggaaggcgatatctacagccgcgcctacgccggtgaagcgtcgcagcatctggatgccaccctcgcccgtctgcgtaatgaaatggatgatccggcgctgcacattgccgatgcgcgttaccagtgcattgctgccatctgtgatgtggtaagcaacaccctgacggcagaacccagccgtttcaccactgcggtagataaaatcgtgctcaaccgtttcctcggtctgccgattttcctctttgtgatgtacctgatgttcctgttggctatcaacatcggcggggcgttacagccgctgtttaacgtcggctccgtggcgctatttgtgcatggtattcaatggattggctacacgctccacttcccggactggctgactatcttcctcgcccagggcctgggtggcggtattaacaccgtgctgccactggtgccgcagatcggcatgatgtacctgttcctctccttccttgaggactccggctatatggcgcgtgcagcgtttgtgatggaccgcctgatgcaggcgctgggcttgccggggaaatcctttgtgccgctgatcgtcggtttcggttgtaacgtaccgtcggtaatgggcgcacgtacgcttgatgcaccgcgtgaacgtctgatgaccatcatgatggcaccgtttatgtcctgcggcgcgcgtctggctatcttcgcagtattcgcggctgccttcttcgggcagaacggtgccctggcggttttctcgctgtatatgctcggtatcgtgatggcggtgctgactggcctgatgctcaagtacaccatcatgcgcggtgaagcgacgccgtttgtcatggagctgccggtctaccatgtaccacacgttaaaagcctgattatccagacctggcagcgtctgaagggcttcgttctgcgtgctggtaaagtgattatcatcgtcagcattttcctgagcgctttcaacagcttctcgttgagcgggaaaatcgtcgataacatcaacgactcggcgctggcttccgtcagccgggtgataacccctgtcttcaagccgattggcgtacatgaagataactggcaggcaacggttggcctgtttacgggcgcaatggcaaaagaagtggtggtgggtacgctcaacaccctctacaccgcagaaaatattcaggacgaagagttcaatccggcggaattcaacctcggtgaagagctgttcagtgcggtagatgaaacctggcagagcctgaaagacaccttcagccttagcgtactgatgaaccccattgaagctagcaaaggcaacggtgaaatgggtaccggggcgatgggcgtgatggatcagaaattcggtagcgcagctgccgcatacagctacctgattttcgtcctgctgtatgtaccatgtatctcggtgatgggagccatcgcccgtgaatcaagccgtggctggatgggcttctccatcctgtgggggctgaatatcgcttactcactggcaacattgttctatcaggtcgccagctacagtcagcacccaacttacagcctggtgtgcattctggcggtaatcctgtttaacatcgtagctatcggtctgctgcgccgcgcgcgtagccgggtggatatcgaactgctggcaacccgcaagtcggtaagcagttgctgcgcagccagcaccaccggtgattgccattaa

SEQ ID NO: 470414 - DNA, 237 bp, Shigella flexneri
atggcttcacttattcaggtacgtgatttgctggcgttacggggccgtatggaagcgacccagataagccagacattgaacactccgcagccaatgattaacgccatgctgcaacagctggaaagcatgggcaaagccgtgcggattcaggaagaacctgacggctgcctctctggcagttgtaaaagctgcccggaaggcaaagcctgtctgcgcgagtggtgggcgctgcgttaa

SEQ ID NO: 470415 - DNA, 888 bp, Shigella flexneri
atgagtaaaaagcagagttccaccccacatgatgcgctgttcaaactctttttacgccaaccggagacggcacgcgattttcttgcgtttcatttaccggcacccattcacgcgctctgtgatatgaaaaccctcaagctggagtcgaggagctttattgatgacgatctgcgtgaaagctattccgatgtgctgtggtcggtgaaaacggaacaaggaccaggatacatctattgtctgattgaacatcaaagcacctcaaacaaactgatcgcatttcgcatgatgcgttacgctattgccgcaatgcaaaatcaccttgatgctggatacaaaacgttgccgatggtggtgccattgttgttttaccacggtattgaaagcccctatccctattcgctgtgttggctggattgtttcgccgatcccaaactggcaaggcagctttatgcctccgcatttccgctgattgatgtcaccgtcatgcctgatgatgaaatcatgcagcaccgacgtatggcgctgctggagttaattcaaaaacatattcgtcaacgcgatctgatggggctggtagagcaaatggcctgcttattaagtagtggatacgctaatgacagacaaatcaaagggctgtttaattacatactgcaaactggcgacgctgtacgttttaacgattttatcgacggcgttgccgaacgttcaccgaaacacaaggagagtttaatgactattgcggaaagattgcggcaggagggggaacaatccaaagccctgcatatagccaaaataatgcttgaatccggagtccctcttgcagacatcatgcgatttaccgggctgtcagaagaagagttggctgcggcgagtagactggccccctga

SEQ ID NO: 470416 - DNA, 189 bp, Shigella flexneri
atgagcagaaaaacccaacgttactctaaagagttcaaagccgaagctgtcagaacggttcttgaaaatcaactttcgatcagtgaaggcgcttcccgattatctcttcctgaaggcactttaggacaatgggttaccgcacggtggctgaactggaatctgaaattctgcaactgcgtaaggcgttaa

SEQ ID NO: 470417 - DNA, 480 bp, Shigella flexneri
atggaatcgctctcagagagaacctcaacaggctaccagcaaatccacaacggcattattcatctggtcgatagcgcccgaacggaaacggtacgtagcgttaacgcgctgatgaccgcgacgtactgggaaattggccgacggattgtcgaatttgaacaaggtggtgaggccagagcagcttatggtgcacagttgattgatcggctatcgaaggatttaagtcgacggtataaacgtggggtctctgcaaaaaacttacgccaaatgaggcttttttacctcttttttcaacatgttgaaattcgccagacagtgtctggcgaattaacaccattgggaattccgcagacaccatctgcagaattcccatcggcaaagatttggcagacgctgtctgccaaattgagaggctgtttgatatttccacagcttttgtattgcatctcctattttcggtttgtatattcatgcaaataa

SEQ ID NO: 470418 - DNA, 1419 bp, Shigella flexneri
atgagtcagaatgtttatcaatttatcgacctgcagcgcgttgatccgccaaagaaaccgctgaagatccgtaaaattgagtttgttgaaatttacgagccgttttccgaaggccaggccaaagcgcaggctgaccgctgtctgtcgtgcggcaacccatactgcgagtggaaatgcccggtacacaactacatcccaaactggctgaagctcgccaacgaggggcgtatttttgaagcggcagaactgtcgcatcagaccaacacactgccggaagtatgcggacgtgtctgcccgcaagaccgtctgtgcgaaggttcctgcaccctgaacgatgagttcggtgcggtgaccatcggcaacattgagcgttatatcaatgataaagcgttcgaaatgggctggcgtccggatatgtccggcgtgaagcaaaccggtaaaaaagtggcgattatcggtgcaggcccggcaggtctggcgtgtgcggatgtcctgacgcgtaacggcgtaaaagccgttgtcttcgaccgtcatccagaaattggcgggctgctgaccttcggtattccggccttcaagctggaaaaagaggtaatgacgcgtcgccgtgaaatcttcaccggcatgggtattgaattcaaactcaataccgaagtgggccgcgacgtacagctggacgatctgctgagtgattacgatgccgtgttccttggcgttgggacttatcagtcaatgcgcggcgggctggaaaacgaagacgccgatggcgtgtacgcagcgctgccgttccttatcgccaacaccaaacagttaatgggctttggtgaaacccgcgacgaaccgttcgtcagcatggaaggcaaacgcgtggtagtacttggcggtggcgacactgcgatggactgcgtgcgcacgtctgtacgccagggggcaaagcacgttacctgtgcctatcgtcgtgatgaagagaacatgccgggttcccgccgcgaagtgaaaaacgcgcgggaagaaggcgtagagttcaaattcaacgtccagccactggggattgaagtgaacggtaacggcaaagtcagcggcgtaaaaatggtacgtaccgaaatgggcgaaccggatgccaaaggccgtcgccgcgcggagatcgttgcaggttccgaacatatcgttccggcagatgcggtgatcatggcgtttggtttccgtccacacaacatggaatggctggcaaaacacagcgtcgagctggattcacaaggccgcatcatcgctccggaaggcaacgacaacgctttccagaccagcaacccgaaaatctttgctggcggcgatatcgtccgtggttccgatctggtcgttaccgccatcgccgaaggtcgcaaagcggcagacggcattatgaactggctggaagtttaa

SEQ ID NO: 470419 - DNA, 4554 bp, Shigella flexneri
atgacacgcaaaccccgtcgccacgctctttctgtgcccgtgcgcagcggttcggaagtggggttcccgcagagcctgggggaggttcacgatatgttgtacgataaatcccttgagagggataactgtggtttcggcctgatcgcccacatagaaggcgaacctagccacaaggtagtgcgtactgcaatacacgcactggcccgcatgcagcaccgtggcgcgattctcgccgatggtaaaaccggcgacggttgcggcttgctgttacaaaaaccggatcgcttttttcgcatcgttgcgcaggagcgcggctggcgtttagcaaaaaactacgctgtcgggatgctcttcctgaataaagatcctgaactcgccgctgccgcacgccgcatcgttgaagaagaactgcaacgcgaaaccttgtcgattgtgggctggcgtgatgtccccactaacgaaggcgtgctgggtgaaatcgccctctcctctctgccacgcattgagcaaatttttgtgaacgccccggcaggctggcgtccacgcgatatggagcgccgtctgtttatcgcccgccgccgcattgaaaagcgtctcgaagccgacaaagacttctacgtctgtagcctgtcgaatctggtgaacatctataaaggtctgtgtatgccggcggatctgccgcgcttttatctggatcttgcggacctgcgtctggaatcggccatttgcctgttccaccagcgcttctccactaacaccgtaccgcgctggccgctggcgcaaccgttccgctatctggcgcataacggtgaaatcaacaccatcaccggtaaccgccaatgggcgcgtgcgcgtacctataaattccagacgccgctgatccctgacctgcacgacgccgcgccattcgtcaacgaaaccggttctgactccagttccatggataacatgctggaactgctgctggcaggcgggatggatatcatccgcgccatgcgcctgttagtgccacccgcctggcagaacaacccggatatggacccggaactgcgtgccttctttgactttaactccatgcatatggagccgtgggatggtccggcgggcatcgtgatgtccgatggtcgcttcgctgcctgtaacctcgaccgtaacggtctgcgtccggcacgctacgtcattaccaaagacaagctcatcacctgcgcctctgaagtcggtatctgggattaccagcctgacgaagtggtcgaaaaaggccgcgtcgggccaggcgaactgatggtgatcgacactcgcagtgggcgtattctgcactcggcagaaaccgatgacgatctgaaaagccgccacccttataaagagtggatggagaaaaacgtccgccgactggtaccgtttgaagatctgcccgatgaagaagtgggtagccgcgaactggacgacgacacgcttgccagctaccagaaacagtttaactacagcgcggaagagctggactccgtaattcgcgtactgggcgaaaacggtcaggaagcggtcggttcgatgggcgatgataccccattcgccgtgctctccagtcagccgcgcattatttacgactacttccgccagcagtttgcccaggtgactaacccgccaatcgacccgctgcgtgaagcgcatgttatgtcgctcgccaccagtatcggtcgtgaaatgaacgtcttttgcgaagcagagggccaggcgcaccgtttaagctttaaatcgccgattctgctctactccgatttcaaacagctcacgacgatgaaagaggagcactaccgcgcagatacgctggatatcacctttgacgtcactaaaaccacgctcgaagcgacagtcaaagagctatgcgacaaagccgaaaaaatggtacgtagcggcaccgtgttgctggtgctctccgaccggaatatcgctaaagatcgcctgccggttccggctccgatggcggttggcgcgatccagacccgtctggtcgatcaaagcctgcgttgcgatgccaacatcatcgtcgaaaccgccagcgcccgcgatccgcaccacttcgccgtgttgctgggtttcggcgcgacggctatttatccgtaccttgcctatgaaacgctgggccgcctggtagacacccacgcgattgccaaagattatcgtaccgtgatgctcaactaccgtaacggcatcaacaaaggcttgtacaaaatcatgtccaaaatgggcatctccaccatcgcctcttaccgctgctcgaaactgtttgaagcggtcggtctacacgatgatgtagtgggcctgtgcttccagggcgcggtcagccgcattggtggggcaagctttgaagacttccagcaggatctgctgaatctgtcgaaacgtgcctggctggcgcgcaagccgattagccagggcggcctgctgaaatacgtccacggcggcgaataccacgcctacaacccggacgtggtgcgcacgctgcaacaggcggtacaaagcggcgagtacagcgactatcaggaatacgcgaagctggttaatgagcgtccggcaaccacgctgcgcgatctgctggcaattacgccgggtgaaaacgcggtcaacattgctgatgttgaaccggcaagcgaactgtttaaacgctttgataccgccgcgatgtctatcggcgcgttaagcccggaagcccacgaggcgctggcggaagcgatgaatagcatcggcggtaactcgaactccggtgaaggcggcgaagacccggcgcgctatggcactaacaaagtgtcgcgcatcaagcaggtggcttctggtcgcttcggcgttactccggcgtatctggtcaatgccgacgtcattcagattaaagtcgcccagggcgcgaagccgggcgaaggtggtcagttgccgggcgacaaagtcactccttacatcgccaaactgcgctattcggtgcccggagtgacgctgatctccccgccgccgcaccacgatatctactctatcgaagacttagcgcagcttattttcgacctcaagcaggttaacccgaaagcgatgatctccgttaagctggtgtccgaaccaggcgttggcaccatcgcgactggcgtggcgaaagcttatgcggacttgatcaccatcgcgggctatgacggcggcaccggcgcaagcccgctgtcgtcagtgaaatatgcaggctgcccgtgggaactcggtctggtggaaacccaacaggcgctggttgccaacggcttgcgtcataaaattcgtttgcaggttgatggcggcctgaaaacgggtgtcgatatcatcaaagcggcgattctcggcgcagaaagcttcggcttcggcactggcccaatggtggcgctcggctgtaaatatctgcgtatttgccacctgaacaactgcgccacgggtgtagcaactcaggatgacaaactgcgtaagaatcactatcacggcctgccgttcaaggtgactaattactttgagtttatcgcccgtgaaacccgcgagctgatggcacagctgggagtaacgcgtctggtggatctgattggtcgcaccgacctgctgaaagagctggacggtttcaccgccaaacagcagaaactggcgctgtcgaagctgctggagactgccgagccacatgcaggtaagtcactctactgcactgaaaacaacccgccgtttgataacggcctactgaacgcgcagttgctgcaacaggcgaaaccgtttgtcgatgaacgccagagcaaaaccttctggttcgatatccgcaacaccgaccgttctgtcggcgcgtcgctttcaggctatatcgcccagacgcacggcgatcaggggctggcagccgatcctatcaaagcgtacttcaacggcaccgcaggccagagtttcggtgtgtggaacgcgggcggcgtggaactgtacctgaccggggatgccaacgactatgtcggtaaaggcatggcgggcggcttaatcgccattcgtcctccggttggttccgccttccgcagccatgaagcaagcattatcggcaacacctgcctgtatggcgcgaccggtggtcgtctgtatgccgcaggccgcgcgggtgaacgtttcggcgtgcggaactccggtgctatcaccgtggtagaaggcattggcgacaacggctgtgaatatatgacgggcggtattgtctgtattctgggtaaaaccggcgttaacttcggcgcgggcatgaccggcggcttcgcttacgttctcgatgaaagcggtgatttccgcaaacgcgttaacccggaactggtcgaagtcttaagcgtcgacgatctggcgatccatgaagagcatctgcgcggtcttatcaccgagcatgttcagcataccggttctcagcgcggtgaagagattctggcgaactggtcaaccttcgccacgaaattcgcgctggttaaaccgaagtccagtgatgtaaaagcactgctgggtcaccgtagtcgtagcgcagcagagttgcgcgtgcaggcgcagtaa

SEQ ID NO: 470420 - DNA, 930 bp, Shigella flexneri
atgcagttacagaaattagtcaatatgtttggtggtgatctcacccgtcgttatgggcaaaaggtgcataagctgacgctgcacggcggttttagctgccctaaccgtgacggtaccatcgggcgtggtggctgcacattctgtaatgttgcctcgtttgccgatgaagcgcagcagcatcgttccattgccgagcaactggcgcaccaggcgaatttagttaaccgcgctaaacgctatctggcctactttcaggcgtataccagcacctttgcggaagttcaggtgctgcgttctatgtatcagcaggcggtgagccaggccaatattgtcggtttgtgtgttggtacccgcccggactgcgtgccggatgtggtgctggatctgctttgcgaatataaggaccagggttacgaagtgtggctggagctggggctacaaaccgcccacgacaaaacactgcatcgcatcaaccgcggccatgattttgcctgttatcagcgtacaacccagctggcacgtcagcgcgggctgaaggtgtgttcccacttaattgtcggcctgcctggcgaagggcaggctgaatgtttgcaaacgctggagcgagtggttgaaaccagcgtggacggcataaagctgcatccgctgcatattgtgaaaggcagcattatggcgaaagcctgggaagcggggcgtttgaacggtattgaactggaggattatacgctcactgccggagaaatgattcgccatacgccaccggaagtgatctaccaccgcatttccgccagcgcccgtcgcccgacgctgcttgctccgctgtggtgcgaaaatcgatggacgggaatggtcgagctggatcgctatctgaatgaacatggcgtacagggatcggcgctgggacgtccgtggctacctccaacggagtag

SEQ ID NO: 470421 - DNA, 2337 bp, Shigella flexneri
atgaagcaaattcgtctgctggcgcagtattatgttgacctgatgatgaagttaggtctggtgcgcttctcaatgttgctggcgctggccctcgtcgttcttgccattgtggtacaaatggcggtaaccatggtgctgcatggtcaggtcgaaagcattgatgttattcgttctatcttctttggtttgctgattacgccgtgggcggtctactttctatcggtggtcgtcgagcaactggaggagtcacgacaacgtctgtcacggctggtgcaaaaactggaggagatgcgcgagcgcgatttgagcctcaacgttcagttaaaagataatattgcccagctaaatcaggaaattgccgttcgtgaaaaagcggaagcagaactgcaggaaaccttcggccaactgaaaattgaaatcaaagagcgcgaagagacacaaattcagctcgagcagcaatcctcattcttacgttccttccttgatgcttcacccgacttggttttttatcgtaacgaagataaagagttttccggctgtaaccgcgcgatggagctgctgaccggaaaaagcgaaaaacaactggttcacctgaaacctgctgatgtttactcaccggaagccgccgcaaaagtcattgaaaccgatgaaaaagtgttccgtcataatgtgtcactgacctatgaacagtggctggattacccggacgggcgcaaagcctgctttgaaatccgtaaagtgccgtactacgaccgcgtgggtaaacgtcacggtttgatgggctttggtcgcgacattaccgagcgtaagcggtatcaggatgcgcttgaacgcgccagccgcgacaaaacgacgtttatttccaccatcagtcacgaattgcgtacaccgctgaacggtatcgtcggcctgagccgcattctgctggataccgaactcaccgccgagcaggaaaaatatctcaaaactatccatgtttcggccgtcacgctggggaatatctttaacgatattatcgacatggataagatggaacggcgcaaggtccagcttgataatcagccggttgatttcaccagcttccttgccgatctggaaaatctctccgcattgcaggcgcaacaaaaaggattgcgctttaacctggagcctacgctgccattaccgcatcaggtcattaccgacgggacgcgtttacggcagatcctgtggaacctcatcagtaacgccgtcaaattcacccagcaaggccaggttaccgtgcgcgtgcgctacgatgaaggcgatatgctgcattttgaagtggaagattctggtatcggcattccgcaggatgagctggataaaatcttcgccatgtattaccaggtgaaagacagtcatggcggtaaacctgccaccggcaccggtattggtctggccgtttctcgtcgtctggcgaaaaatatgggcggcgatattacggttaccagtgaacagggcaaaggttcaacctttacgttgacgatccacgcaccgtcggtggcagaagaggtcgatgatgcgtttgatgaagacgatatgcctttaccggcgctgaatgtgctgctggtggaagacattgaactgaacgtgattgtcgcgcgttctgtgctggaaaaattaggtaacagcgttgatgtcgccatgaccggcaaggcggcgctggagatgtttaaaccgggcgaatacgacctggtgttgctggatattcagttgccagatatgaccgggctggatatctctcgtgaactgacgaagcgttatccgcgcgaggatttaccgccgctggtggccttaaccgctaacgtgctgaaagacaaacaagagtacctcaatgctggaatggatgatgtgctgagtaagccgctttcggttccggcgctaaccgcgatgatcaagaaattctgggatacccaggatgatgaggagagtacggtgacgacagaagagaacagtaaatcagaagcattgctcgatattcccatgctggaacagtatctcgaacttgtaggaccgaagctgatcaccgacgggttagcggtgtttgagaagatgatgccgggctatgtcagcgtgctggagtcgaatctgacggcgcaggataaaaaaggcattgttgaggaaggacataaaattaaaggtgcggcggggtcagtggggttacgccatctgcaacagctgggtcagcaaattcagtctcctgaccttcccgcctgggaagataacgtcggtgaatggattgaagagatgaaagaagagtggcgtcacgacgtagaagtgctgaaagcgtgggtggcaaaagccactaaaaaatga

SEQ ID NO: 470422 - DNA, 654 bp, Shigella flexneri
atgaagaaaattggcgtaattctgagcggatgcggcgtctatgacggttctgaaattcatgaagcggtgttgacgttgttagctatttcacgcagcggtgcgcaggcggtctgctttgcaccggataagcagcaggttgatgttatcaaccatttaactggcgaagcgatgacggaaacgcgcaatgtgctgattgaagcggcacgaataacgcgcggtgaaatccgtcctctggcccaggccgatgccgctgaactggatgcgttgattgtgccgggggggtttggcgcggcgaagaatttaagcaattttgccagtcttggtagcgaatgcaccgttgaccgtgaattaaaggcgctggcacaagcgatgcatcaggccggaaaaccgcttggttttatgtgtattgccccggcgatgctgccgaaaattttcgatttcccgctgcgtttgaccatcggtactgatatcgataccgcagaagtgctggaagagatgggcgcggagcatgtgccgtgtcctgtcgatgatatcgtggttgatgaagacaataagattgtcaccaccccagcatatatgctggcgcagaacattgcagaagcggcgagcggcattgataagctggtttcccgcgtgctggttctggctgaatga

SEQ ID NO: 470423 - DNA, 432 bp, Shigella flexneri
atgagtaaaagccgcttaacggtgtttagtttcgttcgccgttttcttttgcggttaatggttgtcctcgccgttttctggggcgggggcatcgcgttgtttagcgttgcgcctgttcccttctcagcggtaatggtcgagcgacaggtcagcgcctggctgcatggcaattttcgttacgtggcacattctgactgggtcagtatggatcaaatctcgccgtggatgggactggcggtgattgccgcagaagatcagaaatttcctgagcactggggctttgatgtcgcttccattgagaaagccctggcgcacaacgagcgcaatgaaaaccgtattcgcggtgcttcaacgatttctcagcagacggccaaaatctctttttatgggatgggcgtagctgggtacgaaaagggctggaagctggattaa

SEQ ID NO: 470424 - DNA, 633 bp, Shigella flexneri
atgattcgcttatctgaacaaagtcccctgggcaccggaagacatcggaaatgttatgcgcatccggaagatgcccaacgctgtatcaagattgtctaccatcgtggcgatggtggcgataaagagatccgccgtgagttaaagtactacgcgcatcttggtcgccggttaaaagactggagtggaataccgcgctatcacggtaccgttgagacggattgcggaaccggttatgtctacgatgtgattgccgattttgacggcaagccttccattacgctgaccgaatttgctgaacaatgccgttacgaagaagacattgcacaactgcgccagctactgaaacagctgaagcgttatttgcaggataaccgtatcgtgacgatgtcgctgaagccgcagaatatcctctgtcaccgcatcagtgagtcagaggttatcccggtcgtctgcgacaacattggtgaaagcacattgattccactggcgacctggtcgaagtggtgttgtctgcgtaagcaagagcggttatggaaacgatttatcgcccaaccggcgctggctattgccctgcagaaagatctgcaacctcgtgagagcaaaacgctggccctcacttcgcgcgaagcttaa

SEQ ID NO: 470425 - DNA, 273 bp, Shigella flexneri
atgaccgtcaagcaaactgttgaaatcacaaacaagctgggcatgcatgcccggcctgcaatgaagctgtttgaattaatgcagggttttgacgctgaagtgctgttacgtaatgacgaaggcaccgaggctgaagccaacagcgttattgcgctgctgatgttggattctgccaaaggacggcagattgaagttgaagcgaccggtccacaggaagaggaagcactggccgccgttatcgccctctttaattctggttttgatgaagattaa

SEQ ID NO: 470426 - DNA, 855 bp, Shigella flexneri
atggtactgatgatcgtcagcggacgttcaggttcaggtaaatctgtcgccctgcgtgcgctggaagatatgggtttttactgcgtggataaccttcccgtagtgttgttacccgatctggctcgaactctggccgatcgcgagatttctgccgccgtcagcattgatgttcgtaatatgccggagtcaccagaaatattcgaacaggcgatgagtaacctgcctgacgctttctcacctcaactactgttcctggatgccgaccgtaataccttaattcgtcgttacagtgacacgcgccgactgcatccgctttccagcaaaaacctgtcgctggaaagtgctatcgacaaagaaagcgatttgctggagcctctgcgttcgcgagcggatctgattgtcgatacctcagaaatgtccgttcacgagctggctgaaatgctgcgtacccgtctgctgggtaaacgtgaacgcgaactgaccatggtctttgagtctttcggcttcaaacacggtatccctatcgatgcagattacgtctttgacgtgcgcttcttgccgaacccgcactgggatccgaaactgcgtccaatgacaggtcttgataaacctgtcgccgcgttcctcgaccgccacacagaagtacacaattttatctaccagacgcgaagctatcttgagctatggttacctatgctggaaaccaacaaccgtagctacctgacggtcgccattggttgtaccggcgggaagcaccgttcggtgtatattgcagagcaactggcagactacttccgctcgcgcggtaaaaacgtccagtcacgccatcgtacgctggaaaaacgtaaaccatga

SEQ ID NO: 470427 - DNA, 492 bp, Shigella flexneri
atgacaaataatgatacaactctacagcttagcagtgttcttaacagggaatgtacgcgaagccgcgtccactgtcagagcaaaaaacgcgccctggaaatcatcagcgagctggcggcgaaacaacttagcctgccgcctcaggtggtttttgaagctatcctgacgcgggaaaaaatgggcagtaccggtatcggcaatggtattgccattccgcatggcaaacttgaagaagatactctgcgtgccgttggcgttttcgttcagctcgaaacgcctatagctttcgatgccatcgacaaccaaccggtggacttactttttgccctgctggtgccggcagaccaaactaaaacgcacctgcatactctgtcgctggtggcgaaacgtctggcggacaaaaccatctgccgccgtttacgcgcagcccagagcgatgaagagctgtatcaaatcattacggataccgaaggtactccggatgaagcgtag

SEQ ID NO: 470428 - DNA, 288 bp, Shigella flexneri
atgcagctcaacattaccggaaataacgtcgagatcaccgaggcactgcgcgaatttgttacagctaaatttgccaaacttgagcaatattttgaccgaatcaaccaagtctatgttgttctgaaagtggagaaagtcacccacacctcagatgcaacactgcatgtaaacggtggtgaaattcatgccagcgcggaaggtcaggacatgtacgctgccattgatggcttaattgataagctggcacgccagttgaccaaacataaagataaactgaaacaacactaa

SEQ ID NO: 470429 - DNA, 1434 bp, Shigella flexneri
atgaagcaaggtttgcaactcaggcttagccaacaactggcgatgacgccacagctccaacaggcaattcgtctgttgcagttgtcgacgctggaacttcagcaggagctacagcaggcgctggagagtaatccgctgcttgagcaaatcgacactcatgaagaaatcgacacccgcgaaacgcaagacagtgaaacgctggacaccgccgacgcgctcgaacaaaaagagatgccggaagagctgccgctcgatgccagttgggacaccatttacaccgctggtacaccatccggcaccagcggtgactacattgacgacgagctgccggtctaccagggcgaaacgacgcagaccttgcaggattacctgatgtggcaggtcgagctgacaccgttttccgacactgaccgcgctattgctacctctatcgtcgatgccgttgatgaaaccggttatctgactgtcccgctggaagatattctcgaaagtatgggcgatgaagagatcgacatcgacgaggttgaagccgtccttaagcggatccaacggtttgacccggtcggtgtagcggcaaaagatctgcgtgactgcctgctaatccaactctcccaattcgataagaccacgccgtggctggaagaggccagattgatcattagcgatcatctcgatctgttagccaatcacgacttccgcactttaatgcgcgtcacgcgtctgaaagaagatgtgctgaaagaagccgtcaatctgatccagtcgctcgatccgcgccccgggcagtcgatccagactggcgaacctgagtatgtcattccagatgtgctggtgcgtaagcataacggtcactggacggtagaactcaacagtgacagcattccgcgtctgcaaatcaaccagcactacgcctcgatgtgcaataacgcgcgcaacgatggtgacagccagtttatccgcagcaatctgcaggatgccaaatggttgatcaagagtctggaaagccgtaacgatacgctactgcgcgtgagtcgctgtatcgttgaacagcagcaagccttctttgagcaaggtgaagaatatatgaaaccgatggtactggccgatatcgcccaggctgtcgaaatgcatgaatcgacgatatctcgcgtgaccacgcaaaaatacctgcatagtccacgaggcatttttgaactgaagtatttcttttccagtcacgtcaataccgagggcggcggcgaagcttcctccacggcgattcgtgcactggtgaagaaattaatcgcggcggaaaacccagcgaaaccgttgagcgacagcaagttaacctctttgctgtcggaacaaggtatcatggtggcacgccgcactgttgcgaagtaccgagagtctttatccattccgccgtcaaaccagcgtaaacagctcgtttga

SEQ ID NO: 470430 - DNA, 726 bp, Shigella flexneri
atggcaacattaactgcaaagaaccttgcaaaagcctataaaggccgtcgcgtggtagaagacgtcagcctgaccgtcaactccggggaaattgtcggtctgctggggccaaacggtgccggtaagaccaccactttctacatggttgtaggcattgtgccgcgcgatgcgggcaacatcattattgatgatgacgatatcagtctgctgcctctgcatgcacgcgcgcgccgcggtatcggctatctgccacaggaagcctccattttccgtcgcctcagcgtttacgataacctgatggcggtactgcaaattcgtgacgacttgtctgctgaacaacgtgaagaccgcgcgaacgagctgatggaagagtttcacattgagcacctgcgtgacagcatggggcagtcactctccgggggtgaacgtcgccgtgtagaaattgcccgcgcactggctgcgaatccgaaatttattctgctcgacgaaccgtttgccggggttgacccgatctcggttatcgacattaaacgcatcattgaacacctgcgcgacagcggcctgggcgtgctgatcactgaccacaacgtgcgtgaaacactggcggtttgtgaacgcgcttatatcgtcagtcaggggcatttgatcgcccacggcacgcctacagaaatcttacaagacgaacacgttaagcgtgtataccttggggaagacttcagactctga

SEQ ID NO: 470431 - DNA, 558 bp, Shigella flexneri
atgaaattcaaaacaaacaaactcagccttaatcttgtgcttgccagctcacttctggccgccagcattccggcatttgccgtaaccggagacactgatcagccgatccacattgaatcggaccagcaatctcttgatatgcaaggcaacgtggttacctttaccggtaatgtcatcgtcacccagggcaccatcaaaattaatgccgacaaagtggtcgttacccgtccgggcggcgaacaaggtaaagaagtgattgacggatacggtaaaccggcaacgttctaccagatgcaggacaacggtaaacccgttgaaggtcacgcttcccagatgcactacgaactggcaaaagattttgtcgttctgacgggtaatgcttatctgcagcaggtcgatagcaacattaagggcgataagatcacttacctggtgaaagagcagaaaatgcaggctttcagcgacaaaggcaagcgcgtaaccaccgttctggtgccgtcgcagctgcaggacaaaaacaacaaaggccagaccccggcacagaagaagggtaattaa

SEQ ID NO: 470432 - DNA, 576 bp, Shigella flexneri
atgagtaaagccagacgttgggttatcattgtgctatcactggcggttctggtgatgatcggcattaatatggccgaaaaagacgataccgcccaggtggtcgtcaacaacaatgatcccacctataaaagcgagcatacggacacgctcgtctataacccagaaggggcactaagctatcgattgattgctcaacacgttgaatattattccgatcaggccgtttcgtggtttacgcagccggtacttaccacgtttgataaggataaaatcccgacatggtccgtaaaagcagataaagccaagctgaccaatgaccggatgctctatttatatggacacgttgaagtcaacgcacttgtgccagactctcaacttcgcagaatcacgacggataacgcgcagatcaatctggtgacgcaggatgttacctctgaagacctcgtcacgttatacggaacaacatttaactccagcggtctgaaaatgcgcggcaacttacgcagcaagaacgccgagctgattgaaaaggttagaacatcctatgaaattcaaaacaaacaaactcagccttaa

SEQ ID NO: 470433 - DNA, 567 bp, Shigella flexneri
atgagcaaagcaggtgcgtcgcttgcgacctgttacggccctgtcagcgccgacgttatggcaaaagcagagaacattcgtctgctgatcctcgacgttgatggcgtactgtcagatggcctgatttatatgggcaataacggcgaagagctgaaagcattcaatgttcgtgacggttatggcattcgttgtgcgctcacctctgatattaaagtcgctatcattaccgggcgaaaggctaaactggtagaagatcgttgtgccacattggggatcactcacttgtatcaggggcagtcaaacaaactgatcgcctttagcgatttgctggaaaaattggcgattgccccggaaaatgtggcttatgttggcgatgatctcatcgactggccggtaatggaaaaagtgggtttaagcgtcgccgtggccgatgcgcatccactgttgatcccgcgcgccgattacgtgacgcgcattgctggcggtcgtggcgcagtgcgcgaagtttgcgacttattactcctggcgcagggcaaactggatgaagccaaagggcaatcgatatga

SEQ ID NO: 470434 - DNA, 987 bp, Shigella flexneri
atgtcgcacgtagagttacaaccgggttttgactttcagcaagcaggtaaagaagtcctggcgattgaacgtgaatgcctggcggagcttgatcaatacatcaatcagaatttcacgcttgcctgtgaaaagatgttctggtgtaaagggaaagttgtcgtcatggggatggggaaatcggggcacatcgggcgcaaaatggccgcaacgtttgccagcaccggtacaccttcatttttcgtccatcctagtgaagccgcgcatggtgatttaggcatggtcaccccacaggatgtggtgattgctatctctaactcaggtgaatccagcgaaatcacggccttaattccagtgcttaagcgtcttcacgtaccgttaatctgcatcaccggtcgcccggagagcagcatggcgcgcgccgcagatgtgcatctgtgtgttaaagtagcgaaagaagcctgtccgttagggctggcaccgaccagcagcaccaccgccacgctggttatgggcgatgccctcgctgtcgcgctgttaaaagcacgcggctttactgctgaagattttgcgctctcacacccaggcggcgcactgggtcgtaaacttctgctgcgcgtaaacgatattatgcatacgggcgatgagatcccgcatgttaagaaaacggccagtctgcgtgacgcattgctggaagttacccgcaaaaatcttggtatgactgtcatttgcgatgacaatatgatgattgaaggcatctttaccgacggtgatttacgccgtgtcttcgatatgggcgtggatgttcgtcagttaagtattgccgatgtgatgacgccggggggaatacgtgtgcgccctggcattctggccgttgaggcactgaacttaatgcagtcccgccatatcacctccgtgatggttgccgatggcgaccatttactcggtgtgttacatatgcatgatttactgcgtgcaggcgtagtgtaa

SEQ ID NO: 470435 - DNA, 966 bp, Shigella flexneri
atgcttttagctacggcactgttaattgttggtttacttttggtcgtttacagtgccgaccgcctggtttttgccgcgtctattctttgccgaacctttggcatcccgccgctgatcatcggcatgacggtggtcagtattggtacatcgttaccagaaatcatcgtctcgcttgccgcgtctctgcacgaacaacgcgatttagccgttggtacagccctcggctcaaacattatcaatatattgctgatcctcggtctggctgcgctggttcgtccttttaccgtccattccgatgttctgcgccgtgaattacccttaatgttgttggtcagcgtggtggccggttccgtactctatgacggacaacttagtcgaagcgatggtatctttctcctctttctggctgtgctatggctgctgttcattgttaaacttgcacgtcaggggactgacagcctgaccagagagcagcttgcagagctgccgcgtgacggcggattgcccgtcgcgtttttatggctcggcattgcgcttatcatcatgccagtggccacgcggatggtggttgataacgccacggtgctggcgaattactttgccatcagcgagttgacgatggctctgacggcaattgctatcggaaccagtctgccggaactggcaaccgcaatagcgggggttcgcaaaggtgaaaacgacattgctgtcggaaatatcattggcgcaaacatttttaatattgtcatcgtgttgggtttacccgcgctgataacgccaggagagattgatccactggcgtacagtcgtgactacagcgtgatgttgctggtgagcattatttttgcgttgctgtgctggcggcgctccccgcaaccgggccgtggtgtaggggtattattaactggcggatttatcgtatggctggcgatgttgtactggttatcgccaatactcgttgaataa

SEQ ID NO: 470436 - DNA, 810 bp, Shigella flexneri
atggagcagtctgtggcgaatttagtcgatatgcgcgatgtcagttttacgcgtggcaatcgctgcatcttcgataatatttccctgaccgtgccgcgagggaagatcacggcgatcatggggccatcgggcatcggtaaaacgacgctactccgtctgattggcgggcaaatcgcaccagatcatggtgagatccttttcgatggtgagaatattccggcgatgtctcgttcgcgcctgtatacagtgcgtaaacggatgagcatgttatttcagtccggggcgttgttcactgatatgaacgtatttgacaacgtcgcctatccactgcgcgaacatacccaacttcccgcgccattgttgcatagtacggtgatgatgaagctggaggccgtggggctgcgtggagcggctaaactaatgccttctgaactttccggtgggatggcgcggcgtgcagcgctggcgcgtgcgattgcgctggagccggatctcatcatgtttgatgaaccttttgttgggcaagatcccatcaccatgggcgtactggtgaagctgatttctgagctgaacagcgcgctgggcgtgacttgtgtggtggtttctcacgatgtgccggaagtgttaagtattgcggatcacgcctggatcctggcggacaaaaaaattgtcgctcatggcagtgcccaggcgttgcagacgaatcctgatccgcgcgtacgtcagtttctggacgggatagctgacgggcctgttccgttccgctatcctgccggcgattatcacgctgatcttttaccagggagttaa

SEQ ID NO: 470437 - DNA, 783 bp, Shigella flexneri
atgctgttaaatgcgctggcgtcgctcggacataaagggattaaaaccctgagaacgttcgggcgggccgggttaatgttattcaatgcgctggtcggcaaaccggaatttcgcaaacatgcgccgctgctggtgcgccagctctataatgtcggcgtcctgtcgatgctgattattgtagtttctggcgtgttcatcggaatggtgttggggctgcaaggttatctggttctgaccacttatagcgcggaaaccagtctgggtatgctggtggcgttatcgctactgcgtgaactggggccggtggttgccgcgctgttgtttgccgggcgtgctggttcggcgttaaccgcagaaatcggcctgatgcgcgctacagagcaactctccagtatggagatgatggcggtggatccgctgcgtcgggttatttctccccgtttctgggctggggttatttcattaccactgttgacggttatcttcgtcgccgtggggatctggggcggatcgctggtcggcgtcagttggaaaggcattgatagcgggttcttctggtcggcaatgcaaaatgccgtcgactggcgtatggatctggtcaactgtctgattaagagcgtggtgttcgccatcacggtgacgtggatttcgttgtttaacggctacgacgccatcccgacgtctgccgggattagccgggcaaccactcgcaccgttgtccactcgtctctggctgttctggggctggattttgtgctgaccgcattgatgtttgggaattga

SEQ ID NO: 470438 - DNA, 552 bp, Shigella flexneri
atgcaaacgaaaaaaaatgaaatttgggtgggtatctttttattagcagcactgctggcggcgctgtttgtttgcctgaaggcggcgaacgtgacgtccatacgtactgaatcgacctacacgctttatgcgacgttcgataacattggcggcctgaaagcgcgctctccggtcagcattggtggtgttgttgtgggccgggtggcggatattacgctggacccgaaaacctatctgccgcgcgtaacgctggaaattgaacaacgttataaccacattcctgataccagttcgctgagcattcgtacttccggcctgctgggagaacaatatctggcattaaacgtcggttttgaagacccggaactggggactgctatcctgaaggatggcgatacaattcaggacaccaagtctgcgatggtgctggaagatctcattggtcagttcctttacggtagtaaaggcgatgacaataagaatagtggcgatgcgccagctgctgcgccaggtaataatgaaaccactgaacctgtgggtacaacgaaataa

SEQ ID NO: 470439 - DNA, 636 bp, Shigella flexneri
atgtttaaacgtttaatgatggtcgctttgctggtgattgcacctctgagtgcggcaaccgcggcagaccagaccaatccttataagctgatggacgaggcggcgcagaaaacgttcgatcgcctgaagaatgagcaaccgcaaattcgggccaacccggattatctgcgtaccattgttgatcaggaactgctgccatacgtacaggtgaaatacgccggtgcgctggtgctgggccagtattacaagagtgcgacccctgctcaacgtgaagcctactttgccgctttccgtgagtacctgaagcaggcttacggtcaggcgctggcgatgtatcacggtcaaacctatcagattgcgccagaacagccgctgggcgataaaaccattgtgcctattcgcgttaccattattgacccgaatggccgtccgccggtgcgtctggacttccagtggcgtaaaaactcccagacgggaaactggcaagcttacgacatgattgctgaaggcgtcagtatgatcaccaccaaacaaaacgagtggggaacgctgctgcgtaccaaaggtatcgacggcctgactgcgcaactgaaatcgatttctcaacagaaaatcactctggaagagaaaaaataa

SEQ ID NO: 470440 - DNA, 294 bp, Shigella flexneri
atgagcgagtcactgagctggatgcagacgggtgacacgctggcgttatccggagagctggatcaggacgttctgctaccgctttgggaaatgcgtgaggaggcggtgaaggggattacctgcatcgatcttagccgtgtgtcccgcgtggatacggggggactggcactgctgctccatcttatcgatctggcgaaaaagcagggcaacaacgtgacgcttcagggggtaaacgacaaagtgtataccctcgcgaaattgtataatttgcctgctgatgttctgcctcgttaa

SEQ ID NO: 470441 - DNA, 270 bp, Shigella flexneri
atgattgaagatcccatggaaaataatgaaattcagagcgtgttgatgaacgctctctccctccaggaagtccacgtttccggcgatggcagccactttcaggttattgccgtgggtgagttgtttgacggtatgagtcgggttaaaaaacagcagacggtctatggcccgctgatggaatatattgcggataaccgcattcatgctgtgtcgatcaaagcgtatacccctgcggagtgggcgcgcgatcgcaaactgaacggcttttga

SEQ ID NO: 470442 - DNA, 1260 bp, Shigella flexneri
atggataaatttcgtgttcaggggccaacgaagctccagggcgaagtcacaatttccggcgctaaaaatgctgctctgcctattctttttgccgcactactggcggaagaaccggtagagatccagaacgtcccgaaactgaaagacgtcgatacatcaatgaaactgctaagccagctgggtgcgaaagtagaacgtaatggttctgtgcatattgatgcccgcgacgttaatgtattctgcgcaccttacgatctggttaaaaccatgcgtgcttctatctgggcgctggggccgctggtagcgcgctttggtcaggggcaagtttcactacctggcggttgtacgatcggtgcgcgtccggttgatctacacatttctggcctcgaacaattaggcgcgaccatcaaactggaagaaggttacgttaaagcttccgtcgatggtcgtctgaaaggcgcacatatcgtgatggataaagtcagcgttggcgcaacggtgaccatcatgtgtgctgcaaccctggcggaaggcaccacgattattgaaaacgcagcgcgtgaaccggaaatcgtcgataccgcgaacttcctgattacgctgggtgcgaaaattagcggtcagggcaccgatcgtatcgtcatcgaaggtgtggaacgtttaggcggcggtgtctatcgcgtgctgccggatcgtatcgaaaccggtactttcctggtggcggcggcgatctctcgtggcaaaattatctgccgtaacgcgcagccagatactctggacgccgtgctggcgaaactgcgtgatgctggagcggacatcgaagtcggcgaagactggattagcctggatatgcatggcaaacgtccgaaggctgttaacgtacgtaccgcgccgcatccggcattcccgaccgatatgcaggcccagttcacgctgttgaacctggtggctgaagggaccgggttcatcaccgaaacggtctttgaaaaccgctttatgcatgtgccagagctgagccgtatgggcgcgcacgccgaaatcgaaagcaataccgttatttgtcatggtgttgaaaaactttctggtgcacaggttatggcaaccgatctgcgtgcatcagcaagcctggtgctggctggctgtattgcggaagggacgacggtggttgatcgtatttatcacatcgatcgtggctacgaacgcattgaagacaaactgcgcgctttaggtgcaaatattgagcgtgtgaaaggcgagtaa

SEQ ID NO: 470443 - DNA, 279 bp, Shigella flexneri
atggaaagtaatttcattgactggcatcccgctgacatcattgcaggtttgcgcaagaaaggaacgtcaatggcggcggaatctcgcagaaatggtttgagttcctcaacgctggcaaacgcattatcgcgcccatggccgaaaggagagatgattattgcgaaagccctgggaactgacccctgggttatctggccatcacgctaccatgatccgcagacccatgagtttatcgacagaacgcagttgatgcgtagctacactaaaccgaaaaaatga

SEQ ID NO: 470444 - DNA, 972 bp, Shigella flexneri
atgaatttagaaaaaatcaatgagttaaccgcgcaagatatggcgggtgttaatgcggcaatccttgagcagcttaattccgacgtccaactgatcaatcagttaggctattacatcgtcagcggcggcggtaaacgtattcgtccgatgattgctgtactggctgcacgagctgttggctatgagggaaatgcgcatgtcaccattgctgccctgatcgagtttatccacacggcgactctgctacacgacgacgttgtggatgaatcagatatgcgcaggggtaaagctaccgccaacgccgcatttggcaatgccgccagcgtgctggtaggcgattttatttatacccgcgcgttccagatgatgaccagcctcggttcactcaaagtgctggaagtcatgtcagaagctgtaaacgtcatcgcagaaggtgaagttctgcaactgatgaacgttaacgatccggacatcactgaagaaaactacatgcgcgttatctatagcaaaaccgcgcgtctgtttgaggctgccgcgcagtgttccgggattctggctggctgtacgccggaggaggagaaaggcctgcaggattatgggcgctatctcggcactgctttccagttgatcgacgatttactcgattacaatgccgatggcgaacagttaggtaaaaacgtcggcgacgatctgaacgaaggtaaaccgacgctgccgctgctgcatgcgatgcatcatggcacaccagaacaggcacagatgatccgtaccgccatcgaacaaggtaacggtcgccatcttctggaaccggttctggaagcaatgaacgcttgtggatctcttgaatggacgcgtcagcgcgccgaggaagaagcagacaaagccatcgcagcgttacaggtgctcccggacaccccttggcgagaagcactcatcggcctcgcgcacatcgctgttcaacgcgatcgttaa

SEQ ID NO: 470445 - DNA, 312 bp, Shigella flexneri; identical to SEQ ID NO: 1096

SEQ ID NO: 470446 - DNA, 258 bp, Shigella flexneri; identical to SEQ ID NO: 457855

SEQ ID NO: 470447 - DNA, 966 bp, Shigella flexneri
atgaagcagcaggcaggcattggcattcttttggcgcttaccacagcaatttgctggggggcgttgccaatcgcaatgaagcaggtgctggaggtgatggaacctccgacaatcgtgttttaccgtttcttgatggcgagtattggccttggtgccattcttgcggtgaagaagaggttgccgccattacgcgtgtttcgtaagccacgctggttgattttgttggcagtggcgaccgccgggctgtttgggaacttcatcctgttcagctcatccttgcaatacctgagtccgaccgcttcgcaggtgattgggcaactctcgccagttggcatgatggttgccagcgtatttatcctgaaagagaaaatgcgcagcactcaggttgtaggggcattgatgctcctgagcggtctggtgatgttttttaacaccagtctggtcgagatatttacaaagctcaccgattacacctggggagttatctttggggtcggtgcggcgacggtttgggtgagttatggcgtggcgcaaaaggttttattgcgtcggctggcctcaccgcagatcctgtttttactgtacactttatgtacaatcgcgctcttccctctggcaaagcctggagtgatagcgcagcttagccactggcagctcgcatgtttaattttttgcggactgaataccttggtaggatatggcgccttggcggaagcgatggctcgctggcaggcagcgcaggtgagcgcgatcatcacgctcaccccactgtttacgctgtttttttcagatcttttatcactggcctggcccgatttcttcgccagaccgatgttaaaccttttaggttatctcggtgcgtttgtcgtggttgcgggcgcgatgtattccgccattggtcatcgtatttggggcggattacgtaagcatacaacggtggtatcgcaaccccgcgcaggcgaatga

SEQ ID NO: 470448 - DNA, 1173 bp, Shigella flexneri
atgaagtttgttgatgaagcatcgattctggtcgttgcaggtgatggcggtaatggttgcgtgagcttccgccgcgaaaagtatattccgaaaggcggcccggatggcggcgacggcggtgatggtggtgacgtatggatggaagccgacgagaacctgaacacgcttatcgattatcgttttgaaaaatctttccgtgcagagcgcggtcagaacggcgcaagccgcgattgtaccggtaagcgcggtaaagacgtgacgattaaagtgccggtaggtacgcgtgtaatcgaccagggtactggtgaaaccatgggtgatatgactaaacacggtcagcgtctgctggttgctaagggcggctggcacggtctgggcaatacccgtttcaaatcgtcagttaaccgtacaccacggcagaaaactaacggtacgccgggcgataagcgtgagctgctgctggagctgatgctgctggctgacgtcggtatgttggggatgccaaacgcgggtaaatcgacctttattcgtgcggtatcggcggctaaaccgaaagtggcggattatccgtttaccactctggtgccaagtctgggtgtggtacgaatggacaacgaaaagagcttcgttgttgccgatattccaggactgattgaaggcgctgcggaaggcgcaggtctgggcattcgcttcctgaagcacctggaacgttgccgcgtcctgttgcacctcatcgatatcgatccgattgacggcaccgatccggttgaaaacgcgcgtattattatcagcgagctggaaaaatacagccaggatctggcggcgaaaccgcgttggttagtcttcaacaagatcgatctgctggataaggcagaagccgaagagaaagcgaaagcgatcgctgaagcgctgggctgggaagataaatattatctgatctctgcggcgagcggactgggcgtgaaagatctctgctgggatgtgatgacctttatcattgaaaacccggtcgtgcaggctgaagaagcgaaacagccagagaaagtcgaattcatgtgggatgattatcaccgtcagcagcttgaagagattgctgaagaggatgatgaagactgggatgacgactgggacgaagacgacgaagaaggcgttgagttcatttacaagcgttaa

SEQ ID NO: 470449 - DNA, 1434 bp, Shigella flexneri
atgcgattttccagatttatcatcggattgaccagctgtatagcgttcagtgttcaggccgcgaatgttgatgagtacgttactcaactccccgcaggtgccaaccttgccctgatggtgcaaaaagtcggtgcgtcggcccccgctattgattaccacagtcagcagatggcgctgcccgccagtacccagaaagtgattactgcgctggcggcgttgattcaactcggccccgattttcgtttcaccacgacgcttgaaaccaaaggcaatgtggaaaacggcgtacttaagggtgacttagtggcgcgatttggtgccgatccgacgttaaaacgtcaggatattcgcaatatggtcgcgactttgaaaaaatctggcgtcaaccaaatcgatggcaatgtgttgatagatacctccattttcgccagccacgataaagcccccggctggccatggaatgacatgacacaatgctttagcgctccgcctgctgccgccatagttgaccgcaactgtttctccgtctcgctctacagtgccccaaagcctggtgatatggcttttatacgcgtggcatcttattaccccgttacgatgttcagccaggtacgcaccctcccccgtggttctgccgaagcgcaatactgcgaactggatgtggtgccaagcgacctgaaccgctttacgctgacgggatgcctgccacaacgttctgagccgctcccgttggcttttgccgtgcaggatggagccagctatgccggtgcaattctgaaagatgagttaaaacaggcgggtatcacctggagcggaacactgctgcgccagactcaggttaacgaacctggaacggtagttgccagtaaacagtcggccccgctgcacgatctgcttaagattatgctgaaaaagtcggacaacatgatcgccgatacggttttccgcatgatcggccatgcgcgcttcaatgtgcctggaacatggcgggctgggtcggacgccgtgcgtcagatcctgcgccagcaagccggtgtcgatattggtaacaccattattgccgatggttcagggctttcgcggcataacctgattgcccccgccaccatgatgcaggtgctgcaatacattgcccaacacgacaatgaacttaactttatctccatgctgccgcttgcgggctatgacggctctttgcagtaccgtgcaggtctgcatcaggcgggcgtggatggcaaagtctcagcgaaaaccggttcgttgcagggggtatataacctggcgggattcattaccacagcgagcgggcaacgaatggcatttgtacaatatctttctggctatgcagtaaaacccgcggatcagcgtaatcgccgtattccgttagtgctttttgaaagccgtttgtacaaagatatttatcagaacaattag

SEQ ID NO: 470450 - DNA, 477 bp, Shigella flexneri
atgcaagctattccgatgaccttacgcggcgctgaaaaattacgcgaagagctggattttctgaaatctgtgcgccgtcctgaaatcattgctgctatcgcggaagcgcgtgagcatggcgacctgaaagaaaacgccgaataccacgcagctcgtgaacagcagggcttctgcgaaggccgtatcaaagacatcgaagccaagctgtcaaacgcgcaggtgattgatgtcaccaaaatgcccaacaatgggcgcgttatttttggtgctaccgtaacggtgctgaatctggattctgacgaagaacagacttatcgcatcgttggcgatgacgaagctgactttaaacaaaacctgatttctgtaaactcgcctattgctcgtggcctgatcggcaaagaagaagatgatgttgtggtcatcaaaacgccgggcggcgaagtagaatttgaagtaattaaggtggaatacctgtaa

SEQ ID NO: 470451 - DNA, 294 bp, Shigella flexneri; identical to SEQ ID NO: 457860

SEQ ID NO: 470452 - DNA, 630 bp, Shigella flexneri
atgacaggtaagaagcgttctgccagctccagccgctggcttcaggaacactttagcgataaatatgttcaacaggcacagaaaaagggattacgttcccgtgcctggtttaaacttgatgaaatacagcaaagtgacaaactctttaaaccgggaatgacggttgtcgaccttggtgctgctccgggtggttggtcacaatatgtggtcacccaaattggcggcaaaggccgcatcatcgcttgcgatcttttacctatggatcctatcgttggtgtggactttcttcagggcgattttcgtgatgaactggtgatgaaagcactgctggagcgcgttggcgacagcaaagtccaggttgtcatgtccgatatggcaccaaacatgagcggaacaccggcggtggatatcccccgagccatgtatctggtggaactggcgctagaaatgtgtcgtgatgtattagcgccaggtggcagttttgtagtgaaggtgttccagggcgaaggtttcgatgagtatctaagggaaattcgctccctgtttacgaaggtcaaagttcgtaagccggactcttctcgtgcacgttcgcgagaagtgtatattgtagcgaccgggcgtaaaccctaa

SEQ ID NO: 470453 - DNA, 1944 bp, Shigella flexneri
ttgagtgacatggcgaaaaacctaatactctggctggtcattgccgttgtgctgatgtcagtattccagagctttgggcccagcgagtctaatggccgtaaggtggattactctaccttcctacaagaggtcaataacgaccaggttcgtgaagcgcgtatcaacggacgtgaaatcaacgttaccaagaaagatagtaaccgttataccacttacattccggttcaggatccgaaattactggataacctgttgaccaagaacgtcaaggttgtcggtgaaccgcctgaagaaccaagcctgctggcttctatcttcatctcctggttcccgatgctgttgctgattggtgtctggatcttcttcatgcgtcaaatgcagggcggcggtggcaaaggtgccatgtcgtttggtaagagcaaagcgcgcatgctgacggaagatcagatcaaaacgacctttgctgacgttgcgggctgcgacgaagcaaaagaagaagttgctgaactggtagagtatctgcgcgagccgagccgcttccagaaactcggcggtaagatcccgaaaggcgtcctgatggtcggtcctccgggtaccggtaaaacgttgctggcgaaagcgattgcaggcgaagcgaaagttccgttctttactatctccggttctgacttcgtagaaatgttcgtcggtgtgggtgcatcccgtgttcgtgacatgttcgaacaggcgaagaaagcggcaccgtgcatcatctttatcgatgaaatcgacgccgtaggccgccagcgtggcgctggtctgggcggtggtcacgatgaacgtgaacagactctgaaccagatgctggttgagatggatggcttcgaaggtaacgaaggtatcatcgttatcgccgcgactaaccgtccggacgttctcgacccggccctgctgcgtcctggccgtttcgaccgccaggttgtggtcggcttgccagatgttcgcggtcgtgagcagatcctgaaagttcacatgcgtcgcgtaccattggcacccgatatcgacgcggcaatcattgcccgtggtactcctggtttctccggtgctgacctggcgaacctggtgaacgaagcggcactgttcgctgctcgtggcaacaaacgcgttgtgtcgatggttgagttcgagaaagcgaaagacaaaatcatgatgggtgcggaacgtcgctccatggtgatgacggaagcgcagaaagaatcaacggcttaccacgaagcgggtcatgcgattatcggtcgcctggtgccggaacacgatccggtgcataaagtgacgattatcccacgcggtcgtgcgctgggtgtgactttcttcttgcctgagggcgacgcaatcagcgccagccgtcagaaactggaaagccagatttctacgctgtacggtggtcgtctggcagaagagatcatctacgggccggaacatgtttctaccggtgcgtccaacgatattaaagttgcgaccaacctggcacgtaacatggtgactcagtggggcttctctgagaaattgggtccactgctgtacgcggaagaagaaggtgaagtattcctcggccgtagcgtagcgaaagcgaaacatatgtccgatgaaactgcacgtatcatcgaccaggaagtgaaagcactgattgagcgtaactataatcgtgcgcgtcagcttctgaccgacaatatggatattctgcatgcgatgaaagatgctctcatgaaatatgagactatcgacgcaccgcagattgatgacctgatggcacgtcgcgatgtacgtccgccagcgggctgggaagaaccaggcgcttctaacaattctggcgacaatggtagtccaaaggctcctcgtccggttgatgaaccgcgtacgccgaacccgggtaacaccatgtcagagcagttaggcgacaagtaa

SEQ ID NO: 470454 - DNA, 849 bp, Shigella flexneri
atgaaactctttgcccagggtacttcactggaccttagccatcctcatgtaatggggatcctcaacgtcacgcctgattccttttcggatggtggcacgcataactcgctgatagatgcggtgaaacatgcgaatctgatgatcaatgctggcgcgacgatcattgacgttggtggcgagtccacgcgcccaggggcggcggaagttagcgttgaagaagagttgcaacgtgttattcctgtggttgaggcaattgctcaacgcttcgaagtctggatctcggtcgatacatccaaaccagaagtcatccgtgagtcagcgaaagttggcgctcacattattaatgatatccgctccctttccgaacctggcgctctggaggcggctgcagaaaccggtttaccggtttgtctgatgcatatgcagggaaatccaaaaaccatgcaggaagctccgaagtatgacgatgtctttgcagaagtgaatcgctactttattgagcaaatagcacgttgcgagcaggcgggtatcgcaaaagagaaattgttgctcgaccccggattcggtttcggtaaaaatctctcccataactattcattactggcgcgcctggctgaatttcaccatttcaacctgccgctgttggtgggtatgtcacgaaaatcgatgattgggcagctgctgaacgtggggccgtccgagcgcctgagcggtagtctggcctgtgcggtcattgccgcaatgcaaggcgcgcacatcattcgtgttcatgacgtcaaagaaaccgtagaagcgatgcgggtggtggaagccactctgtctgcaaaggaaaacaaacgctatgagtaa

SEQ ID NO: 470455 - DNA, 1338 bp, Shigella flexneri
atgagtaatcgtaaatatttcggtaccgatgggattcgtggtcgtgtaggggatgcgccgatcacacctgattttgtgcttaagctgggttgggccgcgggtaaagtgctggcgcgccacggctcccgtaagattattattggtaaagacacgcgtatttctggctatatgctggagtcagcactggaagcgggtctggcggcagcgggcctttccgcactcttcactggcccgatgccaacaccggccgtggcttatctgacgcgtaccttccgcgcagaggccggaattgtgatatctgcatcgcataacccgttctacgataatgggattaaattcttctctatcgacggcactaaactgccggatgcggtagaagaggccatcgaagcggaaatggaaaaggagatcagctgcgttgattcggcagaactgggtaaagccagccgtatcgttgatgccgcgggtcgctatatcgagttttgcaaagccacgttcccgaacgaacttagcctcagtgaactgaagattgtggtggattgtgcaaacggtgcgacttatcacatcgcgccgaacgtgctgcgcgaactgggggcgaacgttatcgctatcggttgtgagccaaacggtgtaaacatcaatgccgaagtgggggctaccgacgttcgcgcgctccaggctcgtgtgctggctgaaaaagcggatctcggtattgccttcgacggcgacggcgatcgcgtgattatggttgaccatgaaggcaataaagtcgatggcgatcagatcatgtatatcatcgcgcgtgaaggtcttcgtcagggccagctgcgtggtggtgctgtgggtacattgatgagcaacatggggcttgaactggcgctgaaacagttaggaattccatttgcgcgcgcgaaagtgggtgaccgctacgtactggaaaaaatgcaggagaaaggctggcgtatcggtgcagagaattccggtcatgtgatcctgctggataaaaccactaccggtgacggcatcgttgctggcttgcaggtgctggcggcgatggcacgtaaccatatgagcctgcacgacctttgcagcggcatgaaaatgttcccgcagattctggttaacgtacgttacaccgcaggtagcggcgatccgcttgagcatgagtcagttaaagccgtgaccgcagaggttgaagctgcgctgggcaaccgtggacgcgtgttgctgcgtaaatccggcaccgaaccgttaattcgcgtgatggtggaaggcgaagacgaagcgcaggtgactgaatttgcacaccgcatcgccgatgcagtaaaagccgtttaa

SEQ ID NO: 470456 - DNA, 333 bp, Shigella flexneri
atgtacgaagctcttttagtagttttccttattgtggcaattggccttgttggtctgatcatgctgcagcaaggtaaaggcgctgatatgggagcctccttcggagcaggcgcttccgctacgctgtttggttcaagtggttctggtaacttcatgacccgcatgacggcgctgctggcaacgttattcttcatcatcagtctggtgctgggtaacatcaatagcaacaaaaccaatagaggtagcgaatgggaaaatctgagtgcaccggcgaaaaccgaacaaactcagccagctgctccggctaagccgaccagcgatatcccgaactaa

SEQ ID NO: 470457 - DNA, 432 bp, Shigella flexneri
atggttcagcgattgctgttcttcgtcctgaccatcctggttgttaaacgtatatcatcccttccgcttcgcctgcttgttgccgcaccatttgtgttactgactgcggcagacatgagtattagcctctattcatggtgtacctttggtacaactttcaatgatggatttgcgattagtgtgctgcagagtgatccggatgaagttgtgaaaatgctggggatgtatatcccttatctatgtgcttttgcttttttatcccttctttttttggcagtaataataaaatatgatgtttccttgccgacaaaaaaagtgacaggaatattattgctgattgtcatttcgggcagtttattttccgcttgtcaatttgcttataaagatgcaaaaaataaaaaagcgttcagtccatatatactagcgtcgtga

SEQ ID NO: 470458 - DNA, 951 bp, Shigella flexneri
gtgttgattgtgggggagtctgtacgtgtcgacaatatgtctttgtatggatatacacgctctacgacaccgcaagttgaagcacaaagaaaacagatcaaactgtttaatcaagcaataagcggcgcaccttacactgcgctgtcggttcccctttctttaactgctgattctgttttgagtcatgacattcataattaccccgacaacattattaatatggctaatcaagcaggatttcagactttctggctaagctcgcaatccgcttttcggcagaatggtacagcagttaccagtatcgccatgcgcgccatggaaacagtttatgtcagaggatttgatgaattgttgttgccgcatttatcgcaagcattacagcaaaatacgcagcaaaagaaactgattgttcttcatttaaatggaagccatgaaccggcttgtagcgcctatccgcaatccagcgccgtgtttcaaccgcaggacgatcaggatgcctgctatgacaactccattcattacacagatagtttgctaggtcaggtttttgaattattaaaagatcgccgcgcctcggtcatgtattttgccgaccacggcctggaacgtgaccctacgaagaagaacgtctattttcatggaggcagggaggctagccagcaggcatatcatgtcccgatgtttatctggtatagccccgttcttggggatggcgtggatcgcacaacggaaaacaatatcttttcgacagcttacaataattaccttattaatgcgtggatgggggtaacaaagccggaacagccgcaaacgcttgaggaagtgattgcacactataaaggagactcacgggttgtggatgcaaaccatgatgttttcgattatgtgatgctcagaaaggagtttacagaggataagcaaggtaaccccacccctgaagggcagggttga

SEQ ID NO: 470459 - DNA, 1344 bp, Shigella flexneri
atgacgacgattctcaagcatctcccggtaggtcaacgtattggtatcgctttttccggcggtctggacaccagtgccgcactgctgtggatgcgacaaaagggagcggttccttatgcatatactgcaaacctgggccagccagacgaagaggattatgatgcgatccctcgtcgtgccatggaatacggcgcggagaacgcacgtctgatcgactgccgcaaacaactggtggccgaaggtattgccgctattcagtgtggcgcatttcataacaccaccggcggcctgacctatttcaacacgacgccgctgggccgcgccgtgactggtaccatgctggttgctgcgatgaaagaagatggcgtgaatatctggggtgacggtagcacctataaaggaaacgatatcgaacgtttctatcgttatggtctgctgaccaatgctgaactgcagatttacaaaccgtggcttgatactgactttattgatgaactgggcggccgtcatgagatgtctgaatttatgattgcctgcggtttcgactacaaaatgtctgtcgaaaaagcctactccacagactccaacatgcttggtgcaacgcatgaagcgaaggatctggaatacctcaactccagcgtcaaaatcgtcaacccgattatgggcgtgaaattctgggatgagagcgtgaagatcccggcagaagaagtcacagtacgctttgagcaaggtcatccggtggcgctgaacggtaaaacctttagcgacgacgtagaaatgatgctggaagctaaccgcatcggcggtcgtcacggcctgggcatgagcgaccagattgagaaccgtatcatcgaagcgaaaagccgtggtatttacgaagctccggggatggcactgctgcacattgcgtatgaacgtctgttgaccggtattcacaacgaagacaccattgagcagtatcacgcgcatggtcgtcagttgggccgtctgctgtaccaggggcgttggtttgactcccaggcgctgatgctgcgtgactctctgcaacgctgggttgccagccagatcactggtgaagttaccctggagctgcgccgtgggaacgattattcaatcctgaataccgtctcagagaacctgacctacaagccagagcgtctgacgatggaaaaaggcgactcggtgttctcgccagatgatcgtattggtcaattgaccatgcgtaatctggatatcactgatacccgagagaaactttttggttatgccaaaactggcctgctttcctcctctgccacttcaggcctgccgcaggtggagaatatggaaaacaaaggccagtaa

SEQ ID NO: 470460 - DNA, 453 bp, Shigella flexneri
ttgtccacattagagcaaaaattaacagagatgattactgcgccagttgaggccctgggttttgaactggtaggcatcgaatttattcgcggtcgcacatccacactgcgcatctatattgatagtgaagatggcatcaatgttgatgattgtgctgatgtgagccaccaggtaagtgctgtgctggatgttgaagatcccatcaccgttgcttataacctggaagtctcctcaccgggtctcgatcgcccactgttcacggctgaacactacgcccgttttgtcggagaagtggtgactctggttctccgtatggcggtacaaaaccgtcgtaaatggcagggcgttatcaaagcggtagacggtgaaatgatcacagttaccgtcgaaggtaaagatgaagtgttcgcgctgagtaatatccagaaggcgaacctggttccccacttttaa

SEQ ID NO: 470461 - DNA, 1488 bp, Shigella flexneri
atgaacaaagaaattttggctgtagttgaagccgtatccaatgaaaaggcgctacctcgcgagaagattttcgaagcattggaaagcgcgctggcgacagcaacaaagaaaaaatatgagcaagagatcgacgtccgtgtacagatcgatcgcaaaagcggtgattttgacaccttccgtcgctggttagttgttgatgaagtcacccagccgaccaaggaaatcacccttgaagccgcacgttatgaagatgaaagcctgaacttgggcgattacgttgaagatcagattgagtctgttacctttgaccgtatcaccacccagacggcaaaacaggttatcgtgcagaaagtgcgtgaagccgaacgtgcgatggtggttgatcagttccgtgaacacgaaggtgaaatcatcaccggcgtggtgaaaaaagtaaaccgcgacaacatctctctggatctgggcaacaacgctgaagccgtgatcctgcgcgaagatatgctgccgcgtgaaaacttccgccctggcgaccgcgttcgtggcgtgctttattccgttcgcccggaagcgcgtggcgcgcaactgttcgtcactcgttccaagccggaaatgctgatcgaactgttccgtattgaagtgccggaaatcggcgaagaagtgattgaaattaaagcagcggctcgcgacccgggttctcgtgcgaaaatcgcggtgaaaaccaacgataaacgtatcgatccggtaggtgcttgcgtaggtatgcgtggcgcgcgtgttcaggcggtttctactgaactgggcggcgagcgtatcgatatcgtcctgtgggatgataacccggcgcagtttgtgattaacgcaatggcaccggcagacgttgcttctatcgtggtggatgaagataaacacaccatggatatcgccgttgaagctggtaacctggcgcaggcgattggtcgtaacggtcagaacgtgcgtctggcttcgcagctgagcggttgggaactcaacgtaatgaccgttgacgacctgcaggctaagcatcaggcggaagcgcacgcagcgatcgacaccttcaccaaatatctcgacatcgacgaagacttcgcgactgttctggtagaagaaggtttctcgacgctggaagaactggcctatgtgccgatgaaagagctgttggaaatcgaaggccttgatgagccgaccgttgaagcactgcgcgagcgtgctaaaaatgcactggccaccattgcacaggcccaggaagaaagcctcggtgataacaaaccggctgacgatctgctgaaccttgaaggggtagatcgtgatttggcattcaaactggccgcccgtggcgtttgtacgctggaagatctcgccgaacagggcattgatgatctggctgatatcgaagggttgaccgacgaaaaagccggagcactgattatggctgcccgtaatatttgctggttcggtgacgaagcgtaa

SEQ ID NO: 470462 - DNA, 2649 bp, Shigella flexneri
atgacagatgtaacgattaaaacgctggccgcagagcgacagacctccgtggaacgcctggtacagcaatttgctgatgcaggtatccggaagtctgctgacgactctgtgtctgcacaagagaaacagactttgattgaccacctgaatcagaaaaattcaggcccggacaaattgacgctgcaacgtaaaacacgcagcacccttaacattcctggtaccggtggaaaaagcaaatcggtacaaatcgaagtccgcaagaaacgcacctttgtgaaacgcgatccgcaagaggctgaacgccttgcagcggaagagcaagcccgtcgtgaggcagaagaatcggctaaacgcgaggcgcaacaaaaagctgaacgtgaggccgcagaacaagctaagcgtgaagctgctgaacaagcgaaacgtgaagctgcggaaaaagacaaagtgagcaatcaacaagacgatatgactaaaaacgcccaggctgaaaaagcccgccgtgagcaggaagctgcagagctcaagcgtaaagctgaagaagaagcgcgtcgtaaactcgaagaagaagcacgtcgcgttgctgaagaagcacgtcgtatggcggaagaaaacaaatggactgataacgcggaaccgactgaagattccagcgattatcacgtcactacttctcaacatgctcgccaggcagaagacgaaagcgatcgtgaagtcgaaggcggccgtggccgtggtcgtaacgcgaaagcagcgcgtccgaagaaaggcaacaaacacgctgaatcaaaagctgatcgtgaagaagcacgcgcagcagtacgtggcggtaaaggcggaaaacgtaaaggttcttcgctgcagcaaggcttccagaagcctgctcaggccgttaaccgtgacgttgtgatcggcgaaactatcaccgttggcgaactggcgaacaagatggcggttaaaggctctcaggtcatcaaagcgatgatgaaactgggcgcaatggcaaccatcaaccaggttatcgatcaggaaaccgcacagctggttgctgaagagatgggccataaagttatcctgcgtcgtgaaaacgagctggaagaggcggtaatgagcgaccgtgacacgggtgctgcggctgaaccgcgcgcgccggttgtgaccatcatgggtcacgttgaccacggtaaaacctctctgctggactacattcgttcaacgaaagtggcctctggcgaagcgggcggcattacccagcacattggtgcataccacgttgaaactgaaaacggcatgatcaccttcctggacaccccggggcacgccgcgtttacttcaatgcgtgctcgtggtgcgcaggcaacggacatcgtagtcctggttgttgctgccgacgacggcgtaatgccgcagacgatcgaagcaatccagcacgcgaaagcggcgcaggttccggtggtcgttgcagtgaacaagatcgataaaccagaagccgatccggatcgcgttaagaacgaactctcccagtacggcatcctgccggaagagtggggcggtgaaagccagttcgtacatgtgtctgcgaaagcgggtactggtatcgatgaactgctggacgctatcctgctgcaggcggaagttctggagctgaaagcggtacgtaaaggtatggcgagcggtgcggttatcgaatccttcctcgataaaggtcgtggtccggttgctaccgttctggtacgtgaaggtactctgcacaagggcgatatcgttctgtgtggcttcgaatacggtcgtgttcgtgcgatgcgtaacgaactgggtcaggaagtgctggaagcgggtccgtccattccggtggaaatcctcggcctgtccggcgtaccggctgcgggtgatgaagttaccgttgtacgtgacgagaagaaagcgcgtgaagttgcactgtatcgtcagggtaaattccgcgaagttaaactggcgcgtcagcagaaatctaaactcgagaacatgttcgccaacatgaccgaaggcgaagttcacgaagtgaacatcgtcctgaaggcagacgtacagggttctgtggaagcgatctccgactccttgctgaaactgtctactgacgaagttaaagtgaagatcatcggttctggcgtaggtggtatcaccgaaaccgacgccaccctggctgcggcgtccaacgccatcctggttggcttcaacgtacgtgctgatgcctctgcacgtaaagtgattgaagcggaaagcctggatctgcgttactactccgtcatctataacctgattgacgaagtgaaagcggcgatgagcggtatgctgtctccggaactgaaacagcagattatcggtctggcggaagttcgtgacgtgttcaaatcgccgaaatttggtgccatcgcaggctgtatggttaccgaaggtgtggttaaacgtcacaacccgatccgcgttctgcgtgacaacgtggttatctacgaaggcgagctggagtccctgcgccgcttcaaagatgacgttaacgaagtccgtaacggtatggaatgtggtatcggcgttaagaactacaacgacgtccgcactggcgatgtgatcgaagtattcgaaatcatcgagatccagcgtaccatcgcttaa

SEQ ID NO: 470463 - DNA, 402 bp, Shigella flexneri; identical to SEQ ID NO: 458686

SEQ ID NO: 470464 - DNA, 945 bp, Shigella flexneri
atgagtcgtcctcgtcgtcgcggtcgcgacattaacggcgttttgttgctggataaaccgcagggtatgtccagcaatgatgcgctgcaaaaagtgaaacggatttataacgccaaccgtgccgggcataccggtgcgctggacccgctggcaactggcatgttgccaatttgcctcggggaagcgacgaagttttcccagtatctgctggactccgacaaacgctatcgggtcattgcgcgtcttggacagcgtaccgatacttctgatgccgacggacaaatcgttgaagaacgtccggtaacctttagcgcagagcaactggcggcggcgctggatactttccgtggcgatatcgaacagatcccttcgatgtattcagcactgaaatatcagggtaaaaaactgtacgaatatgcgcgtcagggcattgaagtaccgcgtgaagcgcgcccgattaccgtttatgaattgctgtttattcgccacgaaggcaatgagctggagctggaaattcactgctcaaaaggcacttatatccgcaccatcattgatgacctgggtgaaaaactcggttgtggcgcgcatgttatttacctgcgtcgtctggcggtaagtaaatatccggttgaacggattgtgaccctggaacatctgcgtgaactggtcgaacaagccgaacagcaggatattccggctgcggagttacttgatccattactgatgccaatggacagtccagcttcggactacccggtggtgaatcttccgttaacgtcttctgtttacttcaaaaatggtaacccagttcgtacatccggtgcgccgctggaaggactggttcgcgttacagaaggtgagaacggcaaatttatcggtatgggcgaaattgacgatgaaggccgcgttgcgcctcgtcgcctggtggttgaatacccggcgtaa

SEQ ID NO: 470465 - DNA, 270 bp, Shigella flexneri
atgtctctaagtactgaagcaacagctaaaatcgtttctgagtttggtcgtgacgcaaacgacaccggttctactgaagttcaggtagcactgctgactgcacagatcaaccacctgcagggccactttgcagagcacaaaaaagatcaccacagccgtcgtggtctgctgcgcatggtttctcagcgtcgtaaactgctcgactacctgaaacgtaaagacgtagcacgttacacccagctcatcgagcgcctgggtctgcgtcgctaa

SEQ ID NO: 470466 - DNA, 2136 bp, Shigella flexneri
ttgcttaatccgatcgttcgtaaattccagtacggccaacacaccgtgactctggaaaccggcatgatggctcgtcaggctactgccgctgttatggttagcatggatgacaccgcggtatttgttaccgttgttggccagaaaaaagccaaaccaggtcaggacttcttcccactgaccgttaactatcaggagcgtacctacgctgctggtcgtatcccgggtagcttcttccgtcgtgaaggccgcccaagcgaaggcgaaaccctgatcgcgcgtctgattgaccgcccgattcggccgctgttcccggaaggcttcgtcaacgaagttcaggttatcgccaccgtggtttctgttaacccgcaagttaacccggatatcgtcgcgatgattggtgcttccgcagcactgtctctgtctggtattccgttcaatggtccgattggtgctgctcgcgtaggttacatcaatgaccagtacgtactgaacccgactcaggacgagttgaaagagagcaaactggatctggttgttgccggtactgaagccgctgtactgatggttgaatctgaagctgaactgctgagcgaagaccagatgctgggcgcagtagtgttcggtcatgaacaacagcaggttgttattcagaacatcaatgaactggtgaaagaagccggtaaaccacgttgggactggcagccggagccggtaaacgaagcgctgaacgcgcgcgttgctgcactggctgaagctcgcctgagcgatgcttaccgcatcaccgacaaacaagagcgttatgcgcaggttgatgtcatcaaatctgaaaccatcgcgacgctgcttgctgaagacgaaaccctggacgaaaacgaactgggtgaaattctgcacgcgatcgagaaaaacgttgttcgtagccgcgtactggcaggcgaaccgcgtatcgacggtcgtgaaaaagatatgatccgtggtctggatgtgcgtactggcgtgctgccgcgtactcacggttctgcgctgttcacccgtggtgaaacgcaggcgctggttaccgcaacgctgggtactgctcgtgacgcgcaggttcttgatgaactgatgggcgaacgtaccgataccttcctgttccactacaacttccctccgtactccgtaggcgaaaccggcatggtcggttctccgaagcgtcgtgaaattggtcacggtcgtctggcgaagcgcggcgtgctggcagtcatgccggatatggacaaattcccgtacaccgtacgtgttgtgtctgaaatcactgaatccaacggttcctcttctatggcttccgtgtgcggcgcgtctctggcgctgatggacgcaggtgtgccgatcaaagctgccgttgcgggtatcgcaatgggtctggtgaaagaaggcgacaactacgttgtactgtctgacattttgggcgacgaagatcacctgggcgatatggacttcaaagttgcgggttcccgcgagggtatctctgcattgcagatggatatcaaaattgaaggtatcaccaaagagatcatgcaggttgcgctgaaccaggctaaaggtgcgcgtctgcatatcctgggcgtaatggaacaggcgatcaacgcgccgcgtggcgatatctctgagttcgcaccacgtatccataccatcaagatcaacccggacaagatcaaagacgttatcggtaaaggcggctctgttatccgtgccctgaccgaagaaactggcaccaccatcgaaatcgaagatgacggtactgtgaagattgcagcgaccgacggcgagaaagcgaaacatgctattcgtcgtatcgaagagatcactgcagaaatcgaagtgggccgcgtctacactggtaaagtgacccgtatcgttgactttggcgcatttgttgccatcggcggcggtaaagaaggtctggtacacatctctcaaatcgctgacaaacgcgttgagaaagtgaccgattacctgcagatgggtcaggaagtaccggtgaaagttctggaagttgatcgccagggccgtatccgtctgagcattaaagaagcgactgagcagtctcaacctgctgcagcaccggaagctccggctgctgaacagggcgagtaa

SEQ ID NO: 470467 - DNA, 885 bp, Shigella flexneri
atgaagccttttttgcgctggtgtttcgttgcgacagcacttacgcttgcaggatgcagtaatacttcctggcgtaaaagtgaagtcctcgcggtaccattgcaaccgactttacagcaggaagtgattctggcacgtatggaacaaatccttgccagtcgggctttaaccgatgacgaacgcgcacagcttttatatgagcgcggagtgttgtatgatagtctcggtctgagggcattagcgcgtaacgatttttcgcaagcgctggcaatccgaccggatatgcctgaagtattcaattacttaggcatatatttaacgcaggcaggcaattttgatgctgcctatgaagcgtttgattctgtacttgagcttgatccaacttacaactacgcgcacttgaatcgcgggattgcattatattacggcggtcgtgacaagttagcgcaagatgatctgctggcgttttatcaagacgatcccaatgatcctttccgtagtctgtggctttatctcgccgagcagaagctcgatgagaagcaggctaaagaagtattgaaacagcacttcgaaaaatcggataaggaacagtggggatggaacattgtcgagttctacctgggcaacattagcgaacaaacgttaatggaaaggctcaaggcggacgcaacggataacacctcgctcgctgagcatctcagtgaaaccaacttctatttaggtaagtactacctaagtctgggggatttggacagcgccacggcactgttcaaactggcggttgccaacaacgttcataactttgttgagcaccgatacgcattgttggaattatcgctcctgggccaggaccaagatgacctggcagaatcggaccagcaatag

SEQ ID NO: 470468 - DNA, 1890 bp, Shigella flexneri
atggctgaattcgaaaccacttttgcagatctgggcctgaaggctcctatccttgaagcccttaacgatctgggttacgaaaaaccatctccaattcaggcagagtgtattccacatctgctgaatggccgcgacgttctgggtatggcccagacggggagcggaaaaactgcagcattctctttacctctgctgcagaatcttgatcctgagctgaaagcaccacagattctggtgctggcaccgacccgcgaactggcggtacaggttgctgaagcaatgacggatttctctaaacacatgcgcggcgtaaatgtggttgccctgtacggcggccagcgttatgacgtgcaattacgcgccctgcgtcaggggccgcagatcgttgtcggtactccgggccgtctgctggaccacctgaaacgtggcactctggacctctctaaactgagcggtctggttctggatgaagctgacgaaatgctgcgcatgggcttcatcgaagacgttgaaaccattatggcgcagatcccggaaggtcatcagaccgctctgttctctgcaaccatgccggaagcgattcgtcgcattacccgccgctttatgaaagagccgcaggaagtgcgtattcagtccagcgtgactacccgtcctgacatcagccagagctactggactgtgtggggtatgcgtaaaaacgaagcactggtacgtttcctggaagcggaagattttgatgcggcgattatcttcgttcgtaccaaaaacgcgactctggaagtggctgaagctcttgagcgtaacggctacaatagcgccgcgctgaacggtgacatgaaccaggcgctgcgtgagcagacactggaacgccttaaagacggtcgtctggacatcctgattgcgaccgacgttgcggcccgtggcctggacgttgagcgtatcagcctggtggttaactacgatatcccgatggattctgagtcttacgttcaccgtatcggtcgtaccggtcgtgcgggtcgtgctggccgcgcgctgctgttcgttgagaaccgcgagcgtcgtctgctgcgcaacattgaacgtactatgaagctgactattccggaagtagaactgccgaacgcagaactgctgggcaaacgccgtctggaaaaattcgccgctaaagtacagcagcagctggaaagcagcgatctggatcaataccgcgcactgctgagcaaaattcagccgactgcagaaggtgaagagctggatctcgaaactctggctgcggcactgctgaaaatggcacagggtgaacgtactctgattgttccgccagatgcgccgatgcgtccgaaacgtgaattccgtgaccgtgatgaccgtggtccgcgcgatcgtaacgaccgtggcccgcgtggcgaccgtgaagatcgtccgcgtcgtgaacgtcgtgatgttggcgatatgcagctgtaccgcattgaagtgggccgcgatgatggtgttgaagttcgtcatatcgttggcgcgattgctaacgaaggcgacatcagcagccgttacatcggtaacatcaagctgtttgcttctcactccaccatcgaactgccgaaaggtatgccgggtgaagtgctgcaacactttacgcgcactcgcattctcaacaagccgatgaacatgcagttactgggcgatgcacagccgcatactggcggtgagcgtcgtggcggtggtcgtggtttcggtggcgagcgtcgtgaaggcggtcgtaacttcagcggtgaacgccgtgaaggtggtcgtggtgatggtcgtcgttttagcggcgaacgtcgtgaaggccgcgcaccgcgtcgtgatgactctaccggtcgtcgtcgtttcggtggtgatgcgtaa

SEQ ID NO: 470469 - DNA, 1245 bp, Shigella flexneri
atggcaacactaaccaccacccaaacgtcaccgtcgctgcttggcggcgtggtgattatcggcggcaccattattggcgcagggatgttttctctgccagtggtcatgtccggggcgtggtttttctggtcaatggcagcgctgatctttacctggttctgtatgctgcattccggcttgatgattctggaagctaacctgaattaccgaatcggttcgagttttgacaccatcaccaaagatttgctgggcaaaggctggaacgtggtcaacggcatttccattgcctttgtgctctatatcctgacctatgcctatatttctgccagtggttcgattctgcatcacaccttcgcagagatgtcgctaaacgtcccggcacgggcggcgggttttggttttgcactgctggtagcgtttgtggtgtggttgagtactaaagccgtcagccgcatgacggcgattgtgctgggggcgaaagtcattaccttcttcctcaccttcggtagcctgctggggcatgtgcagcctgcgacattgttcaacgttgccgaaagcaatgcatcttatgcgccgtatttgctgatgaccctgccgttctgcctggcgtcgtttggttatcacggtaacgtgccaagcctgatgaagtattacggcaaagatccgaaaaccatcgtgaaatgcctggtgtacggtacgctgatggcactggcgctgtataccatctggttgctggcgacaatgggcaacatccctcgtccggagtttatcggcatcgccgagaagggcggtaatattgatgtgttggtacaagcattaagcggcgtgctgaacagccgtagcctggaccttctgctggtcgtgttctcaaactttgcggtagcgagttcgttccttggcgtaacgctgggtttgtttgactatctggcagatctgtttggtttcgacgactcggctgtgggccgcttgaaaacggcattgctgacctttgccccgcctgttgtgggtggtctgctgttcccgaacggattcctgtatgccattggttatgctggtttagcggctaccatctgggcggcaattgttccggcactgctggcccgcgcatcgcgtaaacgctttggcagcccgaaattccgcgtctggggtggcaagccgatgattgcgctgattctggtgtttggcgtcggcaacgcactggtgcatattttatcgagctttaatttactgccggtgtatcagtaa

SEQ ID NO: 470470 - DNA, 1008 bp, Shigella flexneri
atgactgataaaaccattgcgttttcgctactcgatctggcccccatacccgaaggctcttcagcgcgggaagcgttctcccactctctcgatctcgcccgtctggctgaaaagcgcggctatcatcgctactggctggcagaacaccacaatatgaccggcattgccagtgctgcaacatcggtattgattggctatctggcggcgaataccaccacgctgcatctggggtctggcggcgtgatgttgcctaaccacttaccgttggtcattgccgaacagttcggcacactcaatacgctctatccggggcgaatcgatttggggctgggtcgtgctccgggtagtgaccaacggacaatgatggcgctacgtcgtcatatgagcggcgatattgataatttcccccgcgatgtcgcggagctggtggactggtttgacgcccgcgatcccaatccgcatgtgcgcccggtaccaggctatggcgagaaaatccccgtgtggttgttaggctccagcctttacagtgcacaactggcggcgcagcttggtctgccatttgcgtttgcctcacacttcgcgccggatatgttgttccaggcgctgcatctttatcgcagtaacttcaaaccgtcggctcggctggaaaaaccatacgcgatggtgtgcatcaatattatcgccgccgacagcaaccgcgacgctgaatttctgtttacctcaatgcagcaagcctttgtgaagctgcgccgtggcgaaaccgggcaactgccgccgccgattcaaaatatggatcagttctggtcaccgtctgagcagtatgacgtgcagcaggcgctgagtatgtcgttggtaggcgataaagcgaaagtgcgtcatggtttgcagtcgatcctgcgcgaaaccgacgctgatgagattatggttaacgggcagattttcgaccaccaggcgcgcctgcattcgtttgagctggcgatggatgttaaggaagagttgttgggatag

SEQ ID NO: 470471 - DNA, 879 bp, Shigella flexneri
atgaaatattccttagggccagtgctgtggtactggccaaaagagacgctggaagatttttatcagcaagccgccgccagcagcgccgacgtgatttatcttggtgaagcggtatgcagcaagcgccgggcaaccaaagttggcgactgtctggagatggcaaaatcgctcgccggaagtggcaagcagattgtgctctccacgctggcgctggtgcaggcatcctctgaactgggcgaactgaaacgctatgttgagaacggtgaatttctgattgaagccagcgatctcggcgtggtgaatatgtgcgctgaacgcaaactgccgttcgtcgccgggcacgcgctgaactgctacaacgcggtgacgctgaaaatattgctcaaacagggcatgatgcgctggtgtatgccggtggagctttcccgcgactggctggtgaatctgcttaatcagtgcgatgagctgggcattcgcaaccagtttgaagtggaagtcctgagctacggtcatctaccgctggcctactccgcccgctgctttaccgcgcgttcggaagaccgcccgaaagatgagtgtgaaacctgctgcattaagtatccgaacgggcgcaacgtgctgtcgcaggaaaaccaacaagtgtttgtactcaatggcattcagaccatgagcggctacgtttacaacctcggtaacgagctggcatccatgcagggattggttgatgtagtccgcctgtcaccgcagggcactgacactttcgcgatgctcgacgccttccgcgctaatgaaaatggcgctgtgccactgccgttgacggcaaacagcgactgtaacggctactggcggcggctggcaggactggagctgcaagcctaa

SEQ ID NO: 470472 - DNA, 996 bp, Shigella flexneri
atggagctgctctgccctgccggaaatctcccggcgcttaaggcggccatcgaaaacggcgcagatgctgtttatatcgggctaaaagatgataccaatgcccgtcacttcgccggccttaactttaccgagaaaaaattgcaggaagcggtgagttttgtccatcaacatcgccgcaaacttcacatcgcgattaacacttttgcgcatccggacggttacgcccgttggcagcgtgccgtggatatggcggcgcagctgggtgccgacgcgctgatcctcgccgacctcgccatgctggagtacgccgccgagcgttacccgcatattgaacgtcatgtgtcagtgcaggcttcggcgaccaatgaagaggcgattaacttttatcatcgccattttgacgttgcccgcgtggtgctgccgcgcgtgttgtcgattcatcaggtgaaacagctggcacgggttactcctgtcccgctggaagtgtttgctttcggcagcctgtgcattatgtcggaaggccgttgctatctgtcgtcgtatctgacgggtgagtcgcccaacactgtgggtgcgtgttctccggcccgtttcgtgcgctggcaacaaacgccgcaggggctggaatcccgcctgaacgaagtgctgatcgaccgttatcaggacggcgaaaacgcaggttatccgacgctgtgtaaagggcgttatctggtggacggcgagcgctatcacgcgctggaagaaccaaccagtctcaataccctggaactgctgccggagttaatggctgcgaatattgcttcggtgaaaattgaaggccgccagcgtagcccggcgtatgtcagccaggtggcgaaagtctggcgtcaggctatcgaccgttgtaaggccgatccgcaaaacttcgtaccgcaaagcgcgtggatggagacgctcgggtcgatgtccgaaggcacgcaaaccacccttggcgcgtatcaccgtaaatggcagtga

SEQ ID NO: 470473 - DNA, 525 bp, Shigella flexneri
gtgttggataaactgcgttcccgtattgtgcatttggggccatctctgttgagtgtaccggtaaaactgacgccatttgcgctaaaacgccaggttcttgagcaggtcttaagctggcaattccgtcaggcgctggatgatggcgagctggagtttcttgaaggccgctggttaagtattcatgtgcgtgatattgacctgcaatggtttacctcggtggtgaatggcaaactggtggtcagccagaacacgcaagctgatgtgagttttagtgccgacgccagcgatctgctgatgattgcggcgcgtaaacaagatccggatacgctcttcttccagcgtcggctggtgattgaaggcgatacggagctgggggtgtatgtgaaaaacctgatggacgccattgaactggagcaaatgccgaaagccttacgcatgatgctgctgcaactggcggattttgttgaggcgggaatgaaaaccgcgcctgaaaccaaacagacatcggtaggtgaaccatgctaa

SEQ ID NO: 470474 - DNA, 504 bp, Shigella flexneri
atgctaattcgagtagaaattcccattgatgcgccgggtattgatgccctgctgcgtcgctcattcgaaagtgatgcggaagcgaagctggttcacgatctgcgtgaagatggctttctgacgctggggctggtggcgacagatgacgaaggtcaggtcattggctatgtggcatttagtccggttgatgtgcagggcgaagacctgcaatgggtcggcatggcaccgttggcggttgatgaaaaataccgtggacaggggctggcacgccaactggtctatgaaggactcgattcgcttaatgagttcggctatgccgcagtggtgacgctgggcgatccggcgctgtacagtcgtttcggctttgaactggcggcgcatcacgatctgcgttgccgctggccgggcactgaaagcgccttcctggtacatcgtttagcggatgacgcgctgaatggcgtaaccggtctggttgagtatcacgagcatttcaatcgcttttaa

SEQ ID NO: 470475 - DNA, 312 bp, Shigella flexneri
atgcagacgatgacaccctggtttctttacttgatccgtaccgccgacaataagctttataccgggatcaccacggatgtcgaacgccgctatcagcagcaccaaagcggcaaaggggcgaaagcactgcgcgggaaaggagaactgacgctggcgttttctgcgccagtgggcgaccgttcgctggcactacgggcggaatatcgcgttaagcaactgaccaaacggcaaaaagagcgtctggtagcggaaggcgcagggtttgcagaactgttgagcagcctgcaaaccccggagattaaaagcgattga

SEQ ID NO: 470476 - DNA, 444 bp, Shigella flexneri
atggaaacactcatcgccatcagccgttggctggcaaaacaacatgttgtcacctggtgtgtgcagcaggaaggggaactctggtgcgctaatgccttttatctttttgatgcgcagaaagtcgccttctacattttgacggaagaaaaaacgcgccacgcgcagatgagtgggccgcaggctgcggttgccggaacggtaaacggtcagccgaaaacggtagcgttaattcgcggtgtgcagtttaaaggtgagatccgcaggctggaaggtgaggaaagcgacctcgcgcgcaaggcgtacaatcgtcgctttccggttgccagaatgctgtcggccccggtgtgggaaatccggctcgatgaaatcaaattcaccgacaacacgctgggctttggtaaaaaaatgatttggctacgcgactcaggcaccgagcaggcgtaa

SEQ ID NO: 470477 - DNA, 519 bp, Shigella flexneri
atgagtaagaaaattgccgttttaatcactgatgaatttgaagattcagaatttacttcacccgcagacgagttccgtaaagccggacacgaagtgattactattgaaaaacaagcgggtaaaacggtgaaaggcaaaaaaggagaagccagcgtgaccatcgataaatccatcgatgaagtgacgccagcggagtttgatgccctgttgctaccgggtggtcattcaccggattatctgcgtggcgacaaccgttttgtcacctttacccgtgattttgtgaatagcggcaaacctgttttcgccatctgtcacggtccgcagctactgatcagcgccgatgtgattcgggggcgcaaactgaccgcagttaaaccgatcattattgatgttaaaaatgcgggcgtggaattttacgatcaggaagtagtggttgataaagatcagctggttaccagccggacaccggacgatctgccagcgtttaaccgcgaggcgttacgcctgctcggtgcctga

SEQ ID NO: 470478 - DNA, 636 bp, Shigella flexneri
atgagtcaggtactgattacaggcgcaacggggctggtgggcggtcacctgctgcggatgttgattaatgaaccgaaagttaacgccattgctgcgccgacgcgacgtccgttgggcgatatgcccggggtgtttaatccccatgatccgcaactgagtgacgcgttggcgcaggtcaccgaacccatcgacattgtgttttgttgtctcggcaccacgcggcgagaagcggggagcaaagaggcgtttattcatgccgattacacgctggtagtggataccgcattaaccgggcggcgactgggcgcgcagcatatgctggtggtcagtgctatgggtgccaatgcccactcgccgtttttctataaccgcgtcaaaggggagatggaagaagcattaattgcccagaactggccgaaattgaccattgctcgcccgtcgatgttactgggcgatcgtagcaaacagcggatgaacgaaacgctttttgcgccgctgttccgtttgttaccaggtaactggaaatccattgatgcgagagacgtggcgcgggtcatgctggcagaggcgatgcggcctgagcatgaaggcgtgacgattttaagctcttcagaattacgcaaaagagctgaataa

SEQ ID NO: 470479 - DNA, 1041 bp, Shigella flexneri
atgactggtcagtcttcatctcaggcggcaacgcccattcagtggtggaaacccgcgcttttctttctcgttgtcattgccggtctctggtatgtgaaatggcaaccttactacggcaaagcgtttactgcagccgaaacccacagtatcggtaaatctatccttgcgcaggcggatgctaatccgtggcaagcggcgttggattacgcgatgatctatttcctcgcagtatggaaagcggcggtgctgggggtgatcctcggttcgttgattcaggtgctgatcccgcgtgactggttgttgcgtacgcttgggcaatcgcgctttcgcggcacgctgctgggaacgctgttttcgctgccgggcatgatgtgtacctgctgtgcggctccggtcgcggcgggaatgcgtcgccaacaggtatcgatgggcggtgcgctggcattctggatgggcaatccggtgttaaacccggcgacgctggtgtttatggggtttgtcctcggctggggttttgcggcgattcgtctggtggccgggctggtgatggcgttgctgattgcgacgctggtgcaaaaatgggtgcgtgaaacaccgcaaacgcaggcaccggtcgaaattgacataccggaagcacagagcggtttttttagccgctggggcagggcgctatggacacttttctggagtacgatcccggtttacatccttgcagtactggtgttgggtgccgcacgcgtctggttattcccccatgccgatggtgctgtcgataacagcctgatgtgggtggtggcgatggcggtagcaggatgcttgtttgtcattcccacggcagcagaaattccgattgtacaaacgatgatgctggcaggtatgggaaccgctccggcgctggcattgttgatgacgctcccggcagtgagtttgccgtcactgattatgctgcgcaaagcgttcccggcgaaagccttatggctgacaggggcgatggtggcagtgtctggtgtgattgtcggcgggctggcgctgttgttctga

SEQ ID NO: 470480 - DNA, 576 bp, Shigella flexneri
atgaaggcattatcgccaatcgcagtccttatttccgcgctgctgttgcaaggttgtgttgccgctgccgtagtgggtaccgctgctgtgggtaccaaagccgcaactgacccacgcagtgtcggcacccaggtggacgatggtaccctggaagtgcgcgtgaacagcgcattgtcgaaagacgaacagattaagaaagaaacccgtattaatgtcacggcctatcagggcaaagtgctgctggttgggcagtcaccaaatgctgaactttcggctcgcgccaaacagattgctatgggcgtagacggtgccaacgaagtgtataacgagattcgtcagggccagccgattggtctgggcgaagcatctaacgatacgtggatcaccaccaaagtgcgttcgcagctcttaaccagcgacctggtgaaatcgtccaacgtgaaagtgaccaccgaaaacggtgaagtgttcctgatggggctggtgactgaacgtgaagcgaaagcggcggcagatattgccagccgggtgagcggcgtaaagcgggttaccacagcgtttacgtttattaaatag

SEQ ID NO: 470481 - DNA, 591 bp, Shigella flexneri; identical to SEQ ID NO: 458668

SEQ ID NO: 470482 - DNA, 396 bp, Shigella flexneri
atggctacagtaccaacaaggtcaggtagtccccgccagttaaccaccaaacagaccggcgatgcgtgggaagcacaagcgcgtcgctggctggaaggcaaaggactgcggtttatcgccgctaacgtgaacgagcgtggcggcgagatcgatctgataatgcgtgaaggcctgaccaccgtttttgtcgaggtacgctatcgccgctctgcgctttatggcggcgcggcagccagtgtgacccgcagcaaacaacacaaattattacagactgcccgcttgtggctcgcgcgtcataatgggagttttgatactgtggattgccggttcgatgtggtagccttcaccgggaatgaggttgagtggattaaggatgcctttaatgaccactcataa

SEQ ID NO: 470483 - DNA, 2037 bp, Shigella flexneri
atggtaccctcaacattttctcgtttgaaagccgcgcgttgtctgcctgttgttctggcagccctgattttcgccggttgtggcacccatactcccgatcagtccactgcttatatgcagggcacggcgcaggctgattctgccttttatcttcagcagatgcagcaaagctctgatgataccaggatcaactggcaattactcgccattcgtgcactggtgaaagaaggtaaaaccgggcaggcggttgagttgtttaaccaactaccgcaagaactgaacgattctcagcgtcgcgagaaaacactgctggcggcagagattaaactggcgcagaaagattttgctggcgcgcaaaacttgctggcgaaaatcacacctgccgatttagaacaaaaccagcaagcgcgttactggcaggcaaaaatcgatgccagccaggggcgtccttccattgatttactgcgcgcgttaattgctcaggaaccgctgcttggcgcgaaagaaaaacagcagaatattgatgccacctggcaggcgctctcctccatgactcaggaacaggcgaatacgctggtgatcaacgccgacgaaaatattctgcaaggctggctggatctgcagcgcgtctggtttgataaccgtaacgatcccgacatgatgaaagccgggatcgccgactggcagaaacgttatccgaacaatccgggcgcgaaaatgctgccaacgcagttggttaacgtaaaagcgtttaaaccagcctcgaccaacaaaatcgccctgctgttgccgctgaatggccaggcagcggtatttggtcgcactattcagcaaggctttgaagccgcgaaaaatatcggcactcagccagtggcggctcaggtagctgccgcacctgccgcagacgtagcagaacaacctcagccgcaaactgcggatagcgttgccagcccggcacaagcctcggttagcgatctgaccggtgatcagcctgcggcccagccggtgcctgtaagcgccccggcgacaagcaccgcagcggtaagcgcacccgcaaatccatccgcagagctgaaaatctacgatacctcatcacaaccacttagccagatcttaagccaggttcagcaggatggcgcgagtattgtggttggtccgttgctgaaaaataacgttgaagagttgctgaagagcaacaccccgctgaacgtactggcactgaaccagccggagaatatcgaaaaccgcgtcaatatttgttacttcgcgctttcaccggaagacgaagcgcgcgatgcagcgcgtcatattcgtgaccagggtaaacaagcgccgctggtgctgatcccacgcagtgcattgggcgatcgcgtagccaatgcgtttgcgcaagagtggcagaaactgggcggcggcaccgttctgcaacaaaaatttggttccaccagcgaattacgcgcgggtgttaacggcggttctggtattgctttaacgggtagcccgattactcccagagcgacaaccgactccggcatgacgaccaacaatccaacgctgcaaaccacgccaaccgatgaccagttcaccaataatggcggtcgtgtcgatgcggtctacattgtggcaacgccgggtgaaatcgcttttatcaaaccgatgatcgccatgcgtaacggtagccagagcggtgcaacgctgtacgccagttcccgcagcgcacaaggcaccgcaggcccggatttccgactggagatggaaggcttgcagtacagcgaaatcccgatgctggcaggcggtaatctgccgttaatgcagcaggcgctcagcgcggtgaacaacgattattcgctggctcgcatgtatgcgatgggcgttgatgcctggtcgttggcaaatcatttctcacaaatgcgccaggttcagggttttgaaatcaacggtaataccggaagtctgacggctaacccggattgcgtgattaacaggaagttatcatggctacagtaccaacaaggtcaggtagtccccgccagttaa

SEQ ID NO: 470484 - DNA, 861 bp, Shigella flexneri
atgaaacaacaccaatcggcggataattctcagggccagctttacattgtaccgacgccaatcggcaatctggcggatatcacccagcgtacgttagaggtattacaggccgttgatctgattgccgccgaggatactcgtcacaccggtttattgctgcaacattttgggattaatgcccggttgtttgcgctgcacgaccataacgaacaacaaaaagccgaaacgctgctggcaaagctgcaagaggggcaaaacattgcgctggtttccgatgccggaacgccgctaattaacgatcctggctaccatctggtgcgtacctgccgtgaagcggggattcgtgtggtgccgctacccggaccgtgtgctgctatcactgcgttaagcgccgcgggtttaccatctgaccgtttctgttacgaaggctttttacctgccaaatcaaaaggccgccgtgatgcgctaaaagccattgaagcggagccgcgcacgctgattttttatgaatctacccaccgtctgttagatagcctggaagatatcgttgcggtattaggcgaatcccgctacgtggttctggcgcgtgagctgaccaaaacctgggaaaccattcacggcgcgcccgttggcgagctgctggcgtgggtaaaggaagatgaaaaccgtcgcaaaggcgaaatggtgctgattgtcgaaggtcataaagcacaggaagaagacttacccgccgatgccctgcgcacgctggcgctgctacaggcagaactgccgctgaaaaaagcggcggcgctggccgcagaaattcatggcgtgaagaaaaatgcgctgtataagtatgcgctggagcagcaggggtaa

SEQ ID NO: 470485 - DNA, 1092 bp, Shigella flexneri
atgaaaagagcgcctcttataacaggacttttgttgatatccacatcctgcgcttatgcctcctcaggagggtgtggagccgacagcactagcggtgcgacaaattacagcagtgtggttgatgatgttacggtgaaccagacagataacgtgacaggacgggagtttacctctgcaacgctaagtagcactaactggcaatacgcctgttcctgctctgcgggtaaggcagttaaacttgtctatatggtcagccccgtacttaccaccactggacatcagacaggatattacaaactcaatgacagcctggatattaaaaccacattacaggcaaacgacattccaggactcacaaccgaccaggttgtctctgttaacacccgattcacacagataaaaagcagcaccgtatattctgctgcaacccaaacgggtgtttgccagggtgacacgtctcgttatggacccgttaatattggtgcaaataccacctttaccctgtatgtcaccaagccatttctcggctcgatgaccattccgaaaacggatattgccgtcattaaaggcgcgtgggtcgatggaatgggaagcccgtctacaggtgacttccatgatttagtcaagttatcgattcagggaaatctcaccgccccacagtcgtgcaaaattaatcagggcgatgttattaaagttaattttggattcatcaatggtcagaagtttaccacccgcaatgccatgccagacggttttactccagtagactttgatatcacttatgactgtggtgatacttcaaagattaaaaactcgttgcaaatgcgcatcgacggtacaactggggtagtagaccagtacaacctggtcgccaggcgaagaagttcagacaatgtgcccgatgtcggtattcgtattgaaaatctcggcggcggagttgcaaatattccttttcagaacggtatccttcccgttgatccttccgggcatggcaccgtcaatatgcgcgcctggccagttaatctggtcggtggtgagctggaaacaggaaaatttcagggcacagccaccattaccgtcatggtgcggtaa

SEQ ID NO: 470486 - DNA, 765 bp, Shigella flexneri
atgaccagccagaaagatcgcccaacccaacatgaaatgcgtcttgatggctcactgctggatgatggtcgcctgagctatagcctggaacaaagtctggatgacgataacaaccataacagtagcctgaacgccagttaccgttcaccttatggaaccttcagtgccggatacagttacggtaatgacagcagccaatacaattacggcgttaccggcggcgtggttatccatcctcatggcgtgacgctctcgcaatatctgggcaacgcttttgcgcttatcgatgctaacggggcttctggcgtgaggatacaaaactatccggggattgctactgatccctttggctatgcagtggttccttatctcacgacttatcaggaaaaccgtctctcggtagatactacgcagctgcccgataacgtcgatcttgaacaaacaacacagtttgtggtgcccaacagaggtgcaatggtagcggcgcgtttcaacgccaatatcggttatcgcgtacttgttacagtcagcgatcgcaacggtaaaccgttgccctttggcgctcttgccagcaacgatgatacggggcaacaaagtatcgtcgatgagggcggcatactatatctctctgggatatcgagtaaatcacaaagctggactgtacgctggggaaatcaggcagatcaacaatgtcagtttgcttttagtacaccggattcagaaccaacaacctctgtattacaaggcacagcgcagtgccattaa

SEQ ID NO: 470487 - DNA, 333 bp, Shigella flexneri
atgtcctggctttatcccgatcggggagactttattgctgtggtcggcagaatgcaggatatcaacgccgttcgtcaggtaaaagcggcattgttgtcatcccgggatttatctgtttattctatgaatgccccagggtttattcccggtattgatttttctgatcacctcaattattggcaacacgatattcccgccgtaatgattactgacaccgctttttatcgtaataaacaataccacttgcccggtgataccgcagacagattgaattatcagaaaatggctcaggtggtagatggtgttataaccttgttatacaacagtaaataa

SEQ ID NO: 470488 - DNA, 324 bp, Shigella flexneri
atgggaatgattggctattttgcagaaattgactcagaaaagattaaccaactgcttgagtctactgaaaaacctttgatggataatatacatgacacgctttcaggattacgccgactggaatcactggatcgaagtgagctgcgtaaacagttttccattaagcgactcaatgaaatggagatttatccgggagtgaccttttcagaagagttagaggggcaactctttgcctcgatcatgcttgatatggaaaagctgattagcgcgtatcgacgtatgctgcgacaagggaatcatgcgctgacggttattgttgggtga

SEQ ID NO: 470489 - DNA, 1458 bp, Shigella flexneri
atgacaataactccacaaaacctgatcgcactgctaccgttgctgatcgtcggcttgacggtggtggttgtgatgctctccattgcgtggcgacgcaatcatttcctcaacgctacgctctcggttattgggcttaacgcggcgctggtttcgctctggtttgttggccaggcgggcgctatggacgttacgccgctgatgcgcgttgatggtttcgccatgctttacaccgggctggtattgttggcgagcctcgccacctgtactttcgcctacccgtggcttgaaggctataacgacaacaaggatgagttctacctgttggtgttaattgccgcgctgggcgggatcctgctggcgaatgcaaaccatctggcgtctctgttcctcggtattgaactgatctctttgccgctgtttggcctggtcggttacgctttccgccagaaacgttcgctggaagccagtatcaaatacaccatcctttctgccgcagcgtcttctttcctgctgttcggtatggcgctggtgtatgcgcagtctggcgacctgtcgtttgtcgcgctgggtaaaaacctcggcgacggtatgctcaacgagccgctgttgctggcaggtttcggcatgatgattgttggcctcggcttcaaactctctctggtgccgttccacctgtggacgccagacgtataccagggcgcgcctgcgccggtttccactttcctggcgacggcgagcaaaatcgctatcttcggtgtggtgatgcgtctgttcctctacgcaccggtgggtgacagcgaagcgattcgcgtagtactggcgattatcgcctttgcctccatcatcttcggtaacctgatggcgttgagccagaccaacatcaaacgtctgctcggttactcatctatctctcacctcggctatctgctggtggcgctgattgcgctgcaaaccggcgagatgtcgatggaagcggtaggggtttacctggccggttatctgttcagcagcctcggcgcgttcggcgtggtcagcctgatgtccagcccgtatcgtggcccggatgctgattccctgttctcttaccgcggtctgttctggcatcgtccgatcctcgcggcagtgatgacggtgatgatgctgtctctggccggtatcccgatgacgctgggctttatcggtaagttctacgtgctggcggtcggtgtccaggcacacttgtggtggctggtgggtgccgtggttgtcggttcggcaatcggcctctactactacctgcgcgtggcggtgagcctgtacctgcacgcaccggaacaaccgggtcgcgatgcaccgtcaaactggcagtacagcgcgggcggtatcgtggtgctgatttctgcactgttggtactggtgctgggtgtatggccacaaccgctgattagtattgtgcggttagcaatgccgctgatgtaa

SEQ ID NO: 470490 - DNA, 1530 bp, Shigella flexneri
atgttactaccctggctaatattaattccctttattggcggcttcctgtgctggcagaccgaacgctttggcgtcaaggtgccacgctggatcgcgctgatcaccatgggattgacgctggcgctgtcgctgcaactgtggttgcagggcggttattcactgacgcaatccgccggaattccgcagtggcagtctgaattcgacatgccgtggatcccgcgttttggtatctctattcatctcgccattgacggtctgtcgctgctgatggtcgtgctgaccggtctgctcggtgtgctggcggtactatgttcgtggaaagagatcgaaaaatatcagggcttcttccacctcaacctgatgtggatcctgggcggcgttatcggcgtgttccttgccatcgacatgttcctgttcttcttcttctgggaaatgatgctggtgccgatgtacttcctgatcgcactgtgggggcataaagcctctgacggtaaaacgcgtatcacggcggcaaccaagttcttcatttacacccaggcgagtggtctggtgatgttgatcgccatcctggcgctggtttttgttcactacaatgcgaccggcgtctggaccttcaactatgaagagctgctgaatacgccaatgtccagtggtgtggaatatctgttgatgctgggcttcttcatcgccttcgcagtcaaaatgccggtggttccgctgcatggctggctgccggatgcgcactcccaggctccgaccgccggttccgtggacctcgcggggatcttgctgaaaaccgccgcttacggtttgttgcgtttctccctgccgctgttcccgaacgcgtcggcagagttcgcgccaatcgctatgtggctgggtgttatcggcatcttctacggtgcgtggatgaccttcgctcagaccgatatcaaacgtctgatcgcctacacctcggtttcccacatgggcttcgtgctgattgcaatctacaccggcagccagttggcctaccagggcgcggtaatccagatgattgcgcacggcttgtcggcggcgggtctgtttattctctgcggtcagctttatgaacgtatccatacccgcgacatgcgcatgatgggcggtctgtggagcaagatgaaatggctgccagcactgtcgctgttctttgcggtggcaacgcttgggatgcctggcaccggtaacttcgtcggcgaatttatgattctgttcggcagcttccaggttgtcccggtgattaccgttatctctacctttgggctggtctttgcatctgtttattcgctggcgatgttgcatcgcgcttacttcggtaaagcgaaaagccagattgccagccaggaactgccagggatgtcgctgcgtgagctgtttatgatcctgttgctggtggtgctgctggtactgctgggcttctatccgcagccgattctggatacctcgcactccgcgattggcaatatccagcagtggtttgttaattccgttactactacaaggccgtaa

SEQ ID NO: 470491 - DNA, 1842 bp, Shigella flexneri
atgaacatgcttgccttaaccattattttgccattgattggcttcgtcctgctggcgttctcccgtgggcgctggtctgaaaacgtttcggcgatcgtcggcgttggctctgtgggcctggcggcgctggtaaccgcctttatcggcgttgatttcttcgctaacggcgagcaggcatacagccagccgctgtggacgtggatgtcggtaggcgactttaacatcggttttaacctggtgctggacggcctgtcgctgaccatgctctcggtggtcactggtgtgggtttccttattcacatgtacgcctcctggtacatgcgcggtgaagagggctactctcgcttcttcgcctacaccaacctgttcatcgccagcatggtagttctggttctcgccgataacctgctgctgatgtacctcggctgggaaggcgtgggcctgtgctcctatctgctgatcggtttctattacaccgatccgaagaatggcgcagcagcaatgaaagcgttcgtcgtgacccgtgtgggtgacgttttcctcgctttcgcactgttcattctttacaacgaactgggcaccctgaacttccgcgaaatggtggaactggcaccagcgcactttgctgacggcaataacatgctgatgtgggcgacgctgatgctgctgggcggtgcggtcggtaaatctgcgcagttgccgttgcagacatggcttgctgacgcgatggcgggcccgacgcctgtctccgcgctgatccacgccgcaacgatggtaaccgcgggtgtctacctgatcgcccgtacccacggcctgttcctgatgacgccggaagttctgcatctggtgggtattgtcggggcggttacgctgctgctggccggttttgccgcgctggtacagaccgacatcaaacgtgttctcgcttactctaccatgagccagattggctacatgttcctcgcgcttggcgtgcaggcatgggatgcggcgattttccacttgatgactcacgcgttctttaaagcgctgctgttcctggcatccggttccgtcattctggcctgccatcacgaacagaacatcttcaagatgggcggtctgcgtaaatctattccgctggtttatctctgcttcctggtgggcggcgcagcactgtcggcactgccgctggtcactgcgggcttcttcagtaaggatgagatcctcgcgggtgcgatggcgaatggtcatatcaatctgatggtggcaggtctggtcggtgcgtttatgacctcgctctacaccttccgtatgattttcatcgtcttccacggaaaagaacaaattcacgctcacgccgtgaaaggggtaactcacagcctgccgctgattgtgctgctgatcctttccaccttcgttggcgcactgattgtaccgccgctgcagggcgtgcttccgcaaacgacggaactggcgcacggcagcatgttgaccctggaaattacctctggcgtggtcgcggtggtcggcattctgctggcagcctggctgtggctgggtaaacgttctctggtgacctccatcgccaacagtgcgccgggccgcctgctgagtacctggtggtacaacgcttggggctttgactggctgtacgacaaagtgttcgtcaagccgttcctgggtattgcctggttgctgaaacgcgatccgctgaactcaatgatgaacatcccggcggttctttcccgctttgcaggtaaaggtctgctgttaagcgagaacggttatctgcgctggtatgtggcatccatgagcatcggtgcggtcgtggtgctggcactgttgatggtactgcgttga

SEQ ID NO: 470492 - DNA, 303 bp, Shigella flexneri; identical to SEQ ID NO: 36112

SEQ ID NO: 470493 - DNA, 555 bp, Shigella flexneri
atggagttcgctttttatatctgtggcctgatagccatacttgcgaccttgcgagtgatcacccataccaatccggtacacgcactgctgtacctgattatttcgctgctggcgatttccggggtgttcttctcactaggcgcttacttcgccggtgcgctggaaattatcgtctacgcgggtgccattatggtgctgttcgtgttcgtggtgatgatgctcaacctgggcggttcagaaatcgaacaggaacgccagtggctgaaaccgcaggtgtggattggcccggcaattttgtcggccatcatgctggtggtgattgtttacgccatcctcggtgttaacgatcagggtatcgacggtacgccaatcagtgctaaagcagtgggtattacgctgttcgggccttacgtactggcggtggaactggcttctatgctgctgctcgcgggtctggttgtggccttccacgtcggtcgtgaagagcgtgcgggtgaagtgctgagcaatcgtaaagacgacagcgcgaaaagaaaaacggaggagcacgcatga

SEQ ID NO: 470494 - DNA, 543 bp, Shigella flexneri
atgaccttaaaagaattgttagtaggtttcggcacccaggttcgtagtatctggatgatcggcctgcacgcgttcgccaaacgcgaaacgcgaatgtacccggaagagccggtctatctgccgccccgttatcgtggtcgtatcgttctgacccgcgacccggacggcgaagagcgttgcgtagcctgtaacctctgtgcggtagcctgcccggtcggctgtatctcgctgcaaaaagcagaaaccaaagacggtcgctggtatccggaatttttccgcattaacttctcacgctgcattttctgtggtctgtgcgaagaagcctgtccgaccacggcgattcagttaaccccggatttcgaaatgggggaatacaagcgccaggatctggtttacgagaaagaggatctgctgatctccggtccgggcaaatacccggaatataacttctaccggatggcaggtatggcaatcgacggcaaagataagggcgaagcagagaacgaagccaagcctatcgacgtcaagagcctgttaccgtaa

SEQ ID NO: 470495 - DNA, 978 bp, Shigella flexneri
atgagttggatatcaccggaactgattgagatcctgctgaccatcctcaaagcggtggtgatcctgctggtggttgtcacctgtggggcattcatgagctttggcgaacgtcgcctgctgggtctgttccagaaccgttatggacctaaccgtgttggctggggcggttcgctccagctggttgcggacatgatcaaaatgttctttaaagaagactggatcccgaaattctcggatcgcgtcatctttaccctggcaccgatgattgcctttacctcgctgctgctggcctttgcaattgtgccagtcagtccgggttgggtggttgccgacctgaacatcgggattttgttcttcctgatgatggcaggtctggcggtttacgcggtgctgtttgcgggctggtcaagtaacaacaaatactcgctgctgggtgcgatgcgtgcttctgcgcagaccctgagctacgaagtgttcctcgggctttccctgatgggcgtggtggcgcaggccggttcattcaacatgaccgacatcgtcaacagccaggcgcatgtgtggaacgtcatcccgcaattctttggttttattacctttgccatcgcgggcgtggcggtgtgtcaccgtcacccgtttgaccagccggaagccgagcaggaactggcggatggttaccacattgaatattccggtatgaagttcggtctgttcttcgtgggtgagtacatcgggattgtgaccatctctgcattgatggtgacgctgttcttcggtggctggcaaggcccgttgttaccgccattcatctggttcgcgctgaaaaccgcgttctttatgatgatgttcattttgattcgtgcgtcgttaccgcgtccgcgttatgaccgggtaatgtccttcggctggaaaatctgcctgccgctgacgctgatcaacttgctggtaacggcggctgtcattctctggcaggcgcaataa

SEQ ID NO: 470496 - DNA, 2727 bp, Shigella flexneri
atggctacaattcatgtagacggcaaagaatacgaggtcaacggagcggacaacctgctggaagcttgtctgtctctgggccttgatattccttacttttgctggcatccggcgctgggaagcgtcggtgcttgccgccagtgtgcggtgaagcaataccaaaacgcggaagacacgcgtggtcgcctggtgatgtcctgtatgacaccggcttccgatggcacctttatttccattgacgacgaagaagcgaaacagttccgtgaaagtgtggtcgagtggttaatgaccaaccacccgcacgactgtccggtatgtgaagaaggcggtaactgccatcttcaggatatgaccgtgatgaccggacacagcttccgtcgctaccgtttcaccaaacgtacccaccgtaatcaggatttggggccattcatctctcacgaaatgaaccgctgcatcgcctgctaccgctgtgtgcgttactacaaagattacgctgacggtacagatctgggcgtttatggcgcgcacgacaacgtctacttcggtcgcccggaagacggcacgctggaaagcgaattttccggtaacctggtcgaaatttgcccgaccggcgtatttaccgacaaaacgcactccgagcgttacaaccgtaaatgggatatgcagtttgcgccgagcatctgccagcaatgttccatcggctgtaacatcagccccggtgaacgttacggcgaactgcgtcgtatcgaaaaccgttacaacggtacggtaaaccactacttcctctgcgaccgtggtcgtttcggttacggttacgtcaacctgaaggatcgtccgcgtcagccagtacagcgtcgtggcgatgatttcattaccctcaacgccgaacaggcaatgcagggcgcggcagatattctgcgtcagtcgaagaaagtgatcggtattggttctccgcgtgccagcgtggaaagcaactttgcgctgcgtgaactggtgggcgaagaaaacttctacaccggtatcgctcacggtgagcaggaacgtctgcaactggcgctgaaagtgctgcgtgaaggcggcatttatactccggctctgcgcgaaatcgaatcttacgatgcggtactggtgctgggcgaagacgttacccagaccggcgcgcgcgtcgcactggcagtgcgtcaggcggtgaaaggtaaagcgcgcgaaatggctgcagcacagaaagtggctgactggcagattgcggcaatcctcaacatcggtcaacgtgcgaagcatccgctgtttgttaccaacgttgatgacactcgtctggatgatatcgcggcgtggacttaccgcgcaccggttgaagatcaggcgcgtttaggttttgccatcgcccatgcgctggataactccgcaccagcggttgacggtatcgaacctgagttgcaaaacaaaatcgacgtcatcgtgcaggcactggcaggtgcgaagaaaccgttgattatctccgggacgaacgccggtagcatagaggtgattcaggctgcggctaacgtcgcgaaagccctgaaaggtcgcggcgctgacgttggtatcaccatgattgcccgttccgtcaacagcatggggctgggcattatgggtggcggttcgcttgaagaagcgttaaccgaactggaaaccggacgcgccgacgcggtggtggtgttggaaaacgatctgcatcgttacgcttctgctacccgcgtgaatgctgcgctggctaaagcgccgctggtgatggtggttgatcatcaacgcacagcgatcatggaaaacgcccatctggtgctttcctctgccagctttgctgaaagcgacggtacggtaattaataatgaaggtcgcgcccaacgtttcttccaggtttacgatccggcttattacgacagcaaaactgtcatgctggaaagctggcgctggctgcactcgctgcacagcaccttgctgagccgtgaagtggactggacgcagctcgaccatgtaattgacgctgttgtggcgaaaatcccggaactggcgggtatcaaagatgctgcgccggatgcgacattccgtattcgtgggcagaaactggcccgtgaaccgcaccgttacagcggtcgtaccgccatgcgcgccaatatcagcgttcatgagccgcgtcagccgcaggatattgacaccatgttcaccttctcgatggaaggtaacaaccagccgaccgcgcaccgttcgcaagtgccgtttgcctgggcgccgggctggaactccccgcaggcgtggaacaaattccaggacgaagtgggcggcaaactgcgctttggcgatccgggcgtgcgtctgtttgaaaccagcgaaaacggtctggattacttcaccagcgtaccggcacgcttccagccgcaggacgggaaatggcgtatcgcgccgtactaccacctgtttggcagcgatgaattgtcacagcgtgctccggtcttccagagccgtatgccgcagccgtacatcaaactcaacccagcggatgccgcgaagttgggtgtgaacgcaggtacacgcgtctcctttagttacgatggcaacacggtcacgctgccggttgaaatcgccgaaggactgacggcagggcaggtgggcttgccgatgggtatgtccggcattgctccggtgctggctggcgcgcatcttgaggatctcaaggaggcacaacaatga

SEQ ID NO: 470497 - DNA, 1338 bp, Shigella flexneri
atgaaaaacattatccgtactcccgaaacgcatccgctgacctggcgtctgcgcgatgacaaacagccagtgtggctggacgaataccgcagcaaaaacggttacgaaggggcgcgtaaggcgctgaccgggctgtctccggacgaaatcgttaatcaggtaaaagacgctggtctgaaagggcgcggcggcgcgggcttttcgactggcctgaagtggagcctgatgccgaaagacgaatccatgaacatccgttacctgctgtgtaacgccgatgaaatggagccgggcacctataaagaccgcctgttgatggagcaactgccgcacctgctggtggaaggtatgctcatctccgcgtttgcgctgaaagcttaccgtggctacatcttcctgcgtggcgaatatatcgaagcggcagtaaatctgcgccgcgccattgccgaagccactgaagcgggcttgcttggcaaaaacattatgggaacaggtttcgacttcgaactgttcgtccataccggggcagggcgctacatctgcggggaagaaacagcgttaatcaactccctggaagggcgtcgtgctaacccacgctcgaaaccccccttcccggcaacctccggcgtatggggcaaaccgacctgtgtcaacaacgtcgaaaccctgtgtaacgttccggcgatcctcgctaacggcgtggagtggtatcagaacatctcgaaaagtaaagatgctggcaccaagctgatgggcttctccggtcgggtgaaaaatccgggactgtgggaactgccgttcggcaccaccgcacgcgagatcctcgaagattacgccggtggtatgcgtgatggtctgaaatttaaagcctggcagccaggcggcgcggggactgacttcctgaccgaagcgcaccttgatctgccgatggaattcgaaagtatcggtaaagcgggcagccgtctgggtacggcgctggcgatggcggttgaccatgagatcaacatggtgtcgctggtgcgtaacctggaagagtttttcgcccgtgagtcctgcggctggtgtacgccgtgccgcgacggtctgccgtggagcgtgaaaattctgcgtgcgctggagcgtggcgaaggccagccgggcgatatcgaaacacttgagcaactgtgtcgattcttaggcccgggtaaaactttctgtgcccacgcacctggtgcagtggagccgttacagagcgccatcaaatatttccgcgaagaatttgaggcgggaatcaaacagccgttcagcaatacccatttgattaatgggattcagccgaacctgctgaaagagcgctggtaa

SEQ ID NO: 470498 - DNA, 501 bp, Shigella flexneri
atgcacgagaatcaacaaccacaaaccgaggcttttgagctgagtgcggcagagcgtgaagcgattgagcacgagatgcaccactacgaagacccgcgtgcggcgtccattgaagcgctgaaaatcgttcagaagcagcgtggctgggtgccggatggtgcgatccacgcgatcgccgatgtgctgggtattccggcaagcgacgtcgaaggtgtggcaacgttctacagtcagatcttccgccagccggttggtcgccatgtgatccgttattgcgacagcgtggtctgtcatatcaacgggtatcagggtattcaggcggcgctcgagaaaaagctgaacatcaaaccagggcaaacgacatttgatggccgctttacgctgctgccaacttgctgcctggggaactgtgataaagggccaaacatgatgatcgatgaggacactcacgcgcatctgaccccggaagcgatccctgaactgctggagcggtataaatga

SEQ ID NO: 470499 - DNA, 1803 bp, Shigella flexneri
atggtgaacaatatgaccgacttaaccgcgcaagaacccgcctggcagacccgcgatcatcttgatgatccggtaattggcgaactgcgcaaccgttttgggccggatgcctttactgttcaggcgactcgcaccggggttcccgttgtgtggatcaagcgtgaacaattactggaagttggcgatttcttaaagaaactgccgaaaccttacgtcatgctgtttgacttacacggcatggacgaacgtctgcgcacacaccgcgaagggttacctgccgcggatttttccgttttctaccatctgatttctatcgatcgtaaccgcgacatcatgctgaaggtggcgctggcagaaaacgacctgcacgtaccgaccttcaccaaactgttcccgaacgctaactggtatgagcgtgaaacctgggatctgtttggcattactttcgacggtcacccgaacctgcgccgcatcatgatgccgcaaacctggaaaggtcacccgctgcgtaaagattacccggcgcgcgctaccgaattctcgccgtttgagctgaccaaagccaaacaggatctggagatggaagccctgaccttcaaaccggaagagtgggggatgaagcgcggcaccgaaaacgaggacttcatgttcctcaacctcggtccgaaccacccgtcggcgcacggggctttccgtatcgttttacaactcgacggcgaagagattgtcgactgcgtaccagacatcggctaccaccaccgtggtgcggagaaaatgggcgagcgccagtcctggcacagctacattccgtataccgaccgtattgaatacctcggcggctgcgttaacgaaatgccttacgtgctggcggtagagaaactggccgggatcaccgtgccggatcgcgttaacgtcattcgcgttatgctctccgaactgttccgtatcaacagccacctgctgtacatctcgacctttattcaggacgtcggcgcaatgacgcccgtgttcttcgcctttaccgatcgtcagaaaatttacgatctggtggaagcgatcacgggtttccgtatgcacccggcgtggttccgtattggcggcgtagcgcacgacctgccgcgcggctgggatcgtctgctgcgtgagttcctcgactggatgccgaaacgtctggcgtcttacgagaaagcggcgctgcaaaataccattctgaaaggtcgttcccagggcgttgccgcctatggcgcgaaagaggcgctggagtggggcaccactggcgcgggcctgcgtgctaccgggatcgacttcgacgtgcgtaaggcgcgtccttattctggctatgaaaacttcgactttgaaatcccggttggtggtggtgtttctgactgctacacccgcgtaatgctgaaagtggaagagctgcgccagagtctgcgcattcttgagcagtgcctcaacaacatgccggaaggcccgttcaaagcggatcacccgctgaccacgccgccgccgaaagagcgcacgctgcaacatatcgaaaccctgatcacccacttcctgcaagtgtcgtgggggccggtgatgcctgccaatgaatctttccagatgattgaggcgaccaaggggatcaacagttactacctgaccagcgacggtagcaccatgagttatcgcactcgtatccgcacgccgagttatgcgcatttgcagcaaattccggcggcgatccgcggcagcctggtgtctgacctgattgtttatctgggcagtatcgattttgttatgtcagatgtggaccgctaa

SEQ ID NO: 470500 - DNA, 663 bp, Shigella flexneri; identical to SEQ ID NO: 458267

SEQ ID NO: 470501 - DNA, 444 bp, Shigella flexneri
atgagtatgtcaacatccactgaagtcatcgctcatcactgggcattcgctatctttcttatcgttgccattggcctgtgttgcctgatgctggtaggcggttggtttttaggcggtcgcgcacgcgcgaggtcgaaaaacgtgccgtttgaatccggtatcgactcggtcggctccgcccgcttacgcctgtccgccaagttttatctggtggccatgttcttcgttatcttcgacgttgaagcgctgtatctgttcgcatggtcaacctctatccgcgaaagcggctgggtaggctttgtggaagctgcaatttttatttttgtgttactggcaggtctggtttatctggtgcgtattggcgcgctggactggacgcccgcgcgttcacgccgcgagcgtatgaacccggaaacgaacagtatcgctaatcgtcaacgctaa

SEQ ID NO: 470502 - DNA, 165 bp, Shigella flexneri
atgttgttgaatcgtgtccgttgtgaagcaatggaaaaaatacgggtctattttgacaggaatttgtgtcgattcctccccccaaaagagagtattttcttgatctgtgacacgcttttgttattccataacaaaaacgcagcaacaaatttacgtattttttaa

SEQ ID NO: 470503 - DNA, 939 bp, Shigella flexneri
atgataagtgcaaatcgtccgataattaacctcgacctcgatctgctgagaacatttgttgctgttgccgatctgaacacttttgctgccgcagctgccgctgtgtgtcgtactcagtccgccgtaagtcagcaaatgcagcgtctggaacaactcgttgggaaagaactgttcgctcgtcacggtcgcaacaaactgttaactgaacatggcattcaacttcttggttacgccaggaaaatcctgcgttttaatgatgaggcctgctcatcattaatgttcagtaatcttcagggcgtgttaactatcggtgcttcagatgaatctgccgatacgatcttacctttcctgttaaatcgcgtgagttcggtttatccgaaattagcgctggatgtccgcgttaaacgtaatgcctatatggcagaaatgctggaatcccaggaagtggatttgatggtaaccacccatcgtccttcagcgtttaaggcattgaacctgcgtacctcgccaacacactggtactgcgcagcggaatacgtattgcaaaaaggcgagccgatccctcttgtattgctggatgatccaagtccgtttcgcgatatggtgctggcgacgcttaataaagtagatattccatggcgactggcttatgtcgcctcgacgcttccggccgttcgtgcggcagtgaaagccggtcttggcgtgacggcaaggccggttgagatgatgagcccggacctgcgtgtgctgagtggagtagatggcttaccgccgctacctgataccgaatatttgctgtgctatgacccgtccagtaataatgagctggcccaggtgatctatcaggcgatggagagctaccataatccgtggcaatacagcccaatgtctgctccggaaggggatgattcattgttgattgaaagggatatcgagtaa

SEQ ID NO: 470504 - DNA, 1218 bp, Shigella flexneri
atgtcccccattgaaaaatccagcaaattagagaatgtctgttatgacatccgtggtccggtgctgaaagaagcaaaacgcctggaagaagaaggtaacaaggtactgaaactgaacatcggcaacccagccccattcggttttgacgcgccagatgaaatcctcgttgacgtgatacgcaacctgcctaccgctcaagggtattgcgattccaaagggctttactccgcgcgtaaagccatcatgcagcactaccaggctcgtggcatgcgtgatgttaccgtggaagatatttacatcggcaatggtgtatcggagcttatcgttcaggcaatgcaggcattgctgaacagcggggacgaaatgttggttcctgcaccagattacccactctggaccgcggcggtttcgctttccagcggtaaagcggtgcattatctttgcgatgaatcctctgactggttcccggacctcgatgatattcgcgctaaaattacgcctcgtacgcgtgggattgttattatcaacccaaataacccaaccggcgcggtatattccaaagagcttttaatggagattgtggagattgcacgtcagcataatctcattatcttcgccgatgaaatttatgacaaaattctctacgacgatgctgagcatcattcaattgcgccgctggcacctgacctgctgaccattacctttaacggactgtcgaaaacgtaccgcgttgcaggcttccgtcaggggtggatggtgttgaacgggccgaaaaaacacgccaaaggctacatcgaaggtctggaaatgctggcttcaatgcgcctgtgtgctaacgttcctgcgcaacacgccattcagaccgcgctgggtggttatcagagcatcagtgaatttattacccctggcggtcgtctttatgagcagcgtaaccgcgcgtgggaactgatcaacgatattccgggcgtttcctgcgtgaaacctcgtggtgcgctgtatatgttcccgaaaatcgacgccaaacgctttaacattcatgacgatcagaaaatggtgctggatttcctgttgcaggaaaaagttctgttggtgcaagggacggcattcaactggccgtggccggatcacttccgcattgtcacgctaccgcgtgtcgatgatatcgagctgtctttgagcaagttcgcgcgtttcctttctggttatcatcagctgtaa

SEQ ID NO: 470505 - DNA, 600 bp, Shigella flexneri
atgaaacagagccatttttttgcccatctctcccgcctgaaactcattaaccgctggccgctaatgcgcaacgtgcggacggaaaatgtgtccgaacacagtttgcaggtagcgatggtcgcccatgcgctggcagctatcaaaaatcggaaatttggcggtaatgtcaacgccgaacgtatcgctttactggcgatgtaccacgatgcctcagaagtgctcaccggcgatctccctactccggtgaaatacttcaatgcgcaaatcgctcaggagtacaaggctattgaaaaaatcgctcagcagaaactggtcgatatggttccggaagaactgcgggatatctttgcgccgttaattgacgagcatgcatatagcgatgaagaaaaatcgctggtgaaacaggcagatgcactgtgtgcatatctgaaatgtctggaagaactcgcggccggaaataatgaattcttgctggcaaaaacgcgactggaagcgacgcttgaagcgcgtcgcagccaggagatggactacttcatggaagtatttgttcccagcttccatctttcgctcgatgagattagccaggattcaccgctgtaa

SEQ ID NO: 470506 - DNA, 1833 bp, Shigella flexneri
gtgaacggtgaattgatttgggttctttcattactggccgttgccatcgtcttgtttgcgacgggcagagtgcgtatggatgcggtcgctttgtttgttattgtcgcgtttgcattaagcggaacgctgacggtccccgaagtattttccggcttttctgatcctaacgttgtcctgattgccgccttgtttattattggcgatggtttggtccgtaccggtgttgccaccgtaatgggaacatggctggtcaaagtggcgggcaacagtgaaatcaaaatgttggttttgttgatgctgaccgtcgcggggcttggcgcgtttatgagttcaaccagcgttgtcgctatctttattcccgtggtgttaagcgttgccatgcgtatgcaaacttcgccgtcacgtctgatgatgccgttaagttttgccgggctgattagcggcatgatgacgctggtggcgacgccgccgaacctggtagtcaacagtgaattgctgcgtgaaggctatcacggcttcagtttctttagcgtaacacctattggcctggtcgtgctggtgctgggtattttgtatatgttagtgatgcgtttcatgctgaaaggggatacccagaccccgcagcgcgaaggctggacgcgtcgaacctttcgcgatcttatccgtgaatatcgactgaccgggcgtgcgcgacgtctggctattcgccccggatcgccaatgataggtcaacggctggatgatctcaaattacgtgagcgttatggcgctaacgtcatcggtgttgaacgctggcggcgttttcgtcgcgttatcgtgaacgttaatggggtttctgaatttcgcgcgcgtgacgttttgcttattgatatgtctgcggctgatgtcgatctccggcaattttgtagtgagcaattgctggagccgatggtactgcgcggcgagtatttttctgaccaggcccttgatgtgggcatggcagagatttcattaattcctgagtcagaactgattggtaaatcggtgcgcgaaattggttttcgtacccgctacggactgaatgtggtggggctcaagcgcaatggcgtggcgctggaaggttcgctggcggatgagcctctgctgctgggcgatatcatcctggttgtgggtaactggaaactgatcggtatgctggccaaacagggccgcgacttcgtagcgctgaacttaccggaagaggtgagtgaagcatcgcccgcgcacagccaggcaccccatgccattttctgtctggtgctaatggtggcgttaatgctgacaaatgaaattcctaatcctgttgccgctatcatcgcctgcctgctgatggggaaattccgctgtatagatgctgaaagcgcctataaatccattcactggccgagcattattttgatcgttgggatgatgccgtttgctgtggcattacagaaaacgggaggtgtcgcgctggcggtgaaagggctgatggatattggcggcggttatgggccacatatgatgctggggtgtttgtttgtcttgtcggcggttattgggctgtttatctctaataccgcgacggcggtgttgatggctccgattgcgctggctgctgccaaaacgatgggagtgtcgccttatccatttgcgatggtcgtggcgatggcagcatccgccgcctttatgacaccggtgtcttcacctgttaacaccctggttttaggtccgggaaattacagcttcagtgactttgtgaagttgggggtaccgttcaccattatcgtgatggcggtttgtgtggtgatgatcccgatgctgtttccgttttga

SEQ ID NO: 470507 - DNA, 651 bp, Shigella flexneri
gtgcggtgcaaaggttttctgtttgatcttgatggaacgctggtggattccctgcctgcggtagaacgggcgtggagcaactgggccagacgtcatgggttagcgccggaagaggtgctggctttcattcacggtaaacaggcgatcacctctttgcgccattttatggcgggcaaatccgaggctgatattgccgccgagtttacgcgtctggagcaaatcgaggccacggaaaccgaaggtattaccgcgcttcctggggcaatcgccttactcaatcatttgaataaagcaggtattccgtgggccattgtgacttctggctccatgccggtagcgcgagcgcgccataaaatagcggggcttcccgcaccagaggtgtttgtaaccgctgagcgagtgaagcgcggaaaaccagaacctgatgcgtatctgttaggtgcgcagctgctggggcttgcgccgcaggagtgtgtggtggtggaagatgctcccgctggcgtgctttctggcctggcggcgggttgccatgtcattgcggttaacgctccggcagataccccgcgcctgaatgaggtcgatttggtcctccacagtctggagcaaattactgtgaccaaacagccaaatggcgatgttattattcagtga

SEQ ID NO: 470508 - DNA, 495 bp, Shigella flexneri
atggaaatgaccaacgcgcaacgtcttattttgtctaatcagtacaagatgatgactatgctcgatccggcaaatgctgaacgttaccgtcgcctgcaaacaattattgagcgtggttacggattacagatgcgtgaattggatcgcgagtttggcgagctgaaagaagaaacctgccgcactatcatcgacattatggagatgtatcatgcgttgtatgtttcctggtctaatttgcaggaccagcaatccatcgatgaacgtcgtgtcaccttcctcggctttgacgccgccactgaagcacgttacctcggttatgtccgctttatggttaatgtggaagggcgctatacccattttgacgctgggactcatggttttaacgcccagacgccaatgtgggaaaaatatcagcgcatgcttaatgtgtggcatgcctgcccgcgtcagtaccatttgagcgccaacgaaattaatcaaattatcaacgcctga

SEQ ID NO: 470509 - DNA, 456 bp, Shigella flexneri
atgtcaacgccggataatcgttctgttaatttttttagcttgtttcgccgcggacagcattactcaaagacgtggccactggaaaaacgccttgccccggtctttgtcgaaaatcgcgttatcaagatgacgcgttatgcgatccgttttatgccgccgatcgccgtatttactctctgctggcagattgccctgggcggtctgcttgggccggcagttgccactgcactgttcgccttaagtttacccatgcagggattgtggtggctgggcaagcgttctgtaacgccattaccccctgcaatccttaactggttttatgaagttcgcggtaaattgcaggagtctggacaggtgttggcacccgttgaaggcaagcctgattaccagacattagctgacacgcttaagcgcgccttcaaacaactggataaaactttccttgatgatttgtaa

SEQ ID NO: 470510 - DNA, 1203 bp, Shigella flexneri
atgtcgagtaagttagtactggttctgaactgcggtagttcttcactgaaatttgccatcatcgatgcagtaaatggtgaagagtacctttctggtttagccgaatgtttccacctgcccgaagcacgtatcaaatggaaaatggacggcaataaacaggaagcggctttaggtgcaggcgccgctcacagcgaagcgctcaactttatcgttaatactattctggcacaaaaaccagaactgtctgcgcagctgactgctatcggtcaccgtatcgtacacggcggcgaaaagtataccagctccgtagtgatcgatgagtctgttattcagggtatcaaagatgcagcttcttttgcaccgctgcacaacccggctcacctgatcggtatcgaagaagctctgaaatctttcccacagctgaaagacaaaaacgttgctgtatttgacaccgcgttccaccagactatgccggaagagtcttacctctacgccctgccgtacaacctgtacaaagagcacggcatccgtcgttacggcgcgcacggcaccagccacttctatgtaacccaggaagcggcaaaaatgctgaacaaaccggtagaagaactgaacatcatcacctgccacctgggcaacggtggttccgtttctgctatccgcaacggtaaatgcgttgacacctctatgggtctgaccccgctggaaggtctggtcatgggtacccgttctggtgatatcgatccggcgatcatcttccacctgcacgacaccctgggcatgagcgttgacgcaatcaacaaactgctgaccaaagagtctggcctgctgggtctgaccgaagtgaccagcgactgccgctatgttgaagacaactacgcgacgaaagaagacgcgaagcgcgcaatggacgtttactgccaccgcctggcgaaatacatcggtgcctacactgcgctgatggatggtcgtctggacgctgttgcattcactggtggtatcggtgaaaatgccgcgatggttcgtgaactgtctctgggcaaactgggcgtgctgggctttgaagttgatcatgaacgcaacctggctgcacgtttcggcaaatctggtttcatcaacaaagaaggtacccgtcctgcggtggttatcccaaccaacgaagaactggttatcgcgcaagacgcgagccgcctgactgcctga

SEQ ID NO: 470511 - DNA, 2145 bp, Shigella flexneri
gtgtcccgtattattatgctgatccctaccggaaccagcgtcggtctgaccagcgtcagccttggcgtgatccgtgcaatggaacgcaaaggcgttcgtctgagcgttttcaaacctatcgctcagccgcgtaccggtggcgatgcgcccgatcagactacgactatcgtgcgtgcgaactcttccaccacgacggccgctgaaccgctgaaaatgagctacgttgaaggtctgctttccagcaatcagaaagatgtgctgatggaagagatcgtcgcaaactaccacgctaacaccaaagacgctgaagtcgttctggttgaaggtctggtcccgacacgtaagcaccagtttgcccagtctctgaactacgaaatcgctaaaacgctgaatgcggaaatcgtcttcgttatgtctcagggcactgacaccccggaacagctgaaagagcgtatcgaactgacccgcaacagcttcggtggtgccaaaaacaccaacatcaccggcgttatcgttaacaaactgaacgcaccggttgatgaacagggtcgtactcgcccggatctgtccgagattttcgacgactcttccaaagctaaagtaaacaatgttgatccggcgaagctgcaagaatccagcccgctgccggttctcggcgctgtgccgtggagctttgacctgatcgcgactcgtgcgatcgatatggctcgccacctgaatgcgaccatcatcaacgaaggcgacatcaatactcgccgcgttaaatccgtcactttctgcgcacgcagcattccgcacatgctggagcacttccgtgccggttctctgctggtgacttccgcagaccgtcctgacgtgctggtggccgcttgcctggcagccatgaacggcgtagaaatcggtgccctgctgctgactggcggctacgaaatggacgcgcgcatttctaaactgtgcgaacgtgctttcgctaccggcctgccggtatttatggtgaacaccaacacctggcagacctctctgagcctgcagagcttcaacctggaagttccggttgacgatcacgaacgtatcgagaaagttcaggaatacgttgctaactacatcaacgctgactggatcgaatctctgactgccacttctgagcgcagccgtcgtctgtctccgccagcgttccgttatcagctgactgaactggcgcgcaaagcgggcaaacgtatcgttctgccggaaggtgacgaaccgcgtaccgttaaagcagccgctatctgtgctgaacgtggtatcgcaacttgcgtactgctgggtaatccggcagagatcaaccgtgttgcagcgtctcagggtgtagaactaggtgcaggcattgaaatcgttgatccagaagtggttcgcgaaagctatgttggtcgtctggtcgagctgcgtaagaacaaaggcatgaccgaaaccgttgcccgcgaacagctggaagacaacgtggtgctcggtacgctgatgctggaacaggatgaagttgatggtctggtttccggtgctgttcacactaccgcaaacaccatccgtccgccgctgcagctgatcaaaactgcaccgggcagctccctggtatcttccgtgttcttcatgctgctgccggaacaggtttacgtttacggtgactgtgcgatcaacccggatccgaccgctgaacagctggcagaaatcgcgattcagtccgctgattccgctgcggccttcggtatcgaaccgcgcgttgctatgctctcctactccaccggtacttctggtgcaggtagcgacgtagaaaaagttcgcgaagcaactcgtctggcgcaggaaaaacgtcctgacctgatgatcgacggtccgctgcagtacgacgctgcggtaatggctgacgttgcgaaatccaaagcgccgaactctccggttgcaggtcgcgctaccgtgttcatcttcccggatctgaacaccggtaacaccacctacaaagcggtacagcgttctgccgacctgatctccatcgggccgatgctgcagggtatgcgcaaaccggttaacgacctgtcccgtggcgcactggttgacgatatcgtctacaccatcgcgctgactgcgattcagtctgcacagcagcagtaa

SEQ ID NO: 470512 - DNA, 1479 bp, Shigella flexneri
atgcccgatacgttggtgattatcttttttgttgctattttaaccagtcttgccacctgggtagttccggtggggatgtttgacagtcaggaagtgcagtatcaggttgatggtcaaacaaaaacacgcaaagtcgtagatccacactcatttcgcattctgactaacgaagcaggcgaacctgagtatcaccgcgtacagctgttcacgacgggcgatgaacgcccgggcctgatgaacttcccgtttgaagggttaacctcaggatcgaaatacgggacagccgttggcatcatcatgtttatgctggtgattggcggcgcgtttggcattgtgatgcgtacaggaaccattgataacggtatcctggcgcttattcgccatacccgcgggaatgaaattctctttattcctgcgctgtttattctgttttcacttggcggcgcggtatttggtatgggagaagaggccgtcgcctttgccattatcatcgcaccgctaatggtccggctgggctatgacagtattaccaccgtcctggtgacttatattgccacgcaaatcggttttgccagttcgtggatgaacccgttttgtgtggttgttgctcaggggattgccggcgttccggtgctttctggctccgggttgcgcatcgtggtgtgggttatcgccactctgattggcctgatctttaccatggtgtacgcctcacgagtgaaaaagaatcctcttctgtcacgcgtgcatgagtccgaccgcttctttcgtgaaaagcaggcggatgttgaacaacgtccgtttacctttggtgactggctggtattgattgtcctgacagccgtaatggtctgggtgatttggggcgtgatcgttaatgcctggtttattccagaaattgccagccagttcttcaccatgggtctggtgattggcatcatcggcgttgttttccgccttaacggcatgacggttaataccatggcttcatcctttaccgaaggggcgcgaatgatgatcgcccctgccctgctggtgggtttcgccaaagggattttgctgctggttggtaatggtgaagcaggtaatgccagcgtgttaaatactatcctcaacagcattgccaatgccattagcggtctggacaacgcggtcgcggcctggtttatgttgctcttccaggctgtatttaatttcttcgtgacgtccggttctggtcaggcggcattaactatgccgttactggcaccgcttggcgatctggtcggtgttaaccgtcaggttaccgtgctggcgttccagtttggtgatggcttcagccacatcatttacccaacctcagcttcgttaatggcaacgctcggtgtgtgccgggtggacttccgtaactggctgaaggtgggcgcgaccctgcttggactgctgtttattatgtccagcgtcgtagtgatcggcgctcagttgatgggctaccactaa

SEQ ID NO: 470513 - DNA, 543 bp, Shigella flexneri
atggaacagcgtcgtttggcaagtactgaatgggtggatattgtcaatgaagagaacgaagtcattgcacaagccagccgggaacaaatgcgggcacagtgtctgcgtcatcgtgcaacttacatcgtcgtgcatgatggcatgggcaaaattctggtccagcgtcgtaccgagacaaaagactttttacccggcatgttagatgcgaccgcaggcggtgtagttcaggccgatgagcaactgctggaatccgcgcgtcgcgaagcggaagaagagttgggcattgccggtgtcccctttgccgagcacgggcagttctatttcgaagataaaaattgccgtgtctggggcgcgttgttcagttgcgtctctcacggtcccttcgccctacaggaagatgaagtcagtggagtttgctggctgacgccggaagaaatcaccgcacgctgcgatgagttcactccagactcgctgaaagcgctggcgttgtggatgaagcgcaatgccaaaaatgaagccgtagagactgaaacggcagaatga

SEQ ID NO: 470514 - DNA, 552 bp, Shigella flexneri
atgaaactgatgtttgcatcggacattcatgggtcgttaccggcgacggaacgtgttgtggagttgtttgtccaaagcggtgcccagtggctggtgatccttggcgacgtgttgaatcacggcccgcgtaatgctttaccggagggttacgcgccagccaaagtcgctgaacggcttaatgaagtggcacataaggttatcgctgtgcgtggcaactgcgacagcgaagtggatcaaatgatgctgcatttcccgataaccgcgccgtggcaacaggtattactggaaaaacaacgtctgtttttgacgcatggtcatctttttggcccggaaaatctacctgctttaaaccagaacgatgtgctggtgtacggtcatacccatctgccagtggcagaacagcggggggagattttccacttcaaccccggctcggtgagtattccgaaaggcggtaatccggcgggttatggcatgctggataatgacgtacttagtgtaatcgcactcaatgatcaaagtatcattgcgcaggtcgcgattaatccgtaa

SEQ ID NO: 470515 - DNA, 645 bp, Shigella flexneri
atgagtaaacccgctatcacgctttggtcagatgcccactttttctccccttatgtgttatccgcctgggtggcgttgcaggaaaaaggcctgtcgtttcatatcaagaccatcgacctcgacagcggtgaacatttgcagccgacgtggcaaggttacggtcagacacgccgtgtgccgttattacaaatcgatgattttgagttgagtgaatcttctgccattgcggagtatctggaagatcgatttgcgccaccgacctgggaacgtatttatccgcttgatttagaaaatcgtgcgcgtgcacgacagattcaggcctggctgcgcagcgatctgatgcccatccgcgaagagcgtccgacggatgttgtctttgcgggggcgaaaaaagcgccactaacggccgagggaaaagccagtgcagagaaactgttcgcgatggcagaacatttgttagcactgggtcagccgaatttatttggtgaatggtgcattgctgatactgatctggcgctaatgattaaccgcctggtactacatggcgatgaggtgccagaacgcctggtggattatgcgacattccagtggcagcgagcgtctgtccagcgttttattgcactttcggcgaagcaatctggctga

SEQ ID NO: 470516 - DNA, 648 bp, Shigella flexneri
atgatcgatctctatttcgccccgacacccaatggtcacaaaattacgctgtttctcgaagaagcagagcttgattatcgcttgattaaggtagacctggggaaaggcggtcagtttcgtccggaatttttgcgcatttcgcccaacaacaaaattccggcaattgttgatcattctcctcccgatggcggcgaaccgttaagcctctttgagtctggtgccattttgttgtatctggctgagaaaacaggactctttttgagtcatgaaacgcgtgagcgcgccgccacattacagtggttattctggcaggtaggcggactggggccgatgcttgggcaaaatcatcattttaatcacgcagccccccaaaccattccttacgctattgaacgttatcaggttgaaactcagcgtctttaccatgtactaaacaagcggctggaaaactcgccctggctgggaggcgagaactacagcattgcggatattgcctgctggccgtgggttaatgcctggactcgcctgcgaattgacctcgcaatgtatccggcagtcaagaactggcatgagcggatccgttcgcgccctgccaccggacaggcactgctaaaagcacaactcggtgatgagcgttcggatagttaa

SEQ ID NO: 470517 - DNA, 363 bp, Shigella flexneri
atggcacaacctgccgctattattcgtataaagaaccttcgtttgcgtacgtttatcggaattaaggaagaagaaattaacaaccgtcaggatattgttatcaatgtgacgatccactaccccgccgataaagcgcgcactagcgaagatatcaacgatgcgctgaattatcgcaccgtaacgaaaaacattattcagcatgtagagaataaccgtttctctttgctggaaaaattaactcaggatgtgctcgatatcgcacgtgaacatcactgggtgacgtatgctgaagtggagatcgataaactgcacgcgctgcgctacgccgattcggtatccatgaccttaagctggcagcgttaa

SEQ ID NO: 470518 - DNA, 894 bp, Shigella flexneri
atgaacatagtgatcaccggagggacgggattaattggtcgccatttgattccgcgtttgctggagctgggccatcaaattacggtagtgacgcgtaacccgcagaaagccagttccgttctcggccctcgggtgacactatggcaagggcttgccgatcaaagcaacctcaacggcgttgatgcggtaatcaacctggccggagaaccgattgctgataaacgctggactcacaagcaaaaagagcgtctctgccaaagccgctggaatatcacgcaaaaactggtcgatttgattaatgctagcgacacgccgccgtcggtactcatttccggctcggcaacgggctattatggcgacttaggtgaagtggtggttaccgaagaggaaccgccgcataacgaatttactcataaactctgcgcccgctgggaagagattgcctgccgggcgcaaagtgacaaaacgcgagtgtgcctgctgcgaaccggcgtggtactggcaccggacggcggtattctcggtaaaatgctgccaccgtttcgtcttggcctgggcgggccgattggttccggtcggcagtatctggcctggattcatattgatgatatggtcaacggcattctctggctgctggataacgagctgcgcgggccatttaatatggtttcgccctacccggtacgcaatgaacaatttgcccatgcgctcggtcatgcgctgcatcgcccggctattttgcgcgtccccacaaccgccattcggctgttaatgggcgaatcttcagtactggtattaggtggacaacgcgcgctgcctaaacggctggaagaagcgggttttgcgtttcgctggtacgatttagaagaggcgctggcggatgtcgttcgctga

SEQ ID NO: 470519 - DNA, 891 bp, Shigella flexneri
atgacaatatcgacaacttccacgccgcatgatgcggtatttaaatcttttttacgccatccagacaccgcgcggaattttattaatattcatcttcccgcgccgctgcgcaaactgtgtgatttaacgacgcttaaactagaaccaaacagttttattgatgaagacctgcggcaatattattccgacctcttgtggtctgtgaaaacgcaggagggagtgggttatatttatgtagtgatagagcaccaaagtaagccggaagaattaatggcttttcgcatgatgcgttattccattgcggcaatgcaaaaccatcttgatgcgggctataaagagcttccattggtgatcccgatgctgttttatcatggttgcagaagtccttatccttattcactctgctggcttgatgaatttgccgagcctgctatagcccgcaaaatatattcatcagcgtttccgttggtggatattaccgtggtgccggatgacgagattatgcaacaccgcaaaatggcgctgttggagttaattcagaaacatattcgtcagcgcgatctgttgggattagtcgaccaaattgtttcgctgctagttacagggaacactaatgacagacagctaaaagccctgtttaattacgtattacaaacaggggatgcccagcgtttccgtgcatttattggtgagataacagaacgcgcaccacaagaaaaggagaaactgatgaccattgctgacagattacgtgaagaaggcgcaatgcagggcaaacacgaagaagccctgcgtattgctcaggagatgctggatagaggtttagacagagagttagttatgatggtgacccgactttcaccagacgatcttatcgcgcaaagccactaa

SEQ ID NO: 470520 - DNA, 774 bp, Shigella flexneri
atgtccgagaataaattaaacgttatcgatttgcacaaacgctatggcgaacacgaagtgctgaaaggggtctcactgcaagcgaatgccggagatgtaataagcatcatcggatcgtcgggatcggggaaaagtacctttctgcgctgcattaacttcctcgaaaaaccgagtgaaggatcgatcgtggtcaatggccagacgatcaatctggtgcgcgacaaagacggtcaactcaaagtcgccgataaaaatcaactgcgcttactgcgcacacgcctgacgatggtattccagcacttcaatctctggagccatatgacggtgttggaaaacgtcatggaagcgccgattcaggtgttgggcctgagcaagcaggaagcgcgcgagcgggcggtgaagtatctggcgaaagtcgggatagacgaacgtgcgcaggggaaatatccggtgcatctttccggcggtcagcaacagcgtgtttctatcgcgcgggcgctggcgatggaaccagaagttttactgtttgatgaacctacctcggcgctcgatcctgaactggtaggcgaagtgttacgtattatgcagcaactggcagaagaggggaaaaccatggtggtagtgactcacgaaatgggctttgctcgccatgtttctactcacgtcattttcctacatcaggggaaaatagaagaagagggcgcgccggagcagttatttggcaacccgcaaagccctcgtctgcaacagttccttaagggatcgctgaaataa

SEQ ID NO: 470521 - DNA, 717 bp, Shigella flexneri
gtgatcgaaatcttacatgaatactggaaaccgctgctgtggaccgacggttatcgctttactggtgtggcgatcactctgtggctgcttattttgtcggtagtgataggcggagtcctggcgctgtttctggcgattggtcgtgtctccagtaataaatacatccagtttccaatctggttatttacctatatttttcgcggtacgccgctgtatgttcagttgctggtgttctattccggcatgtacacgcttgagattgttaagggaaccgaattccttaacgctttcttccgcagtggcctgaactgtaccgtgctggcgctgacgcttaacacctgcgcttacactaccgagatttttgctggggcaatccgttcggttccgcatggggaaattgaagccgccagagcctatggcttctcgacctttaaaatgtatcgctgcattattttgccttctgcgctgcgtattgcgttaccggcatacagcaacgaagtgatcctgatgctgcactctactgtgctggcgtttacggccactgtgccggatctgctgaaaatagcccgcgatattaacgccgccacgtatcaaccttttaccgccttcggcattgccgcggtgctctatttaatcatctcttatgtcctgatcagcctctttcgcagagcggaaaaacgctggttgcagcatgtgaaaccttcttcaacgcactga

SEQ ID NO: 470522 - DNA, 687 bp, Shigella flexneri
atgttgtatgggttttcaggtgttattttacagggtgcgctcgtcacgctggagctggctatcagctctgtagtgctcgctgtaatcatcggtttaattggcgctggcggtaagctctcgcaaaatcggctttcggggctgattttcgaagggtacaccacgctgattcgaggcgtgccggacttggtgttgatgctgctgattttctatggtttgcagattgcgctaaacatggtgacggaggcgatgggcgtcgggcagattgatatcgatccgatggtcgctggtattatcactctcggttttatctacggtgcttattttaccgaaacgttccgtggcgcgtttatggcagtgccgaaagggcatatagaggcggcgacggcgttcggttttactcgcgggcaagtgtttcggcggatcatgtttccggcgatgatgcgttacgccctgccaggcattggcaacaactggcaggtgatcctcaaatctaccgcactggtttcgttactcggcctggaagatgtggtcaaagccacgcagctggcaggcaaaagtacctgggaaccgttctatttcgccatcgtctgtggcgtgatttacctggttttcaccaccgtttccaatggtgtgctgctgttccttgagcgccgctactccgtgggtgtgaagagggctgacctgtga

SEQ ID NO: 470523 - DNA, 783 bp, Shigella flexneri
atgaaaaaactggtgctatcgctctctctggttctggccttctccagcgcaactgcggcacttgctgcaattccgcaaaacatccgcatcggtaccgacccgacctatgcgccatttgaatcaaaaaattcacaaggcgaactggttggtttcgatatcgagctggcgaaggagttgtgcaagcgcatcaatacgcaatgtacgtttgtcgaaaacccgctggatgcgttaatcccgtccttaaaagcgaagaagattgacgccatcatgtcatcgctttccattacggaaaaacgtcagcaagaaattgccttcaccgacaaactgtacgctgccgattctcgtctggtggtggcgaaaaattctgacattcagccgacagtcgagtcgctgaaaggcaaacgggtaggcgtattgcagggcaccacccaggagacgttcggtaatgaacactgggcaccaaaaggcattgaaatcgtctcgtatcaggggcaggacaacatttattctgacctgactgccggacgtattgatgccgcgttccaggatgaggtcgctgccagcgaaggtttcctcaaacaacccgtcggtaaagattacaaattcggtggtccgtctgttaaagatgaaaaactgtttggcgtagggaccggcatgggcctgcgtaaagaagataacgaactgcgcgaggcactgaacaaagcctttgccgaaatgcgcgctgacggtacttacgagaaattagcgaaaaagtacttcgattttgatgtttatggtggttaa

SEQ ID NO: 470524 - DNA, 438 bp, Shigella flexneri
ttgattgctgccaaaggttcaccgattcagccaacgctggattcactgaaaggtaaacatgttggtgtgctgcagggatcaacccaggaagcttacgctaacgagacctggcgtagtaaaggcgtggatgtggtggcctatgccaaccaggatttggtctattccgatctggctgcaggacgtctggatgctgcgttacaagatgaagttgctgccagcgaaggattcctcaagcaacctgctggtaaagatttcgcttttgctggctcatcagtaaaagacaaaaaatacttcggtgatggcaccggtgtagggctacgtaaagatgatgctgaactgacggctgccttcaataaggcgcttggcgagctgcgtcaggacggcacctacgacaagatggcgaaaaagtatttcgactttaatgtctacggtgactga

SEQ ID NO: 470525 - DNA, 207 bp, Shigella flexneri
atgaagaagtcgattctcgctctgtctttattagtcggtctctccgcagcggcttccagctatgcggcgctaccggagacggtacgtatcggaaccgataccacctatgcgctgttctcgtcgaaagatgctaaaggtgattttgttggctttgatatcgatctcggtaacgagatgtgcaaacggatgcaggtgaaatgtacctag

SEQ ID NO: 470526 - DNA, 570 bp, Shigella flexneri
atgaaacgactcattgtaggcatcagcggtgccagcggcgcgatttatggcgtgcgcttattacaggttctgcgcgatgtcacagatatcgaaacgcatctggtgatgagccaggcggcgcgccagaccttatccctcgaaacggatttttccctgcgcgaagtgcaggcattagctgatgtcacgctcgatgcgcgcgatatttccgccagcatctcttccggttctttccagacgctggggatggtgattttaccctgttcaatcaaaaccctgtccggcattgtccatagctatactgatggcttactgacccgtgcggcagatgtggtgctgaaagagcgtcgcccgttggtgctctgcgtgcgtgaaacaccattgcacttaggccatctgcgtttaatgactcaggcggcagaaatcggtgcggtgattatgcctcccgttccggcgttttatcatcgcccgcaatcccttgatgatgtgataaatcagacggttaatcgtgttcttgaccagtttgcaataacccttcctgaagatctctttgcccgctggcagggcgcataa

SEQ ID NO: 470527 - DNA, 1518 bp, Shigella flexneri
atgtgcggtattgtcggtatcgccggtgttatgccggttaaccagtcgatttatgatgccttaacggtgcttcagcatcgcggtcaggatgccgccggcatcatcaccatagatgccaataactgcttccgtttgcgtaaagcgaacgggctggtgagcgatgtatttgaagctcgccatatgcagcgtttgcagggcaatatgggcattggtcatgtgcgttaccctacggctggcagctccagcgcctctgaagcgcagccgttttacgttaactccccgtatggcattacgcttgcccacaacggcaatctgaccaacgctcacgagttgcgtaaaaaactgtttgaagaaaaacgccgccacatcaacaccacttccgactcggaaattctgcttaatatcttcgccagcgagctggacaacttccgccactacccgctggaagccgacaatattttcgctgccattgctgccacaaaccgcttaatccgcggcgcgtatgcctgtgtggcgatgattatcggccacggtatggttgctttccgcgatccaaacgggattcgtccgctggtactgggaaaacgtgatattgacgagaaccgtacagaatatatggtcgcttccgaaagcgtagcgctcgatacgctgggctttgatttcctgcgtgacgtcgcgccgggcgaagcgatttacatcactgaagaagggcagttgtttacccgtcaatgtgctgacaatccggtcagcaatccgtgcctgtttgagtatgtatactttgcccgcccggactcgtttatcgacaaaatttccgtttacagcgcgcgtgtgaatatgggcacgaaactgggcgagaaaattgcccgcgaatgggaagatctggatatcgacgtggtgatcccgatcccagaaacctcgtgtgatatcgcgctggaaattgctcgtattctgggcaaaccgtaccgccagggcttcgttaaaaaccgctatgttggccgcacctttatcatgccgggccagcagctgcgtcgtaagtccgtgcgccgtaaactgaatgccaaccgcgccgagttccgcgataaaaacgtcctgctggtcgacgactccatcgtccgtggcaccacttctgagcagattatcgagatggcacgcgaagccggagcgaagaaagtgtacctcgcttctgcggcaccggaaattcgcttcccgaacgtttatggtattgatatgccgagcgccacggaactgatcgctcacggtcgcgaagttgatgaaattcgccagatcatcggtgctgacgggttgattttccaggatctgaacgatctgatcgacgccgttcgcgctgaaaatccggatatccagcagtttgaatgctcggtgttcaacggcgtctacgtcaccaaagatgttgatcagggctacctcgatttcctcgatacgttacgtaatgatgacgccaaagcagtgcaacgtcagaacgaagtggaaaatctcgaaatgcataacgaaggatga

SEQ ID NO: 470528 - DNA, 489 bp, Shigella flexneri
atggtctggattgattacgccataatcgcggtgattgctttttcctctctggttagcctgatccacggctttgttcgtgaagcgttatcgctggtgacatggggttgtgctttctttgttgccagtcattactacacttacctgtcagtctggtttacgggctttgaagacgaactggttcgaaatgggattgccatcgcggtactgtttatcgctaccctgatcgttggtgctatcgtgaacttcgtgataggccagttggtggagaaaacggggttgtcaggcaccgatcgggtgctgggcgtctgtttcggtgcgttgcgcggtgtgttgattgttgccgccattctcttctttctcgactcctttaccggggtgtcgaaaagtgaagactggagcaaatcacagctgatcccgcaattcagttttatcatcagatggttttttgattatctgcaaagctcgtcaagtttcttgcctagagcgtaa

SEQ ID NO: 470529 - DNA, 663 bp, Shigella flexneri
gtggcaagtaagtttcagaatcggttagtgggcacgatcgtgctggtggcgctgggggtgattgtacttccagggctgctggacgggcagaaaaaacattatcaggatgagttcgcggctatcccgctggtgccgaaagcgggcgatcgtgatgagcctgatatgatgccagccgccacccaggcgttgccgacgcagccgccggaaggcgcagcggaagaggtgcgggcaggtgatgccgcagcaccgtcgctcgatccggccactattgcagccaataacaccgagtttgaaccggaacctgcaccggtcgccccaccgaagccgaaaccggtggagccgcctaaaccaaaggttgaagcaccacctgcgccgaagccagaaccgaagccggtcgtggaagaaaaagcagcgccaacgggtaaagcctatgttgtgcaactgggtgcgctgaaaaatgccgataaagtgaatgagattgtcggtaagctgcgcggtgccggttatcgggtttatacgtcgccatccacgccagtgcagggtaaaattacccgtattctggttgggccggatgcctcgaaagataagctgaaaggttcgctgggtgagttgaagcaactttctggcttaagtggcgtggtaatgggctatacgccgaattaa

SEQ ID NO: 470530 - DNA, 1269 bp, Shigella flexneri
atgattatcaaacgcactcctcaagccgcgtcgcctctggcttcgtggctttcttatctggaaaacctgcacagtaaaactatcgatctcggccttgagcgcgtgagccaggtcgcggcgcgtcttggcgtcctgaaaccagcgccatttgtgtttaccgttgcgggtacgaatggcaaaggcaccacctgccgtacgctggagtcgattctgatggcggcagggtacaaagtgggcgtctacagttcgcctcatctggtgcgttataccgagcgcgtacgtgtgcagggccaggaattgccggaatcggcccacaccgcctcttttgcggagattgaatcggcacgcggtgatatttccctgacctatttcgagtacggtacgctgtcggcgttgtggctgttcaagcaggcacaacttgacgtggtgattctggaagtagggctgggcggtcgtctggacgcaaccaatattgtcgatgccgatgtcgcggtagtaaccagtattgcgctggatcataccgactggctgggtccagatcgcgaaagtattggtcgcgagaaagcaggcatcttccgcagcgaaaaaccggcaattgtcggtgagccggaaatgccttctaccattgctgatgtggcgcaggaaaaaggtgcactgttacaacgtcggggcgttgagtggaactattccgtcaccgatcatgactgggcgtttagcgatgctcacggcacgctggaaaatctgccgttgccgcttgtcccgcaaccgaatgccgcaacggcgctggcggcactgcgtgccagcgggctggaagtcagtgaaaatgccattcgcgacgggattgccagcgcaattttgccgggacgtttccagattgtgagcgagtcgccacgcgttatttttgatgtcgcgcataatccacatgcggcggaatatctcaccgggcgtatgaaagcgctaccgaaaaacgggcgcgtgctggcggttatcggtatgctacatgataaagatattgccggaactctggcctggttgaaaagcgtggttgatgactggtattgtgcgccactggaagggccgcgcggtgccacggcagaacaactgcttgagcatttgggtaacggcaaatcatttgatagcgttgcgcaggcatgggatgccgcaatggcggacgctaaagcggaagacaccgtgctggtgtgtggttctttccacacggtcgcacatgtcatggaagtgattgacgcgaggagaagcggtggcaagtaa

SEQ ID NO: 470531 - DNA, 915 bp, Shigella flexneri
atgagctggattgaacgaattaaaagcaacattactcccacccgcaaggcgagcattcctgaaggggtgtggactaagtgtgatagctgcggtcaggttttataccgcgctgagctggaacgtaatcttgaggtctgtccgaagtgtgaccatcacatgcgtatgacagcgcgtaatcgcctgcatagcctgttagatgaaggaagccttgtggagctgggtagcgagcttgagccgaaagatgagctgaagtttcgtgactccaagaagtataaagaccgtctggcatctgcgcagaaagaaaccggcgaaaaagatgcgctggtggtgatgaaaggcactctgtatggaatgccggttgtcgctgcggcattcgagttcgcctttatgggcggttcaatggggtctgttgtgggtgcacgtttcgtgcgtgccgttgagcaggcgcaggaagataactgcccgctgatctgcttctccgcctctggtggcgcacgtatgcaggaagcactgatgtcgctgatgcagatggcgaaaacctctgcggcactggcaaaaatgcaggagcgcggcttgccgtacatctccgtgctgaccgacccgacgatgggcggtgtttctgcaagtttcgccatgctgggcgatctcaacatcgctgaacctaaagcgttaatcggctttgccggtccgcgtgttatcgaacagaccgttcgcgaaaaactgccgcctagattccagcgcagtgaattcctgatcgagaaaggcgcgatcgacatgatcgtccgtcgtccggaaatgcgcctgaaactggcgagcattctggcgaagttgatgaatctgccagcgccgaatcctgaagcgccgcgtgaaggcgtagtggtacccccggtaccggatcaggaacctgaggcctga

SEQ ID NO: 470532 - DNA, 660 bp, Shigella flexneri
atggacctgatttatttcctcatcgattttatcctgcacattgacgtgcatctggcagagctagtcgcggagtacggcgtctgggtttatgccattttgttcttaattttgttctgtgaaaccggtctggtggtaatgccgtttttaccgggtgattcattgctgtttgttgccggagcgttggcatcactggaaaccaacgatctcaacgtccatatgatggtagtgctgatgctgatcgccgcgattgtgggtgacgcggtcaattacactatcgggcggttgttcggtgaaaagttattcagtaatcccaattcgaaaattttccgtcgcagttatctcgacaaaacccatcagttttatgagaaacatggcggcaaaacgattattctcgcccgttttgtgccgatcgtcagaacgttcgccccgtttgttgcgggaatgggccacatgtcgtaccgtcatttcgctgcttataacgtgatcggcgcactgttgtgggtactgctttttacctacgcaggctatttcttcggtacaatcccgatggttcaggataaccttaagctgctgatcgtcgggattattgtggtttctattttgccgggcgtcatcgaaataatccgtcacaaacgcgctgcggcacgcgccgcaaaataa

SEQ ID NO: 470533 - DNA, 813 bp, Shigella flexneri
atgtccgaccagcaacaactgccagtttataaaattgcgctgggcattgagtacgacggcagtaagtattacggctggcaacggcagaatgaagtccgcagtgtgcaggagaagctggaaaaggcgctctcccaggtggcgaacgaacccatcaccgtcttctgcgccgggcgtactgacgcaggggtacacggtaccgggcaagtggtgcatttcgaaacaaccgcgcagcgcaaagacgcggcgtggaccttgggcgtaaatgcgaatttacctggtgacatcgccgtgcgttgggttaaagctgtacctgatgattttcatgcccgatttagcgccacggctcgccgttatcgctacatcatctacaatcatcggctgcgcccggcggtactgagtaaaggggtaacccatttttacgaaccgctggacgctgaacggatgcatcgggctgcgcaatgcttgctgggcgagaatgatttcacctcgttccgtgcggtgcagtgccagtcccgaaccccgtggcgcaacgttatgcatattaatgtcacgcgtcacggtccttatgtggtggttgatatcaaagcgaatgcctttgtacatcatatggtcaggaatattgtcggcagcctgatggaagtcggtgcccacaaccagccggagagctggatagcagagttgctggcggcaaaggacagaacgctggcggcagcaacggcaaaagcggaagggctgtatctggtcgcggtggattaccctgaccggtatgatcttccaaaaccgccaatgggcccgctatttctggcggactaa

SEQ ID NO: 470534 - DNA, 1014 bp, Shigella flexneri
atgtctgaaggctggaacattgccgtcctgggcgcaactggcgctatgggcgaagccctgcttgaaacgctggctgaacgtcagttcccggttggggaaatttatgcactggcacgtaacgaaagcgcaggcgaacaactgcgctttggtggtaaaacaatcaccgtgcaggatgccgctgaattcgactggacgcaggcgcagctggcattttttgtcgcaggcaaagaagctaccgctgcctgggttgaagaagcgaccaactcaggttgcctggtgatcgacagcagcggactgtttgctctcgaacccgacgtaccgctggtggtgccggaagtaaacccgtttgtactgaccgattaccgcaaccggaatgtcatcgccgtaccagacagtctgaccagccagctgctggcggcactgaaaccgttaatcgatcagggcggtttgtcgcgtatcagtgttaccagcctgatttcagcctccgcccagggcaaaaaagcggtcgatgcgttagcggggcagagtgcgaaattgctcaacggcattccgattgacgaagaagatttcttcggtcgtcaactggcgtttaatatgctgccgttgttgccggatagcgaaggtagcgtgcgtgaagaacgtcgtatcgttgacgaagtacgcaaaatcctgcaggacgaagggctgatgatttcggcaagcgtcgtccaggcaccggtattctacggtcatgcccagatggtcaactttgaagcactgcgtccgctggcggcagaagaagcgcgtgatgcgtttgctcagggcgaagatattgtgctctctgaagagaacgaattcccgactcaggtaggggatgcttcgggtacgccgcatctttctgttggctgcgtgcgtaatgactacggtatgccggagcaagtccagttctggtcggtggccgataacgttcgctttggcggcgcgctgatggcagtaaaaatcgccgagaaactggtgcaggagtatctgtactaa

SEQ ID NO: 470535 - DNA, 1137 bp, Shigella flexneri
gtgaaaatccttgttgatgaaaatatgccttatgcccgcgacttatttagccgtttgggtgaggtgatcgcggttcccgggcgtccaatccccgtcgctcaactggcagacgcggatgcgctgatggtgcgttcggtcacgaaagtgaatgaatctttgctggcaggaaaacccattaaatttgttggaactgccactgcggggaccgaccatgtcgatgaagcatggttgaagcaggcgggaattggtttttccgctgcacctggctgtaatgcgattgcggtggtggaatatgttttctcctccctgctgatgcttgccgaacgcgatggattttcactgcacgaccgtacggtggggatcgtgggcgttggtaacgttggacgtcgattgcaggcgcgactggaagcgttagggattaaaaccttactttgcgatccgcctcgcgccgaccgtggggatgagggtgatttccgctcgctggatgagttagtccagcgcgcggatattctgactttccatacgccactctttaaagatggtccgtacaaaacgctacatctggcggatgaaaaactgatccgtagcctgaagcccggagcgattctgattaacgcctgccgtggcgcagtcgtcgataataccgcgctgctgacctgcctgaatgaaggccagaagttaagcgtggtgctggatgtctgggaaggcgagccggaacttaatgtggaattgctgacaaaagtggatatcggcacgccgcatatcgcaggctataccctggagggtaaagcgcgtggcacgacgcaagtgtttgaagcctatagcaagtttattgggcatgaacaacacgttgcgctggatacgttgctgcccgcgcctgagtttggccgcattacgctgcatggtccgctcgatcaaccgacgctgaaaaggctggtgcatttggtgtatgatgtgcgccgcgatgacgcaccgctgcgtaaagtcgccgggataccgggtgagttcgataaactgcgcaaaaactatcttgagcgccgtgaatggtcatctctgtatgtaatttgtgatgacgccagtgcggcatcattgctgtgtaaactgggttttaacgccgttcatcatccggcacgttaa

SEQ ID NO: 470536 - DNA, 996 bp, Shigella flexneri
atgatacaacctatttccggccctcctcctgggcagccaccaggtcagggagataacctgccgtctggcgcgggcaatcagcctttatccagtcagcaacgtacttcgctggaaagcttaatgacgaaagtgacctcactgacgcaacaacaaagagcagaactgtgggcgggtatcaggcacgatattggtctgtcgggagattcaccgctgctttcgcgtcacttccctgccgctgagcataatctggcgcaacgtctgctggccgcgcaaaaaagccattctgcccgccagcttttagcgcaattaggggagtatttacgtctggggaatcatcgtcaggcggtcacggattatatccgtcataactttggtcagacgccgctgaatcagctctcaccggagcaattaaaaaccattctcaccctgttgcaggaagggaagatggttattccgcaaccacagcagcgcgaggcgaccgaccgtcctttattaccggcggagcacaatgcgctaaaacagctggtgaccaaacttgcggcggcaacgggggaacccagcaaacagatctggcaatcgatgctggaactttccggggtgaaagatggcgagttaattccagcgaaactgtttaaccatctggtgacctggctacaggcgcgtcagacgctaagccagcaaaatacgccgacgctggaatcactacagatggcgctaaaacaacctttagatgccagtgaactggcggcgttatcggcatatatccagcaaaaatatggcctttctgcgcaatcatcgctttcttctgcccaggccgaggatattcttaatcagctttatcaacggcgggttaaagggattgatccgcgtgatatgcaaccgctgcttaatccttttccaccgatgatggacacgttgcaaaatatggcaacgcgtcccgcgctgtggatactgttagtcgcgattatcctgatgctggtctggctggttcgttaa

SEQ ID NO: 470537 - DNA, 1179 bp, Shigella flexneri
atgactgctgtaagccaaaccgaaacacgatcttctgccagtttttcgctcttccgcatctcttttgcggtttttctcacctacatgaccgtagggttgccgttgccggttatcccgctgtttgttcatcatgatctgggctatggcaataccatggtcggcattgccgtcgggattcagtttctggctacggtgctgacgcgtggttacgccgggcgactggccgatcaatatggcgcaaaacgttcggcgcttcaggggatgttagcttgtggtctggctggcggcgcgttgctgctggcggcgattttgcctgtctccgcaccgttcaaatttgccctgttggttatcgggcgtttgattcttgggtttggtgaaagccagttactgacaggcgctctgacctgggggttaggcatcgtagggccaaaacactctggcaaagtgatgtcatggaacggaatggcgatttacggtgccctcgctgttggtgcgccgcttggcctgttgattcatagccattacggttttgccgcactggcgatcaccacaatggtattacccttactggcgtgggcctgtaacggcacagtgcgcaaagtaccggccctggcgggagaacgtccatcgctgtggagcgttgtcgggcttatctggaaaccagggttagggctggcactacaaggcgttggttttgcggttatcgggactttcgtttcgctctactttgccagcaaaggatgggcgatggcgggctttactcttaccgcgtttggcggcgcatttgtcgtgatgcgcgtcatgtttggctggatgccggaccgttttggcggcgtgaaagtggcgattgtctctctgcttgtagaaacggtgggcttgttgctgctctggcaagccccaggtgcatgggtcgcattagcgggcgcggcgttaaccggagccggatgttcgcttatctttcctgcgctgggcgtggaggtggttaaacgcgtcccctcacaagttcgcggcaccgcactgggcggttacgccgcgtttcaggatatcgccctcggcgtctccgggccgctggcgggaatgctggcgaccacgtttggttactcttcggtatttcttgccggggcgatctctgcggtgctgggtattattgtcacgatactgtcatttcgtcggggttaa

SEQ ID NO: 470538 - DNA, 1242 bp, Shigella flexneri
atgaaacgtgcagtgattactggcctgggcattgtttccagcatcggtaataaccagcaggaagtcctggcatctctgcgtgaaggacgttcagggatcactttctctcaggagctgaaggattccggcatgcgtagccacgtctggggcaacataaaactggataccactggcctcattgaccgcaaagttgtgcgctttatgagcgacgcatccatttatgcattcctttctatggagcaggcaatcgctgatgcgggcctctctccggaagcttaccagaataacccgcgcgttggcctgattgcaggttccggcggcggttccccgcgtttccaggtgttcggcgctgacgcaatgcgcggcccgcgcggcctgaaagcggttggcccgtatgtggtcactaaagcgatggcatccggcgtttctgcctgtctcgccacgccgtttaaaattcatggcgttaactactccatcagctccgcgtgtgcgacttccgcacactgtatcggtaacgcagtagagcagatccaactgggcaaacaggacatcgtgtttgctggcggcggcgaagagctgtgctgggaaatggcctgcgaattcgacgcgatgggtgcgctatctactaaatacaacgacaccccggaaaaagcctcccgtacttacgacgctcaccgtgacggtttcgttatcgctggcggcggcggtatggtagtggttgaagagctggaacacgcgctggcgcgtggtgcttacatctatgctgaaatcgttggctacggcgcaacctctgatggtgcagacatggttgctccgtctggcgaaggcgcagtacgttgtatgcagatggcgatgcatggcgttgataccccaatcgattacctgaactcccacggtacttcgactccggttggcgacgtgaaagagctggcagctatccgtgaagtgttcggcgataagagcccggcgatttctgcaaccaaagccatgaccggtcactcactgggcgctgcgggtgtgcaggaagctatctactctctgctgatgctggaacacggctttatcgccccgagcatcaacattgaagagctggacgagcaggctgcgggtctgaacatcgtgaccgaaacgaccgatcgcgaactgaccactgttatgtctaacagcttcggcttcggcggcaccaacgccacgctggtaatgcgcaagctgaaaagattaattcgcagtaggccggagtag

SEQ ID NO: 470539 - DNA, 2007 bp, Shigella flexneri
gtgaaacactactccatacaacctgccaacctcgaatttaatgctgagggtacacctgtttcccgagattttgacgatgtctatttttccaacgataacgggctggaagagacgcgttatgtttttctgggaggtaaccaattagaggtacgctttcctgagcatccacatcctctgtttgtgatagcagagagcggcttcggcaccggattaaacttcctgacgctatggaaggcatttgatcagtttcgcgaagcgcatccgcaagcgcaattacaacgcttacatttcattagttttgagaaatttcccctcacccgtgcggatttagccttagcgcatcaacactggccggaactggctccgtgggcagaacaacttcaggcgcagtggccaatgcccttgcccggttgccatcgtttattgctcgatgaaggccgcgtgacgctggatttatggtttggcgatattaacgaactgaccagccaactggacgattcgctaaatcaaaaagtagatgcctggtttctggacggctttgcgccagctaaaaacccggatatgtggacgcaaaatctgtttaacgccatggcaaggttggcgcgtccaggcggcacgctggcgacatttacgtctgccggttttgtccgccgcggtttgcaggaagccggattcacgatgcaaaaacgtaagggctttgggcgcaaacgggaaatgctttgtggggtgatggaacagacattaccactcccctgctccacgccgtggtttaatcgtacgggcagcagcaaacgggaagtagcgattatcggcggtggtattgccagcgcgttgttgtcgctggcgttattacggcgcggctggcaggtagcgctttattgcgcggatgaagcccccgcgctgggtgcttccggcaatcgccagggggcgctgtatccgttattaagcaaacacgatgaggcgctaaaccgctttttctctaatgcgtttacttttgctcgtcggttttacgaccaattacccgttaaatttgatcatgactggtgcggcgtcacgcagttaggctgggatgagaaaagccagcataaaatcgcacagatgttgtcaatggatttacccgcagaactggctgtagccgttgaggcaaatgcggttgaacaaattacgggcgttgcgacaaattgcagcggcattacttatccgcaaggtggttggctgtgcccagcagaactgacccgtaatgtgctggaactggcgcaacagcagggtttgcagatttattatcaatatcagttacagaatttatcccgtaaggatgactgttggttgttgaattttgcaggagatcagcaagcaacacacagcgtagtggtactggcgaacgggcatcaaatcagccgtttcagccaaacgtcgactctcccggtgtattcggttgccgggcaggtcagccatattccgacaacgccggaactggcagagctgaagcaggtgctgtgctatgacggttatctcacgccacaaaatccggcgaatcaacatcattgtattggtgccagttatcatcgcggcagcgaagatacggcgtacagtgaggacgatcagcagcagaatcgccagcggttgattgattgtttcccgcaggcacagtgggcaaaagaggttgatgtcagtgataaagaggcgcgctgcggtgtgcgttgtgccacccgcgatcatctgccaatggtaggcaatgttcccgattatgaggcaacactcgtggaatatgcgtcgttggcggagcaaaaagatgaggcggtaagcgcgccggtttttgacgatctctttatgtttgcggctttaggttctcgcggtttgtgttctgccccgctgtgtgccgagattctggcggcgcagatgagcgacgaaccgattccgatggatgccagtacgctggcggcgttaaacccgaatcggttatgggtgcggaaattgttgaagggtaaagcggttaaggcggggtaa

SEQ ID NO: 470540 - DNA, 279 bp, Shigella flexneri
atgatcgcggagtttgaatcacgcattctggcattaatcgacggcatggttgaccatgccagtgatgatgagttgtttgccagtgggtatttgcgtggccacctgacattagccatcgcagaactggaaagtggtgatgaccactccgctcaggcggtgcatacgaccgttagccagagtctggaaaaagccattggtgccggtgaattgtcgccgcgtgaccaggcgctggtgaccgatatgtgggaaaacctgtttcagcaggcgtcacagctgtaa

SEQ ID NO: 470541 - DNA, 549 bp, Shigella flexneri
atgaacagtacacaccactacgagcagttgattgaaatttttaatagctgctttgccgatgaatttaatacccgtctgattaaaggcgacgacgaaccgatctatcttcctgctgatgcggaagtaccgtataaccgaatcgtctttgctcatggcttttatgccagcgcaattcatgagatttcgcactggtgtattgccggaaaagcgcgccgtgagctggttgatttcggctactggtattgcccggacggacgcgatgcccagacgcaaagccagtttgaagatgttgaagtgaagccgcaggcgttcgactggttattctgcgtggcggctggatatccgtttaacgtcagttgcgacaatctggaaggggatttcgaaccggatcgtgtggtgtttcaacggcgggtacatgcgcaggtgatggattatctgacaaatggcattccggaacgcccggcacgcttcattaaagcactacaaaattattatcacacgccggaacttacggcggaacagttcccgtggccggaagcgctcaactga

SEQ ID NO: 470542 - DNA, 810 bp, Shigella flexneri
atggaaacgtttaatagcctgtttatggtttctccgctgttgctgggagttctcttttttgtcgccatgctggcgggatttatcgactcgattgccggtggcggtgggttactcaccattccggcattgatggctgcgggaatgtctcccgctaacgcgctggcaaccaataaactgcaagcctgcggcggctctatttccgccactatctactttattcgccgcaaagtggttagtttaagcgatcagaaactcaatattgccatgacctttgtcggctcaatgagcggcgcactgttggtacagtacgttcaggctgatgtcttacggcagattttgcccattctggtgatttgtatcggcctctatttcttgctgatgccaaagctgggtgaagaagatcgccagcgccggatgtacggtttacccttcgcgttaattgccggtggctgcgtcggtttttatgacggattctttggcccggctgccggatcgttttacgcgctggccttcgttatgctgtgcggattcaacctcgccaaagccacggctcacgccaaattactcaacgcaacgtcaaacattggcggtctgctgctgtttattctcggcggcaaagtgatttgggcgacgggctttgtcatgctggtggggcagttcctcggcgcgcgcatgggttcacggttggtgttgagcaaaggacaaaagctgatccgcccgatgattgttatcgtctcggcggtgatgagtgccaaattactttacgatagccacggacaggagatcctccactggttggggatgaactaa

SEQ ID NO: 470543 - DNA, 825 bp, Shigella flexneri
atgaacaaaaccgcgattgcgctgctggctctgcttgccagtagcgctagcctggcagcgacgccgtggcaaaaaataacccaacctgtgccgggtagcgcacaatcgataggcagtttttctaatggctgtattgtcggcgctgacacgttgccgatacagtccgaacattatcaggtcatgcgtaccgatcagcgtcgctatttcggtcacccggatctggtgatgtttatccagcgtctgagtagccaggtgagcaatctgggcatgggtacggtgctgattggcgatatggggatgcccgctggtgggcgtttcaacggcggtcatgccagccaccagaccggactggatgtcgatatctttctgcaactgccgaaaactcgctggacctccgcgcagctcttgcgcccgcaagcactggacttagtttcccgcgacggtaaacacgttgtctccacgctgtggaagccagaaattttcagcttgatcaaactcgccgcccaggacaaagacgtcacgcgcatttttgttaatccggcgattaaacaacaactttgccttgatgcgggcaccgatcgcgactggttgcgcaaagtgcgaccctggttccagcatcgcgcgcatatgcatgtacgattacgttgccctgccgatagtctggagtgtgaagatcaacctttaccgccatcaggcgatggttgcggggcagaactgcaaagctggtttgaacctccaaaaccgggaacaacaaagcctgagaagaagacaccgcctccgttgccgccttcctgccaggcgctactggatgagcacgtgatctaa

SEQ ID NO: 470544 - DNA, 1086 bp, Shigella flexneri
atggctggaaacacaattggacaactctttcgcgtaaccaccttcggcgaatcgcacgggctggcgctcggctgcatcgtcgatggtgttccgccaggcattccgctgacggaagcggacctgcaacatgaccttgatcgtcgtcgccctgggacatcgcgctataccacccagcgccgcgagccggatcaggtcaaaatactctccggtgtttttgaaggcgttactactggcaccagcattggcttgttgatcgaaaataccgaccagcgttctcaggattacagcgcaattaaagacgtcttccgtccaggccatgctgattacacctacgaacaaaaatacggtctgcgcgattatcgcggcggtggacgttcttccgcccgcgaaaccgccatgcgcgtggcggcaggggcgattgccaaaaaatatctcgccgagaaatttggtattgaaatccgcggctgcctgacccagatgggcgacattccgctggaaatcaaagactggtcgctggttgaacaaaatccgttcttctgcccggaccccgacaaaatcgacgtgttagatgaactgatgcgcgcgctgaaaaaagagggcgactccatcggcgcgaaagtcaccgttgttgccagtggtgtccccgccggacttggcgagccggtctttgaccgcctggatgccgacatcgcccatgcgctgatgagcatcaacgcggtgaaaggcgtggaaattggcgacggttttgacgtagtggcgctgcgcggcagccagaaccgcgacgaaatcaccaaagacggtttccagagcaaccatgcgggcggcattttcggcggtatcagcagcgggcagcaaatcattgctcatatggcgctgaaaccgacctccagcattaccgtgccggggcgcactattaaccgctttggcgaagaagttgagatgatcaccaaaggccgtcacgatccctgtgtcgggatccgtgcagtgccgatcgctgaagcgatgctggcgatcgttttaatggatcacctgttacggcagcgggcgcaaaatgccgatgtgaagactgatattccacgctggtaa

SEQ ID NO: 470545 - DNA, 933 bp, Shigella flexneri
gtggataaaattttcgttgatgaagcagtaaatgagctgcaaaccattcaggacatgttgcgctggtcggtaagccgcttcagcgcggcaaatatctggtacggtcacggcaccgataacccgtgggatgaagccgtacagctggtgttaccatcgctctacctgccgctggatatcccggaagatatgcgcaccgcgcgtctgacctccagcgaaaaacaccgtattgttgaacgcgtgatccgccgcgtcaacgagcgcattccggtggcttacctgaccaacaaagcctggttctgcggtcatgaattttacgtcgatgaacgcgtgctggtgccgcgctcgccgattggtgaactgatcaacaataaatttgccggactcatcagcaagcaaccgcagcatattttagatatgtgtaccggtagcggctgcatcgccattgcctgtgcttatgccttcccggaagcggaagtcgacgcggtagatatctctcccgacgcgctggcggttgccgaacagaacatcgaagaacacggtctgatccacaacgtcattccgattcgttccgatctgttccgtgatttgccgaaagtgcaatacgatctgattgtcactaacccgccgtatgtcgacgcggaagatatgtccgacctgccaaacgaataccgtcacgagccggaactgggcctggcatctggcaccgacggcctgaaactgacgcgtcgcattctcggtaacgcggcagattaccttgctgatgatggcgtgttgatttgtgaagtgggcaacagcatggtacatcttatggaacaatatcccgatgttccgttcacctggctggagtttgataacggcggcgatggtgtgtttatgctcactaaagagcagcttattgccgcacgagaacatttcgcgatttataaagattaa

SEQ ID NO: 470546 - DNA, 552 bp, Shigella flexneri
atgaaaaagaaaacaacacttagcgaggaggaccaggctctgtttcgccagttgatggcggggactcgcaagattaagcaggacacgattgtccaccgaccgcagcgtaaaaaaatcagcgaagtgccggtgaaacgcttgatccaggagcaggctgatgccagccattatttctccgatgagtttcagccgttattaaataccgaaggtccggtgaaatatgttcgcccggatgtcagccattttgaggcgaagaaactgcgccgcggcgattattcaccggaattgtttttggatttacacggtctgacgcagctgcaggccaagcaggaactgggcgcgttgattgccgcctgtcgccgcgaacatgtgttttgtgcctgcgtgatgtatgggcacgggaagcatattttgaagcaacaaacaccgctgtggctggcacaacatccgcatgtgatggcatttcaccaggcaccgaaagagtacggcggtgatgcggctttgttggtgttgattgaagtggaagagtggttgccgccggagttgccctga

SEQ ID NO: 470547 - DNA, 786 bp, Shigella flexneri
atgagtgcgagttttgacagtgtgagagtttattatgccatggacaaggtaaccggtgctgtagcgagcagtgttttcaatgttacggtgataacgccaaaggaggttgcatatgggaaatatgattcttttgcgtataaaggcgatacgttgcgggttatttcctggtctgggtcgggttcagctccaactttggtactgactgactttgatacaattaataactcaaattgccctggcatagatacgaaaatttttcgttgtgcatatatgacgtttaaaattaccgttgcatctgatgattatggttgcccttggatcgcatccttttattcctatacagatttacccggatttggaagctatacggcccctacagtgcataacacaatatgcccaacgataccggtcgcttcatacgatatctcctggagtgaaaattatgtcagccataataaggcgttacgaattcagtccacggggtcaacagtgaccaccacgctttcgacctacctgatggaaggcggcagactctgtgatggcagtaatttttctgataatgatggcagaggagcatactgccgcgcggtatcagaattgttaacctttacctcttacggttgtgataaatcaacggtaacggttacgccaactcgtcatccggtaacggataaagtactacacgatattgtggtgaatgtgaataccagtagtgggcaaccgattgattcgacgtgtcgttttcagtatgtattgaatgaactgaagttcgtagtattgctctga

SEQ ID NO: 470548 - DNA, 525 bp, Shigella flexneri
atgaagaaaaagcgtacgttgttttttattagtagcctgatgttgctgggcagtggaaccacaatagcaggagataatttgcactttaccggcaatttaatcagtaaatcgtgtacgccagtgattaatggtagccagttggcagaagtacattttcctgccattgccgccagtgatttaatgaaccttgggcagtcagagcgagtgccattggtgtttcaattgaaagattgtcatagttctacattgtttaatgtcaaagtaacgttgacaggaacagaagatagtgctctacccggctttctggcctttgactcctcgtcatcagcatccggcgctgggattggtattgaaactgcggcaggcacatcggtgccaatcaacaatacaacaggcgtcacgctcccgctgaatcagggaaataacagcctaaattttaatacctggttacaggcaaagagcgggcgagatgtaacgtccggagactttagtgccacagtgacggcaacctttgagtatttctga

SEQ ID NO: 470549 - DNA, 471 bp, Shigella flexneri
atgaaacggatctcgcttattttgctgtggggcttttgctcgatggcactctcaaacgtctcttttcacggttatttagtgcagccgcctaactgcacgattagcaacgctcaaaccattgaaataacttttcaggatgtgcttattgatgacattaatggcagcaattatgagcaaaccgtgccgtattccattacctgcgatacggcggttcgcgacccattaatggaaatgaccttgagctggagtggcacaccaagcgattttgataatgctgcagtaagcagcaatatcactggtttaggcattcagctcaaacaggcagggcagagttttacgatcaatacgccacttgtggtgaatgaaaccgatttaccggtgttaacggctgtgccagtaaaaaagagtggtgtcattctgccagaggcggactttgaggcctgggccacgttacaggtagattaccaatga

SEQ ID NO: 470550 - DNA, 507 bp, Shigella flexneri
atgaaaggatcttgttctgtctgggcggtaactgggttactgatatgttgtgttggtagcggctttgcagttgcagcgagtaagtcagtaagtatgaatttacgggtgcttgtcgatgcccctcctccttgtacggtaaatggtgcggcagttgagtttggtaatgtattcattaataagatcaatagggttgattataaacgtcccattgactactcgcttgtttgtaacaatctggcaatggatgacctgcgtctacagatgcaggcgacaacggtcgtgattaacggtgaaacagttatcagcacgggtattcctgggtttggtattcgggttcagaaaagtagtgatcacacaatactcgacttaacctctggctcatggttgccatttaatttttcctcgggagttcccgttctggaagctgtgccggtgaaacagagtggtacaacgttagcggcagctgaatttaacgccagtgccacaattgtggtggattaccaatga

SEQ ID NO: 470551 - DNA, 468 bp, Shigella flexneri
atgtctgatttactttgctctgccaaattgggtgctacgacgctagcgttactgcttagcgctgccagtttgtctgcccaggcttctgtaacgccagatcgtacccgtttgatatttaatgaaagcgacaaatcaatcagcgtgacgttgcgcaataacgatccgaaactgccttatctggcccaaagctggatcgaagatgaaaagggtaacaagatcagttcaccgttaactgttctgccaccggtgcaacgcatcgattcaatgatgaacgggcaggtaaaagtgcagggaatgccggatatcaacaaattgcctgccgatcgtgaaagcctgttctacttcaacgtgcgtgagatcccgccaaaatcaaacaaagccaacacgctgcaaatagcactacaaacgcgtattaagttgttctggcgaccgaaggcgctggagaacgtcagcatgaaaaacccctag

SEQ ID NO: 470552 - DNA, 786 bp, Shigella flexneri
ttgaacgtcggcaccagtgacaaacacaccagcgttgacggctattacagccatgatggttcgctggcgcaggttgacctcagtgcgaactaccatgaagggcaatacacctctgcgggcttgtcgttacagggcggcgcaacgcttactgcccacggtggcgcacttcaccgtacccagaatatgggcgggacacgcttgttgattgatgccgatggcgttgccgatgttccggtagaaggtaacggtgctgctgtttataccaatatgtttggtaaagccgtcgtttctgacgtcaataactattaccgcaatcaggcgtatatcgacctcaacaaactgccggaaaacgccgaagcaacccagtcggtggtacaagccacgctaactgaaggggcgattggctaccgcaaatttgccgtcatcagtggtcaaaaagcgatggcggtgctgcgtttacaagacggcagccatcctccgtttggcgcagaagtaaaaaatgataacgagcagacagtgggccttgtcgatgatgacggcaatgtttatctggctggggtgaaacctggcgaacacatgagtgtgttctggagtggtgttgcgcattgcgatatcaacctgccggacccgctgcctgccgatctgtttaacggcttgttactgccatgccagcataaaggcaacgtcgcgccggttgttcctgatgacataaagcctgtcattcaggagcagacgcaacaggtgacacccaccaatccccctgtttctgtttcagctaaccaataa

SEQ ID NO: 470553 - DNA, 1860 bp, Shigella flexneri
atgcctgaccattctctttttcgattacggattcttccgtggtgcattgcgctggcaatgtcagggagttatagcagtgtctgggctgaagacgacattcagtttgattcccgttttctggaattaaaaggcgacacaaaaattgatctgaagcgtttttccagccagggatatgttgagcccggaaaatacaatttacaggttcaactaaataaacagccattggcggaagagtacgatatttactggtatgctggtgaagatgacgcgagcaaaagctatgcttgtctgacaccggaactggtagcgcagtttggtttaaaagaagacgtggcgaaaaatctgcaatggagccacgatgctaaatgcctgaaatccggtcaactggaaggcatggaaattaaggctgatttaagccagtccgcattagtcatttcactgccacaggcttacctcgaatatacttatcccgactgggatccgccttcacgttgggatgacggcatctccgggatcgtcgcggactacagcatcaacgcacaaacccggcacgaagaaaatggcggtgatgatagtaacgagatcagcggcaacgggacggttggggttaacctagggccgtggcgtatgcgtgctgactggcagactaactatcaacatactcgcagtaatgatgacgatgaattcagcggcgatgaaactcaaaaaaaatgggagtggagtcgctactatgccaggcgggcgttaccatcattaaaagccaaactggcgctgggcgaggattacctcagatccgatatttttgatggttttaactatgttggtggcagtgtcagtactgacgatcaaatgttgcctcccaatctgcgcggctacgcgccagacatttccggcgtggcacacaccacagcaaaagtgaccgtcagccagatggggcgtgtgatttacgaaacgcaggttccggctggaccgtttcgtattcaggatcttggtgattctgtctccggtacgttgcatattcgcattgaagaacagaacggccaggtgcaggaatatgacatcagcaccgcctcgatgccatacctcactcgtccaggtcaggttcgctataagatcatgatgggccgtccgcaagagtggggacaccatgtcgagggtgaatttttttctggtgctgaagcttcctgggggatcgctaacggctggtcgttatatggcggcgcactgggagatgaaaactatcagtctgcggcgcttggtgtcggtcgcgatttgtctacattcggcgcggtcgcgtttgatgttactcactcgcacaccaaactggataaagacactgcttatggcaaaggttcgctggacggtaactccttccgtgtgagttattccaaagactttgaccagctcaacagccgcgttacttttgctggatatcgcttctcggaagagaactttatgaccatgagcgagtatctggatgccagtgacagcggaatggtacgcacgggcaacgacaaagagatgtacaccgccacttataaccagaacttccgcgatgcgggtgtttcggtttatctcaactatacccgccatacctactgggatcgcgaggagcagacaaactacaacatcatgctctcgcactatttcaatatgggcagtattcgtaatgtcagcatctcgatgactggctaccgttacgagtatgacaaccaggccgacaaaggcatgtacatttcgctcagtatgccgtggggcgacaacagtaccgttagctataacggtactatggcagtgggacggacagcagtcaggtcggttatttcagccgtgtcgatgacgcgactcactatcagttga

SEQ ID NO: 470554 - DNA, 564 bp, Shigella flexneri
atgagtaagtttgttaaaacagctattgctgcggcaatggtgatgggcgtgttcacctctacggcaacaatcgctgcgggtaacaacggtactgcacgtttttacggcaccattgaagactcagtgtgttctatcgttccagacgatcacaaactggaagttgatatgggtgatatcggtgccgaaaaactgaaaaataacggcaccaccacgccgaaaagtttccagattcgtctgcaagattgcgtatttgatactcaggaaacaatgaccactacctttactggtaccgtttcttctgcaaatagcggcaattattacaccattttcaataccgataccggtgcggcatttaacaatgttagcctggcgatcggtgactctctgggtacctcttacaaaagcggcatgggtattgaccagaaaatagtgaaagacacttctaccaacaaaggcaaagcgaagcagacactgaactttaacgcctggctggtcggcgcagctgatgcgccagatctgggtaattttgaagcaaataccaccttccagattacttacctgtaa

SEQ ID NO: 470555 - DNA, 576 bp, Shigella flexneri
gtggcgaagagcgtacccgcaatttttcttgaccgtgatggcaccattaatgtcgatcacggctatgtccatgagatcgacaactttgaatttatcgacggtgttattgacgccatgcgcgagctaaaaaaaatgggctttgcgctggtggtagtaaccaaccagtctggcattgctcgcggtaaatttaccgaagcacagtttgaaacgctgaccgagtggatggactggtcgctggcggaccgagatgtcgatctggatggtatctattattgcccgcatcatccgcaggggagtgttgaagagtttcgccaggtctgcgattgccgcaaaccacatccggggatgcttttgtcagcacgcgattatttgcatattgatatggccgcttcttatatggtgggcgataaattagaagatatgcaggcagcggttgcggcgaacgtgggaacaaaagtgctggtgcgtacgggtaaacctattacacctgaagcagaaaacgcggcagattgggtgttaaatagcctggcagacctgccgcaagcgataaaaaagcagcaaaaaccggcgcaatga

SEQ ID NO: 470556 - DNA, 1032 bp, Shigella flexneri
atgataaaactttcgaatatcaccaaagtgttccaccagggcacccgcaccatccaggcgttgaacaacgtcagcctgcatgtgccagctggacaaatttatggcgttatcggtgcctcaggcgcgggtaagagtacgcttatacgttgtgtaaacctgctggagcgcccaaccgagggtagcgtgctggtcgatggccaggaattgaccacgctgtcagaatccgagttgaccaaagctcgccgccagattggtatgattttccagcattttaacctgctctcttcgcgtactgtttttggcaacgtggctctgccgctggagctggacaacacaccgaaagacgagatcaaacgtcgcgtgacggaattgctgtcattggttggtcttggcgataagcatgatagctacccgtcgaatctttccggtgggcagaaacaacgtgtggcgattgcccgtgcattagccagcaatcccaaagtattgctgtgtgatgaagccaccagcgcgctggacccggcaacgacacgttctattctcgaactgctgaaagacattaaccgccgtctgggtttgacgattctgttgatcacccacgaaatggacgttgtgaagcgtatttgtgattgcgtggcggtcatcagcaatggcgaactgatcgagcaggacacggtaagtgaagtgttctcgcatccgaaaacgccgctggcgcagaagtttattcagtcgaccctgcatctggatatcccggaagattaccaggaacgtctgcaaacggagccatttactgactgcgtgccgatgctgcgtctggagtttaccggtcaatcggtcgatgccccactgctttctgaaaccgcgcgtcgtttcaacgtcaacaacaacattattagcgcgcagatggactacgccggtggcgttaaattcggcatcatgctgactgaaatgcacggcacacaacaagatacgcaagccgccattgcctggctgcaggaacaccatgtaaaagtagaggtactgggttatgtctga

SEQ ID NO: 470557 - DNA, 654 bp, Shigella flexneri
atgtctgagccgatgatgtggctgctggttcgtggcgtatgggaaacgctggcaatgaccttcgtatccggattttttgggtttgtgattggtctgccggttggcgttctgctttatgtcacgcgtccggggcaaattattgctaacgcgaagctgtatcgtaccgtttctgcgattgtgaacattttccgttccatcccgttcattatcttgctggtatggatgattccgtttacccgcgttattgtcggtacatcgattggtttgcaggcagcaattgttccgttaaccgttggtgcagcaccgtttattgcccgtatggtcgagaacgctctgctggagatcccaaccgggttaattgaagcttcccgcgcaatgggtgccacgccaatgcagatcgtctgtaaagtgctgttaccggaagcgttgccgggtctggtgaatgcggcaactatcaccctgattaccctggtcggttattccgcgatgggtggtgcagtcggtgccggtggtttaggtcagattggctatcagtatggctacatcggctacaacgcgacggtgatgaatacggtactggtattgctggtcattctggtttatttaattcagttcgcaggcgaccgcatcgtccgggctgtcactcgcaagtaa

SEQ ID NO: 470558 - DNA, 816 bp, Shigella flexneri
atggcgttcaaattcaaaacctttgcggcagtgggagccctgattggatcactggcactggtaggctgcggtcaggatgaaaaagatccaaaccacattaaagtcggcgtgattgttggtgccgaacagcaggtagcagaagtcgcgcagaaagttgcgaaagacaaatatggcctggacgttgagctggtaaccttcaacgactatgttctgccaaacgaagcattgagcaaaggcgatatcgacgccaacgccttccagcataaaccgtaccttgatcagcaactgaaagatcgtggctacaaactgatcgcagtaggcaacacttttgtttatccgattgctggttactccaagaaaatcaaatcactggatgaactgcaggatggttcgcaggttgccgtgccaaacgatccaactaatcttggtcgttcactgctgctgctgcaaaaagtgggcttgatcaaactgaaagatggcgttggcctgctgccgaccgttcttgatgttgttgagaaccaaaaaaatctgaaaattgttgaactggaagcaccgcaactgccgcgttctctggacgacgcgcaaatcgctctggcagttatcaataccacctatgccagccagattggcctgactccggcgaaagacggtatctttgtcgaagataaagactccccatacgtaaacctgatcgtaacgcgtgaagataacaaagacgccgagaacgtgaagaaattcgtccaggcttatcagtctgatgaagtttacgaagcagcaaacaaagtgtttaacggcggcgctgttaaaggctggtaa

SEQ ID NO: 470559 - DNA, 405 bp, Shigella flexneri
atgcgtgctttaccgatctgtttagtagcactcatgctaagcggctgttccatgttaagcagatcccctgtcgaacccgttcaaagcactgcaccccagccgaaagcggagcctgcaaaaccgaaagcgccgcgcgccacgccggtccgaatttataccaatgcagaagaattagtcggcaaaccgttccgcgatctcggtgaagtcagtggcgactcttgccaggcctctaatcaggactctccgccgagcattccaaccgcacgtaagcagatgcaaatcaatgcctctaaaatgaaagccaatgctgtattactgcatagctgcgaagtcaccagcggtacgccgggctgctatcgtcaggctgtatgtatcggctctgcgcttaacattacggcgaaatga

SEQ ID NO: 470560 - DNA, 708 bp, Shigella flexneri
atgagcagtttccagttcgagcaaataggcgttattcgctcgccctataaagaaaaattcgccgttccgcgccagccaggtctggtaaaaagcgccaacggcgaactgcatctcattgcttcctacaaccaggccgacgccgttcgcggcctggaagcattcagccatttatggatccttttcgtctttcatcaaacgatggaaggcggctggcgtccgactgtgcgtccaccgcgcctcggcggtaacgccagaatgggggttttcgcaacacgctctactttccgccctaacccaattggcatgtcgctggtagagctgaaagaggttgtttgccataaaggcagcgtgattctgaagctcggcagtctggatctggtcgatggtacgccggtagtggatatcaaaccgtatctcccctttgccgaatcgcttcccgatgccagtgccagctatgcgcaaagtgcgccagctgcagagatggcggtgagttttaccgcagaggtcgaaaagcagcttttgacgctggagaagcgttatccgcagttaacgctgtttatccgcgaagtactggcgcaggacccgcgcccggcctatcgtaaaggtgaggaaacgggcaaaacctatgccgtctggctacatgattttaacgttcgctggcgcgtcaccgacgcaggttttgaagtctttgcgctggaaccgcgttaa

SEQ ID NO: 470561 - DNA, 1719 bp, Shigella flexneri
atgcgtactagccaatacctgctctccactctcaaggagacacctgccgacgccgaggtgatcagccatcagctgatgctgcgcgccgggatgatccgcaagctggcctccgggttatatacctggctgccgaccggcgtgcgcgttctgaaaaaagtcgaaaacatcgtgcgtgaagagatgaacaacgccggtgcgatcgaggtgtcgatgccggtggttcagccagccgatttgtggcaagagagtggtcgttgggaacagtacggtccggaactgctgcgttttgttgaccgtggcgagcgtccgttcgtactcggcccaactcatgaagaagttatcactgacctgattcgtaacgagcttagctcttacaaacagctgccgctgaacttctatcagatccagaccaagttccgcgacgaagtgcgtccgcgtttcggcgtcatgcgttcccgcgaattcctgatgaaagatgcttactctttccatacttctcaggaatccctgcaggaaacctacgatgcaatgtatgcggcctacagcaaaatcttcagccgcatggggctggatttccgcgccgtacaggccgacaccggttctatcggcggcagcgcctctcacgaattccaggtgctggcgcagagcggtgaagacgatgtggtcttctccgacacctctgactatgcagcgaacattgaactggcagaagctatcgcgccgaaagaaccgcgcgctgctgctacccaggaaatgacgctggttgatacgccgaacgcgaaaaccatcgcggaactggttgaacagttcaatctgccgattgagaaaacggttaagactctgctggttaaagcggttgaaggcagtagcttcccgctggttgcgctgctggtgcgcggtgatcacgagctgaacgaagttaaagcagaaaaactgccgcaggttgcaagcccgctgactttcgcgaccgaagaagaaattcgtgctgtggttaaagccggtccgggttcactgggtccggtaaacatgccgattccggtggtgattgaccgtaccgttgcggcgatgagtgatttcgctgctggtgctaacatcgatggtaaacactacttcggtatcaactgggatcgcgatgtcgctaccccggaagttgcagatatccgtaacgtggtggctggcgatccaagcccggatggccagggtacgctgctgatcaaacgtggtatcgaagttggtcacatcttccagctgggtaccaagtactccgaagcactgaaagcctccgtacagggtgaagatggccgtaaccaaatcctgacgatgggttgctacggtatcggggtaacgcgtgtggtagctgcggcgattgagcagaactacgacgaacgcggcatcgtatggcctgacgctatcgcgccgttccaggtggcgattctgccgatgaacatgcacaaatccttccgcgtacaagagcttgctgagaaactgtacagcgaactgcgtgcacaaggtatcgaagtgctgctggatgaccgcaaagagcgtccgggcgtgatgtttgctgatatggaactgatcggtattccgcacactattgtgctgggcgaccgtaacctcgacaacgacgatatcgaatataaatatcgtcgcaacggcgagaaacagttaattaagactggtgacatcgtcgaatatctggtgaaacagattaaaggctga

SEQ ID NO: 470562 - DNA, 825 bp, Shigella flexneri
atggataaaccaaaggcgtactgccgcctgcttctccccagctttcttttactttcggcttgtaccgttgatatcagccagccagacccatcagccacagcagtagatgccgaggcaaaaacatgggctgtcaaattccagcatcaaagctctttcaccgaacaatcaataaaagaaataacggcacctgatctcaaacccggcgatttgctgttctcctcaagccttggggtaacctcatttggaatccgcgtcttcagcacttcctctgtgagtcacgttgcaatctttctgggtgataataacgttgcagaagcgacaggcgctggcgtccagattgtttcccttaaaaaagcgatgaagcatagtgataagcttttcgtcttacgagtcccggatcttaccccgcaacaagccacagatatcaccgcgtttgccaataaaatcaaagatagcggttataactatcgcggcattgtcgaatttattccctttatggtgactcgccagatgtgctcactgaatccgttctccgaggattttcgccaacagtgcgtcagcgacctggcgaaagcgcagttaagcagtgtgtgcgaaggagacaaaaagtcgtggttttgttcggaatttgtcactgatgcatttgccaaatccgggcatccacttacactggcgcaatcgggctggattagccctgccgatctgatgcatatgcgtattggtgatgtctctgcgtttaagccagaaacgcagttacagtatgttgggcacctgaagcctgggatttatatcaaggcgggtcgctttgttgggctgactcagtga

SEQ ID NO: 470563 - DNA, 711 bp, Shigella flexneri
atggtgaaaaaagcgatagtgacagcgatggctgtaatcagcctctttactctgatgggatgtaataatcgggccgaagtcgatacgctttctccggcgcaggctgccgaactgaaaccgatgccgcaaagttggcgcggcgtgctaccgtgtgccgattgcgaaggaatcgaaatctctctgttcctcgaaaaagacggaacatgggtgatgaatgagcgttatctcggtgctcgtgaagaaccttcctccttcgcttcctacggtacatgggcgcgaaccgctgacaagctggtattaaccgacagcaaaggtgaaaagtcatattatcgggcgaaaggcgatgcgctggagatgctcgatcgtgaaggcaatccaattgaatcgcagttcaactatacgctggaaccggcacaatccagtttacctatgacgccgatgaccctgcgaggcatgtatttttatatggctgatgcggcgaccttcactgattgcgcgaccggaaaacgtttcatggtagcgaataacgcagagctggagcgtagctacctggctgcgcgcggtcacagtgaaaaaccggtgttactgtcagtagaaggtcactttacgcttgaggctaatccggatactggtgcgccaaccaaagtattagcgcccgatacggcggggaaattttacccgaataaggattgcagtagtttggggcagtaa

SEQ ID NO: 470564 - DNA, 423 bp, Shigella flexneri
atgattgtgatttcccgacatgttgctattcccgatggtgagcttgagatcaccgccattcgtgcgcagggcgctggcgggcagcatgttaataagacctcaacggctattcatctgcgttttgacattcgggcgtccagcctgccagagtattacaaagagcgtctgctcgccgccagccatcatttgatcagcagtgatggcgtgattgtcattaaggcacaggaataccgcagtcaggaactgaaccgcgaagccgctctggcccggctggtggcagtgattaaagatttaacaaaagaacaaaaagcccgacgacccacgcggcccacccgtgcatcgaaagagcgcaggctggcatcgaaagcacaaaaatcaagcgtgaaggcgatgcgcggcaaagtacgcagcggtcgggaataa

SEQ ID NO: 470565 - DNA, 546 bp, Shigella flexneri
atggcgcttaaagcgacaatttataaagcgacggttaatgtggccgatctcgaccgcaaccagtttctcgatgcctctctgacgctggcgcgccacccttcagaaacccaggagcgtatgatgctgcgcttgctggcgtggctgaaatatgctgatgaacgtctgcaatttacccgtggtttgtgtgccgatgatgagccggaagcgtggctgcgtaacgatcacctgggcattgatttgtggattgagctggggctgccggatgagcgacgaattaagaaagcctgcacccaggccgcagaagtggcgctgtttacctataatagtcgggcggcgcaaatctggtggcagcaaaatcagagcaaatgtgtgcagtttgccaatctttccgtctggtatctggacgatgaacaactggcgaaagtaagcgcctttgccgatcgtaccatgacgctgcaggcaacgattcaggatggtgttatctggttatcggatgataagaataatctggaagttaacttaaccgcctggcaacaaccttcatga

SEQ ID NO: 470566 - DNA, 201 bp, Shigella flexneri; identical to SEQ ID NO: 3723

SEQ ID NO: 470567 - DNA, 261 bp, Shigella flexneri
atgtcaatgaatgatacgtatcaaccaattaattgtgatgattacgataatcttgagctcgcctgccagcatcatttaatgctgacacttgagctgaaagatggcgaaaaattgcaggcaaaagccagtgatttagtctcccgcaaaaatgtggagtatctggtcgtcgaggccgctggcgaaacccgcgagctgcgtctggataaaattaccagctttagccaccctgaaatcggtacggtggtggtaagcgaatcctga

SEQ ID NO: 470568 - DNA, 1299 bp, Shigella flexneri
atgacactcacgctcaatagacaacttctcacctcacgccagattctggtggcctttagcggcgggcttgactccaccgttctgctgcatcagttggtgcagtggcggacggaaaatccgggcgtcactctgcgcgctattcatgtgcatcacggtttaagtgccaatgccgatgcctgggttacgcattgcgaaaacgtctgccaacagtggcaggtgccgctggtggtcgaacgcgtacaacttgcgcaagaggggctggggattgaggcccaggcgcggcaggcacgttatcaggcatttgcccgtaccctattgcccggcgaagtgctggtcaccgcgcaacatctcgacgatcaatgtgaaacctttctgctggcgctaaaacgcggtagcggccctgccgggctttcggctatggcggaagtttcggagtttgctggaacacggcttatccgcccgttgcttgcccgcacgcggggggaactggagcagtgggcattggcgcatggtttacgctggattgaagacgaaagtaatcaggacgactcatacgatcgtaactttctgcgcctgcgcgtagtgccgttattgcagcagcgttggccgcattttgcggaagcaacggcccgcagcgccacactttgtgctgaacaagagagtctgttggatgaactgctggcggatgatttagcacactgccaaacgtcgcaggggacgctgcagattgcgccaatgctggcgatgagtgatgcccgtcgcgcggcgattattcgccgctggctggcagggcagaatgcaccgatgccttcccgcgacgcgctggtgcgcatctggcaggaagtggcgctggcgcgggaagatgcttccccctgtttacgtttgggcgcctttgaaatccgccgctatcagtcgcaactgtggtggattaaatccgtcaccgggcaaagcgaaaccattgtgctgtggcagacgtggctacaaccgctggaattaccggcggggctgggaaccgtacagcttactgcgggaggcgatattcgccctccgcgtgcagacgaagcggtcagcgtgcgtttcaaagcgccaggattgctgcatattgtcgggcgcaacggcggacgtaagctgaagaaaatctggcaagagttaggcgtgccgccgtggctacgtgacaccacgccactgctgttttatggagaaacgctgattgcggcggcaggggtatttgtgacgcaagaaggtgtggctgaaggtgagaatggcgtaagttttgtctggcagaaaacgcttagttaa

SEQ ID NO: 470569 - DNA, 390 bp, Shigella flexneri; identical to SEQ ID NO: 457718

SEQ ID NO: 470570 - DNA, 291 bp, Shigella flexneri
atgacgccacatcaggcatggcagagacagattaaaggtgaagtagaaaccattgcgctggaacaactggtcggtagagtatcggcaaatatgatcctgccttatccaccgggcgtaccgctgttgatgccaggagaaatgctgaccaaagagagccgcacggtactcgattttctactgatgctttgttccgtagggcaacattaccccggttttgaaacggatattcacggcgcgaaacaggacgaagacggcgtttaccgcgtacgagtcctaaaaatggcgggataa

SEQ ID NO: 470571 - DNA, 1851 bp, Shigella flexneri
atgaacatcattgccattatgggaccgcatggcgtcttttataaagatgagcccatcaaagaactggagtcggcgctggtggcgcaaggctttcagattatctggccacaaaacagcgttgatttgctgaaatttatcgaacataaccctcgaatttgcggcgtgatttttgactgggatgagtacagtctcgatttatgcagcgatatcaatcaacttaatgaatatctcccgctttatgccttcatcaacacccactcgacgatggatgtcagcgtgcaggatatgcggatggcgctctggttttttgaatatgcgctggggcaggcggaagatatcgccattcgtatgcgtcagtacaccaacgaatatcttgataacattacgccgccgttcacgaaagccttgtttacctacgtcaaagagcggaagtacaccttttgtacgccggggcatatgggcggcaccgcatatcaaaaaagcccggttggctgtctgttttatgattttttcggcgggaatacccttaaggctgatgtctctatttcggtcaccgagcttggttcgttgcttgaccacaccgggccacacctggaagcggaagagtacatcgcgcggacttttggcgcggaacagagttatatcgttaccaacggaacatcgacgtcgaacaaaattgtgggtatgtacgccgcgccatccggcagtacgctgttgatcgaccgcaactgccataaatcactggcgcatctgttgatgatgaacgatgtagtgccagtctggctgaaaccgacgcgtaatgcgttggggattctgggggggatcccgcgccgtgaatttactcgcgacagcatcgaagagaaagtcgctgccactacgcaagcacaatggccggttcatgcggtgatcaccaactccacctatgatggtttgctctacaacaccgactggatcaaacagacgctggatgtcccgtcgatccacttcgattccgcctgggtgccgtatactcattttcatccaatctaccagggtaaaagtggtatgagcggcgagcgtgttgcgggaaaagttttcttcgaaacgcaatcgacccacaaaatgctggcggcgttatcgcaggcttcactgatccacattaaaggcgagtatgacgaagaggcgtttaacgaagcctttatgatgcataccaccacctcgcccagttatcccattgttgcttcggttgagacggcggcggcgatgctgcgtggtaatccgggcaaacggctgattaaccgttcggtggagcgggcgctgcattttcgcaaagaggtccagcggctgcgggaagagtctgacggttggtttttcgatatctggcaaccgccgcaggtggatgaagccgaatgcaggcccgttgcgcctggcgaacaatggcacggctttaacgatgcggatgccgatcatatgtttctcgatccggttaaagtcactattttgacaccggggatggacgaacagggcaatatgagtgaggaggggatcccggcggcgctggtagcaaaattcctcgacgaacgtgggatcgtagtagagaaaaccggcccttataacctgctgtttctctttagtattggcatcgataaaaccaaagcaatgggattattgcgtgggttgacggaatttaagcgctcttacgatctcaacctgcggatcaaaaatatgctgcccgatctctatgctgaagatcccgatttctaccgcaatatgcgtattcaggatctggcgcaagggatccataagctgattcgtaaacacgatctttccggtttgatgttgcgggcattcgatactttgtgccggaaatga

SEQ ID NO: 470572 - DNA, 960 bp, Shigella flexneri
atgagtctgaatttccttgattttgaacagccgattgcagagctggaagcgaaaatcgattctctgactgcggttagccgtcaggatgagaaactggatattaacatcgatgaagaagtgcatcgtctgcgtgaaaaaagcgtagaactgacgcgtaaaatcttcgccgatctcggtgcatggcagattgcgcaactggcacgccatccgcagcgtccttataccctggattacgttcgcctggcatttgatgaatttgacgaactggctggcgaccgtgcgtatgcagacgataaagctatcgtcggtggtatcgcccgtctcgatggtcgtccggtgatgatcattggtcatcaaaaaggtcgtgaaaccaaagaaaaaattcgccgtaactttggtatgccagcgccagaaggttaccgcaaagcactgcgtctgatgcaaatggctgaacgctttaagatgcctatcatcacctttatcgacaccccgggggcttatcctggcgtgggcgcagaagagcgtggtcagtctgaagccattgcacgcaacctgcgtgaaatgtctcgccttggcgtaccggtagtttgtacggttatcggtgaaggtggttctggcggtgcgctggcgattggcgtgggcgataaagtgaatatgctgcaatacagcacctattccgttatctcgccggaaggttgtgcgtccattctgtggaagagcgccgacaaagcgccgctggcggctgaagcgatgggtatcatcgctccgcgtctgaaagagctgaaactgatcgactccatcatcccggaaccgctgggcggcgctcaccgtaacccggaagcgatggcggcatcgttgaaagcgcaactgctggcggatctggccgatctcgatgtgttaagcactgaagatttaaaaaatcgtcgttatcagcgcctgatgagctacggttacgcgtaa

SEQ ID NO: 470573 - DNA, 3483 bp, Shigella flexneri
atgtctgaaccacgtttcgtacacctgcgggtgcacagcgactactcgatgatcgatggcttggccaaaaccgcaccgctggtaaaaaaggcggcggcgttgggtatgccagcactggcgatcaccgatttcaccaacctttgcggtctggtgaagttctacggagcgggacatggcgcagggattaagcctatcgtcggggcagattttaatgtccagtgcgacctgctgggtgatgagttaacccacctgacggtactggcggcgaacaataccggctatcagaatctggcgttgctgatctcaaaagcgtatcagcgcgggtacggtgccgccgggccgatcatcgatcgcgactggcttatcgaattaaacgaagggttgatccttctttccggcgggcgcatgggcgacgtcggacgcagtcttttgcgtggtaacagcgcgctggtagatgagtgtgtcgcgttttatgaagaacacttcccggatcgctattttctcgagctgatccgcaccggcaggccggatgaagaaagctatctgcacgcggcggtggaactggcggaagcgcgcggtttgcccgtcgtggcgactaacgatgtgcgctttatcgacagcagcgactttgacgcacacgaaatccgcgtcgcgatccacgacggctttaccctcgacgatcctaaacgcccgcgtaactattcgccgcagcaatatatgcgtagcgaagaggagatgtgtgagctgtttgccgacatcccagaagcccttgccaacaccgttgagatcgccaaacgctgtaacgtaactatgcgtcttggtgaatacttcctgccgcagttcccgaccggggacatgagcaccgaagattatctggtcaagcgtgcaaaagaaggcctggaagagcgtctggcatttttattccctgacgaggaagaacgtcttaaacgccgcccggaatatgacgaacgtctggagactgaacttcaggttatcaaccagatgggcttcccgggctacttcctcatcgttatggaatttatccagtggtcgaaagataacggcgtaccggtagggccaggccgtggctccggtgcgggttcactggtggcctacgcgctgaaaatcaccgacctcgatccgctggaatttgacctgctgttcgaacgtttccttaacccggaacgtgtctccatgcctgacttcgacgttgacttctgtatggagaaacgcgatcaggttatcgaacacgtggcggacatgtacggtcgtgatgcggtatcgcagattatcaccttcggtacgatggcggcgaaagcggtgatccgcgacgtaggccgcgtgctggggcatccgtacggctttgtcgaccgtatctcgaaactgatcccgcccgatccggggatgacgctggcgaaagcgtttgaagccgagccgcagctgccggaaatctacgaagcggatgaagaagttaaggcgctgatcgacatggcgcgcaaactggaaggggtcacccgtaacgccggtaagcacgccggtggggtggttatcgcgccgaccaaaattaccgattttgcgccgctttattgcgatgaagagggcaaacatccggtcacccagtttgataaaagcgacgttgaatacgccggactggtgaagttcgacttccttggtttgcgtacgctcaccatcatcaactgggcgctggagatgatcaacaagcggcgggcgaagaatggcgagccaccgctggatatcgccgcgatcccgctggatgacaagaaaagcttcgacatgctgcaacgctcggaaaccacggcggtattccagcttgaatcgcgcggcatgaaggacctgatcaagcgtctgcaacctgactgcttcgaagatatgatcgcactggtggcactgttccgccctggtccgttgcagtcagggatggtggataactttatcgaccgtaaacatggtcgtgaagagatctcctatccggacgtgcagtggcagcatgaaagcctgaaatcggtactggagccaacctacggcattatcttgtatcaggaacaggtcatgcagattgcccaggtgctttctggttataccctcggtggcgcggatatgctgcgccgtgcgatgggtaagaaaaagccggaagagatggctaagcagcgttctgtatttgctgaaggtgcagaaaagaacggaatcaacgccgaactggcgatgaaaatcttcgacctggtggagaaattcgcgggttacggatttaacaaatcgcactctgcggcctatgctttggtgtcatatcaaacgttatggctgaaagcgcactatccggcggagtttatggcggcggtaatgaccgccgatatggacaacaccgagaaggtggtgggcctggtggatgagtgctggcggatggggctgaaaatcctgccaccagatataaactccggtctttaccatttccacgtcaacgacgacggcgaaatcgtgtatggtattggcgccatcaaaggggtaggtgaaggtccgattgaggccatcatcgaagcccgtaataaaggcggctacttccgcgaactgtttgatctctgcgcccgtaccgacaccaaaaagttaaaccggcgggtgctggaaaaactgatcatgtccggggcgtttgaccgtcttgggccacaccgcgcggcgctgatgaactcgctgggtgatgcgttaaaagcggcagatcaacacgcgaaagcggaagctatcggtcaggccgatatgttcggcgtgctggccgaagagccggaacaaattgaacaatcctacgccagctgccaaccgtggccggagcaggtggtattagatggggaacgtgaaacgttaggcctgtacctgaccggacaccctatcaaccagtatttaaaagagattgagcgttatgtcggaggcgtaaggctgaaagacatgcacccgacagaacgtggtaaagtcatcacggctgcggggctcgttgttgccgcgcgggttatggtcaccaagcgcggcaatcgtatcggtatctgcacgctggatgaccgttccgggcggctggaagtgatgttgtttactgacgccctggataaataccagcaattgctggaaaaagaccgcatacttatcgtcagcggacaggtcagctttgatgacttcagcggtgggcttaaaatgaccgctcgcgaagtgatggatattgacgaagcccgggaaaaatatgctcgcgggcttgctatctcgctgacggacaggcaaattgatgaccagcttttaaaccgactccgtcagtctctggaaccccaccgctctgggacaattccagtacatctctactatcagagggcggatgcacgcgcgcggttgcgttttggcgcgacgtggcgtgtctctccgagcgatcgtttattaaacgatctccgtggcctcattggttcggagcaggtggaactggagtttgactaa

SEQ ID NO: 470574 - DNA, 597 bp, Shigella flexneri
atgatcgaatttgtttatccgcacacgcagctggttgcgggtgtggatgaagtcggacgcgggccgttagttggcgcggtcgtcaccgctgcggtgatccttgacccggcgcgcccgattgccgggctgaatgattccaaaaagctgagcgaaaaacgccgtctggcgctctatgaagagatcaaagagaaagcgttgagctggagtctgggccgcgcggaaccccacgaaatcgacgagctgaacattcttcatgcgaccatgctggcgatgcagcgtgccgtcgctgggctgcatattgcgccggaatatgtgttgattgatggtaaccgctgcccgaaattaccgatgcctgcgatggctgtggtgaaaggggatagccgcgtaccagaaatcagtgccgcgtctatcctggcgaaagtgacgcgtgacgccgaaatggcggcgctggatattgttttcccgcaatatggttttgcccaacataaagggtatccaaccgcttttcatctggaaaaactggctgaatatggcgcgactgaacatcatcgtcgcagctttgggcctgtcaaacgcgcactgggacttgcgtcctga

SEQ ID NO: 470575 - DNA, 1149 bp, Shigella flexneri
atgactgaccagcgtccattaacgattgccctggtcgccggagaaacctccggcgatatcctgggggccggtttaatccgcgctctgaaagaacgtgtgcccaacgcccgctttgttggtgttgccgggccacgaatgcaggctgaaggctgcgaagcctggtacgaaatggaagaactggcggtgatgggcattgttgaagtgctcggtcgtctgcgtcgcttactgcatattcgtgccgatctgacaaagcgttttggcgaactgaagccagatgtttttgttggtattgatgcgcccgacttcaatattactcttgaaggtaacctcaaaaagcagggtatcaaaaccattcattacgtcagtccatccgtctgggcgtggcgacagaaacgcgttttcaaaataggcagagccaccgatctggtgctcgcatttctgcctttcgaaaaagcgttttatgacaaatacaatgtaccgtgccgctttatcggtcataccatggctgatgccatgccgttagatccagataaaaatggtgcccgtgatgtgctggggatcccttacgatgcccactgtctggcattgttgccgggcagccgtggtgcagaagtcgaaatgcttagtgccgatttcttgaaaactgcccagcttttgcgccagacatatccggatctcgaaatcgtggtgccgctggtgaatgccaaacgccgcgagcagtttgaacgcatcaaagctgaagtcgcgccagacctgtcggttcatttgctggatggaatgggccgtgaggcgatggtcgccagcgatgcggcactactggcgtcggggacggcagccctggagtgtatgctggcgaaatgcccgatggtggtgggatatcgcatgaagccttttaccttctggttggcgaagcggctggtgaaaactgattatgtctcgctgccaaatctgctggcgggcagagagttagtcaaagagttattgcaggaagagtgtgagccgcaaaaactggctgcggcgctgttaccgctgttggcgaacgggaaaaccagccacgcgatgcacgataccttccgtgaactgcatcagcagatccgctgcaatgccgatgagcaggcggcacaagccgttctggagttagcacaatga

SEQ ID NO: 470576 - DNA, 789 bp, Shigella flexneri
gtgattgataaatccgcctttgtgcatccaaccgccattgtggaagagggcgcgtcaattggcgcgaacgcacacattggtcctttttgtatcgttggaccccatgtcgaaattggtgagggtaccgtactgaaatctcacgttgtcgtgaatggtcatactaaaattggccgcgataatgagatttatcagtttgcctccatcggcgaagttaaccaggatttgaaatatgctggcgaaccgacccgtgtggaaatcggcgatcgtaaccgcattcgcgaaagcgtcaccattcatcgtggcacagtccagggcggtggattgacgaaggtgggcagcgacaacttactgatgatcaacgcgcacattgcgcacgattgtacggtaggtaaccgctgtattctcgccaacaacgcaacgctggcgggtcacgtatcggttgacgacttcgcgatcatcggcggcatgaccgcagtccatcagttctgcatcattggtgcgcatgtgatggttggcggctgctccggtgtggcgcaggacgtccctccttatgtcattgcgcagggtaaccacgcaacgccgttcggtgtcaatatcgaagggctgaagcgccgcggattcagccgtgaggcgattaccgctatccgcaatgcgtataagctaatttatcgtagcggtaaaacgctcgatgaagtgaaaccggaaattgctgaactggcggaaacatatccggaagtgaaagcctttaccgatttctttgcacgctcaacgcgcggtctgattcgttaa

SEQ ID NO: 470577 - DNA, 456 bp, Shigella flexneri; identical to SEQ ID NO: 457725

SEQ ID NO: 470578 - DNA, 1026 bp, Shigella flexneri
atgccttcaattcgactggctgatttagcgcagcagttggatgcagaactacacggtgatggcgatatcgtcatcaccggcgttgcgtccatgcaatctgcacaaacaggtcacattacgttcatggttaacccaaaataccgtgagcatttaggcttgtgccaggcgtccgcggttgtcatgacccaggacgatcttcctttcgcgaaaagtgccgcgctggtagtgaagaatccctacctgacttacgcgcgcatggcgcaaattttagataccacgccgcagcccgcgcagaacattgcacccagtgcggtgatcgacgcgacggcgaagctgggtaacaacgtatcgattggcgctaacgcggtgattgagtccggcgttgaactgggcgataacgtgattatcggtgccggttgcttcgtaggtaaaaacagcaaaatcggtgcaggttcgcgtctctgggcgaacgtaaccatttaccatgagatccagatcggtcagaattgcctgatccagtccggaacagtggtaggcgcagacggctttggttatgccaacgatcgtggtaactgggtgaagatcccacagattggtcgcgtaattattggcgatcgcgtggagatcggtgcctgcacaaccatcgatcgcggcgcgctggatgacactgttattggcaatggcgtgatcattgataaccagtgccagattgcacataacgtcgtgattggcgacaatacggcggttgccggtggcgtcattatggcgggcagcctgaaaattggtcgttactgcatgatcggcggagccagcgtaatcaacgggcatatggaaatatgcgacaaagtgacggttacgggcatgggtatggtgatgcgtcccatcactgaaccaggcgtctattcctcaggcattccgctgcaatccaacaaagtctggcgcaaaaccgctgcactggtgatgaacattgatgacatgagcaagcgtctgaaatcgcttgagcgcaaggttaatcaacaagactaa

SEQ ID NO: 470579 - DNA, 486 bp, Shigella flexneri
gtgaaaaagtggttattagctgcaggtcttggtttagcactggcaacttctgctcaggcggctgacaaaattgcaatcgtcaatatgggcagcctgttccagcaggtagcgcagaaaaccggtgtttctaacacgctggaaaatgagttcaaaggccgtgccagcgaactgcagcgtatggaaaccgatctgcaggctaaaatgaaaaaactgcagtccatgaaagcgggcagcgatcgcaccaaactggaaaaagacgtgatggctcagcgccagacttttgctcagaaagcgcaggcttttgagcaggatcgcgcacgtcgttccaacgaagaacgcggcaaactggttactcgtatccagactgctgtgaaatccgttgccaacagccaggatatcgatctggttgttgatgcaaacgccgttgcttacaacagcagcgatgtaaaagacatcactgccgacgtactgaaacaggttaaataa

SEQ ID NO: 470580 - DNA, 2433 bp, Shigella flexneri
atggcgatgaaaaagttgctcatagcgtcgctgctgtttagcagcgccaccgtatacggtgctgaagggttcgtagtgaaagatattcatttcgaaggccttcagcgtgtcgccgttggtgcggccctcctcagtatgccggtgcgtacaggcgacacggttaatgatgaagatatcagtaataccattcgcgctctgtttgctaccggcaactttgaggatgttcgcgtccttcgtgatggtgatacccttctggttcaggtaaaagaacgtccgaccattgccagcattactttctccggtaacaaatcggtgaaagatgacatgctgaagcaaaacctcgaggcttctggtgtgcgtgtgggcgaatccctcgatcgcaccaccattgccgatatcgagaaaggtctggaagacttctactacagcgtcggtaaatatagcgccagcgttaaagctgtcgtgaccccgctgccgcgcaaccgtgttgacctaaaactggtgttccaggaaggtgtgtcagctgaaatccagcaaattaacattgttggtaaccatgctttcaccaccgacgaactgatctctcatttccaactgcgtgacgaagtgccgtggtggaatgtggtaggcgatcgtaaataccagaaacagaaactggcgggcgatcttgaaaccctgcgcagctactatctggaccgcggttatgcccgtttcaacatcgactctacccaggtcagtctgacgccagataaaaaaggtatttacgtcacggtgaacatcaccgaaggcgatcagtacaagctttctggcgttgaagtgagcggcaaccttgccgggcactccgctgaaattgagcagctgactaagatcgagccgggcgagctgtataacggcactaaagtgaccaaaatggaagatgacattaaaaagcttctcggtcgctatggttatgcctatccgcgcgtacagtcgatgcctgaaattaacgatgccgacaaaaccgttaaattacgcgtgaacgttgatgtgggtaaccgtttctacgtgcgtaagatccgttttgaaggtaacgatacctcgaaagatgccgtcctgcgtcgcgaaatgcgtcagatggaaggtgcatggttggggagcgatctggtcgatcagggtaaggagcgtctgaatcgtctgggcttctttgaaactgtcgataccgatacccaacgtgttccgggtagcccggaccaggttgatgtagtctacaaggtgaaagaacgtaacactggtagcttcaacttcgggattggttacggtactgaaagtggcgtgagcttccaggctggcgtgcaacaggataactggttaggtacaggttatgctgttggtatcaacgggaccaaaaacgattaccagacctatgctgaactgtcggtaaccaacccgtacttcaccgtagatggcgtaagcctcggtggtcgtctcttctataatgacttccaggcagatgacgccgacctgtccgactataccaacaagagttatggtacagacgtgacgttgggcttcccgattaacgaatataactcgctgcgtgcaggtctgggttatgtacataactccctgtccaacatgcagcctcaggttgcgatgtggcgttatctgtactctatgggtgaacatccgagcacctctgatcaggataacagcttcaaaacggacgacttcacgttcaactatggttggacctataacaagcttgaccgtggttacttcccgacagatggttcacgtgtcaacctgaccggtaaagtgaccattcctggatcggataacgaatactacaaagtgacgttagacacggcgacttatgtgccgatcgatgacgatcacaaatgggttgttctgggtcgtacccgctggggttatggtgatggtttaggcggcaaagagatgccgttctacgagaacttctatgccggtggttccagcaccgtgcgtggcttccagtccaataccattggtccgaaagcagtttacttcccgcatcaggccagtaattatgatccggactatgattacgaatgtgcgactcaggacggcgcgaaagacctgtgtaaatcggatgatgctgtaggcggtaacgccatggcggttgccagcctcgagttcatcaccccgacgccgtttattagcgataagtatgctaactcggttcgtacttcattcttctgggatatgggtaccgtttgggatacaaactgggattccagccaatattctggatatccggactatagtgatccaagcaatatccgtatgtctgcgggtatcgcattacaatggatgtccccattggggccgttggtgttctcctacgcccagccgttcaaaaagtacgatggagacaaggcagaacagttccagtttaacatcggtaaaacctggtaa

SEQ ID NO: 470581 - DNA, 1353 bp, Shigella flexneri
atgctgagttttctctgggatttggcttcgttcatcgttgcactgggtgtacttatcaccgtgcatgaatttggtcatttctgggttgcccggcgttgtggtgttcgcgttgagcgtttctcaatagggtttggtaaggcgctctggcggcgaactgataagctcggcaccgaatatgttatcgccctgatcccgttgggcggttatgtcaaaatgctggatgagcgcgcagaaccggtcgttccggaactccgccaccatgccttcaataataaatctgtcggccaacgagcggcgattattgccgcaggtccggttgcaaacttcatttttgctatctttgcctactggctggtttttattattggtgtgcctggcgtacgtccggtggttggcgaaatagcagccaattcgatagctgcggaagcacaaattgcaccaggtacggaactaaaagccgtagatggtatcgaaacgcctgattgggatgccgtgcgtttgcagttggtcgataaaattggcgatgaaagcaccaccattacagtagcgccatttggcagcgaccaacggcgggatgtaaagctcgatttacgtcactgggcgtttgagcctgataaagaagatccggtatcttcgctggggattcgtcctcgtgggccgcaaattgaacctgtactggaaaatgtgcagccaaactcggcggcaagcaaggcaggtttgcaagcaggcgacaggatcgttaaagtcgatggtcagcccttaacgcagtgggtgacctttgtgatgcttgtccgggataacccgggtaaatccttagcgttagaaatcgaaaggcaggggagtcccttgtctttgacattaatcccggggagtaaaccgggtaatggtaaagcgattggttttgtcggtattgagccgaaagtcattcctttgccagatgagtataaagttgtacgccagtatgggccgttcaacgccatcgtcgaagccacggacaaaacgtggcagctgatgaagctgacggtcagtatgctgggaaaattgatcaccggtgatgtgaaactgaacaacctcagtgggccgatctctatcgccaagggggctgggatgacagcggaactcggggtagtttattacctgccgtttcttgcgcttattagcgtgaacttagggataattaacctgtttccgttgcccgtacttgacggggggcatctgctgttccttgcgatcgaaaagatcaagggcggaccggtatccgagcgggttcaagacttttgttatcgcattggctcgattctgctggtgctgttaatggggcttgcacttttcaatgatttctctcggttatga

SEQ ID NO: 470582 - DNA, 750 bp, Shigella flexneri
atgctggcagcgtgggaatggggacagcttagcggttttaccactcgttcgcagcgagtatggttggcggtgttatgcgggttattgttggcgctgatgctttttctgttgccggaatatcaccgaaatattcatcaaccgctggttgaaatctcactttgggcttcgttgggttggtggattgtcgcgctattgctggtgctgttttacccaggttccgcagcaatctggcgtaactctaaaacattgcgccttatttttggcgtgctaaccattgttcccttcttctggggcatgctggcgttacgggcctggcactatgacgagaatcattacagtggcgcaatatggctgctctatgtcatgatcctggtatggggcgctgactccggcgcatatatgtttggcaaattgtttggtaaacataagctggcaccgaaggtttctccgggtaaaacctggcaaggctttataggtggactcgctactgcagcggtaatctcatggggttatggcatgtgggcgaatctcgacgtcgctcccgtcaccttactcatttgctctattgtcgcagcgttagcctcagtgctcggcgatctgaccgagagtatgtttaagcgtgaagcaggaattaaggacagcggtcatttaattccaggacacggtggtattttagatcgtattgatagcctgacggctgcggtaccggtctttgcttgcttgttgttactggtattcaggacgctttaa

SEQ ID NO: 470583 - DNA, 153 bp, Shigella flexneri
atgggggtcgcttttgctgaagtatcgcctgatatctgcttttgtgttaatacccgtcgtcatcgcggcgttgtttctgttgccgccggtggggttcgccattgtaacgctggtggtctgcatgctggcagcgtgggaatggggacagcttag

SEQ ID NO: 470584 - DNA, 759 bp, Shigella flexneri
atgttgtctgctactcaaccacttagcgaaaaattgccagcgcatggctgccgtcatgttgcgatcattatggacggcaatggtcgctgggcaaaaaagcaagggaagattcgtgcctttgggcataaagccggggcaaaatccgtccgccgggctgtctcttttgcggccaacaacggtattgaggcgttaacgctgtatgcctttagtagtgaaaactggaaccgaccagcgcaggaagtcagtgcgttaatggaactgtttgtgtgggcgctcgatagcgaagtaaaaagtctgcaccgacataacgtgcgtctgcgtattattggcgataccagtcgttttaactcgcgtttgcaagaacgtattcgtaaatctgaagcgctaacagccggaaataccggtctgacgctgaatattgcggcgaactacggtggacgttgggatatagtccagggagtcaggcaactggctgaaaaggtgcagcaaggaaacctgcaaccagatcagatagatgaagagatgttaaaccagcatgtctgtatgcatgaactggcccctgtagatttagtaattaggactgggggagagcatcgcattagtaactttttgctttggcaaattgcctatgccgaactttactttacagatgttctctggcccgatttcgatgaacaagactttgaaggggcgttaaatgcctttgctaatcgagagcgtcgtttcggcggcaccgagcccggtgatgaaacagcctga

SEQ ID NO: 470585 - DNA, 1197 bp, Shigella flexneri
atgaagcaactcaccattctgggctcgaccggctcgattggttgcagcacgctggacgtggtgcgccataatcccgaacacttccgcgtagttgcgctggtggcaggcaaaaatgtcactcgcatggtagaacagtgcctggaattctctccccgctatgccgtaatggaagatgaagcgagtgcgaaacttcttaaaacgatgctacagcaacaggggagccgcaccgaagtcttaagtgggcaacaagccgcttgcgatatggcagcgcttgaggaggttgatcaggtgatggcagccattgttggtgctgctgggctgttacctacgcttgctgcgatccgcgcgggtaaaaccattttgctggccaataaagaatcactggttacctgcggacgtctgtttatggacgccgtaaagcagagcaaagcgcaattgttaccggtcgatagcgaacataacgctatttttcagagtttaccgcaacctatccagcataatctgggatacgctgaccttgagcaaaatggcgtggtgtccattttacttaccgggtctggtggccctttccgtgagacgccattgcgcgatttggcaacaatgacgcccgatcaagcttgccgtcatccgaactggtcgatgggacgtaaaatttctgtcgattcggctaccatgatgaacaaaggtctggaatacattgaagcgcgttggctgtttaacgccagcgccagccagatggaagtgctgattcacccgcagtcagtgattcactcaatggtgcgctatcaggacggcagtgttctggcgcagctgggggaaccggatatgcgtacgccaattgcccacaccatggcatggccgaatcgcgtgaactctggcgtgaagccgctcgatttttgcaaactaagtgcgttgacatttgccgcaccggattatgagcgttatccatgcctgaaactggcgatggaggcgttcgaacaaggccaggcagcgacgacagcattgaatgccgcaaacgaaatcaccgttgctgcttttcttgcgcaacaaatccgctttacggatatcgctgcgttgaatttatccgtactggaaaaaatggatatgcgcgaaccacaatgtgtggacgatgtgttatctgttgatgcgaacgcgagtgaagtcgccagaaaagaggtgatgcgtctcgcaagctga

SEQ ID NO: 470586 - DNA, 558 bp, Shigella flexneri
gtgattagcgatatcagaaaagatgctgaagtacgcatggacaaatgcgtagaagcgttcaaaacccaaatcagcaaaatacgcacgggtcgtgcttctcccagcctgctggatggcattgtcgtggaatattacggcacgccgacgccgctgcgtcagctggcaagcgtaacggtagaagattcccgtactctgaaaatcaacgtgtttgatcgttcaatgtctccggccgttgaaaaagcgattatggcctccgatctcggcctgaacccgaactctgcgggtagcgacatccgtgttccgctgccgccgctgacggaagaacgtcgtaaagatctgaccaaaatcgttcgtggtgaagcagaacaagcgcgtgttgcagtacgtaatgtgcgtcgtgacgcgaacgacaaagtgaaagcactgttgaaagataaagagatcagcgaagacgacgatcgccgttctcaggacgatgtacagaaactgactgatgctgcaatcaagaaaattgaagcggcgctggcagacaaagaagcagaactgatgcagttctga

SEQ ID NO: 470587 - DNA, 726 bp, Shigella flexneri
atggctaccaatgcaaaacccgtctataaacgcattctgcttaagttgagtggcgaagctctgcagggcactgaaggcttcggtattgatgcaagcatactggatcgtatggctcaggaaatcaaagaactggttgaactgggtattcaggttggtgtggtgattggtgggggtaacctgttccgtggcgctggtctggcgaaagcgggtatgaaccgcgttgtgggcgaccacatggggatgctggcgaccgtaatgaacggcttggcaatgcgtgatgcactgcaccgcgcctatgtgaacgctcgtctgatgtccgctattccattgaatggcgtgtgcgatagctacagctgggcagaagctatcagcctgttgcgcaacaaccgtgtggtgatcctctccgccggtacaggtaacccgttctttaccaccgactcagcagcttgcctgcgtggtatcgaaattgaagccgatgtggtgctgaaagcaaccaaagttgacggcgtgtttaccgctgatccggcgaaagatccaaccgcaaccatgtacgagcaactgacttacagcgaagtgctggaaaaagagctgaaagtcatggacctggcggccttcacgctggctcgtgaccataaattaccgattcgtgttttcaatatgaacaaaccgggtgcgctgcgccgtgtggtaatgggtgaaaaagaagggactttaatcacggaataa

SEQ ID NO: 470588 - DNA, 852 bp, Shigella flexneri
atggctgaaattaccgcatccctggtaaaagagctgcgtgagcgtactggcgcaggcatgatggattgcaaaaaagcactgactgaagctaacggcgacatcgagctggcaatcgaaaacatgcgtaagtccggtgctattaaagcagcgaaaaaagcaggcaacgttgctgctgacggcgtgatcaaaaccaaaatcgacggcaactacggcatcattctggaagttaactgccagactgacttcgttgcaaaagacgctggtttccaggcgttcgcagacaaagttctggacgcagctgttgctggcaaaatcactgacgttgaagttctgaaagcacagttcgaagaagaacgtgttgcgctggtagcgaaaattggtgaaaacatcaacattcgccgcgttgctgcgctggaaggcgacgttctgggttcttatcagcacggtgcgcgtatcggcgttctggttgctgctaaaggcgctgacgaagagctggttaaacacatcgctatgcacgttgctgcaagcaagccagaattcatcaaaccagaagacgtatccgctgaagtggtagaaaaagaataccaggtacagctggatatcgcgatgcagtctggtaagccgaaagaaatcgcagagaaaatggttgaaggccgcatgaagaaattcaccggcgaagtttctctgaccggtcagccgttcgttatggaaccaagcaaaactgttggtcagctgctgaaagagcataacgctgaagtgactggcttcatccgtttcgaagtgggtgaaggcatcgagaaagttgagactgactttgcagcagaagttgctgcgatgtccaagcagtcttaa

SEQ ID NO: 470589 - DNA, 726 bp, Shigella flexneri
atggcaactgtttccatgcgcgacatgctcaaggctggtgttcacttcggtcaccagacccgttactggaacccgaaaatgaagccgttcatcttcggtgcgcgtaacaaagttcacatcatcaaccttgagaaaactgtaccgatgttcaacgaagctctggctgaactgaacaagattgtttctcgcaaaggtaaaatccttttcgttggtactaaacgcgctgcaagcgaagcggtgaaagacgctgctctgagctgcgaccagttcttcgtgaaccatcgctggctgggcggtatgctgactaactggaaaaccgttcgtcagtccatcaaacgtctgaaagacctggaaactcagtctcaggacggtactttcgacaagctgaccaagaaagaagcgctgatgcgcactcgtgagctggagaaactggaaaacagcctgggcggtatcaaagacatgggcggtctgccggacgctctgtttgtaatcgatgctgaccacgaacacattgctatcaaagaagcaaacaacttgggtattccggtatttgctatcgttgataccaactctgatccggacggtgttgacttcgttatcccgggtaacgacgacgcaatccgtgctgtgaccctgtacctgggcgctgttgctgcaaccgtacgtgaaggccgttctcaggatctggcttcccaggcggaagaaagcttcgtagaagctgagtaa

SEQ ID NO: 470590 - DNA, 795 bp, Shigella flexneri
atggctatctcaatcaagaccccagaagatatcgaaaaaatgcgcgtcgctggccgactggctgccgaagtgctggagatgatcgaaccgtatgttaaaccgggcgtcagcaccggcgagctggatcgcatctgtaatgattacattgttaatgaacaacacgcggtttctgcctgcctcggctatcacggctatccgaaatccgtttgcatctctattaatgaagtggtgtgccacggtatcccggacgatgctaagctgctgaaagatggcgatatcgttaacattgatgtcaccgtaatcaaagatggtttccacggcgatacctcgaaaatgtttatcgtcggtaagccgaccatcatgggcgaacgcctgtgccgcatcacgcaagaaagcctgtacctggcgctacgcatggtaaaaccaggcattaatctgcgcgaaatcggtgcggcgattcagaaatttgtcgaagcagaaggcttctccgtcgttcgtgaatattgcggacacggtattggtcgcggcttccatgaagaaccgcaggtgctgcactatgactcccgtgaaaccaacgtcgtgctgaaaccggggatgacgttcaccattgagccaatggtcaacgcgggtaaaaaagagatccgcaccatgaaagatggctggacggtaaaaaccaaagatcgcagcttgtctgcacaatatgagcatactattgtggtgactgataacggctgcgaaattttgacgctacgcaaggatgacaccatcccggcgataatctcgcacgacgaataa

SEQ ID NO: 470591 - DNA, 2673 bp, Shigella flexneri
atgaatacccttccagaacagtacgcaaacaccgctctctccaccctgcccggtcaaccgcaaaatccatgcgcctggccccgtgatgaattaaccgtctgtgggataaaagcccatatcgatactttccagcgttggctgggtgatgcctttgacaatgggatctctgcagaacagttgattgaggcacgtaccgagttcatagaccagctcctgcaacgattatggattgaagcgggattcagccagattgccgacctggcattggttgccgtcggtggctacggtcgtggcgagctgcatccactttctgacatcgatttactgattttaagccgtaaaaagctcccggacgatcaggcgcaaaaagtgggcgagctgttaacgctgctctgggatgtaaagctggaagtcggtcatagtgtgcgcacgcttgaagagtgcatgttggaagggttatcggatttaaccgtcgccaccaatttaatcgaatcccgcttattaattggcgatgttgcgctcttcctcgaactgcaaaaacatatttttagcgaaggattctggccttccgacaagttctacgcagcgaaagttgaagaacagaaccagcgccatcagcgttaccatggcaccagctacaaccttgaaccagacatcaaaagtagccctggcggcttgcgcgatattcacactctgcaatgggtggcccgccgtcattttggcgcaacatcgctggatgaaatggtcgggtttggcttcttaacctcagcggagcgggcggaattaaacgaatgtctgcatatactgtggcgtattcgctttgccctgcatctggtcgtcagccgttacgataatcgtctgttattcgatcgccaacttagcgtcgctcagcgtctgaattacagtggtgaaggcaacgaaccggtcgagcggatgatgaaggattacttccgcgttacacgccgcgtcagtgaactcaaccagatgctgctgcaactgttcgatgaagccatcctcgcccttcccgccgacgaaaaaccacgtccactcgacgatgagtttcagctacgcggtacgctaatcgacctgcgtgatgaaacactatttatgcgccagccggaagccatcttgcgtatgttctacaccatggtgcgcaacagtgcgatcaccggcatttactccaccacgctgcgccagttacgccatgcccgtcgccatctgcaacaaccgctgtgtaatattccgcaagcacgaaaactgtttttgagcattctgcgtcaccccggagcggtgcggcgcggactattgccaatgcatcgccatagcgtgctcggcgcgtatatgccgcaatggtcgcatatcgtcgggcagatgcagtttgatctgttccacgcctacacggtggatgaacatactatccgcgtgatgctgaaactggagagttttgccagtgaagaaacgcgccagcgccatccgttgtgtgtggacgtctggccgcgcctgccgtcaactgagctgattttcatcgccgcgctgtttcacgatatcgccaaaggacgcggcggcgaccactccattctcggtgctcaggatgtagtgcattttgcagaactccacgggctgaactcacgcgaaacacagctggttgcctggctggttcaccagcacttgctgatgtcggtgacagcacaacgccgcgatattcaggaccctgaagtcatcaagcagtttgccgaagaagttcaaacggaaaatcgtctgcgctatctggtatgcctgacagtggctgacatttgcgccaccaacgaaacactgtggaatagctggaagcaaagtctgttgcgcgaactctattttgccaccgaaaagcagctacgacgcggaatgcaaaacacgccggatatgcgcgaacgggttcgccatcaccaactccaggcactggcactactgcgcatggataacatcgacgaagaggcgctgcaccaaatttggtcacgctgtcgtgctaactattttgtccgccatagcccaaatcaactggcctggcatgcccgccatttattacagcatgatttaagcaaaccgctggtattgcttagcccgcaggctacgcgtggaggcaccgagatttttatctggagcccggaccgcccctatctgtttgccgccgtctgtgccgaattagaccgccgcaatttaagtgttcacgacgcacaaattttcaccactcgcgacggtatggcgatggatacctttatcgtgctggaacccgatggcagcccgctgtccgcagatcgccatgaggttattcggtttggtctggagcaggtgctgacgcaaagtagctggcagccaccgcagccccgtcgccaacccgccaaattacgccattttactgttgaaaccgaagtaacgtttttgccgacccataccgaccgcaaatcgttcctcgaactgatcgccctcgaccaacctggactgctggcgcgagtcgggaaaatttttgccgatctgggaatttcgcttcatggtgcccgaattacaaccattggcgagcgagtagaagatttattcataattgccaccgctgaccggcgtgcgcttaataacgagttgcagcaggaagtgcatcagcggttgacagaggccctcaatccaaacgataaagggtga

SEQ ID NO: 470592 - DNA, 825 bp, Shigella flexneri
atgcagcagttacagaacattattgaaaccgcttttgaacgccgtgccgagatcacgccagccaatgcagacaccgttacccgcgaagcggtaaatcaggtgatcgccctgctggattccggcgcactgcgtgtagcggaaaaaattgacggtcagtgggtgacgcatcagtggttgaaaaaagcggtgctgctctctttccgtattaatgataatcaggtgatcgaaggggcagaaagccgctacttcgacaaagtgccgatgaaattcgccgactacgacgaagcacgtttccagaaagaaggcttccgcgttgtgccaccagcggcggtacgtcagggtgcgtttattgcccgtaacaccgtgctgatgccgtcttacgttaacatcggcgcatatgttgatgaaggcaccatggttgatacctgggcgaccgtcggttcttgtgcgcagattggtaaaaacgtccacctttccggtggcgtgggcatcggcggcgtgctggagccgctgcaggctaacccgaccattattgaagataactgcttcattggcgcacgctctgaagtggttgaaggggtgattgtcgaagaaggttccgtcatctctatgggcgtatacattggtcagagcacccgtatttacgaccgtgaaaccggcgaaatccactacggtcgcgttccggcggggtctgtggttgtttcaggtaatctgccgtcaaaagatggcaaatacagcctctactgtgcggttatcgttaagaaagttgacgcgaaaactcgcggcaaagtcggcattaacgaactgctgcgtaccatcgattaa

SEQ ID NO: 470593 - DNA, 387 bp, Shigella flexneri; identical to SEQ ID NO: 457741

SEQ ID NO: 470594 - DNA, 615 bp, Shigella flexneri
atggcggagttacaacaactgcaaaacgcgctgactacgcccgagcgtaataatctggtggcgattgtctcgctaaccgaaatggtggtgttgaaaccggcgttgaactcttttgggcgctgggatgcagaagatcatcgtaagcgagttgaacaactgattacccgcatgaaagagtacggccagctgcgttttcgcgtttcactgggcaactattttaccggtcctggcagtattgcccgatcctatcgtacggcgaaaacgacgatggtggtgggtaaacagcggatgccagaaagtcgctgctatttttatcaggatctgatgttacctgtgttactcgacagtttgcgtggcgactggcaggccaacgaactggcgcgaccgctggcgcggctgaaagcgatggacaataacggcttgctgcgacgaacgctggcggcgtggtttcgccacaatgtgcaaccgctggcaacgtcaaaggcgttgtttattcatcgtaataccctggagtatcggcttaatcgtatatcggaactgaccgggcttgatttgggcaattttgatgacaggttgctgctgtatgtggcgttacaactggatgaagagcggtag

SEQ ID NO: 470595 - DNA, 576 bp, Shigella flexneri
atggctggctggcatcttgataccaaaatggcgcaggatatcgtggcacgtaccatgcgcatcatcgataccaatatcaacgtaatggatgcccgcgggcgaattatcggcagcggcgatcgtgagcgtattggtgaattgcacgaaggtgcattgctggtactttcacagggacgagtcgtcgatatcgatgacgcggtagcacgtcatctgcacggtgtgcggcaggggattaatctaccgttacggctggaaggtgaaattgtcggcgtaattggcctgacaggtgaaccagagaatctgcgtaaatatggcgaactggtctgcatgacggctgaaatgatgctggaacagtcgcggttgatgcacttgttggcgcaggatagccgtttgcgggaagaactggtgatgaacctgattcaggcagaggagaatactcccgcacttctgaatgggcgcaacggctggggatcgatctcaatcaaccgcgagtggtggctattgttgaggtcgacagcggtcagcttggcgtggacagcgcaatggcggagttacaacaactgcaaaacgcgctga

SEQ ID NO: 470596 - DNA, 1425 bp, Shigella flexneri
atgaaaaaaaccacattagcactgagtgcactggctctgagtttaggtttggcgttatctccgctctctgcaacggcggctgagacttcttcagcaacgacagcccagcagatgccaagccttgcaccgatgctcgaaaaggtgatgccttcagtggtcagcattaacgtagaaggtagcacaaccgttaatacgccgcgtatgccgcgtaatttccagcagttcttcggtgatgattctccgttctgccaggaaggttctccgttccagagctctccgttctgccaggggggccagggcggtaatggcggcggccagcaacagaaattcatggcgctaggttccggcgtcatcattgatgccgataaaggctatgtcgtcaccaacaaccacgttgttgataacgcgacggtgattaaagtccagctgagcgatggtcgtaagttcgacgcgaagatggttggcaaagatccgcgctctgatatcgcgctgatccaaatccagaacccgaaaaaactgaccgcaattaagatggcggattctgatgcactgcgcgtgggtgattacaccgtagcgattggtaacccgtttggtctgggcgagacggtaacttccgggattgtctctgcgctggggcgtagcggcctgaatgctgaaaactacgaaaacttcatccagaccgatgcagcgatcaaccgtggtaactccggtggtgcgctggttaacctgaacggcgaactgatcggtatcaacaccgcgatcctcgcaccggacggcggcaacatcggtatcggttttgctatcccgagtaacatggtgaaaaacctgacctcgcagatggtggaatacggccaggtgaaacgcggtgagctgggtattatggggactgagctgaattccgaactggcgaaagcgatgaaagttgacgcccagcgcggtgctttcgtaagccaggttctgcctaattcctccgctgcaaaagcgggcattaaagcgggtgatgtgatcacctcactgaacggtaagccgatcagcagctttgccgcactgcgtgctcaggtgggtactatgccggtgggcagcaaactgaccctgggcttactgcgcgacggtaagcaggttaacgtgaacctggaactgcagcagagcagccagaatcaggttgattccagctccatcttcaacggcattgaaggcgctgagatgagcaacaaaggcaaagatcagggcgtggtagtgaacaacgtgaagacgggcactccggctgcgcagatcggcctgaagaaaggtgatgtgattattggtgcgaaccagcaggcagtgaaaaacatcgctgaactgcgtaaagttctcgacagcaaaccgtctgtgctggcactgaacattcagcgcggcgacagcaccatctatctgttaatgcagtaa

SEQ ID NO: 470597 - DNA, 1518 bp, Shigella flexneri
atggcacagattgatttccgaaaaaaaataaactggcatcgtcgttaccgttcaccgcagggcgttaaaaccgaacatgagatcctgcggatcttcgagagcgatcgcgggcgtatcatcaactctccggcaattcgtcgtctgcaacaaaagacccaggtttttccactggagcgcaatgccgccgtgcgcacgcgtcttacccactcgatggaagtccagcaggtgggacgctacatcgccaaagaaattttaagccgtctgaaagagcttaaattgctggaagcatacggcctggatgaactgaccggcccctttgaaagcattgttgagatgtcatgcctgatgcacgatatcggcaatccgccgtttggtcattttggcgaagcagcgataaatgactggtttcgccaacgtttgcacccggaagatgccgaaagccagcctctgactgacgatcgctgcagcgtggcggcactacgtttacgggacggggaagaaccgcttaacgagctgcggcgcaagattcgtcaggacttatgtcattttgaggggaatgcacaaggcattcgtctggtgcatacattgatgcggatgaatctcacttgggcacaggttggcggtattttaaaatatacccgtccggcgtggtggcgtggcgaaacgcctgagacacatcactatttaatgaaaaagccgggttattatctttctgaagaagcctatattgcccgcttgcgtaaagaacttaatttggcgctttacagtcgttttccattaacgtggattatggaagctgccgacgacatctcctattgtgtggcagaccttgaagatgcggtagagaaaagaatatttaccgttgagcagctttatcatcatttgcacgaagcgtggggccagcatgagaaaggttcgctcttttcgctggtggttgaaaatgcctgggaaaaatcacgctcaaatagtttaagccgcagtacggaagatcagttttttatgtatttacgggtaaacaccctaaataaactggtaccctacgcggcacaacgatttattgataatctgcctgcgattttcgccggaacgtttaatcatgcattattggaagatgccagcgaatgcagcgatcttcttaagctatataaaaatgtcgctgtaaaacatgtgtttagccatccggatgtcgagcagcttgaattgcagggctatcgggtcattagcggattattagagatttatcgtcctttattaagcctgtcgttatcagactttactgaactggtagaaaaagaacgggtgaaacgtttccctattgagtcgcgcttattccacaaactctcgacgcgccatcggctggcctatgtcgaggctgtcagtaaattaccgtcagattctcctgagtttccgctatgggaatattattaccgttgccgcctgctgcaggattatatcagcggtatgaccgacctctatgcgtgggatgaataccgacgtctgatggccgtagaacaataa

SEQ ID NO: 470598 - DNA, 699 bp, Shigella flexneri
atgaaaatcggcatcattggtgcaatggaagaagaagttacgctgctgcgtgacaaaatcgaaaaccgtcaaactatcagtctcggcggttgcgaaatctataccggccaactgaatggaaccgaggttgcgcttctgaaatcgggcatcggtaaagtcgctgcggcgctgggtgccactctgctgttggaacactgcaagccagatgtgattattaacaccggttctgccggtggcctggcaccaacgctgaaagtgggcgatatcgttgtctcggacgaagcgcgttatcacgacgcggatgtcacggcatttggttatgaatacggtcagttaccaggctgtccggcaggctttaaagctgacgataaactgatcgctgccgctgaggcctgcattgccgaactgaatcttaacgctgtacgtggcctgattgttagcggcgacgctttcatcaacggttctgttggtctggcgaaaatccgccacaacttcccacaggccattgctgtagagatggaagcgacggcaatcgcccatgtctgccacaatttcaacgtcccgtttgttgtcgtacgcgccatctccgacgtggccgatcaacagtctcatcttagcttcgatgagttcctggctgttgccgctaaacagtccagcctgatggttgagtcactggtgcagaaactggcacatggctaa

SEQ ID NO: 470599 - DNA, 801 bp, Shigella flexneri
atggctaaatcactgttcagggcgctggtcgccctgtcttttctcgcgccactgtggctcaacgccgcgccgcgcgtcatcacgctttctcccgccaacactgaacttgcctttgccgccgggatcacgccggttggggtcagcagctattccgactatcctccacaagcgcaaaagattgagcaggtttccacctggcaggggatgaatctggaacgcattgtcgcgctgaaacccgatctggtgattgcctggcgtggaggtaatgccgagcggcaggttgaccagctggcttcgctgggaataaaagtgatgtgggtcgatgcgacaagcattgaacaaattgccaatgcgttacgtcaactggccccctggagtccgcaaccagacaaggccgaacaagccgcgcaatccctgctggatcagtacgtgcaattgaaagcgcaatatgctgataaacctaaaaaacgtgtttttctgcaattcggcattaatccgccatttaccagtggaaaagagtcgattcagaaccaggtactcgaagtttgtggcggagaaaacatctttaaagacagccgggttccctggccgcaagttagccgcgaacaggtgttagcacgctcgccacaggctattgtcattacaggcggaccggaccaaattcctaaaatcaaacaatactggggtgaacagctcaaaattcccgttattcctctcacgagtgactggtttgaacgtgcaagcccacgtattatcctcgcagcacaacagctctgtaatgcgctttcacaggtagattag

SEQ ID NO: 470600 - DNA, 624 bp, Shigella flexneri
atgctcgtctattggctggatatagtcggcacagcggtatttgccatctacggcgttttgttagccggaaaattgcgtatggacccttttggtgttctggtactgggcgtggttaccgcagtaggcgacggaacaattcgcgacatggcgctggatcacggcccggtattttgggtgaaagatcccaccgatctggtcgttgccatggtcaccagcatgctgaccatcgtgctggtgcgccagccaagacgcttaccaaaatggatgttgccggtgctggacgccgttggtctggcggtgtttgtcggcattggcgtgaataaagcctttaatgcggaagccggtccgttaatcgcggtttgtatgggcgtcattactggcgttggcggcgggatcattcgtgatgtactggtccgcgaaatccccatgattttacgtacagaaatctacgcaactgcctgtattatcggcggtattgtccacgctacggcttattacacattttccgtaccactggaaacagccagtatgatgggcatggtcgtgacgctattgattcggctggcggctattcgttggcatcttaagctaccgacgtttgcgctggatgagaatgggcgttga

SEQ ID NO: 470601 - DNA, 345 bp, Shigella flexneri
atgagtgatgacgtagcactgccgctggagtttaccgacgcagcagccaacaaagttaaaagcctgatcgctgacgaagataacccgaatctgaaattacgcgtgtatatcaccggtggcggttgcagcggcttccagtatggtttcacctttgatgatcaggtgaacgaaggcgatatgaccatcgaaaaacagggcgttggcctggtggttgatccgatgagcctgcaatatctggtcggcggttccgttgactacaccgaaggactggaaggttctcgtttcatcgtgaccaacccgaacgcgaaaagcacctgcggttgcggttcttcctttagcatctaa

SEQ ID NO: 470602 - DNA, 1422 bp, Shigella flexneri
atgaaaactgatactccctctttagaaacaccgcaggccgcgcgcctgcgacgcagacaactgattcgccaacttcttgagcgcgataaaaccccgttagccattttgtttatggcggcagtcgtcggcacgcttgtcgggctggctgcggttgcttttgacaaaggtgtcgcctggttgcagaaccaacgtatgggggcgctggtacatactgctgataattatccgctactgttaaccgtcgcttttctctgttcggcggtgctggcgatgttcggctactttttggtgcgcaaatacgcgcccgaagcagggggatcggggatcccggaaattgaaggggcgctggaagatcaacgtcctgttcgctggtggcgtgtattgccggtgaaattctttggcgggctggggacactcggcggaggcatggggctagggcgcgaaggaccaaccgtgcagatcggcggcaatatcagtcgcatggtgcttgatattttccgcctgaaaggtgatgaagctcgccatacgctgctggcaaccggtgctgctgcggggctggctgcggcctttaacgcgccgctggcgggtattttgtttattatcgaagagatgcgtccgcagtttcgctatacgttaatttcgattaaagcggtatttattggcgtcattatgtcgaccattatgtaccggatttttaatcatgaagttgcgttgattgacgtcggtaaactttctgatgcgccgcttaatacgctgtggctttatctgatcctcggtattatttttggcattttcggccctatttttaataaatgggtgctggggatgcaggatttgctgcaccgtgtgcacggcggcaatattaccaaatgggtactgatggggggtgcgattggcggtctgtgtggattgctggggtttgtggcaccagcaacgtcgggcggcggttttaacctgattcctatcgctaccgcggggaatttcagcatgggaatgctggtgtttatcttcgtcgctcgggtcattaccaccttactctgcttctcttccggcgcgccgggcggtatttttgccccgatgctggcgctgggtactgtgctgggaaccgctttcggaatggttgccgttgagctgtttccgcaatatcacctggaggcggggacgtttgctattgccggaatgggggcattactggcggcatctattcgcgcgccgttaacggggatcattctggttctggagatgaccgataactaccagctcattttgccaatgattattaccggtcttggcgcaacactattagcgcaatttaccggcgggaaacctctatactcggcgattcttgcgcgcacgctggcaaaacaggaagctgagcaactggcgcgaagcaaggccgcatcagccagcgagaatacttga

SEQ ID NO: 470603 - DNA, 1281 bp, Shigella flexneri
atgagtaagtctgaaaatctttacagcgcagcgcgcgagctgatccctggcggtgtgaactcccctgttcgcgcctttactggcgtgggcggcactccactgtttatcgaaaaagcggacggcgcttatctgtacgatgttgatggcaaagcctatatcgattatgtcggttcctgggggccgatggtgctgggccataaccatccggcgatccgcaatgccgtgattgaagccgccgagcgtggtttaagctttggtgcaccgaccgaaatggaagtgaaaatggcgcaactggtgaccgaactggtcccgaccatggatatggtgcgcatggtgaactccggcaccgaggcgacgatgagcgccatccgcctggcccgtggttttaccggtcgcgacaaaatcattaaatttgaaggttgttaccacggtcacgctgactgcctgctggtgaaagccggttctggcgcactcacgttaggccagccaaactcgccgggcgttccggcagatttcgccaaacataccttaacctgtacttataacgatctggcctctgtacgcgccgcgtttgagcaatacccgcaagagattgcctgtattatcgtcgagccggtggcaggcaatatgaactgtgttccgccgctgccagagttcctgccaggtctgcgtgcgctgtgcgacgaatttggcgcgttgctgatcatcgatgaagtgatgaccggtttccgcgtagcgctagctggcgcacaggattatttcgccgtagtgccagatttaacctgcctcggaaaaatcatcggcggtggaatgccggtaggcgcattcggtggtcgtcgtgatgtaatggatgcgctggccccgacaggtccggtctatcaggcgggtacgctttccggtaacccgattgcgatggcagcgggtttcgcctgtctgaatgaagtcgcgcagccgggcattcacgaaacgctggatgagctgacaacacgtctggcagaaggtctgctggaagcggcagaagaagcgggaattccgctggtcgttaaccacgtcggtggtatgttcggtatcttctttaccgacgccgagtccgtgacgtgctatcaggatgtgatggcctgtgacgtcgagcgttttaagcgtttcttccatatgatgctggatgaaggtgtttacctggcaccgtcagcgtttgaagcgggctttatgtctgtggcgcacagcatggaagatatcaataacaccatcgatgctgcacgtcgggtgttcgcgaagttgtga

SEQ ID NO: 470604 - DNA, 1983 bp, Shigella flexneri
gtgagtaaacgaattgcgcttttcccggcgttattgctggcgctgttagtgattgtcgctacggcgctcacctggatgaacttctcacaggcgctgccgcgcagtcagtgggcgcaggccgcctggtcgccggatattgacgtcatcgagcagatgatttttcactacagcttgttgccgcgtctggcgatttcgctgctggtgggcgcgggcctggggctggtgggcgtgctgtttcagcaagtactgcgtaacccgctggcggaaccgacgacgttgggcgttgcaacaggcgcgcaactggggattaccgtcaccacgctctgggcgatccctagcgcgatggcgagccagtttgctgcgctggcaggggcttgcgttgttggcttaattgtctttggcgtcgcgtgggggaaacggctgtcgccggtaacgctgattttcgcggggttggtagtgagcctttattgcggcgcaatcaatcagttactggttatcttccatcatgaccagttgcaaagcatgtttctgtggagcactggaacgctgacgcaaacccactggggcggtgttgagcgtttatggccgcagttgctgggcggtgtgatgctgacgttgctgctacttcgtccgttaaccctgatggggcttgatgatggcgtggcgcgcaatctcgggctggccttgtcgcttgcgcgtctggcggcgctgtcgctggcgattgtcatcagtgcgctgctggtgaacgctgtggggattatcggctttatcgggttgttcgcgccgctgctggcaaaaatgctgggggcgcggcgtctgctgccacgactgatgctggcgtcgttgattggtgcgctgatcctctggctttccgatcaaatcatcctctggctgactcgcgtgtggatggaagtgtccaccggttcggtcactgcgttgatcggtgcgccgctgctactgtggctgctgccgcgtttacgcagcattagcgcgccggatatgaaggttaacgatcgtgtcgcgactgaacgccaacatgtgctggcgtttgccctcgcgggcggcgtgctgttgttgatggctgtggtggtggcgctgtcgtttggtcgtgatgcgcacggctggacgtgggcgagcggggcgttgctcgaggatttaatgccctggcgctggccgcgaattatggcggcgctgtttgcgggcgtcatgctggcggtagcgggctgtattattcagcgactgaccggcaacccgatggcaagcccggaagtgctggggattagctccggcgcggcgtttggtgtggtgttaatgctgtttctggtaccgggtaatgcctttggctggttgttacccgcaggcagtctcggggcggcggtgacgctgttgatcattatgatcgccgccggacgcggtggattttccccacaccgcatgttactggcggggatggcgttaagtaccgcgttcaccatgcttttgatgatgttgcaggcaagtggtgacccgcgaatggcgcaagtgctgacctggatttccggttcgacctacaacgcgaccgatgctcaggtctggcgcaccggaattgtgatggtgattttgctggcgattactccgctgtgccgccgctggctgaccattttaccgctgggtggtgataccgcgcgggcggtagggatggcgctgacgccgacgcgaattgcgctgctgctgttagcggcttgcctgacggcgaccgcgacgatgactattggaccgttgagttttgttggtttaatggcaccgcatattgcgcggatgatgggctttcgacggacgatgccacacatcgtaatttcggcgctggtgggtggtttactgctggtgttcgctgactggtgtgggcggatggtgctgtttccattccagatcccggcggggctgctgtcgacctttatcggtgcgccatattttatctatttgctgagaaagcagagccgttaa

SEQ ID NO: 470605 - DNA, 891 bp, Shigella flexneri
atgagcggcttacctcttatttcgcgccgtcgactgttaacggcgatggcgctttctccgttgttatggcagatgaataccgcccacgcggcggctattgaccccaatcgtattgtggcgctggagtggttgccggtggaattactgctggcgctcggcatcgtgccttacggcgtggcggataccatcaactatcgcctgtgggtcagcgaaccaccattgccggactcagtgattgacgtcggtttgcgtacagaacctaaccttgaactgatgaccgaaatgaaaccgtcgtttatggtctggtcggcaggatatggcccttcatcagaaatgctggcacgtattgcgccgggtcgcggatttaacttcagtgacggcaaacatccgttggcgatggcgcgtaaatcgctgacggaaatggcagatttacttaacctgcaaagcgcagcggaaacgcatttagcgcaatacgaagactttatccgcagcatgaaaccccgctttgtgaagcgtggtgcacgcccgttactgctgacgacgcttatcgatccgcgccatatgctggtcttcggtccaaacagcttgttccaggaaattctcgatgagtacggcatcccaaatgcctggcaaggggaaaccaacttctggggcagtaccgccgtcagtatcgatcgtctggcagcgtataaagacgttgatgtgctctgttttgatcacgacaacagcaaagacatggatgcgctaatggcaaccccgctgtggcaggccatgccgtttgtccgtacagggcgctttcagcgcgtacccgcagtctggttttatggtgcaacgctttcggcaatgcactttgtgcgtgttctggataacgccatcggaggtaaagcgtga

SEQ ID NO: 470606 - DNA, 798 bp, Shigella flexneri
atgcaggaatacacgaatcattccgataccacttttgcactgcgtaatatctcctttcgtgtgcccgggcgcacgcttttgcatccgctgtcgttaacctttcctgccgggaaagtgaccggtctgattggtcacaacggttctggtaaatccactctgctcaaaatgcttggtcgtcatcagcctccgtcagaaggggagattcttcttgatgcccagccgctggaaagctggagcagcaaagcgtttgcccgcaaagtggcttatttgccgcagcagcttcctccggcagaagggatgaccgtgcgtgaactggtggcgattggtcgttacccgtggcatggcgcgctggggcgctttggtgcggcagatcgcgaaaaggtcgaggaagctatctcgctggttggcttaaaaccgctggcgcatcggctggtcgatagtctctctggcggcgaacgtcagcgggcgtggatcgccatgctggtggcgcaggatagccgttgtctgttgctcgacgaaccgacttcagcgctggatatcgcccaccaggttgatgtgctggcgctggtgcaccgtttaagtcaggaacgtggcctgacggtcattgccgtgttgcacgatatcaatatggcggcacgctactgtgattatctggtcgccctgcgcagtggtgaaatgattgctcagggaacgcctgcggaaattatgcgcggcgaaaccctcgaaatgatttatggcatcccgatgggtattttgccgcatccggcgggtgctgcacctgtgagttttgtttattga

SEQ ID NO: 470607 - DNA, 2244 bp, Shigella flexneri
atggcgcgttccaaaactgctcagccaaaacactcactgcgtaaaatcgcagttgtagtagccacagcggttagcggcatgtctgtttatgcacaggcagcggttgaaccgaaagaagacactatcaccgttaccgctgcacctgcgccgcaagaaagcgcatgggggcctgctgcaactattgcggcgcggcagtcagctaccggcactaaaaccgatacgccgattcaaaaagtgccacagtctatttctgttgtgaccgccgaagagatggcgctgcatcagccgaagtcggtaaaagaagcgcttagctacacgccgggtgtctctgttggtacgcgtggcgcatccaacacctatgaccacctgatcattcgcggttttgcggcagaaggccaaagccaaaataactatctgaatggcctgaagttgcagggcaacttctataacgatgcggtcattgacccgtatatgctggaacgcgctgaaattatgcgtggcccggtttccgtgctttacggtaaaagcagtcctggcggtctgttgaatatggtcagcaagcgtccgaccaccgaaccgctgaaagaagttcagtttaaagccggtactgacagcctgttccagactggttttgactttagcgatgcgttggatgatgacggtgtttactcttatcgcctgaccggtcttgcgcgttctgccaatgcccagcagaaagggtcagaagagcagcgttatgctattgcaccggcgttcacctggcgtccggatgataaaaccaatttcaccttcctttcttacttccagaacgagccggaaaccggttattacggctggttgccgaaagagggaaccgttgagccgctgccgaacggtaagcgtctgccgacagactttaatgaaggggcgaagaacaacacctattctcgtaatgagaagatggtcggctacagcttcgatcacgaatttaacgacacctttactgtgcgtcagaacctgcgctttgctgaaaacaaaacctcgcaaaacagcgtttatggttacggcgtctgctccgatccggcgaatgcttacagcaaacagtgtgcggcattagcgccagcggataaaggccattatctggcacgtaaatacgtcgttgatgatgagaagctgcaaaacttctccgttgatacccagttgcagagcaagtttgccactggcgatatcgaccacaccctgctgaccggtgtcgactttatgcgtatgcgtaatgacatcaacgcctggtttggttacgacgactctgtgccactgctcaatctgtacaatccggtgaatcccgatttcgacttcaatgccaaagatccggcaaactccggcccttaccgcattctgaataaacagaaacaaacgggcgtttatgttcaggatcaggcgcagtgggataaagtgctggtcaccctaggcggtcgttatgactgggcagatcaagaatctcttaaccgcgttgctgggacgaccgataaacgtgatgacaaacagtttacctggcgtggtggtgttaactacctgtttgataatggtgtaacaccttacttcagctatagcgaatcgtttgaaccttcttcgcaagttgggaaggatggtaatattttcgcaccgtctaaaggtaagcagtatgaagtcggcgtgaaatatgtaccggaagatcgtccgattgtagttactggtgccgtgtataatctcactaaaaccaacaacctgatggcggaccctgagggttccttcttctcggttgaaggtggcgagatccgcgcacgtggcgtagaaatcgaagcgaaagcggcgctgtcggcgagtgttaacgtagtcggttcttatacttacaccgatgcggaatacaccaccgatactacctataaaggcaatacgcctgcacaggtgccaaaacacatggcttcgctgtgggctgactataccttctttgacggtccgctttcaggtctgacgctgggcaccggtggtcgttatactggctccagctatggtgatccggctaactcctttaaagtgggaagttatacggtcgtggatgcgttagtgcgttatgatctggcgcgagtcggcatggcgggctccaacgtggcgctgcatgttaacaacctgttcgatcgtgaatacgtcgccagctgctttaacacttatggctgcttctggggcgcagaacgtcaggtcgttgcaaccgcaacctttcgtttctaa

SEQ ID NO: 470608 - DNA, 2535 bp, Shigella flexneri
atggccgggaatgaccgcgagccaattggacgcaaagggaaactgacgcgtccggtcaaacaaaaggtaagccgtcgtcgttacgaagatgacgatgattacgacgattatgatgactatgaggatgaagaaccgatgccgcgcaaaggtaagggcaaaggcaaagggcgtaagcctcgtggcaaacgcggctggctatggctactgctaaaactggctatcgtttttgccgtgctgatcgccatttacggcgtttatctcgatcaaaaaattcgtagccgtattgatggcaaggtctggcaactgcccgcggcagtttatggccgaatggtcaaccttgaaccagatatgaccatcagcaagaacgaaatggtgaagctgctggaggcaacacagtatcgtcaggtgtcgaaaatgacccgtcctggcgaatttaccgtgcaggccaacagcattgagatgatccgccgtccgtttgatttcccggacagtaaagaagggcaggtgcgtgcgcgtctgacctttgatggtgatcatctggcgaccatcgtcaatatggagaacaaccgtcagttcggtttcttccgtcttgatccgcgtctgatcaccatgatctcctcgccaaacggtgagcagcgtttgtttgtgccgcgcagtggtttccctgatttgctggtggatactttgctggcgacagaagaccgtcatttttacgagcatgatggaatcagtctctactccattgggcgtgcggtgctggcaaacctgaccgcaggtcgcacggtgcagggtgcgagtacgctgacgcaacagctggtgaaaaacctgttcctctccagcgagcgttcttactggcgtaaagcgaacgaagcttacatggcgctgatcatggacgcgcgttacagcaaagaccgtattcttgagctgtatatgaacgaggtgtatctcggtcagagcggcgacaacgaaatccgcggcttcccgctggcaagcttgtattactttggtcgcccggtagaagagctaagcctcgaccagcaggcgctgttagtcggtatggtgaaaggggcgtccatctacaacccgtggcgtaacccgaaactggcgctggagcgacgtaatctggtgctgcgtctgctgcaacagcaacagattattgatcaagaactctatgacatgttgagtgcccgtccgctgggggttcagccgcgtggtggggtgatctctcctcagccagcctttatgcagctggtgcgtcaggagttgcaggcaaaactgggcgataaggtaaaagatctctccggcgtgaagatcttcactacctttgactcggtggcccaggacgcggcagaaaaagccgccgtggaaggcattccggcactgaagaaacagcgtaagttgagcgatcttgaaactgcgattgtggtcgtcgaccgctttagtggtgaagttcgtgcgatggtcggaggttctgagccgcagtttgcgggctacaaccgtgcgatgcaggcgcgtcgttcgattggttcccttgcaaaaccagcgacttatctgacggctttaagccagccgaaaatctatcgcctgaacacgtggattgccgatgcgccaatcgcgctgcgtcagccgaatggccaggtctggtcaccgcagaacgatgaccgtcgttatagcgaaagcggcagagtgatgctggtggatgcgttgacacgttcgatgaacgtgccgacggtaaatctggggatggcgctggggctgcctgcggttacggagacctggatcaaactgggcgtaccgaaagatcagttgcatccggttccggcaatgctgctgggggcgttgaacttaacgccaatcgaagtggcgcaggcattccagaccatcgccagcggtggtaaccgtgcaccgctttctgcactgcgttcggtaatcgcggaagatggtaaggtgctgtatcagagcttcccgcaggcagaacgcgctgttccggcgcaggcggcgtatctgacactatggaccatgcagcaggtggtacaacgtggtacgggtcgtcagcttggggcgaaatacccgaacctgcatctggcagggaaaacagggactaccaacaataacgtagatacctggtttgcaggcattgacggcagcacggtgaccatcacctgggtaggccgtgataacaaccagccgaccaaactgtatggagccagcggggcaatgtcgatttatcagcgttatctggctaaccagacgccaacgccgctgaatcttgttccgccagaagatattgcagatatgggcgtggactacgacggcaactttgtttgcagcggtggcatgcgtgtcttgccggtctggaccagcgatccgcaatcgctgtgccagcagagcgagatgcagcagcagccgtcaggcaatccgtttgatcagtcttctcagccgcagcaacagccgcaacagcaacctgctcagcaagagcagaaagacagcgacggtgtagccggttggatcaaggatatgtttggtagtaattaa

SEQ ID NO: 470609 - DNA, 2430 bp, Shigella flexneri
gtgtcgtcgttgcccgttgctgccgtcttacctgaattacttaccgctctcgattgtgcgccgcaggtattattaagtgcgccgaccggggccgggaaatcaacctggctgccgctgcaactgctggcgcatcccggcattaacgggaaaattatcctgctggagccgcgtcgtctggcggcgcgtaacgtcgcgcaacggctggcggagctgcttaacgaaaagccaggcgataccgttggctaccggatgcgtgcgcaaaactgcgtcgggctgaatacccgcctggaagtggttaccgaaggcgtgctgacgcggatgatccagcgtgacccggaactgagcggtgttggattggtgatccttgatgagtttcatgagcgcagtttgcaggcggatttggcgttggcgctgttactcgatgtgcaacaaggtctgcgtgatgaccttaaactgctgattatgtcggctacgctggacaatgaccgcttgcagcaaatgctgccggaagcgcccgtcgtcatctcagaagggcgctcgtttccggttgaacgccgttatttaccgctgcccgcgcatcagcgttttgacgaagccgttgcggtagccaccgccgaaatggtgcgtcaggaaagtggatcattactgttatttttacctggcgtcggagaaattcagcgcgtgcaggaacaactggcttcgcgcatcggcagtgatgtggtgctctgcccgctgtatggcgtgttgtcactgaacgatcagcgaaaagcgatcctcccggcaccgcaagggatgcgcaaagtggtgctggcgaccaatattgctgaaaccagtttaaccatcgaaggtattcgtctggtggtggattgtgcccaggagcgtgtggcgcgctttgatccgcgcacggggcttacgcggttgattactcaacgcgttagtcaggcatccatgacgcagcgtgccgggcgcgccgggcgtctggagccgggtatcagcctgcatttaatcgccaaagaacaagcagaacgcgccgcggcgcaaagtgagccggagatcttacaaagcgatctttccggtttgctgatggaattactgcaatggggatgcagcgatccggcgcagatgagctggctggatcaaccgccaacggtgaatctactggccgcgaaacgcctgttacaaatgctgggggcgctggagggtgaacggcttagtgcgcaagggcaaaaaatggcagcgctgggtaacgatccgcgtttagcggcaatgctggttaacgcaaagagcgatgacgaagctgctaccgcggcaaaaattgccgccattctcgaagagccgccacggatgggcaatagtgacctgggcgtggcgttttcgcgcaatcaaccagcctggcagcaacgtagtcagcaactgttaaaacgcttaaacgtacgcggcggtgaggcagacagttcgcttatcgcgccgctacttgccggggcgtttgccgatcgcattgctcatcgccgtgggcaagatggacgctatcaactggcaaacagcatgggagcgatgctcgatgccgacgacgcgctaagccgccacgaatggttgatcgcaccgttattattgcagggtagcgcctcgccggatgcgcggattttactggcgctaccggtcgatattgatgaattagtacaacgctgtccgcagctggtgcagcaatctgacaccgtggaatgggatgacgcgcaaggtacgctgaaagcctggcgtcggctacaaatcggtcagttgacggtgaaagtgcagccgctggcgaaaccgtcagaagacgagttgcatcaggcgatgcttaatggcatccgtgataaaggtttaagcgtgctcaactggacggcggaagcggaacagctacgcttgcgtttgttatgcgccgcaaagtggttgccggaatatgactggccagcggttgatgatgaaagtttgttggcgacgctggaaacgtggctgctgccacatatgaccggcgtacattcactacgcggcctgaaatcactcgacatttatcaggcactacgcggattacttgattggggaatgcagcaacgtctggatagtgaattgcctgcgcattacactgtgccgacgggaagccggatcgccattcgttatcatgaagataacccgcccgcgctggcggtgagaatgcaggagatgtttggtgaggccactaatccgacgatcgcccaggggcgcgtgccgctggtgctgaagttgctttcccctgcccaaaggccgctgcaaatcacgcgtgatttgggggccttctggaaaggggcgtatcgtgaggtgcaaaaggagatgaaagggcgttatcccaaacacgtctggccggacgacccggcaaacacggcaccgacgcgacggacgaaaaagtattcgtaa

SEQ ID NO: 470610 - DNA, 531 bp, Shigella flexneri
atgtctgaaccgcaacgtctgttctttgctatcgacttacctgcagaaatccgcgaacagattatccattggcgcgccacacacttcccacctgaggcgggacgtccggtcgccgccgataatttgcacctgactctggcatttttaggcgaagtgagcgcagagaaagagaaggcgctttctcttttagccggacggattcgtcaacctggtttcacactcacgcttgatgacgccggacaatggctgcgttcgcgtgtggtgtggttagggatgcgtcagcctccacgcggcttaatccagctggcgaatatgctccgttcacaggctgcccgcagcggttgttttcaaagcaatcgtccgtttcatccacatattaccttattgcgcgacgccagcgaggcggtgacattcccgccgccgggttttaactggtcttatgcggtgacggagttcaccctttacgcctcctcgtttgcccgtggacgcacacgctacacgccgctaaaacgctgggcgctaacgcaataa

SEQ ID NO: 470611 - DNA, 705 bp, Shigella flexneri
atggaattttctccccctctacagcgcgcgacgctaattcagcgttacaaacgttttttagccgatgtgatcacacccgatggtcgcgaattaacgctacactgcccgaatacgggtgcgatgaccggttgtgcaacgcctggcgataccgtctggtattcgacttcagacaacaccaaacggaaatacccacacacctgggaattaactcaaagccagagcggcgcatttatttgcgtcaatacgctttgggctaacaggttgacgaaagaggctatccttaatgaatcaatttcagaactgtcaggctatagctcgctgaaaagcgaagtaaaatacggctccgaacgcagccgtattgactttatgttgcaggcggattcgcgtccagactgctatattgaagtgaaatcggttacgttagcggagaacgaacagggatattttcccgatgcggtcactgaacgaggtcagaaacaccttcgggagttgatgagcgtagcggctgaaggccagcgtgcggttatttttttcgccgtgctgcattcagccattacacggttttcacccgcgcgccacatcgatgagaaatacgcgcaactattgtcagaagctcaacagaggggggtagaaattctggcttacaaagcggaaatttctgctgaaggcatggctcttaaaaaatcactgccggttacattgtag

SEQ ID NO: 470612 - DNA, 456 bp, Shigella flexneri; identical to SEQ ID NO: 457759

SEQ ID NO: 470613 - DNA, 927 bp, Shigella flexneri
atgctcccgccttattttttgttcaaagagatgacagacacacagtatattggccgcttcgccccctctccttccggcgagcttcattttggctctctgatcgccgcgctcggcagctatttgcaggctcgcgcccggcaaggtcgctggctggtacgcatagaagatatcgacccgcctcgtgaagttcccggtgccgcagaaactatcctgcgccagctggaacattacggtctgcactgggacggcgatgttctctggcaatcgcaacgtcacgacgcctatcgtgaagcactcgcctggttacatgaacaaggactaagttattactgcacctgtacgcgtgcgcgtattcaaagcattggcggtatttacgacggtcattgccgggtgttgcatcatggaccagacaacgccgcagtgcgtatccgccagcagcatccggtcacgcaatttactgacctgctgcgaggcattattcacgccgacgaaaaactggcacgggaagattttatcattcatcgccgtgatgggttgttcgcctacaacctggctgttgtggttgatgatcatttccagggcgttacagaaatagtgcgtggggctgatctgattgaaccaacagtaaggcaaatcccgctgtaccagctttttggctggaaagtgccagattacattcatctgccgctggcgcttaatccacaaggcgctaaactttccaagcagaatcatgcgcctgcgttgccgaaaggcgatccacgcccggtactaatcgcggcacttcaatttctggggcagcaggcagaagcacactggcaggatttcagcgtcgagcaaatccttcagtcagccgtcaaaaactggatgctgaccgccgtgcccgagtcggcaattgtaaattcaacattctcaaatgcgtcatgctga

SEQ ID NO: 470614 - DNA, 1365 bp, Shigella flexneri
gtgctaagccgcgaggaaagcgaggctgaacaggcagtcgcccgtccacaggtgacggtgatcccgcgtgagcagcatgctatttcccgcaaagatatcagtgaaaatgccctgaaggtaatgtacaggctcaacaaagcgggatacgaagcctggctggttggcggcggcgtgcgcgacctgttacttggcaaaaagccgaaagattttgacgtaaccactaacgccacgcctgagcaggtgcgcaaactgttccgtaactgccgcctggtgggtcgccgtttccgtctggctcatgtaatgtttggcccggagattatcgaagttgcgaccttccgtggacaccacgaaggtaacgtcagcgaccgcacgacctcccaacgcgggcaaaacggcatgttgctgcgcgacaacattttcggctccatcgaagaagacgcccagcgccgcgatttcactatcaacagcctgtattacagcgtagcggattttaccgtccgtgattacgttggtggtatgaaggatctgaaggacggcgttatccgtctgattggtaacccggaaacgcgctaccgtgaagatccggtacgtatgctgcgcgcggtacgttttgccgccaaattgggtatgcgcatcagcccggaaaccgcagaaccgatccctcgcctcgctaccctgctgaacgatatcccaccggcacgcctgtttgaagaatcgcttaaactgctacaagcgggctacggttacgaaacctataagctgttgtgtgaatatcatctgttccagccgctgttcccgaccattacccgctacttcacggaaaatggcgacagcccgatggagcggatcattgaacaggtgctgaagaataccgatacgcgtatccataacgatatgcgcgtgaacccggcgttcttgtttgccgccatgttctggtacccactgctggagacggcacagaagatcgcccaggaaagcggcctgacctatcacgacgctttcgcgctggcgatgaacgacgtgctggacgaagcctgccgttcactggcaatcccgaaacgtctgacgacgttaacccgcgatatctggcagttgcagttgcgtatgtcccgtcgtcagggtaaacgcgcatggaaactgctggagcatcctaagttccgtgcggcttatgacctgttggccttgcgagctgaagttgaacgtaatgctgaactgcagcgtctggtgaaatggtggggtgagttccaggtttccgcaccaccagatcaaaaagggatgcttaacgagctggatgaagaaccgtcaccgcgtcgtcgtactcgtcgtccacgcaaacgcgcaccgcgtcgtgagggtaccacatga

SEQ ID NO: 470615 - DNA, 480 bp, Shigella flexneri
atgacagtggcgtatattgccataggcagcaatctggcctctccgctggagcaggtcaatgctgccctgaaagcattaggcgatatccctgaaagccgcattcttgccgtttcttcgttttaccgcaccccaccgctggggccgcaagatcaacccgattacctcaacgccgccgtggcgcttgaaacttcgcccgccccggaagagttactcaaccatacacagcgcatagaactgcaacagggtcgtgttcgtaaagctgaacgctggggaccacgcacgctggatctcgatatcatgctgtttggtaatgaagtgataaataccgaacgcctgaccgttccgcactacgatatgaagaatcgtggatttatgctgtggccgctgtttgagattgcaccggagctggcgtttcctgatggggagacgttgcgtgaagtcttacatacaagagcatttgacaaattaagcaaatggtaa

SEQ ID NO: 470616 - DNA, 459 bp, Shigella flexneri
atgttccggggagcaacgttagtcaatctcgacagcaaagggcgcttatcagtgcctacccgttatcgggaacagctgcttgagaacgctgccggtcaaatggtttgcaccattgacattcatcacccgtgcctgctgctttaccccctgcctgaatgggaaattatcgagcaaaaattatcgcgtctgttgagcatgaacccggttgagcgccgtgtgcagcgcctactgttaggtcatgccagcgaatgtcagatggatggcgcaggtcgattgttaatcgcgccagtactgcggcaacatgccgggctgacaaaagaagtgatgctggttggacagttcaacaagtttgagctgtgggatgaaacaacctggcatcaacaggtcaaggaagatatcgacgcagagcagttggctaccggagacttatcggagcgactgcaggacttgtctctataa

SEQ ID NO: 470617 - DNA, 942 bp, Shigella flexneri
atgatggaaaactataaacatactacggtgctgctggatgaagccgttaatggcctcaatatccgtcctgatggcatctacattgatgggacttttggtcgcggtggtcactcacgtctgatcctctcgcagcttggcgaagaggggcgtttgctggcgatcgatcgcgacccgcaggctatcgccgttgcgaagactattgatgatccgcgcttctccatcatccacggacctttctccgcgctgggcgaatacgttgccgagcgcgatcttattggcaagatcgacggcattctcctcgatcttggcgtctcttcaccgcaacttgatgatgctgaacgcggcttttcctttatgcgcgatggtccgctggacatgcgtatggacccaacccgtgggcagtcagccgctgaatggctacaaaccgcagaagaagccgatatcgcctgggtattgaaaacctatggtgaagagcattttgccaaacgcattgcccgcgccattgtcgagcgtaaccgcgaacagccgatgacccgcaccaaagaactggcggaagtcgtggctgctgcaacgccggtgaaagataagtttaaacatcccgcgacccgtaccttccaggcggtgcgcatttgggtaaacagtgaactggaggagatagagcaggcgctaaaaagctcgctcaacgtgctggccccgggtgggcggctttcgatcatcagcttccactcgctggaagaccgtattgtgaaacgttttatgcgtgaaaacagccgcggtccgcaagttccggcagggttaccgatgactgaagagcagctcaaaaaactgggtggccgtcagctgcgagcactaggcaagttaatgccgggcgaagaagaggtggctgagaaccctcgtgcccgtagttcagttctgcgtattgcagagaggacgaacgcatga

SEQ ID NO: 470618 - DNA, 366 bp, Shigella flexneri
atgatcagcagagtgacagaagctctaagcaaagttaaaggatcgatgggaagccacgagcgccatgcattgcctggtgttatcggtgacgatcttttgcgatttgggaagctgccactctgcctgttcatttgcattattttgacggcggtgaccgtggtaaccacggtgcaccatacccgtttactgaccgctcagcgcgaacaactggtgctggagcgagatgctttagacattgaatggcgcaacctgatccttgaagagaatgcgctcggcgaccatagccgggtggaaaggatcgccacggaaaagctgcaaatgcagcatgttgatccgtcacaagaaaatatcgtagtgcaaaaataa

SEQ ID NO: 470619 - DNA, 1767 bp, Shigella flexneri
atgaaagcagcggcgaaaacgcagaaaccaaaacgtcaggaagaacatgccaactttatcagttggcgttttgcgttgttatgcggctgtattctcctggcgctggcttttctgctcggacgcgtagcgtggttacaagttatctccccggatatgctggtgaaagagggcgacatgcgttctcttcgcgttcagcaagtttccacctcccgcggcatgattactgaccgttctggtcgcccgttagcggtgagcgtgccggtaaaagcgatttgggctgacccgaaagaagtgcatgacgctggcggtatcagcgtcggtgaccgctggaaggcgctggctaacgcgctcaatattccgctggatcagctttctgcccgcattaacgccaacccgaaagggcgctttatttatctggcgcgtcaggtaaactctgacatggcggactacatcaaaaaactgaaactgccggggattcatctgcgtgaagagtctcgccgttactatccgtccggcgaagtgactgctcacctcatcggctttactaacgtcgatagtcaagggattgagggcgttgagaagagtttcgataaatggcttaccgggcagccgggtgagcgcattgtgcgtaaagaccgctatggtcgcgtaattgaagatatttcttctactgacagccaggcagcgcacaacctggcgctgagtattgatgaacgcctgcaggcgctggtttatcgcgaactgaacaacgcggtggcctttaacaaggctgaatctggtagcgccgtgctggtggatgtcaacacaggtgaagtgctggcgatggctaacagcccgtcatacaaccctaacaatctgagcggcacgccgaaagaggcgatgcgtaaccgtaccatcaccgacgtgtttgaaccgggctcaacggttaaaccgatggtggtgatgaccgcgttgcaacgtggcgtggtgcgggaaaactcggtactcaataccattccttatcgaattaacggccacgaaatcaaagacgtggcacgctacagcgaattaaccctgaccggggtattacagaagtcgagtaacgtcggtgtttccaagctggcgttaacgatgccgtcctcagcgttagtagatacttactcacgttttggactgggaaaagcgaccaatttggggttggtcggagaacgcagtggcttatatcctcaaaaacaacggtggtctgacatagagagggccaccttctctttcggctacgggctaatggtaacaccgttacagttagcgcgagtctacgcaactatcggcagctacggcatttatcgcccactgtcgattaccaaagttgaccccccggttcccggtgaacgtgtcttcccggaatccattgttcgcaccgtggtgcatatgatggaaagcgtggcgctaccaggcggcggcggcgtgaaggcggcgattaaaggctatcgtatcgccattaaaaccggtaccgcgaaaaaggtcgggccggacggtcgctacatcaataaatatattgcttataccgcaggcgttgcgcctgcgagtcagccgcgcttcgcgctggttgttgttatcaacgatccgcaggcgggtaaatactacggcggcgccgtttccgcgccggtctttggtgccatcatgggcggcgtattgcgtaccatgaacatcgagccggatgcgctgacaacgggcgataaaaatgaatttgtgattaatcaaggcgaggggacaggtggcagatcgtaa

SEQ ID NO: 470620 - DNA, 1488 bp, Shigella flexneri
gtggcagatcgtaatttgcgcgaccttcttgctccgtgggtgccagacgcaccttcgcgagcactgcgagagatgacactcgacagccgtgtggctgcggcgggcgatctctttgtagctgtagtaggtcatcaggcggacgggcgtcgatatatcccgcaggcgatagcgcaaggtgtggctgccattattgcagaggcgaaagatgaggcgaccgacggtgaaatccgtgaaatgcacggcgtaccggtcatctatctcagccagctcaacgagcgtttatctgcactggcgggccgcttttaccatgaaccctctgacaatttacgtctcgtaggcgtaacgggcaccaacggcaaaaccacgacgacccagcttctggcgcagtggagccaactgcttggcgaaaccagcgcggtaatgggcaccgttggtaacggtctgctggggaaagtgatcccgacagaaaatactaccggttcggcagttgatgttcagcatgagctggcggggctggtggatcagggcgcgactttttgcgcaatggaagtttcctcccacgggctggtacagcaccgtgtggcggcattgaaatttccggcgtcggtctttaccaacttaagccgcgatcaccttgattatcatggtgatatggaacactacgaagctgcgaaatggctgctttattctgaacatcattgcggtcaggcgattattaacgccgacgatgaagtgggccgccgctggctggcaaaactgccggacgcggttgcggtatcaatggaagatcatatcaatccgaactgtcacggacgctggttgaaagcgaccgaagtgaactatcacgacagcggcgcgaccattcgctttagttcaagctggggcgatggcgaaattgaaagccatctgatgggcgcttttaacgtcagcaacctgttgctcgcgctggcaacactgctggcgctgggctatccactggctgatctgctgaaaaccgccgcgcgtctgcaaccggtttgcggacgtatggaagtgttcactgcgccaggcaaaccgacggtggtggtggattacgcgcatacgccggatgcactggaaaaagccttacaggcggcgcgcctgcactgtgcgggcaagctgtggtgcgtctttggctgtggtggcgatcgcgataaaggtaagcgtccactgatgggcgcaattgccgaagagtttgctgacgtggcggtggtgacggacgataacccgcgtaccgaagaaccgcgtgccatcatcaacgatattctggcgggaatgttagatgccggacatgccaaagtgatggaaggccgtgctgaagcggtgacttgcgccgttatgcaggctaaagagaatgatgtggtactggtcgcgggcaaaggccatgaggattaccagattgttggcaatcagcgtctggactactccgatcgcgtcacggtggcgcgtctgctgggggggattgcatga

SEQ ID NO: 470621 - DNA, 1359 bp, Shigella flexneri
atgattagcgtaacccttagccaacttaccgatattctcaacggtgaactgcaaggtgcagatatcacccttgatgctgtaaccactgatacccgaaaactgacgccgggctgcctgtttgttgccctgaaaggtgaacgttttgatgcccacgattttgccgaccaggcgaaagctggcggcgcaggcgcactactggttagccgtccgctggacatcgacctgccgcagttaatcgtcaaggatacgcgtctggcgtttggtgaactggctgcatgggttcgccagcaagttccggcgcgcgtggttgctctgacggggtcctccggcaaaacctccgttaaagagatgacggcggcgattttaagccagtgcggcaacacgctttatacggcaggcaatctcaacaacgacatcggtgtaccgatgacgctgttgcgcttaacgccggaatacgattacgcagttattgaacttggcgcgaaccatcagggcgagattgcctggactgtgagtctgactcgcccggaagcggcgctggtcaacaacctggcagcggcgcatctggaaggttttggctcgcttgcgggtgtcgcgaaagcgaaaggtgaaatctttagcggcctgccggaaaacggtatcgccattatgaacgccgacaacaacgactggctgaactggcagagcgtaattggctcacgcaaagtgtggcgtttctcacccaatgccgccaacagcgatttcaccgccaccaatatccatgtgacctcgcacggtatggaatttaccctacaaaccccaaccggtagcgtcgatgttctgctgccgttgccggggcgtcacaatattgcgaatgcgctggcagccgctgcgctctccatgtccgtgggcgcaacgcttgatgctatcaaagcggggctggcaaatctgaaagctgttcctggccgtctgttccccatccaactggcagaaaaccagttgctgctcgacgactcctacaacgccaatgtcggttcaatgaccgcagctgttcaggtactggctgaaatgccgggctaccgcgtgctggtggtgggcgatatggcggaactgggcgctgaaagcgaagcctgccatgtacaggtgggtgaggcggcaaaagctgctggtattgaccgcgtgttaagcatgggtaaacaaagccatgctatcagcaccgccagcggcgttggcgaacattttgctgataaaactgcgttaattacgcgtcttaaatcactgattgctgagcaacaggtaattacgattttagttaagggttcacgtagtgctgccatggaagaggtagtacgcgctttacaggagaatgggacatgttag

SEQ ID NO: 470622 - DNA, 1083 bp, Shigella flexneri
atgttagtttggctggccgaacatttggtcaaatattattccggctttaacgtcttttcctatctgacgtttcgcgccatcgtcagcctgctgaccgcgctgttcatctcattgtggatgggcccgcgcatgattgctcatttgcaaaaactttcctttggtcaggtagtgcgtaacgacggtcctgaatcacacttcagcaagcgcggtacgccgaccatgggcgggattatgatcctgacagcgattgtgatctccgtgctgctgtgggcttacccgtccaatccgtacgtctggtgcgtgttggtggtgctggtaggttacggtgttattggctttgttgatgattatcgcaaagtggtgcgtaaagacaccaaagggttgatcgctcgttggaaatatttctggatgtcggtcattgcgctgggtgttgctttcgctttgtaccttgccggcaaagacacgcccgcaacgcagctggtggtcccattctttaaagatgtgatgccgcaactggggctgttctacattctgctggcttacttcgtcattgtgggtactggcaacgcggtaaacctgaccgatggtcttgacggtctggcaattatgccgaccgtatttgtcgccggtggttttgcgctggtggcgtgggcgaccggcaacatgaactttgccagctatttacacataccgtatctgcgacacgccggggaactggttattgtctgtaccgcgatagtcggggcaggactgggcttcctgtggtttaacacctatccggcgcaggtctttatgggcgatgtcggttcgctggcgttaggtggtgcgttaggcattatcgccgtactgctacgtcaggaattcctgctggtgattatggggggcgtgttcgtggtagaaacgctttctgtcatcctgcaggtcggctcctttaaactgcgcggacaacgtattttccgcatggcaccgattcatcaccactatgaactgaaaggctggccggaaccgcgcgtcattgtgcgtttctggattatttcgctgatgctggtcctgattggtctggcaacgctgaaggtacgttaa

SEQ ID NO: 470623 - DNA, 1317 bp, Shigella flexneri
atggctgattaccagggtaaaaatgttgtcattatcggcctgggcctcaccgggctttcctgcgtggactttttcctcgctcgcggtgtgacgccgcgcgttatggatacgcgtatgacaccgcctggcctggataaattacccgaagccgtagaacgccacacgggcagtctgaatgatgaatggctgatggcggcagatctgattgtcgccagtcccggtattgcactggcgcatccatccttaagcgctgccgctgatgccggaatcgaaatcgttggcgatatcgagctgttttgtcgcgaagcacaagcaccgattgtggcgattaccggttctaacggcaaaagcacggtcaccacgctagtgggtgaaatggcgaaagcggcgggggttaacgttggtgtgggtggcaatattggcctgcctgcgttgatgctactggatgatgagtgtgaactgtacgtgctggaactgtcgagcttccagctggaaaccacctccagcttacaggcggtagcagcgaccattctgaacgtgactgaagatcatatggatcgctacccgtttggtttacaacagtatcgtgcagcaaaactgcgcatttacgaaaacgcgaaagtttgcgtggttaatgctgatgatgccttaacaatgccgattcgcggtgcggatgaacgctgcgtcagctttggcgtcaacatgggtgactatcacctgaatcatcagcagggcgaaacctggctgcgggttaaaggcgagaaagtgctgaatgtgaaagagatgaaactttccgggcagcataactacaccaatgcgctggtggcgctggcgctggcagatgccgcagggttaccgcgcgccagcagcctgaaagcgttaaccaccttcaccggtctgccgcatcgctttgaagtggtgctggagcataacggtgtgcgctggattaacgattcaaaagcgaccaacgtcggcagtacggaagcggcgctgaatggcctgcacgtagacggcacgctgcatttgttgctgggcggcgatggtaaatcggcggactttagcccactggtgcgttacctgaatggcgataacgtacgtctgtattgtttcggtcgtgacggcgcgcagctggcggcgctacgcccggaagtggcagaacaaaccgaaactatggaacaggctatgcgcttgctggctccgcgtgttcagccgggcgatatggttctgctctccccggcctgtgccagccttgatcagttcaagaactttgaacaacgaggcaatgagtttgcccgtctggcgaaggagttaggttga

SEQ ID NO: 470624 - DNA, 1245 bp, Shigella flexneri
atgcgtttatctctccctcgcctgaaaatgccgcgcctgccaggattcagtatcctggtctggatctccacggcgctaaagggctgggtgatgggctcgcgggaaaaagataccgacagcctgatcatgtacgatcgcaccttactgtggctgaccttcggcctcgcggcgattggctttatcatggtgacctcggcgtcaatgcccatagggcaacgcttaaccaacgatccgttcttcttcgcgaagcgtgatggtgtctatctgattttggcgtttattttggcgatcattacgctgcgtctgccgatggagttctggcaacgctacagtgccacgatgctgctcggatctatcatcctgctgatgatcgtgctggtagtgggtagcgctgttaaaggggcatcgcgttggatcgatctcggtttgctgcgtatccagcctgcggagctgacaaaactgtcgctgttttgctatatcgccaactatctggtgcgtaaaggtgacgaagtacgtaataacctgcgcggcttcctgaaaccgatgggcgtgattctggtgttggcagtgttactgctggcacagccagaccttggtacggtggtggtgttgtttgtgactacgctggcgatgttgttcctggcgggagcgaaattgtggcagttcattgccattatcggtatgggcatttcagcggttgtgttgctgatcctcgccgaaccgtaccgtatccgccgtgttaccgcattctggaacccgtgggaagatccctttggcagcggctatcagttaacgcaatcgctgatggcgtttggtcgcggcgaactttgggggcaaggtttaggtaattcggtacaaaaactggagtatctgccggaagcgcacactgactttattttcgccattatcggcgaagaattaggttatgtcggtgtggtactagcacttttaatggtattcttcgtcgcttttcgtgcgatgtcgattggccgcaaagcattagaaattgaccaccgtttttccggttttctcgcctgttctattggcatctggtttagcttccaggcgctggttaacgtaggcgcggcggcggggatgttaccgaccaaaggtctgacattgccgctaatcagttacggtggttcgagcttactgattatgtcgacagccatcatgatgctgttgcgtattgattatgaaacgcgtctggagaaagcgcaggcgtttgtacgaggttcacgatga

SEQ ID NO: 470625 - DNA, 1068 bp, Shigella flexneri
atgagtggtcaaggaaagcgattaatggtgatggcaggcggaaccggtggacatgtattcccgggactggcggttgcgcactatctaatggctcagggttggcaagttcgctggctggggactgccgaccgtatggaagcggacttagtgccaaaacatggcatcgaaattgatttcattcgtatctctggtttgcgtggaaaaggtataaaagcactgatagctgcgccgctgcgtatcttcaacgcctggcgtcaggcgcgggcgattatgaaagcgtacaaacctgacgtggtactcggtatgggcggctatgtatcaggtccaggtggtctggccgcgtggtcgttaggcattccggttgtacttcatgaacaaaacggtattgcgggcttaaccaataaatggctggcgaagattgctaccaaagtgatgcaggcgtttccaggcgctttccctaatgcggaagtggtgggtaacccggtgcgtaccgatgtgctggcgctgccgttgccgcagcaacgtttggctggacgtgaaggtccggttcgtgtgttggtagtgggtggttcccagggcgcacgcattcttaaccagacaatgccgcaggttgctgcgaaactgggtgattcagtcactatctggcatcagagcggcaaaggttcgcaacaatccgttgaacaggcgtatgccgaagcggggcaaccgcagcataaagtgactgaatttattgatgatatggcggcggcgtatgcgtgggcggatgtcgtcgtttgccgctccggtgctttaactgtgagtgaaatcgccgcggcaggactaccggcgttgtttgtgccgtttcaacataaagaccgccagcaatactggaatgcgctaccgctggaaaaagcgggcgcagccaaaattattgagcagccacagcttagcgtggatgctgtcgccaacaccatggccgggtggtcgcgagaaaccttattaaccatggcagaacgcgcccgcgctgcatccattccggatgccaccgagcgagtggcaaatgaagtgagccgggctgcccgggcgtaa

SEQ ID NO: 470626 - DNA, 1476 bp, Shigella flexneri
atgaatacacaacaattggcaaaactgcgttccatcgtgcccgaaatgcgtcgcgttcggcacatacattttgtcggcattggtggtgccggtatgggcggtattgccgaagttctggccaatgaaggttatcagatcagtggttccgatttagcgccaaatccggtcacgcagcagttactgaatctgggtgcgacgatttatttcaaccatcgcccggaaaacgtacgtgatgccagcgtggtcgttgtttccagcgccatttctgccgacaacccggaaattgtcgcagctcatgaagcgcgtattccggtgatccgtcgtgccgaaatgctggctgagttaatgcgttttcgtcatggcatcgccattgcaggaacgcacggcaaaacgacaactaccgcgatggtttccagcatctacgcagaagcggggctcgacccaaccttcgttaacggcgggctggtaaaagcggcgggggttcatgcgcgtttggggcatggtcggtacctgattgccgaagcagatgagagtgatgcatcgttcctgcatctgcaaccgatggtggcgattgtcaccaatatcgaagccgaccacatggatacctaccagggcgactttgagaatttaaaacagacctttattaattttctgcacaacctgcctttttacggtcgtgcggtgatgtgtgttgatgatccggtgatccgcgaattgttaccgcgtgtgggacgtcagaccacaacttacggcttcagcgaagatgccgacgtgcgtgtagaagattatcagcagattggcccgcaggggcactttacgctgctgcgtcaggacaaagagccgatgcgcgtcaccctgaatgcgccaggccgtcataacgcgctgaacgccgcagctgcggttgcggttgctacggaagagggaattgacgacgaggctattttgcgtgcgctggagagcttccaggggactggtcgccgttttgatttcctcggtgaattcccgctggagccagtgaatggtaaaagcggtacggcaatgctggtcgatgactacggccaccacccgacggaagttgacgccaccattaaagcggcgcgcgcaggctggccggataaaaacctggtaatgctgtttcagccgcaccgttttacccgtacgcgcgacctgtatgatgatttcgccaatgtgctgacgcaggttgataccctgttgatgctggaagtgtatccggctggcgaagcgccaattccgggagcggacagccgttcgctgtgtcgcacaattcgtggacgtgggaaaattgatcccattctggtgccggaccctgcgcaggtagccgagatgctggcaccggtattaaccggtaacgacctgattctcgttcagggggctggtaatatcggaaaaattgcccgttctttagctgaaatcaaactgaagccgcaaactccggaggaagaacaacatgactga

SEQ ID NO: 470627 - DNA, 921 bp, Shigella flexneri
atgactgataaaatcgcggtcctgttgggcgggacttccgctgagcgggaagtttctctgaattctggcgcagcggtgttagccgggctgcgtgaaggcggtattgatgcgtatcctgtcgacccgaaagaagtcgacgtgacgcaactgaagtcgatgggttttcagaaagtgtttatcgcgctacacggtcgcggcggtgaagatggtacgctgcagggcatgctcgagctgatgggcttgccttataccggcagcggagtgatggcatctgcgctttcaatagataaactacgcagcaaacttctgtggcaaggtgccggtttaccggtcgcgccgtgggtagcgttaacccgctcagagtttgaaaaaggcctgagcgataagcagttagcagaaatttctgctctgggtttgccggttatcgttaagccgagccgcgaaggttccagtgtgggaatgtcaaaagtagtagcagaaaatgctctacaagatgcattaagattggcatttcagcacgatgaagaagtattgattgaaaaatggctaagtgggccggagttcacggttgcgatactcggtgaagaaattttaccgtcaatacgtattcaaccgtccggaaccttctatgattatgaggcgaagtatctctctgatgagacacagtatttctgccccgcaggtctggaagcgtcacaagaggccaatttgcaggcattagtgctgaaagcatggacgacgttaggttgcaaaggatggggacgtattgacgttatgctggacagtgatggacagttttatctgctggaagccaatacctcaccgggtatgaccagccacagcctggtgccgatggcggcacgtcaggcaggtatgagcttctcgcagttggtagtacgaattctggaactggcggactaa

SEQ ID NO: 470628 - DNA, 831 bp, Shigella flexneri
atgtcgcaggctgctctgaacacgcgaaacagcgaagaagaggtttcttctcgccgcaataatggaacgcgtctggcggggatccttttcctgctgaccgttttaacgacagtgttggtgagcggctgggtcgtgttgagctggatggaagatgcgcaacgcctgccgctctcaaagctggtgttgaccggtgaacgccattacacgcgtaatgacgatatccggcagtcgatcctggcattgggtgagccgggtacctttatgacccaggatgtcaacatcatccagacgcaaatagaacaacgcctgccgtggattaagcaggtgagcgtcagaaagcagtggcctgatgaattgaagattcatctggttgaatatgtgccgattgcgcggtggaatgatcaacacatggtagacgcggaaggaaacaccttcagcgtgccgccagatcgcaccagcaagcaggtgcttccaatgctgtatggcccggaaggcagcgctaatgaagtgttgcagggctatcgcgaaatggggcagatgctggcaaaggacagatttactctgaaggaagcggcgatgaccgcgcggcgttcctggcagttgacgctgaataacgatattaagctcaatcttggccggggcgatacgatgaaacgtttggttcgctttgtagaactttatccggttttacagcagcaggcgcaaaccgatggcaaacggattagctacgttgatttgcgttatgactctggagcggcagtaggctgggcgcccttgccgccagaggaatctactcagcaacaaaatcaggcacaggcagaacaacaatga

SEQ ID NO: 470629 - DNA, 1263 bp, Shigella flexneri
atgatcaaggcgacggacagaaaactggtagtaggactggaaattggtaccgcgaaggttgccgctttagtaggggaagttctgcccgacggtatggtcaatatcattggcgtgggcagctgcccgtcacgtggtatggataaaggcggggtgaacgacctcgaatccgtggtcaagtgcgtacaacgcgccattgaccaggcagaattgatggcagattgtcagatctcttcggtatatctggcgctttctggtaagcacatcagctgccagaatgaaattggtatggtgcctatttctgaagaagaagtgacgcaagaagatgtggaaaacgtcgtccataccgcgaaatcggtgcgtgtgcgcgatgagcatcgtgtgctgcatgtgatcccgcaagagtatgcgattgactatcaggaagggatcaagaatccggtaggactttcgggtgtgcggatgcaggcaaaagtgcacctgatcacatgtcacaacgatatggcgaaaaacatcgtcaaagcggttgaacgttgtgggctgaaagttgaccaactgatatttgccggactggcatcaagttattcggtattgacggaagatgaacgtgaactgggtgtctgcgtcgtcgatatcggtggtggtacaatggatatcgccgtttataccggtggggcattgcgccacacaaaggtaattccttatgctggcaatgtcgtgaccagtgatatcgcttacgcctttggcacgccgccaagcgacgccgaagcgattaaagttcgccacggttgtgcgctgggttccatcgttggaaaagatgagagcgtggaagtgccgagcgtaggcggtcgtccgccgcggagtctgcaacgtcagaccctggcagaggtgatcgagccgcgctataccgagttgctcaacctggtcaacgaagagatattgcagttgcaggaaaagcttcgccaacaaggggttaaacatcacctggcggcaggcattgtattaaccggtggcgcagcgcagatcgaaggtcttgcagcctgtgctcagcgcgtgtttcatacgcaagtgcgtatcggcgcgccgctgaacattaccggtttaacggattatgctcaggagccgtattattcgacggcggtgggattgcttcactatgggaaagagtcacatcttaacggtgaagctgaagtagaaaaacgtgttacagcatcagttggctcgtggatcaagcgactcaatagttggctgcgaaaagagttttaa

SEQ ID NO: 470630 - DNA, 1152 bp, Shigella flexneri
atgtttgaaccaatggaacttaccaatgacgcggtgattaaagtcatcggcgtcggcggcggcggcggtaatgctgttgaacacatggtgcgcgagcgtattgaaggtgttgaattcttcgcggtaaataccgatgcacaagcgctgcgtaaaacagcggttggacagacgattcaaatcggtagcggtatcaccaaaggactgggcgctggcgctaatccagaagttggccgcaatgcggctgatgaggatcgcgatgcattgcgtgcggcgctggaaggtgcagacatggtctttattgctgcgggtatgggtggtggtaccggtacaggtgcagcaccagtcgtcgctgaagtggcaaaagatttgggtatcctgaccgttgctgtcgtcactaagcctttcaactttgaaggcaagaagcgtatggcattcgccgagcaggggatcactgaactgtccaagcatgtggactctctgatcactatcccgaacgacaaactgctgaaagttctgggccgcggtatctccctgctggatgcgtttggcgcagcgaacgatgtactgaaaggcgctgtgcaaggtatcgccgaactgattactcgtccgggtttgatgaacgtggactttgcagacgtacgcaccgtaatgtctgaaatgggctacgcaatgatgggttctggcgtggcgagcggtgaagaccgtgcggaagaagctgctgaaatggctatctcttctccgctgctggaagatatcgacctgtctggcgcgcgcggcgtgctggttaacatcacggcgggcttcgacctgcgtctggatgagttcgaaacggtaggtaacaccatccgtgcatttgcttccgacaacgcgactgtggttatcggtacttctcttgacccggatatgaatgacgagctgcgcgtaaccgttgttgcgacaggtatcggcatggacaaacgtcctgaaatcactctggtgaccaataagcaggttcagcagccagtgatggatcgctaccagcagcatgggatggctccgctgacccaggagcagaagccggttgctaaagtagtgaatgacaatgcgccgcaaactgcgaaagagccggattatctggatatcccagcattcctacgtaagcaagctgattaa

SEQ ID NO: 470631 - DNA, 918 bp, Shigella flexneri
atgatcaaacaaaggacacttaaacgtatcgttcaggcgacgggtgtcggtttacataccggcaagaaagtcaccctgacgttacgccctgcgccggccaacaccggggtcatctatcgtcgcaccgacttgaatccaccggtagatttcccggccgatgccaaatctgtgcgtgataccatgctctgtacgtgtctggtcaacgagcatgatgtacggatttcaaccgtagagcacctcaatgctgctctcgcgggcctgggcatcgataacattgttatcgaagttaacgcgccggaaatcccgatcatggacggcagcgccgctccgtttgtatacctgctgcttgacgccggtatcgacgagttgaactgcgccaaaaaatttgttcgcatcaaagagactgttcgtgtcgaagatggcgataagtgggctgaatttaagccgtacaatggtttttcgctggatttcaccatcgattttaaccatccggctattgattccagcaaccagcgctatgcgatgaacttctccgctgatgcgtttatgcgccagatcagccgtgcgcgtacgttcggtttcatgcgtgatatcgaatatctgcagtcccgtggtttgtgcctgggcggcagcttcgattgtgccatcgttgttgacgattatcgcgtactgaacgaagacggcctgcgttttgaagacgaatttgtgcgtcacaaaatgctcgatgcgatcggtgacttgttcatgtgtggtcacaatattattggtgcatttaccgcttataaatccggtcatgcactgaataacaaactgctgcaggctgtcctggcgaaacaggaagcctgggaatatgtgaccttccaggacgacgcagaactgccgttggccttcaaagcgccttcagctgtactggcataa

SEQ ID NO: 470632 - DNA, 588 bp, Shigella flexneri
gtgctgtggacttcaggctttaatgataagatttgtgcgctaaatacgtttgaattcgatcgggatggcaataacgtgagtggaatactgacgcgctggcgacagtttggtaaacgctacttctggccgcatctcttattagggatggtcgcggcgagtttaggtttgcctgcgctcagcaacgccgccgaaccaaacgcgcccgcaaaagcgacaacccgcaaccacgagccttcagccaaagttaactttggtcaattggccttgctggaagcgaacacgcgccgcccgaattcgaactattccgttgattactggcatcaacatgctattcgtacggtaatccgtcatctttctttcgcaatggcaccgcaaacactgcccgttgctgaagaatctttgcctcttcaggcgcaacatcttgcattactggatacgctcagcgcgctgctgacccaggaaggcacgccgtctgaaaagggttatcgcattgattatgcgcattttaccccacaagcaaaattcagcacgcccgtctggataagccaggcgcaaggcatccgtgctggccctcaacgcctcacctaa

SEQ ID NO: 470633 - DNA, 2706 bp, Shigella flexneri
atgctaatcaaattgttaactaaagttttcggtagtcgtaacgatcgcaccctgcgccggatgcgcaaagtggtcaacatcatcaatgccatggaaccggagatggaaaaactctccgatgaagaactgaaagggaaaaccgcagagtttcgtgcgcgtctggaaaaaggcgaagtgctggaaaatctgatcccggaagctttcgccgtggtgcgtgaggcaagtaagcgcgtctttggtatgcgtcacttcgacgttcagttactcggcggtatggttcttaacgaacgctgcatcgccgaaatgcgtaccggtgaaggtaaaaccctgaccgcaacgctgcctgcttacctgaacgcactaaccggtaaaggcgtgcacgtagttaccgtcaacgactacctggcgcaacgtgacgccgaaaacaaccgtccgctgtttgaattccttggcctgactgttggtatcaacctgccgggcatgccagcaccggcaaagcgcgaagcttacgcagctgacatcacttacggtacgaacaacgaatacggctttgactacctgcgcgacaacatggcgttcagccctgaagaacgtgtacagcgtaaactgcactatgcgctggtggacgaagtggactccatcctgatcgatgaagcgcgtacaccgctgatcatttccggcccggcagaagacagctcggaaatgtataaacgcgtgaataaaattattccgcacctgatccgtcaggaaaaagaagactccgaaaccttccagggcgaaggccacttctcggtggacgaaaaatctcgccaggtgaacctgaccgaacgtggtctggtgctgattgaagaactgctggtgaaagagggcatcatggatgaaggggagtctctgtactctccggccaacatcatgctgatgcaccacgtaacggcggcgctgcgcgctcatgcgctgtttacccgtgacgtcgactacatcgttaaagatggtgaagttatcatcgttgacgaacacaccggtcgtaccatgcagggccgacgctggtccgatggtctgcaccaggctgtggaagcgaaagaaggtgtgcagatccagaacgaaaaccaaacgctggcttcgatcaccttccagaactacttccgtctgtatgaaaaactggcggggatgaccggtactgctgataccgaagctttcgaatttagctccatctacaaactggataccgtcgttgttccgaccaaccgtccaatgattcgtaaagatctgccggacctggtctacatgactgaagcggaaaaaattcaggcgatcattgaagatatcaaagaacgtactgcgaaaggccagccggtgctggtgggtactatctccatcgaaaaatcggagctggtgtcaaacgaactgaccaaagccggtattaagcacaatgtcctgaacgccaaattccacgccaacgaagcggcgattgttgctcaggcaggttatccggctgcggtgactatcgcgaccaacatggcgggtcgtggtacagatattgtgctcggaggtagctggcaggcagaagttgccgcgctggaaaatccgaccgcagagcaaattgaaaaaattaaagccgactggcaggtacgtcacgatgcggtactggaagcaggtggcctgcatatcatcggtaccgagcgtcacgaatcccgtcgtatcgataaccagttgcgcggtcgttctggtcgtcagggggatgctggttcttcccgtttctacctgtcgatggaagatgcgctgatgcgtatttttgcttccgaccgagtatccggcatgatgcgtaaactgggtatgaagccaggcgaagccattgaacacccgtgggtgactaaagcgattgccaacgcccagcgtaaagttgaaagtcgtaacttcgacattcgtaagcaactgctggaatatgatgacgtggctaacgatcagcgtcgcgccatttactcccagcgtaacgaactgctggatgtcagcgatgtgagcgaaaccatcaacagcattcgtgaagatgtgttcaaagccaccattgatgcctacattccgccacagtcgctggaagaaatgtgggatattccggggctgcaggaacgtctgaagaacgatttcgacctcgatttaccaattgccgagtggctggataaagaaccagaactgcatgaagagacgctgcgtgagcgcattctggcgcagtccatcgaagtgtatcagcgtaaagaagaagtggttggtgctgagatgatgcgtcacttcgagaaaggcgtcatgctgcaaacgcttgactccctgtggaaagagcacctggcagcgatggactatctgcgtcagggtatccacctgcgtggctatgcacagaaagatccgaagcaggaatacaaacgtgaatcgttctccatgtttgcagcgatgctggagtcgttgaaatatgaagttatcagtacgctgagcaaagttcaggtacgtatgcctgaagaggttgaggagctggaacaacagcgtcgtatggaagccgagcgtttagcacaaatgcagcagcttagccatcaggatgacgactctgcagccgcagctgcactggcggcgcaaaccggtgaacgcaaagtaggacgtaacgatccttgcccgtgcggttctggtaaaaaatacaagcagtgccatggtcgcctgcaataa

SEQ ID NO: 470634 - DNA, 390 bp, Shigella flexneri
atgaaaaagctgcaaattgcggtaggtattattcgcaacgagaacaatgaaatctttataacacgtcgcgcagcagatgcgcacatggcgaataaactggagtttcccggcggtaaaattgaaatgggcgaaacgccggaacaggcggtggtgcgtgaacttcaggaagaggtcgggattaccccacaacatttttcgctatttgaaaaactggaatatgaattcccggacaggaatataactctgtggttctggctggtcgaaagttgggaaggggtgccgtggggtaaagaagggcaacccggtgagtggatgtcgctgatcggtcttaatgccgatgattttccgccagccaatgaaccggtaattgcgaagcttaagcgtctgtag

SEQ ID NO: 470635 - DNA, 198 bp, Shigella flexneri; identical to SEQ ID NO: 457696

SEQ ID NO: 470636 - DNA, 744 bp, Shigella flexneri
atgcagacccaggtcctttttgaacatccactaaatgaaaaaatgcgtacatggctgcgcattgagtttttgattcagcaactcaccgttaatttacccatcgttgaccacgctggcgcgctgcatttcttccgtaatgtcagtgaattactggatgttttcgagcgcggcgaagtccgcactgagctgttgaaagaacttaaccggcagcaacgtaaactccagacctggattggcgtgcctggcgtggaccagagccgtattgaagcattaattcagcagttaaaagcggcggtgagcgtattaatttccgcgccgcgtatcgggcaatttctgcgtgaagatcgtttgattgctctggtgcgtcagcgactgagcatcccaggcggctgttgcagctttgatttacctacattgcacatttggctgcatctaccccaggcgcagcgcgacagccaggtagaaacctggattgccagcctgaacccgctcacccaggcacttaccatggtgctggatttaattcgccagtcggcccccttccgtaaacaaaccagcctgaatggtttttatcaggataacggtggcgatgccgacttgctgcgcctgaatctgtcgctcgattcacagctttatccgcaaatttccggacataagagccgttttgccattcgttttatgccgctggacactgaaaacggacaggtaccggaacgtctggatttcgaactggcctgttgctaa

SEQ ID NO: 470637 - DNA, 621 bp, Shigella flexneri
atggggtatatagttgccttaacgggaggcattggcagtggtaagagtaccgttgccaatgcgtttgctgatctcggaattaacgtcattgatgccgatattattgcgcgtcaggtggttgaaccaggtgcacctgcgctacatgccattgctgatcactttggcgaaaacatgattgctgctgatggaacattgcagcgccgggccttgcgcgagcggatcttcgccaacccggaagagaaaaactggcttaacgacctgctgcatccgctgattcagcaagagacgcaacaccagatccagcaagcaacttccccctatgtactgtgggttgtgccattgctggtagaaaactcactgtataaaaaagcgaatcgagtgctggtggtggatgtcagcccagaaacgcaacttaagcgcaccatgcagcgcgatgatgtaactcgcgaacatgtcgaacaaatccttgctgctcaggcaacgcgcgaagcccgccttgccgtggcagatgacgtcattgataataacggcgcaccggatgctatcgcatcggatgttgcccgcctgcacgcacactatttgcagcttgcgtcgcagtttgtctcacaggaaaaaccgtaa

SEQ ID NO: 470638 - DNA, 1044 bp, Shigella flexneri
atgcgtattgaagaagatctgaagttaggttttaaagacgttctcatccgccctaaacgctccactcttaaaagccgttccgatgttgaactggaacgtcaattcaccttcaaacattcaggtcagagctggtccggcgtgccgattatcgccgcaaatatggacaccgtaggcacattttctatggcctctgcgctggcttcttttgatattctgactgctgtgcataaacacttttctgtcgaagagtggcaagcgtttatcaacaattcttccgctgatgtgctgaaacatgtgatggtttctaccggcacgtctgatgcggatttcgaaaaaactaaacagattctcgacctgaacccggcattaaacttcgtttgtattgatgtggcgaatggttattccgaacacttcgtgcagttcgttgcgaaagcgcgtgaagcgtggccgaccaaaagcatttgtgctggcaacgtagtgactggtgaaatgtgtgaggagcttatcctctccggtgctgatatcgttaaagttggcattggcccaggttctgtttgtacaactcgcgtcaaaacaggcgtcggttatccgcagctttctgcggtaatcgaatgtgccgatgcggcgcacggtctgggcggaatgatcgtcagcgacggtggctgtaccacgccgggcgatgtggcgaaagcctttggcggcggtgccgatttcgtcatgcttggcggcatgctggcgggccacgaagagagcggcggtcgcatcgttgaggagaacggcgagaaatttatgctgttctacggcatgagctccgagtctgcgatgaaacgtcacgttggcggcgttgcggaataccgcgcagcagaaggtaaaaccgttaagctgccgctgcgaggccaggttgaaaataccgcgcgtgatattttgggcggcctgcgttcagcttgtacatacgttggggcttcacgcctgaaagagctgaccaagcgcaccacgtttattcgtgtgctggaacaagaaaaccgcatcttcaacaacctgtaa

SEQ ID NO: 470639 - DNA, 1203 bp, Shigella flexneri
atggcaagtaagcaactctggcgctggcatggcataaccggcgacggcaatgcgcaagatgggatgctatgggcagagagccgtactttactgcttatggcactacagcaacagatggttaccccactaagcctgaagcgaatcgccatcaattctgcgcagtggcgaggagataaaagcgcggaagtcattcatcaactggcgacgctacttaaagccgggttaacgctttctgaagggctggctctgctggcggaacagcatcccagtaagcaatggcaagcgttgctgcaatcgctggcgcacgatctcgaacagggcattgctttttccaatgccttattaccctggtcagaggcatttccgccgctctatcaggcgatgatccgcacgggtgaactgaccggtaagctggatgaatgctgctttgaactggcgcgtcagcaaaaatcccagcgtcagttgaccgacaaagtgaaatcagcgttgcgttatcccatcatcattttagcgatggcaatcatggtggttgtggcaatgctgcattttgttctgccggagtttgccgctatctataagaccttcaacaccccactaccggcactaacgcaggggatcatgacgctggcagactttagtggcgaatggggctggctgctggtgttgttcggctttctgctggcgatagccaataagttgctgatgcgccgcccgacctggcttatcgcgcggcagaaatttctgttacgcatcccgattatgggttcactgatgaggggacaaaaactcacgcagatctttacgattctggcgctaacacaaagtgcaggcattacttttttacagggcgtagagagcgtcagagaaacaatgcgctgcccgtactgggtgcaacttctgacacaaatccagcacgatatcagtaacggtcatcccatctggctggcgctaaaaaatgccggtgagtttagcccgctctgtttgcaattagtgagaacaggagaggcatccggctcgctggacctcatgttagacaacctcgcccatcatcatcgggataacacaatggcgctggcggataacctcgcagccttactggaaccggcgttgctgatcataacgggaggaattatcggtacgctggtggtggcaatgtatctgccaattttccatttaggcgatgcgatgagtgggatgggataa

SEQ ID NO: 470640 - DNA, 396 bp, Shigella flexneri
atgggggtcgcccgctggatgctatcatcggcgcttacgctggtaatagcccagcgtctggtacgtaaactttgcccacattgtcgccgacagcaaggggagcccatccatattccagacactgtatggccgtcgccgctgccccactggcaggcacccggttgtgtacattgctaccacggtttttatggtcgtaccgccttgtttgaagtcctgcccattacaccagccatacgccagcttatttccgctaatactgaagttgaatcgctggaaacgcacgcccgacaggcgggtatgcgtacgctttttgaaaacggctgcctggccgtggagcaaggcttaaccacctttgaagagttaatccgcgtactggggatgccgcatggcaagtaa

SEQ ID NO: 470641 - DNA, 798 bp, Shigella flexneri
atgaatattccacagctcacggccctgtgcctgcgttatcagggagtcttgctggatgccagcgaagaagtggttcatgttgcggtggtcgatgccccctcacatgagttgctggacgcattgcatttcgctaccaccaaacgtattgagatcacctgctggacgcgccaacaaatggaaggtcacgccagtcgcacacaacagacattacccgtagctgttcaggagaagcatcagcccaaagcagaattgctgactcgaacgttacaatctgcgctggaacaacgcgcgtctgatattcatatcgaaccagcggacaatgcctaccgcatccgcttgcgtatcgacggcgtattgcatcctttaccggatgtttcaccggatgccggagtcgcattaacagccagattaaaagtgctgggaaacctggatattgcggaacatcgcctgccgcaggacgggcaattcactgtcgaactggcaggaaacaccgtctcatttcgtattgcgaccttaccatgtcggggtggtgaaaaggtggtattaaggttgttacagcaggtgagccaggcactggatgttaacacgctgggaatgcagccgttacaactggcggactttgctcatgccttgcaacaaccacagggactggtgctggtaactggccctacaggcagtggcaaaacggtcacctggtgttgtccacgctacacaccaattccaccactgaaacgctggtacgtttacagcaaatgggggtcgcccgctggatgctatcatcggcgcttacgctggtaa

SEQ ID NO: 470642 - DNA, 441 bp, Shigella flexneri
atggacaagcaacgcggttttacacttatcgaactgatggtggttattggcatcattgccattttaagctccattggtattcccgcttatcaaaactacctgcgcaaagccgcactcaccgacatgctacaaacctttgtgccttaccgtaccgccgtagagttgtgcgcgctggaacatggtggattagatacctgcgacggtggcagcaatggcattccctcgcctaccaccacccgctatgtttcagccatgagtgtggcaaagggcgtggtgtcgctgaccgggcaagaaagtctcaatgggctaagcgtcgtcatgacgccaagttgggataacgcaaacggcgtcaccggctgggcgcgcaactgcaatattcaaagtgacagcgcattgcagcaagcctgcgaagatgtcttccgctttgatgacgccaactaa

SEQ ID NO: 470643 - DNA, 894 bp, Shigella flexneri
atgccgcctcgccgctacaaccctgacacccgacgtgacgagctgctggaacgcattaatctcgatatccccggcgcggtggcccaggcgctgcgggaagatttaggcggaacagtcgatgccaacaatgacattacggcaaaacttttaccggaaaattctcgctctcatgccacggtgatcacccgcgagaatggcgtattttgtggcaaacgctgggttgaagaggtgtttattcaactggcaggcgacgatgtcaccataatctggcatgtggatgacggcgatgtcatcaacgccaatcaacccttgttcgaacttgaaggcccatcccgcgtgctgttaacgggcgaacgcactgcgcttaattttgtgcaaaccctttcaggagttgccagtaaggtacgccactatgtcgaattactggaaggcaccaacacgcagttgttggatacgcgcaaaaccttacctggcctgcgttcagctctgaaatacgcggtactttgcggcggcggagcgaatcaccgtctggggctttctgatgccttcctgatcaaagaaaaccatattattgcctccggctcagtgcgccaggcggtcgaaaaagcgtcctggctgcatccggatgcgccagtagaagtcgaagtagagaatctggaagaacttgatgaggccctgaaagccggagccgatatcatcatgctggataacttcgaaacagaacagatgcgcgaagccgtcaaacgcaccaacggcaaggcgctactggaagtgtctggcaacgtcactgacaaaacactgcgcgaatttgccgaaacgggcgtggactttatctccgtcggtgcgctaactaaacacgtacaagcactcgacctttcaatgcgttttcgctaa

SEQ ID NO: 470644 - DNA, 552 bp, Shigella flexneri
atgttgttagaacaggggtggctggttggcgcgcgccgcgttccctcaccacattacgattgccgcctggatgacgaaacacccaccctgctggtggtgcacaatattagcctgccgccaggcgagtttggcggtccgtggatcgacgcattattcactggaactattgatccgcaggcacatcctttctttgctgagatcgcccatttgcgcgtctccgctcactgtttgattcgccgtgatggtgaaatagtccagtatgttcctttcgataaacgtgcctggcatgcgggagtctctcagtatcaggggcgtgaacgctgcaatgatttttctattgggattgagcttgaaggcaccgatactctggcgtataccgatgcgcagtatcaacagcttgcggcggttacgcgggcactgatagatcgctatcccgatatcgctaataacatgacgggccattgtgatattgcgccggatcggaaaaccgatcccggtcctgcatttgattgggcacggtttcgtgcgctggtcagcaaggagacaacatga

SEQ ID NO: 470645 - DNA, 855 bp, Shigella flexneri
atgacgctatttacaaccttactggtgttaattttcgagcgcctgtttaagttgggcgagcactggcagcttgatcatcgtcttgaagcgttctttcggcgggtgaaacatttttctctcgggcgcacgttaggcatgaccattattgcgatgggtgtgacttttttactgttacgcgcattgcagggagtattgttcaacgttcccacgctgctggtgtggctgctgattggtttgctgtgtattggcgcaggtaaagttcgtcttcattatcatgcttatctgacagctgcttcacgtaatgatagccatgcccgtgccacgatggctggcgaactcaccatgattcacggcgtcccggcaggctgcgacgaacgtgagtatttgcgtgagctgcaaaatgcattgctgtggattaactttcgtttttatcttgcaccgctgttctggctgattgtggggggaacctggggacccgttacgctgatggggtatgcgttcttgcgtgcatggcaatactggctggcgcgataccagacgccgcatcatcgtttacagtccggcattgatgcagtgcttcatgtactggattgggtgccggttcgtcttgcgggtgtggtatatgccttgatcggtcatggtgagaaagcgttaccggcctggtttgcttcgctgggtgatttccatacttcgcaatatcaggtattaacgcgtctggcgcagttctctctggcgcgtgaaccgcatgtcgataaggtggagacgccgaaggcagcggtttcaatggcgaagaaaacctcgttcgtggtcgtggtggtgattgcgctactgacgatttacggggcgttggtgtag

SEQ ID NO: 470646 - DNA, 1371 bp, Shigella flexneri
atggaaggtcaacagcacggcgagcagctaaagcgcggccttaaaaaccgccatattcagcttatcgcgctgggtggcgcgatagggacagggctattcctaggtagcgcctccgtaatacagtccgcagggccagggattatcctgggttacgccattgctggttttatcgcctttctgatcatgcgtcagctgggtgaaatggtggtcgaagaacctgtcgcaggctcctttagccactttgcttataaatactggggcagttttgccggtttcgcctctggctggaactactgggtactgtacgttttagttgccatggcagagctgactgccgtgggtaaatacattcagttctggtatccggaaatcccaacctgggtttctgccgccgtattctttgtggtgattaacgccatcaacctgaccaacgttaaagtgtttggcgagatggagttctggtttgccattatcaaagttattgcggtagtagcgatgatcatcttcggcggctggctgctgttcagtggcaacggtggcccgcaggcgagcgttagcaacctgtgggatcaaggtggtttcctgccgcacggcttcaccggactggtgatgatgatggcgattatcatgttctcgttcggtggtctggaactggtggggatcaccgcagcagaagctgataacccggagcaaagtatcccgaaagcaactaaccaggttatctaccgcatcctgattttctatattggttcgttagccgttctgctctcactgatgccgtggacccgcgttaccgccgataccagtccgtttgtgctgatcttccacgagttaggcgatacctttgtggcgaatgcgctgaacatcgtggtactgactgcggcgctctccgtgtacaacagctgcgtatattgcaacagccgtatgctgtttggtctggcacaacaggggaacgcgccaaaagcgctggcgtctgtcgataaacgcggcgtaccggttaacaccattctggtgtctgcgctggttacagcattgtgcgtattgattaactatcttgctccggaatccgcatttggcctgttaatggcactggtggtatccgcactggtgatcaactgggcgatgatcagtctggcgcatatgaagttccgtcgcgccaagcaggaacaaggcgtggtaactcgcttccctgctctgctttatccgctgggtaactggatctgcctgctgtttatggcggcggtactggtgattatgctgatgaccccaggaatggcgatttcggtatacctgatcccggtatggctgatcgtgttaggtatcggctatctgtttaaagagaaaaccgccaaagccgtaaaagcgcattaa

SEQ ID NO: 470647 - DNA, 765 bp, Shigella flexneri
atggcctacagcaaaatccgccaaccaaaactctccgatgtgattgagcagcaactggagtttttgatcctcgaaggcactctccgcccgggcgaaaaactcccaccggaacgcgaactggcaaaacagttcgacgtctcccgtccctccttgcgtgaggcgattcaacgtctcgaagcgaagggcttgttgcttcgtcgccagggtggcggcacttttgtccagagcagcctatggcaaagcttcagcgatccgctggtggagctgctctccgaccatcctgaatcacagtatgacttgctcgaaacacgacacgccctggaaggtatcgccgcttattacgccgcgctgcgtagtaccgatgaagacaaggaacgcatccgtgaactccaccacgccatagagctggcgcagcagtctggcgatctggacgcggaatcaaacgccgtactccagtatcagattgccgtcaccgaagcggcccacaatgtggttctgcttcatctgctaaggtgtatggagccgatgttggcccagaatgtccgccagaacttcgaattgctctattcgcgtcgcgagatgctgccgctggtgagtagtcaccgcacccgcatatttgaagcgattatggccggtaagccggaagaagcgcgcgaagcatcgcatcgccatctggcctttatcgaagaaattttgctcgacagaagccgtgaagagagccgccgtgagcgttctctgcgtcgtctggagcaacgaaagaattag

SEQ ID NO: 470648 - DNA, 2664 bp, Shigella flexneri
atgtcagaacgtttcccaaatgacgtggatccgatcgaaactcgcgactggctccaggcgatcgaatcggtcatccgtgaagaaggtgttgagcgtgctcagtatctgatcgaccaactgcttgctgaagcccgcaaaggcggtgtaaacgtagccgcaggcacaggtatcagcaactacatcaacaccatccccgttgaagaacaaccggagtatccgggtaatctggaactggaacgccgtattcgttcagctatccgctggaacgccatcatgacggtgctgcgtgcgtcgaaaaaagacctcgaactgggcggccacatggcgtccttccagtcttccgcaaccatttatgatgtgtgctttaaccacttcttccgtgcacgcaacgagcaggatggcggcgacctggtttacttccagggccacatctccccgggcgtttacgcccgtgctttcctggaaggtcgtctgactcaggagcagctggataacttccgtcaggaagttcacggcaatggcctctcttcctatccgcacccgaaactgatgccggaattctggcagttcccgaccgtatctatgggtctgggtccgattggtgctatttaccaggctaaattcctgaaatatctggaacaccgtggcctgaaagatacctctaaacagaccgtttacgcgttcctcggcgacggtgaaatggacgaaccggaatccaaaggtgcgatcaccatcgctacccgtgaaaaactggataacctggttttcgttatcaactgtaacctgcagcgtcttgacggcccggtcaccggtaacggcaagatcatcaacgaactggaaggcatcttcgaaggtgctggctggaacgtgatcaaagtgatgtggggtagccgttgggatgaactgctgcgtaaagataccagcggtaaactgatccagctgatgaacgaaaccgttgacggcgactaccagaccttcaaatcgaaagatggtgcgtacgttcgtgaacacttcttcggtaaatatcctgaaaccgcagcactggttgcagactggactgacgagcagatctgggcactgaaccgtggtggtcacgatccgaagaaaatctacgctgcattcaagaaagcgcaggaaaccaaaggcaaagcgacagtaatccttgctcataccattaaaggttacggcatgggcgacgcggctgaaggtaaaaacatcgcgcaccaggttaagaaaatgaacatggacggcgtgcgtcacatccgcgaccgtttcaatgtgccggtgtctgatgcagatatcgaaaaactgccgtacatcaccttcccggaaggttctgaagagcatacctatctgcacgctcagcgtcagaaactgcacggttatctgccaagccgtcagccgaacttcaccgagaagcttgagctgccgagcctgcaagacttcggcgcgctgctggaagagcagagcaaagagctctctaccactatcgctttcgttcgtgctctgaacgtgatgctgaagaacaagtcgatcaaagatcgtctggtaccgatcatcgccgacgaagcgcgtactttcggtatggaaggtctgttccgtcagattggtatttacagcccgaacggtcagcagtacaccccgcaggaccgcgagcaggttgcttactataaagaagacgagaaaggtcagattctgcaggaagggatcaacgagctgggcgcagggtgttcctggctggcagcggcgacctcttacagcacgaacaatctgccgatgatcccattctacatctattactcgatgttcggcttccagcgtatcggcgatctgtgctgggcggctggagaccagcaagcgcgtggcttcctgatcggcggtacttccggtcgtaccaccctgaacggtgaaggtctgcagcacgaagatggtcacagccacattcagtcgctgactatcccgaactgtatctcttacgacccggcttacgcttacgaagttgctgtcattatgcatgacggtctggagcgtatgtacggtgaaaaacaagagaacgtttactactacatcactacgctgaacgaaaactaccacatgccggcaatgccggaaggtgctgaggaaggtatccgtaaaggtatctacaaactcgaaaccattgaaggtagcaaaggtaaagttcagctgctgggctccggttccatcctgcgtcacgtccgtgaagcggcagagatcctggcgaaagattacggcgtaggttctgacgtttatagcgtgacctccttcaccgagctggcgcgtgatggtcaggattgtgaacgctggaacatgctgcatccgctggaaactccgcgcgttccgtatatcgctcaggtgatgaacgacgcgccggcagtggcatctaccgactatatgaaactgttcgctgagcaggtccgtacttacgtaccggctgacgactatcgcgtactgggtactgatggcttcggtcgttccgacagccgtgagaacctgcgtcaccacttcgaagttgatgcttcttatgtcgtggttgcggcgctgggcgaactggctaaacgtggcgaaatcgataagaaagtggttgctgacgcaatcgccaaattcaacatcgatgcagataaagttaacccgcgtctggcgtaa

SEQ ID NO: 470649 - DNA, 1881 bp, Shigella flexneri
atggctatcgaaatcaaagtaccggacatcggggctgatgaagttgaaatcaccgagatcctggtcaaagtgggcgacaaagttgaagccgaacagtcgctgatcaccgtagaaggcgacaaagcctctatggaagttccatctccgcaggcgggtatcgttaaagagatcaaagtctctgttggcgataaaacccagaccggcgcactgattatgattttcgattccgccgacggtgcagcagacgctgcacctgctcaggcagaagagaagaaagaagcagctccggcagcagcacccgcggctgcggcggcaaaagacgttaacgttccggatatcggcagcgacgaagttgaagtgaccgaaatcctggtgaaagttggcgataaagttgaagctgaacagtcgctgatcaccgtagaaggcgacaaggcttctatggaagttccggctccgtttgcaggtaccgtgaaagagatcaaagtgaacgtgggtgacaaagtgtctaccggctcgctgattatggtcttcgaagtcgcgggtgaagcaggcgcggcagctccggcggctaaacaggaagcgactccggcagcgacccctgcaccagcagctggcgtgaaagaagttaacgttccggatatcggcggtgacgaagttgaagtgaccgaagtgatggtgaaagtgggcgacaaagttgccgctgaacagtcactgattaccgtagaaggcgataaagcttctatggaagttccggctccgtttgcaggcgtcgtgaaggaactgaaagtcaacgttggcgataaagtgaaaactggttcgctgattatgatcttcgaagttgaaggcgcagcgcctgcggcagctcctgcgaaacaggaagcggcagcgccggctccggcagcaaaagctgaagctccggctgcgaaagcggaaggcaaatctgaatttgctgaaaacgacgcttacgttcacgcgaccccgctgatccgccgtctggcacgcgagtttggcgttaacctggcgaaagtgaagggcactggccgtaaaggtcgtatcctgcgcgaagacgttcaggcttacgtgaaagaagctatcaaacgtgcagaagcagctccggcggcgactggcggtggtatccctggcatgctgccgtggccgaaggtggacttcagcaagtttggcgaaatcgaagaagtggaactgggccgtatccagaaaatttctggtgctaacctgagccgtaactgggtgatgatcccgcatgttacccacttcgacaaaaccgatatcaccgagctggaagcgttccgtaaacagcagaacgaagaagcggcgaaacgtaagctggatgtgaagatcaccccggttgtcttcatcatgaaagccgttgctgcagctcttgagcagatgcctcgcttcaatagttcgctgtcggaagacggtcagcgtctgaccctgaagaaatacatcaacatcggtgtggcggtggataccccgaacggtctggttgttccggtattcaaagacgtcaacaagaaaggcatcatcgagctgtctcgcgagctgatgactatttctaagaaagcgcgtgacggtaagctgactgcgggcgaaatgcagggcggttgcttcaccatctccagcatcggcggcctgggtactacccacttcgcgccgattgtgaacgcgccggaagtggctatcctcggcgtttccaagtccgcgatggagccggtgtggaatggtaaagagttcgtgccgcgtctgatgctgccgatttctctctccttcgaccaccgcgtgatcgacggtgctgatggtgcccgtttcattaccatcattaacaacacgctgtctgacattcgccgtctggtgatgtaa

SEQ ID NO: 470650 - DNA, 1425 bp, Shigella flexneri
atgagtactgaaatcaaaactcaggtcgtggtacttggggcaggccccgcaggttactccgctgccttccgttgcgctgatttaggtctggaaaccgtaatcgtagaacgttacaacacccttggcggtgtttgcctgaacgtcggctgtatcccttctaaagcactgctgcacgtagcaaaagttatcgaagaagccaaagcgctggctgaacacggtatcgtcttcggcgaaccgaaaaccgatattgacaagattcgtacctggaaagagaaagtgatcaatcagctgaccggtggtctggctggtatggcgaaaggccgcaaagtcaaagtggtcaacggtctgggtaaattcaccggggctaacaccctggaagttgaaggtgagaacggcaaaaccgtgatcaacttcgacaatgcgatcattgcagcgggttctcgcccgatccaactgccgtttattccgcatgaagatccgcgtatctgggactccactgacgcgctggaactgaaagaagtaccagaacgcctgctggtaatgggtggcggtatcatcggtctggaaatgggcaccgtttaccacgcgctgggttcacagattgacgtggttgaaatgttcgaccaggttatcccggcagctgacaaagacatcgttaaagtcttcaccaagcgtatcagcaagaaattcaacctgatgctggaaaccaaagttaccgccgttgaagcgaaagaagacggtatttatgtgacgatggaaggcaaaaaagcaccagctgaaccgcagcgttacgacgccgtgctggtagcgattggtcgtgtgccgaacggtaaaaacctcgacgcaggcaaagctggcgtggaagttgacgaccgtggtttcatccgcgttgacaaacagctgcgtaccaacgtaccgcacatctttgctatcggcgatatcgtcggtcagccgatgctggcacacaaaggtgttcacgaaggtcacgttgccgctgaagttatcgccggtaagaaacactacttcgatccgaaagttatcccgtccatcgcctataccgaaccagaagttgcatgggtaggtctgactgagaaagaagcgaaagagaaaggcatcagctatgaaaccgccaccttcccgtgggctgcttctggtcgtgctatcgcttctgactgcgcagacggtatgaccaagctgattttcgacaaagaatctcaccgtgtgatcggtggtgcgattgttggtaccaacggcggcgagctgctgggtgaaatcggcctggcaatcgaaatgggttgtgatgctgaagacatcgcactgaccatccacgcgcacccgactctgcacgagtctgtgggcctggcggcagaagtgttcgaaggtagcattaccgacctgccgaacccgaaagcgaagaagaagtaa

SEQ ID NO: 470651 - DNA, 783 bp, Shigella flexneri
atggcatggcggcacaatccaaactaccgtaatggtgtgccctatcatgatcaggatatggcaaagcggtttcatcaaaccgatgtcaacggcggaatgagtgccacgcagctacctgctccaacacgcgacagccagcgtcaggcggcagcaagtcagtttcagcaacgaacacacgccgcccccgtcattacacgagatacccaacgtcaggcagcggcacagcggtttaatgaagctgaacactatgggagctatgacgacttccgcgacttcagccgtcgccaaccactgacccagcagcaaaaggacgccgctcgtcagcgttatcagtcggcctctcctgagcagcgccaggcagtccgcgagaaaatgcagactaacccgcagatccagcagcgaagggaggcggcgcgccagcgtattcagtccgcctcgcctgagcagcgccaggcggttcgcgagaaaatgcagactaacccgcagaaccagcagcgaagagaggcagcgcgtgagcgtattcagtctgcaactcccgaacagcgccaggtgtttaaggaaaaagtacagcagcgcccactgaaccaacagcaacgtgataacgcccgccagcgtatacaatcggcatcacctgaacaacgtcaggtttttcgggagaaagttcaggagagccgcccacaacgtctaaacgacagtaaccatactgtcaggctgaataacgagcaacggtcagcagtacgcgaacgtctctctgaacgtggagcaagaagactggaaaggtaa

SEQ ID NO: 470652 - DNA, 168 bp, Shigella flexneri
atgctcaccggtgatacggttgaaattgttgacgtcgatattgatgttgtcgccgttgtgttgccagccattactgtcacgatgaccgccatcgtggtgatgataatcatcatcgtcatgatgatgatggtcatgatcgtcgtcatctcagtcgatgctgctgaatag

SEQ ID NO: 470653 - DNA, 909 bp, Shigella flexneri
atgaaaatgactttgccgtttaaaccccatgtgctggcgctaatttgcagtgccgggctttgtgctgcctctgccgggctatatataaaaagccgcacagtggaagcgcctgtagaaccgcaatcgacacaactggctgtgtctgacgctgccgctgttacgcttcctgcaacggtttccgcacctcccgtaatacccgcagtcgtcaaatccgcattcagcactgcacaaatagatcaatgggtcgcacccgtcgcgctgtatcccgacgccctactttcgcaggtgctgatggcatcaacctatccgacaaacgttgctcaagcagtgcaatggtcgcacgataatccacttaaacaaggcgatgctgctattcaggcggtatctgaccagccgtgggacgccagcgttaaatcactggtggcctttccacaattgatggcattgatgggcgaaaacccgcaatgggtgcaaaacctgggcgatgcttttctggcgcagccgcaggacgtgatggactcggtacagcgattgcggcaactggcgcaacaaaccggctcgctgaagtcatcaaccgaacagaaagttattaccacaacgaagaaagctgtaccggtaaaacagacagtcacggcacccgtcataccatccaataccgttttaactgccaaccccgtcattacagagccggcaacaaccgtcatttccattgagcccgccaatcctgatgtggtctatattcccaactacaacccaaccgtggtttacgggaactgggccaatactgcgtatccgccggtttatctgccaccaccagccggagaaccgtttgttgacagctttgtgcgcggattcggctatagcatgggcgttgctaccacgtacgcactattcagcagcatcgactga

SEQ ID NO: 470654 - DNA, 2598 bp, Shigella flexneri
gtgctagaagaataccgtaagcacgtagctgagcgtgccgctgaggggattgcgcccaaacccctggatgcaaaccaaatggccgcgcttgtagagctgctgaaaaacccgcccgcgggcgaagaagaattcctgttagatctgttaaccaaccgtgttcccccaggcgtcgatgaagccgcctatgtaaaagcaggcttcctggctgctatcgctaaaggcgaagctaaatcccctctgctgactccggaaaaagctatcgaactgctgggcaccatgcagggtggttacaacattcatccgctgatcgacgcgctggatgatgccaaactggcacctattgctgccaaagcactttctcacacgctgctgatgttcgataacttctatgacgtagaagagaaagcgaaagcaggcaacgaatatgcgaagcaggtaatgcagtcctgggcggatgccgaatggttcctgaatcgcccggcgctggctgaaaaactgaccgttaccgtctttaaagtcactggcgaaaccaacaccgatgacctttctccggcaccggatgcgtggtcacgcccggatatcccactgcacgcgctggcgatgctgaaaaacgcccgtgaaggtattgagccagaccagccaggtgttgttggcccgatcaaacagattgaagctctgcaacagaaaggtttcccgctggcgtacgtcggtgacgttgtgggtacgggttcatcgcgtaaatccgccacgaactccgttctgtggtttatgggcgatgatattccacatgtgccgaacaaacgcggcggtggtttgtgcctcggcggtaaaattgcacccatcttctttaacacgatggaagacgcgggtgcactgccaatcgaagtcaacgtctctaacctgaacatgggcgacgtgattgacgtttacccgtacaaaggtgaagtgcgtaaccacgaaacaggcgaactgctggcgaccttcgaactgaaaaccgacgtgctgattgatgaagtgcgtgctggcggccgtattccgctgattatcgggcgtggcctgaccaccaaagcgcgtgaagcacttggtctgccgcacagtgatgtgttccgtcaggcgaaagatgtcgctgagagcgatcgcggcttctcgctggcgcagaaaatggtaggccgtgcctgtggcgtgaaaggcattcgtccgggcgcgtactgcgaaccgaaaatgacttctgtaggctctcaggacaccaccggcccgatgacccgtgatgaactgaaagacctggcgtgcctgggcttctcggctgacctggtgatgcagtctttctgccacaccgcggcgtatccgaagccagttgacgtgaacacgcaccacacgctgccggacttcattatgaaccgtggcggtgtgtcgctgcgtccgggtgacggcgtcattcactcctggctgaaccgtatgctgctgccggataccgtcggtaccggtggtgactcccatacccgtttcccgatcggtatctctttcccggcgggttctggtctggtggcgtttgctgccgcaactggcgtaatgccgctggatatgccggaatccgttctggtgcgcttcaaaggcaaaatgcagccgggcatcaccctgcgcgatctggtacacgccattccgctgtatgcgatcaaacaaggtctgctgaccgttgagaagaaaggcaagaaaaacatcttctctggtcgcattctggaaattgaaggtctgccggatctgaaagttgagcaggcctttgagctaaccgatgcgtccgccgagcgttctgccgctggttgtactatcaagctgaacaaagaaccgatcatcgaatacctgagctccaacatcgtcctgctgaagtggatgatcgcggaaggttacggcgatcgtcgtaccctggaacgccgtattcagggcatggaaaaatggctggcgaatcctgagctgctggaagccgatgcagatgcggaatacgcggcagtgatcgacatcgatctggcggagattaaagagccaatcctgtgtgctccgaacgatccggatgacgcacgtccgctgtctgcggtacagggcgagaagatcgacgaagtatttatcggttcttgcatgactaacatcggtcacttccgtgccgctggtaaactgctggatgcgcacaaaggtcagttgccgacccgcctgtgggtggcaccgccaacccgtatggacgccgcgcaactgacggaagaaggctactacagcgtcttcggtaagagcggggctcgtatcgagatcccgggctgttccctgtgtatgggtaaccaggcgcgtgtagcagacggtgcgacggtggtttccacctctacccgtaacttcccgaaccgtttgggtactggcgcgaatgtcttcctggcttctgcagaactggcggctgttgcggcgctgattggcaaactgccgacgccggaagagtaccagacctacgttgcgcaagtagataaaactgccgttgatacttatcgttatctgaacttcaaccagctttctcagtacaccgaaaaagccgatggggtgattttccagactgcggtgtaa

SEQ ID NO: 470655 - DNA, 363 bp, Shigella flexneri
atggattacgaatttctgcgcgatattaccggagtggtaaaggtgcgtatgtccatggggcatgaagtggtcgggcactggtttaatgaagaggtgaaagaaaacctggccttgcttgatgaagtggaacaagcagcgcacgcactgaaaggtagcgaacggtcctggcaacgggcagggcatgaatacaccctgtggatggacgctgaagaggtgatggttcgcgccaatcaactggaattcgctggcgatgaaatggaagaggggatgaactactacgacgaagaaagcctgtcgctatgcggcgttgaggattttctgcaggtcgtggcggcttaccgcaatttcgtgcagcagaagtaa

SEQ ID NO: 470656 - DNA, 795 bp, Shigella flexneri
ttgaaaaaactgaaactgcatggctttaataatctgaccaaaagtctgagtttttgtatttacgatatctgctacgccaaaactgccgaagagcgcgacggttatattgcttatatcgatgaactctataatgccaaccgtctgaccgaaatcctgtcagaaacctgttccattatcggggccaatattcttaacatcgcccgccaggattacgaaccacagggtgccagcgtcactattctggtgagtgaagaaccggttgacccgaaactcatcgacaaaacagaacaccccggcccactgccagaaacggtggttgctcatctcgataaaagtcatatttgcgtacatacctacccggaaagtcatcctgaaggcggtttatgtaccttccgcgccgatattgaagtctctacctgcggcgtgatttctccgctgaaggcgctgaattacctgatccaccagcttgagtccgatatcgtaaccattgattatcgcgtgcgcggttttactcgcgacattaacggtatgaagcactttatcgaccatgagattaattcgattcagaactttatgtctgacgatatgaaggcgctgtatgacatggtggatgtaaacgtctatcaggaaaatatcttccataccaagatgttgcttaaagagttcgaccttaagcactacatgttccacaccaaaccggaagatttaaccgacagcgagcgccaggaaattaccgctgcgctgtggaaagaaatgcgcgagatttattacgggcgcaatatgccagctgtttaa

SEQ ID NO: 470657 - DNA, 867 bp, Shigella flexneri
atggccgaaaaaaaacagtggcatgaaacgctacacgaccagtttgggcagtactttgcggtagataacgttctgtatcatgaaaagaccgatcaccaggatctgatcatttttgagaacgctgcatttggtcgcgtaatggcgctggatggcgtagtacaaaccaccgagcgcgacgagtttatctatcatgagatgatgacccatgttccgctactggcccacggtcacgcgaaacatgtgctgattatcggcggcggcgacggtgccatgctgcgtgaagtaacccgacataaaaacgttgagtcaatcacgatggtggaaatcgatgcgggtgtcgtgtcgttctgccgtcagtatctgcccaaccataacgccggtagctacgacgatccgcgctttcaactagtgatcgacgatggcgtcaatttcgttaatcaaaccagccagacctttgatgtcattatctccgactgcaccgatcctatcggtcccggcgaaagcctgttcacctcagcattttatgaaggctgcaaacgttgcctgaatcctggcggtatcttcgtcgcacaaaacggcgtctgctttttacagcaggaagaagccatcgacagccatcgcaaactcagccattacttcagcgacgttggcttttatcaggcggcgatcccgacctattacggcggtatcatgacttttgcatgggcgacagataacgacgccttacgccatctctcaaccgaaattattcaggcgcgttttctcgcttctggcctgaaatgccgttattacaatccggcaatccatacggcagcttttgccttacctcagtatctgcaagacgcactggcttcacagccgtcctaa

SEQ ID NO: 470658 - DNA, 348 bp, Shigella flexneri
atgaagacgtttttcagaacagtgttattcggcagcctgatcgccgtttgcgcaaacagttacgcgctcagcgagtctgaagccgaagatatggccgatttaacggcagtttttgtctttctgaagaacgattgtggttaccagaacttatctaacgggcaaattcgtcgcgcactggtctttttcgcccagcaaaaccagtgggatctcagtaattacgacaccttcgacatgaaagctctcggtgaagacagctaccgcgatctcagcggcattggcattcccgtcgctaaaaaatgcaaagccctggcccgcgattccttaagcctgcttgcctacgtcaaataa

SEQ ID NO: 470659 - DNA, 1551 bp, Shigella flexneri
atgcaacgtcgtgatttcttgaaatattccgtcgcactgggtgtggcttcagccttgccactgtggagccgtgcagtctttgcggcggaacgcccaacgttaccgatccctgatttgctcacgaccgatgcccgtaatcgcattcagttaactattggcgcaggtcagtccacctttggcgagaaaactgcaactacctggggctataacggcaatctgctggggccggcggtgaaattacagcgcggcaaagcggtaacggttgatatctacaaccaactggcggaagagacgacgttgcactggcacgggctggaagtaccgggtgacgtcgacggcggcccacagggaattattccgccaggtggcaagcgctcggtgacgttgaacgttgatcaacctgccgctacctgctggttccatccacatcaacatggcaagaccgggcgacaggtggcgatggggctggctggtctggtggtgattgaagatgacgagatcctgaaattaatgctgccaaaacagtggggtatcgatgatgttccggtgatcgttcaggataagaaatttagcgccgacgggcagattgattatcaactggatgtgatgaccgccgccgtgggctggtttggcgatacgctgctgaccaacggtgcaatctacccacaacacgctgccccgcgtggttggctgcgcctgcgtttgctcaatggctgtaatgcccgctcgctcaatttcgccaccagcgacaatcgcccgctgtatgtgattgccagcgacggtggtctgctacctgaaccggtgaaggtgagcgagctgccggtgctgatgggcgagcgttttgaagtgctggtggaggttaacgacaacaaaccctttgacctggtgacgctgccggtcagccagatggggatggcgattgcaccgtttgacaagccgcatccggtaatgcggattcagccgattgctattagtgcctccggtgctttgcctgacacattaagtagcctgcctgcgttaccttcgctggaagggctgacggtacgcaagctgcaactttctatggacccgatgctcgatatgatggggatgcagatgctaatggagaaatatggcgatcaggcgatggccggaatggatcacagccagatgatgggccatatggggcacggcaatatgaatcatatgaaccacggcgggaagttcgatttccaccatgccaataaaatcaacggtcaggcgtttgatatgaataagccgatgtttgcggcggcgaaagggcagtacgaacgttgggttatctctggcgtgggcgacatgatgctgcatccgttccatattcacggcacgcagttccgtatcttgtcagaaaatggcaaaccgccagcggctcatcgcgcgggctggaaagataccgttaaggtagaaggcaatgtcagtgaagtgctggtgaagtttaatcacaacgcaccgaaagaacatgcttatatggcgcacagccatctgctggagcatgaagatacggggatgatgttagggtttacggtataa

SEQ ID NO: 470660 - DNA, 2391 bp, Shigella flexneri
atggcaattaacaatacagcctcgcgacgattactcgtcacgctaacagccctttttgcagcgctttgcgggctgtatctactcattggcggaggctggctggtcgcgattggcggctcctggtactaccctatcgctggccttgtgatgctcggcgtcgcctggatgctgtggcgcagtaaacgcgccgcgctttggctatacgcagccctgctgctcggcaccatgatttggggcgtctgggaagttggtttcgacttctgggcgctgactccgcgcagcgatattctggtcttcttcggcatctggctgatcctgccgtttgtctggcgtcgcctggtcattcctgccagcggcgcagttgccgcactggtggtcgcactgctgattagcggtggtatcctgacctgggccggatttaacgatccgcaggagatcaacggcaccttaagcgccgatgccacacctgccgaagctatctcccccgttgccgatcaggactggcctgcgtatggccgcaatcaggaaggtcaacgcttttcaccactgaagcaaattcacgccgataacgtccacaagctgaaagaagcctgggtgttccgtactggcgatgtgaagcagccgaacgatccgggtgaaatcaccaatgaagtgacgccgattaaagtgggcgataccctttacctgtgtaccgctcaccagcgcctgtttgcgcttgatgccgccagcggcaaagagaaatggcattacgatcctgagctgaaaaccaacgagtctttccagcacgtaacctgccgtggcgtctcttatcatgaagccaaagcagaaacggcttcgccggaagtgatggcggattgcccgcgtcgtatcattcttccagtgaatgatggtcgcctgattgcgattaacgctgaaaacggcaaactgtgcgaaaccttcgccaataaaggcgtgctcaatctgcaaagcaatatgccagacaccaaaccgggtctgtatgagccgacttctccgccaattatcaccgataaaaccatcgtgatggccggttcagtcaccgataacttctcaacccgcgaaacgtctggcgtgatccgtggttttgatgtcaacaccggggagctgctgtgggcttttgatccgggcgcgaaagatccgaacgcaatcccgtcagacgaacacacctttacctttaactcaccaaactcgtgggcaccagcggcctatgacgcgaagctggatctggtctatctgccgatgggcgtgaccacgccggatatctggggcggtaaccgcacaccggaacaggaacgttatgccagctcgattctggcgctgaatgccactaccgggaaactggcgtggagctaccagaccgttcaccacgacctgtgggacatggatcttccggcacagccgacgctggcggacatcaccgttaatggtcagaaagtgccgattatttacgctccggcgaaaaccggtaacatttttgtgctcgatcgtcgtaatggcgaactggtggttccggccccggaaaaaccggttccccaaggtgctgccaaaggcgattacgttacccctactcaaccattctcggaactgagcttccgtccgacgaaagatttgagcggtgcggatatgtggggagccaccatgtttgaccaactggtgtgccgcgtgatgttccaccagatgcgctatgaaggcattttcacgccgccatctgaacagggtacgctggtcttcccgggtaacctggggatattcgaatggggcgggatttccgttgatccaaatcgtgaagtggcaattgccaacccaatggcactgccgtttgtttcgaaactgctcccgcgtggtcctggcaacccgatggagcagccgaaagatgccaaaggcacgggtacggaatccggcattcagccacagtacggtgtaccgtatggtgtcacgctcaacccgttcctctcaccatttggtctgccatgtaaacagccagcatggggttatatctcggcgctggatctgaaaactaatgaagtggtgtggaagaaacgtattggtacgccgcaggacagtatgccgttcccgatgccggttccggtgccgttcaatatgggtatgccgatgctgggcgggccaatctccacggcgggtaacgtgctgtttatcgccgctacggcagataactacctgcgcgcttacaacatgagcaacggtgaaaaactgtggcagggtcgtttaccggcgggtggtcaggcaacaccgatgacctatgaagtgaatggcaagcagtacgtggtgatctccgcaggcggtcacggttcatttggtacgaagatgggcgactatattgtggcttatgccctgccggatgatgtgaaataa

SEQ ID NO: 470661 - DNA, 537 bp, Shigella flexneri
atgaaacatactgtagaagtaatgatccccgaagcggagattaaagcgcgtatcgccgaactgggtcgtcagattactgagcgttacaaagacagcggcagcgatatggtgctggtgggtctgctgcgtggctcatttatgtttatggcggacctgtgccgtgaagttcaggtatctcatgaagtcgactttatgaccgcctccagctacggtagcggcatgtccaccacccgtgatgtgaaaatcctcaaagatctggatgaagatatccgtggcaaggacgtgctgattgttgaagatatcatcgactcggggaatacactgtcgaaagtgcgtgagatcttaagcctgcgcgaaccgaagtcgttggcgatttgtacgctgctggataaaccgtcccgtcgtgaagtgaacgtcccggttgaatttatcggtttctcgatcccggatgagtttgtggtgggttacggcattgattacgcacagcgttaccgtcatctgccgtatattggcaaagtgattctgctggacgagtaa

SEQ ID NO: 470662 - DNA, 663 bp, Shigella flexneri
atgaaagacatagatacactcatcagcaacaatgcactatggtcaaaaatgctggtggaagaggatcccgggttttttgagaaactggcacaagcgcaaaaaccgcgctttctatggattggatgttccgacagtcgcgttcctgcagaacgtttaaccggtcttgagccgggcgaactctttgttcaccgtaatgttgctaacctagtcattcacaccgacctgaactgcctttccgtggttcagtatgcagtggatgtactcgaagttgaacacattattatctgtggccactacggttgcggcggcgtacaagccgccgttgaaaacccggaactggggcttatcaacaactggctgctgcatatccgcgatatctggttcaaacatagctcattgctcggcgaaatgccgcaagagcgccgtctggataccttgtgtgaactgaacgtcatggaacaggtgtataacctgggccactccaccattatgcaatcagcgtggaaacgcgggcagaaagttaccattcacggctgggcctacggcattcacgacggcttgctgcgtgatctggatgttaccgccaccaaccgcgaaacccttgagcaacgttaccgtcacgggatttccaacctcaagctgaaacacgccaaccacaaataa

SEQ ID NO: 470663 - DNA, 927 bp, Shigella flexneri
atgaccattgcactggaacttcaacagcttaaaaaaaactatccaggcggcgttcaggcgcttcgtggaatagatttgcaggtcgaagcgggtgatttttatgcgcttctcgggccgaacggggccgggaaatcgaccactatcggtattatcagctctctggtaaataaaacctccgggcgggtcagcgtatttggttacgatctcgagaaagatgtcgtgaacgctaaacgtcagttgggactggtgccgcaggaatttaacttcaacccgtttgaaaccgtgcagcaaattgtggtgaatcaggcagggtactacggtgtggagcgcaaagaggcgtacatccgcagcgaaaaatatcttaagcagctcgatttatggggaaaacgcaacgaacgtgcgcgtatgttatctggcgggatgaagcgccgtttaatgattgcccgtgcgttaatgcatgaacctaaactactgattctcgacgaaccgaccgcaggcgtggatattgaacttcgccgctcaatgtggggctttttgaaggatttaaacgacaaaggcaccaccatcattcttaccacacactacctggaagaagcagaaatgctgtgccgcaatatcggcattattcaacatggtgagctggtggaaaatacctcgatgaaggcgctgctggcgaagctgaaatcggaaacctttattctcgatctcgcaccgaaaagtccgttaccgaagctcgatggctatcagtatcgactggtcgataccgcgacgctggaagttgaagtgctacgtgagcaggggatcaacagcgtatttacgcagttaagtgagcagggcattcaggtattaagtatgcgtaacaaagctaaccgtctggaagagctgtttgtttcactggttaatgaaaaacaaggagatcgcgcatga

SEQ ID NO: 470664 - DNA, 768 bp, Shigella flexneri
atgcatctttactgggtggcgctaaaaagcatctgggcgaaagagatccatcgctttatgcgtatctgggtgcagacgctggtgccgccagtcatcaccatgaccctttactttattatcttcggtaacctgataggttcgcgtattggcgatatgcatggcttcagctatatgcagttcatcgtaccggggctgatcatgatgtcggtgatcaccaacgcctacgctaacgtcgcgtcatcattttttggtgccaagttccagcgtaatattgaagagctgctggtagcgccggttccgactcacgtcattattgccggatatgtcggcggtggcgtggcgcgtggtctgtttgttggcattctggtgacggcaatttcactgttttttgtgccgtttcaggtgcattcgtgggtattcgttgccttaaccttggtgctcacggcggtgctattctcccttgcgggtttgctgaacggcgtgtttgccaaaacgttcgatgacatcagcctggtgccaacctttgtgttaacgccactcacgtatttgggcggggtcttttactcactgactttgttgccgccgttctggcaagggctgtcgcacctgaacccaatcgtttatatgatcagtggtttccgctacggcttcctcggtataaatgatgtgccgctggtcactacctttggcgtactggtggtctttattgtggcgttttatttgatctgttggtcgctgatccaacgtggacgtggtttgcgtagctaa

SEQ ID NO: 470665 - DNA, 441 bp, Shigella flexneri
atgttaggttgggtaattacctgtcacgatgaccgggcgcaagagatactggatgcgctggagaaaaaacatggggcacttcttcagtgccgggccgtgaatttctggcgcggattaagctctaatatgctcagccgcatgatgtgcgatgctctgcatgaagcggactctggtgagggtgtcatcttcttaaccgatatagccggagcgccaccgtatcgcgtggcttcattattaagccacaaacactcccgttgcgaagtgatttctggtgtcacgttaccgttaattgaacagatgatggcttgccgtgaaaccatgaccagttcagagtttcgtgagtgtattgtcgaactgggtgggccggaggtgagtagtctttggcaccaacaacaaaaaaatccgcctttcgtcctcaaacataatttgtatgagtattaa

SEQ ID NO: 470666 - DNA, 1230 bp, Shigella flexneri
atgtataaacaagctgttattctcctgctgatgctgtttaccgcaagtgtcagtgccgcgttacctgcccgttatatgcaaaccatcgaaaatgctgcggtctgggcgcaaattagtgacaagatggtgaccgtggggaatattcgggccggacaaatcattgccgtggagcccactgccgcaagttattacgcatttaattttggctttggtaaagggtttatcgataaagggcatctcgagccagttcaggggcgacaaaaagttgaagacggtttgggtgacctcaacaagccgctgagtaatcagaacttaattacctggaaagatacgccggtctacaacgcgccgagtgtgggcagtgcgccatttggggtactggcggacaatttgcgctacccgattttgcataaactgaaagacaggttaaatcaaacctggtatcagatccgtattggcgatcgactggcctatatcagcgcgctggatgcccaacccgataatggcctgccggtgctaacttatcaccatattctgcgcgacgaagaaaacacccgttttcgccatacttcgacgaccacctcggtacgcgctttcaataaccaaatggcctggctgcgcgacaggggatacgcgacactgagcatggctcagctggaaggttacgtgaagaatacgatcaatctccctgcgcgagcggtggtgattacctttgatgatggcctcaagtcggtgagccgctatgcgtatcctgtgttgaaacaatatggcatgaaggcgacggtgtttattgttacctcacgcatcaaacgtcacccgcagaagtggaacccaaaatcgctgcaatttatgagcgtttctgagcttaacgaaattcgcgatgtttttgatttccagtcacatacccattttttgcatcgggtagatggttatcgccgacccatattactgagccgtagtgagcacaatattctgtttgattttgcacgttcacgccgcgctctggcgcaatttaatccacatgtctggtatctttcgtatccgtttggcggctttaatgacaaagccgtgaaggcagcaaacgatgccggatttcacctggcggtgacaaccatgaaaggcaaagtaaaaccgggggataatccgttgttactaaaacgactttatatcttaagaacggattcgctggagaagatgtcgcggctggtgagtaaccagccgcagggataa

SEQ ID NO: 470667 - DNA, 381 bp, Shigella flexneri
atgattcgcacgatgctgcagggcaaactccaccgcgtgaaagtgactcatgcggacctgcactatgaaggttcttgcgccattgaccaggattttcttgacgcagccggtattctcgaaaacgaagccatcgatatctggaatgtcaccaacggcaagcgtttctccacttatgccatcgcggcagaacgcggttcgagaattatttctgttaacggtgcggcggcccactgcgccagcgtcggcgatattgtcatcatcgccagcttcgttaccatgccagatgaagaagctcgcacctggcgacccaatgtcgcctattttgaaggcgacaatgaaatgaaacgtaccgcgaaagcgattccggtacaggttgcttga

SEQ ID NO: 470668 - DNA, 903 bp, Shigella flexneri
atggatgcaccgagtaccacaccgcatgacgcggtatttaaacaatttttaatgcatgcggagacggctcgcgactttctggagatacatttgccagtggaattacgcgaactttgtgatctcaacacgcttcatttagagtcggggagtttcattgaagagtgcctgaaaggtcacagcacggacgtgctctattccatgcaaatgcagggcaatcccggttatctgcatgttgtgattgaacaccaaagcaagccggataagaaaatggcctttcgcatgatgcgttattctattgctgccatgcaccggcatctggaggctggccacgataagctgccgctggtggtgccgatactgttttatcagggcgaggccacaccttatccgctctcaatgtgctggtttgatatgttttactcgccggagctggcgcgacgcgtctataacagtcctttcccgctggtggatatcaccatcacaccggatgacgaaatcatgcaacatcggcggattgcgattctcgaactactgcaaaaacatattcgccagcgcgacttaatgttattgctggagcaactggtcacgctgattgacgaagggtacactagcggaagtcagttagttgccatgcaaaactatatgctgcaacgcggtcatactgaacaagcggatttgttttatggtgtgctgagagacagggaaacgggagggaagtctatgatgacgctggcgcagtggtttgaagagaaagggattgagaaggggattcagcagggaagacaggaggaaaggcaagaattcgccctgcgtcttctaagtaaaggaatgtctcgggaagacgttgcagagatggcaaatttacctcttgctgagattgataaggtaattaaccttatttaa

SEQ ID NO: 470669 - DNA, 852 bp, Shigella flexneri
gtgttaattatcgaaaccctgccgctgctgcgtcagcaaattcgccgcctgcgtatggaaggcaagcgcgtggcgctggtgcctactatgggtaatctgcacaatggccatatgaagctggtcgacgaagccaaagcccgcgccgatgtggtcgtcgtcagtattttcgttaacccgatgcagttcgaccgcccggaagatctggcacgttatccacggaccttgcaggaggactgcgagaagctaaacaaacgtaaagtggatttagttttcgccccttcggtaaaagagatctacccgaacggtactgaaacccacacttacgttgacgttcctggcctttcgaccatgctggaaggtgccagccgtccgggacattttcgcggcgtttcgactattgtcagcaagctgttcaacctggtccagccggacatcgcctgcttcggtgaaaaagattttcagcaactggcgttgatccgcaaaatggttgccgatatgggcttcgatattgagattgtcggtgtgccaattatgcgcgccaaagacggtctggcgctaagttcccgtaacggttatctgacggcggaacaacgcaaaattgcgcctggtctgtacaaagttttaagttcgattgctgacaaattgcaggctggggaacgggatctcgatgaaattattaccattgcggggcaagaactgaatgaaaaaggcttccgcgccgatgatattcagattcgcgatgccgacacattgctggaagtttctgaaaccagcaaacgggcagtaattctggtagccgcctggcttggcgatgctcgcctgatcgacaacaaaatggtcgagctggcgtaa

SEQ ID NO: 470670 - DNA, 795 bp, Shigella flexneri
atgaaaccgaccaccattgcttcacttcagaaatataagcaggataaaaagcgtttcgcgaccatcaccgcttacgactacagcttcgcgaaactatttgctgatgaagggcttaacgtcatgctggtaggcgactcgctgggcatgaccgttcagggccacgattccactctgccagtaaccgttgctgatatcgcctaccacactgccgccgtacgtcgcggcgcaccaaactgcctgctattggctgacctgccgtttatggcgtatgccacgccggaacaagcctttgaaaacgccgcaacggttatgcgtgccggtgccaatatggtcaaaattgagggcggtgagtggctggtcgaaaccgtaaaaatgctgaccgaacgtgccgttcctgtatgtggtcacttaggtttaaccccacagtcagtgaatattttcggtggctacaaagtacaggggcgcggcaatgaagcgagcgatcgactactcagcgatgcattagccttagaagccgcgggggcacagctgctggtgctggaatgcgtgccggttgagctggcaaaacgtattaccgaagcactggcgatcccggttattggtattggtgcaggcaacgtcactgacgggcaaatcctcgtgatgcacgacgcctttggtattaccggcggtcacattcctaaattcgctaaaaatttcctcgccgaaacgggcgacatccgcgcggctgtgcggcagtatatggctgaagtggagtccggcgtttatccgggcgaagaacacagtttccattaa

SEQ ID NO: 470671 - DNA, 2448 bp, Shigella flexneri
atgaatgctccgtttacatattcatcgcccacgcttagcgtagaagctcttaagcactctatcgcttacaagctgatgtttacgattggaaaggacccggtcgtcgccaataaacatgaatggctgaacgcaacgttatttgctgtgcgcgatcgtctcgtggagcgctggttacgttcaaaccgtgcccagttgtcgcaagaaactcgtcaggtttactacctgtcgatggagtttttgattggccgtacgctctccaacgccatgttgtcgctaggaatttacgaagatgtacagggcgcactggaagcgatggggttaaatctcgaagagctgattgatgaagaaaatgacccaggcctcggtaacggtggcctgggacgtctggcggcttgcttccttgattctctggcgacgttagggttgccggggcgcggttacggcatccgctatgactacggtatgttcaagcagaacatcgttaacggtagccagaaagagtcgccagactactggctggaatacggtaacccgtgggaattcaaacgccacaacacgcgctataaagtccgttttggtggtcgcattcagcaggaaggtaaaaaaacgcgctggattgaaaccgaagagattctgggagtcgcttacgatcagataatccctggttacgacaccgacgcgaccaacacgctgcgtttgtggagtgcgcaagccagtagcgaaattaacctcggtaaattcaaccagggtgactacttcgcggcagtggaagataaaaaccactccgagaacgtatctcgcgtactgtatccggatgactccacctactccgggcgtgagctgcgcctgcgtcaggaatacttcttggtttcctcgaccattcaggacattttaagccgtcattatcagttgcataaaacctacgataacctggcggataaaatcgcgattcatctcaatgatacccatccggtactgtcgattcctgagatgatgcgtctgctgatcgatgagcaccaatttagctgggacgacgcgtttgaggtgtgttgtcaggtcttctcctacactaaccacacgctgatgagcgaggcgctggaaacctggccggttgatatgctgggtaaaattctgccgcgtcacctgcagatcatctttgaaatcaacgactatttcctgaaaaccttgcaggaacagtatccgaacgataccgatctgctgggacgggcgtcgatcattgatgaatccaacggtcgtcgtgtgcgtatggcctggctggcggttgttgtgagccacaaagttaacggtgtatcggaactgcactctaatctgatggtgcaatcgttgtttgccgactttgcgaaaatcttcccgggtcgtttcaccaacgtcaccaacggtgtgacgccgcgtcgctggctggcggtagcgaacccatcgctttcagccgtgctggacgaacacctgggccgtaactggcgcaccgaccttagcctgcttaatgagctgcaacaacactgtgatttcccaatggttaatcacgctgtgcatcaggcgaagctggagaacaaaaagcgtctggcagagtatatcgcccagcagctgaatgtggtggtgaatccaaaggcgttgttcgatgtacaaatcaaacgtattcacgaatacaaacgtcaattgatgaatgtgttgcatgtgattacccgctataaccgcatcaaggccgacccggatgcgaagtgggtaccgcgcgtgaatatttttggcggtaaggcggcttcggcctattacatggcgaagcacattattcatttgatcaatgacgtagcgaaagtgatcaacaacgatccgcagattggcgataagctgaaagtcgtgttcatcccgaactacagcgttagcctggcgcagttgatcattccggcggcagatctgtctgaacagatttcgctggcagggacggaagcttccggcaccagtaacatgaagtttgcgcttaacggtgcgctgactatcggtacgttggacggtgcgaatgtcgagatgctggatcatgtcggtgctgacaatatctttatttttggtaacacagcggaagaagtggaagaactgcgtcgtcagggctacaaaccgcgtgaatactacgagaaagatgaggagctgcatcaggtgctgacgcaaatcggcagcggtgtattcagtccggaagatccgggtcgctatcgcgatctggttgattcgctgatcaacttcggcgatcactaccaggtactggcggattatcgcagctatgtcgattgtcaggataaagtcgacgaactctacgagcttcaggaagagtggaccgcaaaagcgatgctgaacattgccaatatgggctacttctcttctgaccgtactatcaaagagtacgctgatcatatctggcatatcgatccggtgagattgtaa

SEQ ID NO: 470672 - DNA, 1434 bp, Shigella flexneri
atgcaggttttacatgtatgttcagagatgttcccgctgcttaaaaccggcggtctggctgatgttattggggcattacccgcagcacaaatcgcagacggcgttgacgctcgcgtactgttgcctgcatttcccgatattcgccgtggcgtgaccgatgcgcaggtagtatcccgtcgtgatactttcgccgggcatatcacgctgttgttcggtcattacaacggggttggcatatacctgattgacgcgccgcatctctatgatcgtccgggaagcccgtatcacgataccaacttatttgcctataccgacaacgtattgcgttttgcgctgctggggtgggttggggcagaaatggccagcgggcttgacccattctggcgtcctgatgtggtgcatgcgcacgactggcatgcaggtcttgcgcctgcgtatctggcggcgcgcgggcgtcctgcgaagtcggtgtttactgtgcacaacctggcctatcaaggcatgttttatgcacatcacatgaatgacatccaattgccatggtcattctttaatattcatgggctggaattcaacggacaaatctctttcctgaaggccggtctgtactatgccgatcacattacggcggtcagtccaacctacgctcgcgagatcaccgaaccgcagtttgcctacggtatggaaggtctgttgcaacagcgtcaccgtgaagggcgtctttcaggcgtactgaacggcgtggacgagaaaatctggagtccagagacggacttactgttggcctcgcgttacacccgcgatacgttggaagataaagcggaaaataagagccagttacaaatcgcaatggggcttaaggttgacgataaagtgccgctttttgcagtggtgagccgtctgaccagccagaaaggtctcgacctggtgctggaagccttaccggggcttctggagcagggcgggcagctggcgctactcggcgcgggcgatccggtgctgcaggaaggtttccttgcggcggcagcggaataccccggtcaggtgggcgttcagattggctatcacgaagcattttcgcatcgcattatgggcggcgcggacgtcattctggtgcccagccgttttgaaccgtgcggcttaacgcaactttatggattgaagtacggtacgctgccgttagtgcggcgcaccggtgggcttgctgatacggtttctgactgttctcttgagaaccttgcagatggcgtcgccagtgggtttgtctttgaagatagtaatgcctggtcgctgttacgggctattcggcgtgcttttgtactgtggtcccgtccttcactgtggcggtttgtgcaacgtcaggctatggcaatggattttagctggcaggtcgcggcgaagtcgtaccgtgagctttactatcgcttgaaatag

SEQ ID NO: 470673 - DNA, 1296 bp, Shigella flexneri
atggttagtttagagaagaacgatcacttaatgttggcgcgccagctgccattgaaatctgttgccctgatactggcgggaggacgtggtacccgcctgaaggatttaaccaataagcgagcaaaaccggccgtacacttcggcggtaagttccgcattattgactttgcgctgtctaactgcatcaactctgggatccgtcgtatgggcgtgatcacccagtaccagtcccacactctggtgcagcacattcagcgcggctggtcattcttcaatgaagaaatgaacgagtttgtcgatctgctgccagcacagcagagaatgaaaggggaaaactggtatcgcggcaccgcagatgcggtcacccaaaacctcgacattatccgccgttataaagcggaatacgtggtgatcctggcgggcgaccatatctacaagcaagactactcgcgtatgcttatcgatcacgtcgaaaaaggcgcacgttgcaccgttgcttgtatgccagtaccgattgaagaagcctccgcatttggcgttatggcggttgatgagaacgataaaattatcgaattcgttgaaaaacctgctaacccaccgtcaatgccgaacgatccgagcaaatctctggcgagtatgggtatctacgtctttgacgccgactatctgtatgaactgctggaagaagacgatcgtgatgagaactccagccacgactttggcaaagatttgattcccaagatcaccgaagccggtctggcctatgcgcacccgttcccgctctcttgcgtacaatccgacccggatgccgagccgtactggcgcgatgtgggtacgctggaagcttactggaaagcgaatctcgatctggcctctgtggtgccggaactggatatgtacgatcgcaattggccaattcgcacctacaatgaatcattaccgccagcgaaattcgtgcaggatcgctccggtagccacgggatgacccttaactcactggtatccggcggttgtgtgatctccggttcggtggtggtgcagtccgttctgttctcgcgcgttcgcgtgaattcattctgcaacattgattccgccgtattgttaccggaagtatgggtaggtcgctcgtgccgtctgcgccgctgcgtcatcgatcgtgcttgtgttatcccggaaggcatggtgattggtgaaaacgcagaggaagatgcacgtcgtttctatcgttcagaagaaggcatcgtgctggtaacgcgcgaaatgctacggaagttagggcataaacaggagcgataa

SEQ ID NO: 470674 - DNA, 1974 bp, Shigella flexneri
atgacacaactcgccattggcaaacccgctcccctcggcgcgcattacgacggtcagggcgtcaacttcacacttttctccgctcatgccgagcgggtagaactgtgtgtctttgacgccaatggccaggaacatcgctatgacttgccagggaacagtggcgacatttggcacggttatctgccggatgcgcgcccgggtttgcgttatggttatcgcgttcatggcccctggcaacccgccgaggggcatcgctttaacccggcgaagttgttgattgatccttgcgcgcggcaaattgacggggagtttaaagataacccgctgctgcacgccggtcataatgaacctgactatcgcgacaacgccgccattgcgccgaaatgcgtagtggtggttgatcactatgactgggaagatgacgccccgccgcgcacgccgtggggcagcaccatcatttatgaagcccatgtcaaaggattaacgtacttgcacccggagatcccggtcgagatccgtggcacttataaagccctcgggcatccggtgatgatcaactatttgaaacaattgggcattaccgcgctggaactgctgccagtggcgcagtttgccagtgaaccacgtctgcaacgcatggggctaagtaactactggggttacaacccggtggcgatgtttgcgctgcatccggcgtatgcctgctcgccagaaacggcgctggatgagtttcgcgatgcaatcaaagcactgcataaagcgggtatcgaagtcattcttgatatcgtgctcaaccatagtgcggaactggacctcgacggcccgttattctcgctgcgtgggatcgataaccgtagctattattggataagagaagacggcgattatcacaactggaccggttgcggcaacacgctcaatttgagtcatccggcggtggtggattatgccagcgcctgcctgcgttattgggtagaaacctgccacgtcgatggtttccgctttgatctggcggcagtcatgggccgtacgccagagttccgtcaggatgcgccgttgtttaccgctatccagaactgcccggtgctctcgcaggtgaagttaattgctgaaccgtgggatatcgctcctagtggttatcaggtgggaaatttcccgccgctgtttgccgagtggaacgatcatttccgcgatgctgcccgtcgtttctggctacattatgatttgcctctgggggcgtttgccgggcgttttgctgcctccagcgatgtttttaaacgtaatggtcgtctgccgagtgccgcgattaatctcgtcaccgcgcatgacggttttacgcttcgcgactgcgtttgcttcaaccataaacacaatgaagcaaacggagaagaaaatcgcgacgggaccaacaacaattacagtaacaatcatggtaaagaagggttaggcggtactcttgacctggttgaacggcggcgcgacagcattcatgccctgttaacaacgttgttgctctcccagggcacgccgatgttactggccggtgacgaacatggtcacagccagcatggcaataacaatgcctactgtcaggataaccaattaaactggttggactggtcgcaggcaagcagtggtttaaccgcatttaccgccgcgttaatccatctgcgcaagcgcattcccgctttggtggagaatcgctggtgggaagaaggtgacggcaatgtccgttggctaaatcgatatgctcaacctttaagcacggatgagtggcaaaacgggccgaaacagctgcaaattctgctctcggatcgctttttgatcgcaattaacgccacgcttgaggtaacagagattgttttacctgctggggagtggcacgccattcccccattcgctggagaggataacccagtgattacggttgtctggcagggacctgcacacggattgtgtgtgttccagagatga

SEQ ID NO: 470675 - DNA, 2187 bp, Shigella flexneri
atgtccgatcgtatcgatagagacgtgattaacgcgctaattgcaggccattttgcggatcctttttccgtactgggaatgcataaaaccaccgcgggactggaagtccgtgcccttttacccgacgctaccgatgtgtgggtgattgaaccgaaaaccgggcgcaaactcgcaaaactggagtgtctcgactcacggggattctttagcggcgtcattccgcgacgtaagaattttttccgctatcagttggctgttgtctggcatggtcagcaaaacctgattgatgatccttaccgttttggtccgctaatccaggaaatggatgcctggctattatctgaaggtactcacctgcgcccgtatgaaaccttaggcgcgcatgcagatactatggatggcgtcacaggtacgcgtttctctgtctgggctccaaacgcccgtcgggtctcggtggttgggcaattcaactactgggacggtcgccgtcacccgatgcgcctgcgtaaagagagcggcatctgggaactgtttatccctggggcgcataacggtcagctctataaatacgagatgattgatgccaatggcaacttgcgtctgaagtccgacccttatgccttcgaagcgcaaatgcgcccggaaaccgcgtctcttatttgcgggctgccggaaaaggttgtacagactgaagagcgcaaaaaagcgaatcagtttgatgcgccaatctctatttatgaagttcacctgggttcctggcgtcgccacaccgacaacaatttctggttgagctaccgcgagctggccgatcaactggtgccttatgctaaatggatgggctttacccacctcgaactactgcccattaacgagcatcccttcgatggcagttggggttatcagccaaccggcctgtatgcaccaacccgccgttttggtactcgcgacgacttccgttatttcattgatgccgcacacgcagctggtctgaacgtgattctcgactgggtgccaggccacttcccgactgatgactttgcgcttgccgaatttgatggcacgaacttgtatgaacacagcgatccgcgtgaaggctatcatcaggactggaacacgctgatctacaactatggtcgccgtgaagtcagtaacttcctcgtcggtaacgcgctttactggattgaacgttttggtattgatgcgctgcgcgtcgatgcggtggcgtcgatgatttatcgtgactacagccgtaaagagggggagtggatcccgaacgaatttggcgggcgcgagaatcttgaagcgattgaattcttgcgtaataccaaccgtattcttggtgagcaggtttccggtgcggtgacaatggctgaggagtctaccgatttccctggcgtttctcgtccgcaggatatgggcggtctgggcttctggtacaagtggaacctcggctggatgcatgacaccctggactacatgaagctcgacccgatttatcgtcagtatcatcacgataaactgaccttcgggatgctctacaactacactgaaaacttcgtcctgccgttgtcgcatgatgaagtggtccacggtaaaaaatcgattctcgaccgcatgccgggcgacgcatggcagaaattcgctaacctgcgcgcttactatggctggatgtgggcatttccgggcaagaaactgctgttcatggggaacgaatttgcccagggccgcgagtggaaccatgacgccagcctcgactggcatctgttggaaggcggcgataactggcaccacggtgtccagcgtctggtgcgcgatctgaacctcacctaccgccaccataaagcaatgcatgaactggattttgacccgtacggctttgaatggctggtggtggatgacaaagaacgctcggtgctgatctttgtgcgtcgcgataaagagggtaacgaaattatcgttgccagtaactttacgccggtgccgcgtcatgattatcgcttctgcattaatcagccaggtaaatggcgtgaaatcctcaataccgattccatacactatcacggcagtaatgcaggcaatggcggcacggtacacagcgatgagattgccagccacggtcgtcagcattcactaagcctgacgctaccaccgctggccactatctggctggttcgggaggcagaatga

SEQ ID NO: 470676 - DNA, 1104 bp, Shigella flexneri
atgaaaaatgttggttttatcggctggcgcggtatggtcggctccgttctcatgcaacgcatggttgaagagcgcgacttcgacgccattcgccctgtcttcttttctacttctcagcttggccaggctgcgccgtcttttggcggaaccactggcacacttcaggatgcctttgatctggaggcgctaaaggccctcgatatcattgtgacctgtcagggcggcgattataccaacgaaatctatccaaagcttcgtgaaagcggatggcaaggttactggattgacgcagcatcgtctctgcgcatgaaagatgacgccatcatcattcttgaccccgtcaatcaggacgtcattaccgacggattaaataatggcatcaggacttttgttggcggtaactgtaccgtaagcctgatgttgatgtcgttgggtggtttattcgccaatgatcttgttgattgggtgtccgttgcaacctaccaggccgcttccggcggtggtgcgcgacatatgcgtgagttattaacccagatgggccatctgtatggccatgtggcagatgaactcgcgaccccgtcctctgctattctcgatatcgaacgcaaagtcacaaccttaacccgtagcggtgagctgccggtggataactttggcgtgccgctggcgggtagcctgattccgtggatcgacaaacagctcgataacggtcagagccgcgaagagtggaaagggcaggcggaaaccaacaagatcctcaacacatcttccgtaattccggtagatggtttatgtgtgcgtgtcggggcattgcgctgccacagccaggcattcactattaaattgaaaaaagatgtgtctattccgaccgtcgaagaactgctggctgcgcacaatccgtgggcgaaagtcgttccgaacgatcgggaaatcactatgcgtgagctaaccccagctgccgttaccggcacgctgaccacgccggtaggccgcctgcgtaagctgaatatgggaccagagttcctgtcagcctttaccgtgggcgaccagctgctgtggggggccgcggagccgctgcgtcggatgcttcgtcaactggcgtaa

SEQ ID NO: 470677 - DNA, 594 bp, Shigella flexneri
atgaatgaaatcatttctgcagcagttttattgatcctgattatggatccgctcggaaacctgcctattttcatgtccgtactgaaacatactgaaccgaaaagacggcgggcaatcatggtgcgagagttgcttattgctctcctggtgatgctggtgttcctgtttgcgggtgagaaaattctggcatttctcagcctgcgagcagaaaccgtctccatttctggcggcatcattctgtttctaatcgccattaagatgattttccccagcgcttcaggaaatagcagcgggcttccggcaggtgaagagccatttatcgtgccgttggcaattccgttagtcgccgggccgactattctcgccacgctgatgttgttgtctcatcagtacccgaatcagatgggacatctggtgattgctctgctgctggcctggggcggcacctttgtcatcctgctacagtcttcgctatttttacgtctgctgggcgagaaaggggtgaacgcacttgaacgcctgatgggattgattctggtgatgatggcaactcagatgttcctcgacggcattcgaatgtggatgaaggggtaa

SEQ ID NO: 470678 - DNA, 1341 bp, Shigella flexneri
gtgactacattaacgcttgttttaacagcagtagggtctgttttactgctgctgtttttagtcatgaaggcgcgtatgcacgctttcctggctttgatggtggtgtccatgggggctggccttttttccggtatgccgctcgataaaatcgcagcgacgatggaaaaagggatgggaggcaccctcggcttcctggcggtggttgtcgccctgggagctatgtttggcaagatcttatatgaaaccggcgcagtcgatcagattgccgtcaaaatgctcaaatccttcggtcacagccgcgcgcattatgccatcggccttgcggggctggtctgtgcgctaccgctgttctttgaagtggcgattgttctgctgattagcgttgctttctcaatggcgcgccacaccggtacgaacctggtgaagctggtaatcccattattcgcaggcgtggcggccgcggcagcgttcctggtgcctgggccagcgccaatgctgctggcatcgcagatgaatgccgactttggctggatgatcctgattggcctgtgtgcggcaattccgggaatgattattgccgggccgctgtggggtaacttcatcagccgttacgttgagctgcatattcctgacgacatcagcgaaccgcatctcggcgaaggtaaaatgccatctttcggattcagcctgtcgctgatcctgttgccgctggtgctggtggggctgaaaaccattgccgcgcgttttgtgccagaaggctctaccgcttacgaatggttcgagtttattggtcatccgtttaccgcgattctggttgcttgtctggtagcgatttatggcctggcaatgcgtcagggcatgccaaaagacaaagtgatggagatttgcggtcacgcgctgcaaccggcggggatcattctgctggtgattggtgcaggcggcgtgttcaaacaggtgctggttgactctggcgtaggtccggcactgggcgaagcgttaaccggcatgggcctgccgattgctatcacctgcttcgtgctggctgctgcagtgcgcatcattcagggggctgccaccgtagcctgtttaacggcggtgggactggtgatgccagtcattgaacaactgaactactctggtgcgcaaatggcggcactgtcgatttgtatcgctggtggttcgattgttgtcagccacgttaacgacgctggtttctggttgttcggtaaatttaccggcgcgaccgaagccgaaacgctgaaaacctggaccatgatggaaaccatcctcggcactgttggtgccatcgttgggatgattgcgttccagctgttgagttaa

SEQ ID NO: 470679 - DNA, 528 bp, Shigella flexneri
ttgagcacgactaaccatgatcaccacatttacgtcttgatgggcgtatcgggcagcggcaaatctgcggtcgccagtgaagtggcgcatcaacttcatgccgcgtttcttgatggcgatttcctccatccacggcgcaatatcgaaaaaatggcgtctggcgaaccgctgaatgacgacgatcgcaaaccctggttgcaggcgctgaacgactccgcgtttgctatgcagcgcaccaataaagtgtcgctgatcgcctgttctgcactgaaaaagcactatcgcgacttgctgcgtgaaggtaatccgaatctctctttcatctacctgaaaggcgattttgatgtgattgaaagtcgcctgaaagcgcgcaaaggccatttctttaaaacccaaatgttggtgacgcagtttgaaacgctgcaggagccgggtgcggacgaaaccgatgtactggtggtggatatcgatcaaccgctggaaggtgttgtggcaagcaccattgaggttattaaaaaaggcaaataa

SEQ ID NO: 470680 - DNA, 996 bp, Shigella flexneri
atgaaaaagaaaagacccgtacttcaggatgtggctgaccgtgtaggcgtgaccaaaatgacggtcagccgttttttacgcaacccggagcaggtttccgtcgctctacgcggcaagattgccgccgctcttgatgaactgggctatattcccaatcgtgcgcccgatatcctctctaacgctaccagccgggcgattggcgtcctgttaccttctctcaccaaccaggttttcgcggaagtattacgcggaatcgaaagcgtcaccgacgcgcacggttatcagaccatgctggcgcactacggttataaaccggaaatggagcaagaacgtctcgaatccatgctctcctggaatatcgacggcctgatcctcaccgaacgtacccacacgccgcgcaccttaaagatgattgaagtggcggggatcccggtggtggagttgatggacagccagtcgccgtgcctcgatatcgccgtcggttttgataactttgaagcggcacgccagatgactaccgccattattgctcgtgggcatcgccacattgcctatctcggcgcacgtctcgacgaacgtactatcatcaaacagaagggatacgaacaggcgatgctggatgcaggcctggtgccatatagcgtgatggttgagcaatcttcttcttactcttccggtattgaactgattcgccaggcgcggcgggaatatccgcagctggatggcgtgttctgtactaatgatgatctggcggtcggcgcggcgtttgaatgtcagcgtctggggttaaaagttcctgacgatatggcgattgccggtttccacggtcatgacattggtcaggtgatggagccacgacttgcgagcgtgctgacgccgcgtgagcggatgggcagtattggcgctgaacgcctgctggcgcgtattcgtggcgaatctgtgacaccgaaaatgttagatttaggtttcaccttgtcaccgggcggatctatttaa

SEQ ID NO: 470681 - DNA, 594 bp, Shigella flexneri
atgggcttctccgcgctgcgcgtgattaacgacgacgtgattgaagcagggcagggcttcggcactcacccgcataaagatatggaaattttgacctacgtgctggaaggtactgttgagcatcaggacagcatgggcaataaagagcaggttccggcgggtgagttccagattatgagtgcgggtacgggtattcgtcactcagagtacaacccaagcagcaccgagcgtctgcatctgtatcagatctggatcatgcctgaagaaaatggcattacgccgcgttatgaacagcgtcgcttcgatgccgtgcagggcaaacagctggtgctctcgccggatgcgcgagatggttcgctgaaagtgcatcaggatatggaactgtatcgttgggcgttgctgaaagatgagcagtcggtgcatcagattgccgctgaacgccgcgtctggattcaggtggtaaaaggcaatgttaccattaacggcgtgaaagcctcgaccagcgatggtctggcaatctgggatgagcaggcaatctccatccatgcggatagcgacagcgaagtgttactgttcgatctgccgccggtttaa

SEQ ID NO: 470682 - DNA, 1038 bp, Shigella flexneri
atggtcatcaactgcgcctttattggcttcggcaaaagcaccacccgttaccatctgccgtatgtacttaaccgcaaggatagctggcatgtcgcgcatatttttcgtcgccatgcgaagccggaagaacaggctcccatttactctcatatccatttcaccagcgatctcgacgaagtgctaaacgatcccgatgttaagttggttgttgtctgcacccatgcggacagccacttcgagtacgcgaagcgcgcgctggaagccgggaaaaatgtgctggtcgaaaaaacgttcactccgacacttgcgcaggcgaaagagctgtttgcactggcgaaaagcaaagggctgaccgtcacgccatatcagaatcgtcgctttgattcctgcttcctgacggcgaaaaaagcgattgaaagcggcaagctgggagagattgtcgaagtggaaagccattttgactattaccgcccggtggcagaaaccaaacctggactgccgcaggatggcgcgttctatggccttggtgtgcatacgatggaccagattatttctctgttcggtcgcccggatcacgtcgcttatgacatccgcagcctgcgtaataaagccaatcctgacgacacctttgaagcgcaactgttttatggcgacctgaaagccatcgtcaaaaccagccatctggtgaaaatcgattatccgaaatttatcgttcacggtaagaaaggttcgtttattaaatacggtatcgaccagcaggaaaccagcctgaaggctaatattatgccgggcgaaccgggattcgcagcggatgattcggtcggtgtgctggagtatgtcaatgacgagggtgtgacggtcagagaagagatgaagccggagatgggcgattacgggcgtgtttatgatgcgttgtatcaaaccatcacccacggtgcgccaaattacgtcaaggaatctgaagttcttaccaatctggaaatccttgaacgcggatttgagcaagcctctccctccacagtgactctcgcgaattaa

SEQ ID NO: 470683 - DNA, 489 bp, Shigella flexneri
atgagtgagatagtaatacgccacgcagaaacacgggattacgaggccatcaggcagattcacgcccagccggaggtgtattgcaacacactacaggtgcctcatccttccgatcatatgtggcaggagcgactcgccgatcgtcccggcatcaagcaactcgtcgcctgtattgatggagacgtcgtgggccatctcaccattgacgtgcaacagcgcccacgccgcagtcatgttgccgattttggtatctgtgtcgactctcgttggaagaaccgcggcgtcgccagcgccctgatgcgagagatgattgaaatgtgcgacaactggttacgggtagatcgcattgaactaaccgtgtttgtcgataacgcgccagcaattaaggtctataaaaaattcggctttgagattgaagggaccggtaagaagtacgcattgcgtaatggtgaatatgtcgatgcgtattatatggcgcgggtgaaatag

SEQ ID NO: 470684 - DNA, 1743 bp, Shigella flexneri
atgataaaaccgacgtttttacgccgggtggccattgctgctctgctctcaggaagttgttttagcgccgccgccgcgcctcctgcgccgcccgtctcgtatggtgtggaggaagatgtcttccatccggtacgcgcgaaacagggaatggtagcgtctgtggacgccactgccactcaggtgggggtggatatcctcaaggagggcgggaatgccgttgatgccgccgtggcggtgggctacgcgctggcggtaacgcatccgcaggcagggaatctgggcggtggtggttttatgttaatccgctcgaaaaatggcaataccacggctatcgatttccgcgaaatggcacccgccaaagcgacccgcgatatgttcctcgatgatcagggcaacccggacagcaaaaaatcactcacttcgcatctggcttccggcacaccgggtacggtagcaggtttctcgctggcgctggataaatacggcaccatgccgctgaacaaagtcgtgcagcccgcgtttaaactggcacgcgatggttttatcgttaacgacgcgctggctgacgatctcaaaacctacggtagcgaagtgttgccgaatcacgaaaacagtaaagctatcttctggaaagagggcgagccgctgaaaaagggcgacacgctggtgcaggcgaacctggcaaagagcctggagatgattgctgaaaacggcccggacgaattctataaaggcacgattgcggaacagatcgcccaggagatgcagaaaaacggtggcttgatcactaaagaagatttagcggcctataaagcggtcgaacgcactccgataagcggcgattatcgcgggtatcaggtttactccatgccaccgccatcctccggcgggatccatatcgtacaaatcctcaatattctggaaaacttcgatatgaagaaatacggctttggcagcgccgatgcgatgcaaatcatggcagaagcggagaaatacgcctacgccgaccgctcggaatatcttggcgacccggattttgtcaaagtcccgtggcaggcactgaccaataaagcctatgccaaatccattgccgatcaaattgatatcaaaaaagcgaagccgtccagtgagattcgccctggcaagcttgcgccttatgagagtaatcaaactacccattactctgtagtggataaagacggtaacgcggtggcggtgacctatacgctgaacaccaccttcggtacgggtattgtcgcgggtgagagcggtattctgcttaataaccagatggatgatttctccgccaaaccgggcgtaccgaacgtttacgggctggtgggcggtgatgccaacgccgtcgggccgaacaaacgcccgctgtcgtcgatgtcgccgaccattgtggtgaaagacggtaaaacctggctggttaccggtagcccaggcggtagccggattatcaccacggtgctgcaaatggtggtgaatagcatcgattatggcatgaacgtcgccgaagcgaccaatgcgccgcgtttccaccatcagtggttgccggacgagctgcgtgtcgaaaaagggtttagcccggatacgctcaagctgctggaagcaaaaggtcagaaagtggcgctgaaagaggcgatgggcagcacacaaagcattatggttgggccggacggtgagttgtacggcgcatccgacccgcgctcggtggatgatttaacggcggggtattaa

SEQ ID NO: 470685 - DNA, 441 bp, Shigella flexneri
atgaaacgacttctgattcttacggcactcctgccgtttgtcggctttgcacagcccattaatactctgaacaaccctaaccagccggggtatcagatacccagccagcagcggatgcaaacccagatgcagactcagcaaatccagcaaaaagggatgctgaatcagcaactgaaaacgcaaactcagttgcaacagcagcatttagaaaaccagataaacaataattctcagcgggtgttgcagtcacagccgggggagcgaaatcccgcccggcagcaaatgctgcccaacaccaacggcgggatgttaaacagcaaccgtaatccggatagttcgttgaatcagcagcatatgctgccggagaggagaaacggcgacatgctgaatcagcccagcacgccgcagcctgacattccgttgaaaactattgggccgtaa

SEQ ID NO: 470686 - DNA, 744 bp, Shigella flexneri
atgagtaactggccttatccccgcatcgtcgctcatcgtggcggcggtaagctggccccggaaaacaccctggcggcaatcgacgtcggggcaaaatacggtcataagatgatcgaatttgacgcgaagttatcgaaagatggcgagatcttcctgctccatgacgacaatctcgaacgcaccagcaacggctggggcgtcgcgggtgaactgaactggcaggatttactgcgcgtggatgcgggcagttggtacagcaaagcgtttaaaggtgagccgctgccgttgctttcgcaggtggcggaacgctgtcgcgaacacgggatgatggcgaatatcgaaatcaaacccaccactggcactggaccattaacgggcaaaatggtggcgctggcggcacgccaactgtgggccggtatgacgccgccgctgctgtcatcgtttgagattgatgctttagaagctgcacaacaggcggcaccggaactgccgcgtggtttattgcttgatgagtggcgcgacgactggcgcgaactgaccgcgcggctgggctgcgtctctattcatctcaatcataagttactcgataaagcgcgagtgatgcagttgaaagacgccggattacggattctggtttataccgtcaataaaccccagcacgcggcagagttgctgcgctggggcgtggattgcatctgtaccgatgcgattgacgtgattggtccgaactttacggcccaatag

SEQ ID NO: 470687 - DNA, 888 bp, Shigella flexneri
gtggcggatggcgaatttatcgtgatggtcgggccgtctggctgcgggaaatcgacgctgctgcgtatggttgccgggctggagagggtgaccgaaggcgatatctggatcaacgaccagcgcgtgaccgaaatggagccgaaagatcgcgggattgcgatggtgttccagaattacgcgctttatccgcatatgagcgtcgaagaaaacatggcgtgggggctgaaaattcgcggcatgggcaagcagcaaatagccgagcgcgttaaagaagcggcgcgcattctggagctggacggtctgctcaaacgtcgcccgcgcgagctttccggcggtcagcgccagcgtgtggcgatgggacgcgcgattgtgcgcgatccggcggtgttcttgtttgatgagccactctctaacctcgatgccaagctgcgcgtacagatgcgtcttgaactgcaacagctgcaccgtcgcctgaaaacgacttcactctacgttactcacgatcaggttgaggcgatgacgctcgcccagcgagtaatggtgatgaacggcggcgttgccgaacagattggcacgccggtggaagtctacgaaaagcccgccagcctgtttgtggcgagttttatcggcagcccggcgatgaacctgctgacaggccgcatgaataatgaaggcacgcatttcgaactggacggcggtatcgtgctaccgctaaacggtggctaccgtcagtatgccgggcgtaaaatgaccctcggcattcgcccggaacatattgcgctaagctcgcaagcagaagctggtggtgcgactggcgcatcaggagcgcccgacggcaggcagcacgctgtggctgcatctggcggaaaatcagctgcatctttttga

SEQ ID NO: 470688 - DNA, 846 bp, Shigella flexneri
atgattgagaaccgtccgtggctgacgatattcagccataccatgctgatcctcgggatcgcggtgatcctcttcccgctgtacgtggcgtttgtcgcggcgacgctggataaacaggccgtctacgccgcgccgatgacgctcatccccggcacgcatctgctggaaaacatccacaacatctgggtgaacggggtaggcacaaatagcgcgccgttctggcggatgttgcttaacagctttgtgatggcgttcagcattacgctcggcaaaattactgtctcgatgctctcggcatttgccattgtctggtttcgttttccgctacgtaacctcttcttctggatgatttttatcaccctgatgctgccggttgaagtacgtatcttcccgacggtggaagtcatcgccaacctgaagatgctcgacagctacgccggtttaacgctgccgctgatggcctcggcgaccgccacgtttctgtttcgccagttctttatgacgctgccggatgaactggtggaagcggcgcggatcgacggtgcgtcaccaatgcgcttcttttgcgacatcgtttttccgctctccaaaactaatctggcggcgctgtttgtgatcacctttatttacggctggaaccagtatttgtggccgttgttgattattaccgacgtggatctcggcaccaccgtggcagggatcaaagggatgatcgccactggcgaaggcaccacggaatggaactcagtgatggcggcgatgttgttaaccctgatcccaccagtagtgattgttttagtgatgcagcgtgccttcgtgcgcggcctggtcgatagtgagaaataa

SEQ ID NO: 470689 - DNA, 888 bp, Shigella flexneri
atgtcatcatcccgtccggtgttccgctcgcgctggctgccttatctgctggtcgcgccgcagctcatcatcaccgttatcttttttatctggcctgcgggcgaagcgttgtggtactcgctacaaagcgtcgatccgtttggtttctccagccagtttgtcggtctggataacttcgtcacgctgtttcatgacagctattatctcgactccttctggacgacgataaaattcagcacctttgtcaccgtcagcggtttgctggtatcgctgttctttgcggcgctggtggagtacatcgtgcgcggcagtcgtttctaccaaaccttaatgttgctgccgtatgccgtggctcccgccgttgccgccgtattgtggatcttcctgtttaaccccggtcgcgggctgatcacccattttctcgctgagttcggctacgactggaaccacgcgcaaaatagcggtcaggcgatgtttctggtggtgtttgcctcggtgtggaagcaaatcagctacaactttctgttcttctatgccgcgctgcaatccattccccgttcgttgatcgaagccgcagccatcgacggtgcagggccgattcgccgcttctttaagattgcgctgccgcttatcgccccggtgagtttcttcctgctggtagtgaacctggtgtatgccttcttcgacaccttcccggtgatcgacgccgccacgtccggcgggccggttcaggccaccacgacgctgatttataagatctaccgcgaaggttttaccggactggatctggcttcgtctgccgcacagtcgatggtgttgatgttcctcgtcatcgtgctgacggtggtgcagttccgctatgttgaaagcaaggtgcgttaccaatga

SEQ ID NO: 470690 - DNA, 1317 bp, Shigella flexneri
atgaaaccgttacattatacagcttcagcactggcgctcggactggcgttaatggggaatgcacaggcagtgacgaccattccgttctggcattctatggaaggggaactgggtaaagaggtggattctctggcccaacgttttaacgccgaaaatccggattacaaaattgtaccgacctataaaggcaactacgaacagaatttaagcgcggggattgccgtatttcgtaccggcaacgctccggctattttgcaggtttatgaagttggcaccgccaccatgatggcgtcgaaagccattaaaccggtgtatgacgtgtttaaagaggcagggattcagttcgatgagtcgcagtttgtgccgacggtttccggttactactccgacagcaaaaccggccacttactctcccagccgttcaacagctcgactcccgttctctattacaacaaagacgccttcaagaaagcggggttagacccggaacagccgccgaaaacctggcaggatctggcggactattccgcaaaactgaaagcctccggtattaagtgcggctacgccagcggctggcagggctggatccaactggaaaactttagcgcctggaacggtctgccgtttgccagcaaaaacaacggctttgacggtacggacgcggtgctggagttcaacaagccggagcaggtgaaacacatcgccatgctcgaggagatgaacaagaagggcgacttcagctacgtcggtcgtaaggatgaatccaccgagaagttctataacggtgattgcgcgatgaccaccgcctcttccggttctcttgccaacattcgcgagtacgccaaatttaactacggcgtaggtatgatgccttacgacgccgatgcgaaagatgcgccacaaaacgccattatcggcggagccagcctgtgggtgatgcagggcaaagataaagaaacgtataccggcgtggcgaagtttctcgacttcctcgcgaagccagaaaacgctgctgagtggcatcagaaaaccggttatctgccaattaccaaagcggcgtatgacctgacccgtgagcagggcttttacgagaaaaacccaggtgcggataccgcgacgcgtcagatgctgaacaagccgccgttgccgttcaccaaagggcttcgtctgggcaacatgccgcagatccgcgtgattgtggatgaagagcttgagagcgtgtggaccggtaagaagacgccacagcaggcgctggataccgcagttgagcgtgggaaccagttactgcgccgctttgagaaatcgacgaagtcttaa

SEQ ID NO: 470691 - DNA, 714 bp, Shigella flexneri
atggaaaaagtcatgttgtcctttgacaaagtcagcgcccactacggcaaaatccaggcgctgcatgaggtgagcctgcatatcaatcagggcgagattgtcactctcattggcgcgaacggggcggggaaaaccaccttgctcggcacgttatgcggcgatccgcgcgccaccagcgggcgaattgtgtttgatgataaagacattaccgactggcagacggcgaaaatcatgcgcgaagcggtagcgattgtcccggaagggcgtcgcgtcttctcgcggatgacggtggaagagaacctggcgatgggcggcttctttgccgaacgtgaccagtttcaggagcgcataaagtgggtgtatgaactgtttccacgtctgcatgagcgccgtgttcagcgggcgggcaccatgtccggcggtgaacagcagatgctggcgattggtcgcgcgctgatgagcaatccgcgtttgttgttacttgatgagccatcgctcggtcttgcgccgattatcatccagcaaattttcgacaccatcgagcagctgcgcgagcaggggatgactatcttcctcgtcgagcagaacgccaaccaggcgctaaagctggcggatcgcggctacgtgctggaaaacggccatgtggtgctctccgataccggcgacgcgctgctggcgaacgaagcagtgagaagtgcgtatttaggcgggtaa

SEQ ID NO: 470692 - DNA, 768 bp, Shigella flexneri
atgagtcagccattattatctgttaacggtctgatgatgcgcttcggcggcctgctggcggtgaacaacgtcaatcttgaactgtacccgcaggaaatcgtctcgttaatcggccctaacggtgccggaaaaaccacggtttttaactgcctgaccggtttctacaaacccaccggcggcaccattttactgcgcgatcagcatcttgaaggtttaccggggcagcaaattgctcgcatgggcgtggtgcgcaccttccagcatgtgcgtctgttccgtgaaatgacggtaattgaaaacctgctggtggcgcagcatcagcaactgaaaaccgggctgttctctggcctgttgaaaacgccttctttccgtcgcgcccagagcgaagcgctcgaccgcgccgccacctggcttgagcgcattggtttgctggaacacgccaaccgtcaggcgagtaacctggcctatggtgaccaacgccgtctggagattgcccgctgcatggtgacgcagccggagattttaatgctcgacgaaccggcggcaggtcttaacccaaaagaaaccaaagagctggatgagctgattgccgaactgcgcaatcatcacaacaccactatcttgttgattgaacacgatatgaagctggtgatggggatttcagaccgaatttatgtggtcaatcaggggacgccactggcaaacggtacgccggagcaaatccgtaataacccggacgtgatccgtgcctatttaggtgaggcataa

SEQ ID NO: 470693 - DNA, 1278 bp, Shigella flexneri
atgaaaccgatgcatattgcaatggcactgctctctgccgcgatgttctttgtcctggcgggcgtctttatgggcgtacaactggagctggatggcaccaaactggtggtcgacacggcttcagacatccgttggcagtggatgtttatcggcacggcggtggtctttttcttccagcttttgcgaccggctttccagaaagggttgaaaagcgtttccgggccgaagtttattctgcccgcgattgatgggtccacggtgaagcaaaagctgttcctcgtggcgctgctggtgcttgtggtggcgtggccgtttatggtgtcacgtgggacggtggatatcgccactctgaccatgatctacattatcctcggtctcgggctgaatgtggttgttggtctttctggtctgctggtgctggggtacggcggtttttacgccatcggcgcttacacttttgcgctgctcaatcactattacggtctggggttctggacctgtttgccgattgccggactgatggcagcggcggcgggtttcctgctcggttttccggtgctgcgtctgcgcggtgactatctggcgatcgttacccttggtttcggcgaaattgtgcgcatattgctgctcaataacactgaaatcaccggcggcccgaacggaatcagtcagatcccgaaaccgacactcttcggactcgagttcagccgtaccgctcgtgaaggcggctgggacacgttcagtaatttctttggcctgaaatacgatccgtccgatcgcgttatcttcctctacctggtggcgttgctgctggtggtgttaagcctgtttgtcattaaccgcctgctgcggatgccgctgggccgcgcgtgggaagcgttgcgtgaagacgagatcgcctgtcgttcgctgggcttaagcccgcgccgtatcaagctgactgcttttaccatcagcgccgcatttgccggttttgccggaacgctgtttgcggcgcgtcagggctttgtcagcccggaatccttcacctttgctgaatcggcctttgtgctggcgatagtggtgctcggcggtatgggctcgcaatttgcagtgattctggcggctgttctgctggtggtgtcgcgcgaattgatgcgtgatttcaacgaatacagcatgttaatgctcggtggtttgatggtgctgatgatgatctggcgtccgcagggtttgctgcccatgacgcgcccgcaactgaagctgaaaaacggcgcagcgaaaggagagcaggcatga

SEQ ID NO: 470694 - DNA, 927 bp, Shigella flexneri
atgtctgagcagtttttgtatttcttgcagcagatgtttaacggcgtcacgctgggcagtacctacgcgctgatagccatcggctacaccatggtttacggcattatcggcatgatcaacttcgcccacggcgaggtttatatgattggcagctacgtctcatttatgatcatcgccgcgctgatgatgatgggcattgataccggctggctgctggtggcggcgggattcgtcggcgcaatcgtcatcgccagcgcctacggctggagtatcgaacgggtagcttaccgcccggtgcgtaactctaagcgcctgattgcgcttatttccgcaatcggtatgtccatcttcctgcaaaactacgtcagcctgaccgaaggttcgcgcgacgtggcgctgccgagcctgtttaacggtcagtgggtggtgggccatagcgaaaacttctctgcctctattaccaccatgcaggcggtgatctggattgtcaccttcctcgccatgctggcgctgacgattttcattcgctattcccgtatggggcgcgcctgtcgtgcctgcgcggaagatctgaaaatggcgagcctgcttggcatcaacaccgaccgggtgattgctttgacctttgttattggcgcggcgatggcggcagtggctggcgtactgctcggtcagttctactgcgtcattaacccctatatcggctttatggccgggatgaaagcctttaccgctgcggtgctcggtgggattggcagcattccaggggcgatgattggcgggctgatcctggggattgcggaggcgctctcttctgcctatctgagtacggaatataaagatgtggtctcattcgccctgctgattctggtgctgctggtgatgccgaccggtattctgggtcgcccggaggtagagaaagtatga

SEQ ID NO: 470695 - DNA, 1110 bp, Shigella flexneri
atgaaacggaatgcgaaaactatcatcgcagggatgattgcactggcaatttcacacaccgctatggctgacgatattaaagtcgccgttgtcggcgcgatgtccggcccgattgcccagtggggcgatatggaatttaacggcgcgcgtcaggcgattaaagacattaatgtcaaagggggaattaagggcgacaagctggttggcgtggaatatgacgacgcctgcgacccgaaacaagccgttgcggtcgtcaacaaaatcgttaacgacggcattaaatacgttattggtcatctgtgttcttcctctacccagccagcgtcggatatctacgaagacgaaggtattctgatgatctcgccgggagcgaccaacccggagctgacccaacgcggttatcaacacattatgcgtactgccgggctggactcttcccaggggcctacggcggcaaaatacattcttgagacggtgaagccccagcgcatcgccatcattcacgacaaacaacagtatggcgaagggctggcgcgttcggtgcaggacgggctgaaagcggctaacgccaacgtcgtcttcttcgacggtattaccgccggggagaaagatttctccgcgctgatcgcccgcctgaaaaaagaaaatatcgacttcgtttactacggcggttactacccggaaatggggcagatgctgcgccaagcccgttccgttggcctgaaaacccagtttatggggccggaaggtgtcggtaacgcatcgctgtcgaacattgccggtgatgccgccgaaggcatgttggtcactatgccaaaacgctatgaccaggatccggcaaaccagggcatcgttgatgcgctgaaagcagacaagaaagatccgtccgggccttatgtctggatcacttacgcggcagtgcaatctctggcaactgcccttgagcgtaccggcagcgatgagccgctggcgctggtgaaagatttaaaagctaacggtgcaaacaccgtgattgggccgctgaactgggatgaaaaaggcgatcttaagggatttgattttggtgtcttccagtggcacgccgacggttcatccacggcagccaagtga

SEQ ID NO: 470696 - DNA, 384 bp, Shigella flexneri
atgaagctgaccatcattcgattagaaaactttagcgaccaggaccggattgacctgcaaaagatctggccggagtattccccttcctctttacaggttgacgataaccaccgtatctacgccgcgcgttttaacgagcgtctgcttgcggccgtgcgggtaaccttaagcggcaccgagggagcactggattctctacgcgtgcgggaagtcacccgccgtcgcggtgtggggcaatatctgctggaagaggttttgcgtaacaatcctggcgtttcatgctggtggatggcggatgcaggcgtggaagatcgcggtgtgatgacggcgtttatgcaggcactgggatttacggcacagcagggcggctgggagaagcgttaa

SEQ ID NO: 470697 - DNA, 1104 bp, Shigella flexneri
atgaacataaagggtaaagcgttactggcaggatgtatcgcgctggcattcagcaatatggctctggcagaagatattaaagtcgcggtcgtgggtgcaatgtccggtccggttgcgcagtacggtgaccaggagtttaccggcgcagagcaggcggttgcggatatcaacgctaaaggcggcattaaaggcaacaaactgcaaatcgtaaaatatgacgatgcctgtgacccgaaacaggcggttgcggtggcgaacaaagtcgttaacgacggcattaaatatgtgattggtcacctctgttcttcatcaacgcagcctgcgtctgacatctacgaagacgaaggcattttaatgatcaccccagcggcaaccgcgccggagctgaccgcccgtggctatcagctgatcctgcgcaccaccggcctggactccgaccaggggccgacggcggcgaaatatattcttgagaaagtgaaaccgcagcgtattgctatcgttcacgacaaacagcaatacggcgaaggtctggcacgagcggtgcaggacggcctgaagaaaggcaatgctaacgtggtgttctttgatggtatcaccgccggggaaaaagatttctcaacgctggtggcgcgtctgaaaaaagagaatatcgacttcgtttactacggcggttatcacccggaaatggggcaaatcctgcgtcaggcacgcgcggcagggctgaaaactcagtttatggggccggaaggtgtggctaacgtttcgctgtctaacattgcgggcgaatcagcggaagggctgctggtgaccaagccgaagaactacgatcaggttccggcgaacaaacccattgttgatgcgatcaaagcgaaaaaacaggacccaagcggcgcattcgtctggaccacctacgccgcgctgcaatctttgcaggcgggcctgaatcagtctgacgatccggctgaaatcgccaaatacctaaaagcgaactccgtggataccgtgatggggccactgacctgggatgagaaaggcgatctaaagggctttgagttcggcgtatttgactggcacgccaacggcacggcgaccgatgcgaagtaa

SEQ ID NO: 470698 - DNA, 855 bp, Shigella flexneri
atgactgacaaaatgcaaagtttagctttagccccagttggcaacctggattcctacatccgggcagctaacgcgtggccgatgttgtcggctgacgaggagcgggcgctggctgaaaagctgcattaccatggcgatctggaagcagctaaaacgctgatcctgtctcacctgcggtttgttgttcatattgctcgtaattatgcgggctatggcctgccacaggcggatttgattcaggaaggtaacatcggcctgatgaaagcagtgcgccgttttaacccggaagtgggtgtgcgcctggtctccttcgccgtccactggatcaaagcagagatccacgaatacgttctgcgtaactggcgtatcgtcaaagttgcgaccaccaaagcgcagcgcaaactgttcttcaacctgcgtaaaaccaagcagcgtctgggctggtttaaccaggatgaagtcgaaatggtggcccgtgaactgggcgtaaccagcaaagacgtacgtgagatggaatcacgtatggcggcacaggacatgacctttgacctgtcttccgacgacgattccgacagccagccgatggcaccggtgctctatctgcaggataaatcatctaactttgccgacggcatcgaagatgataactgggaagagcaggcggcaaaccgtctgaccgacgcgatgcatggtctggacgaacgcagccaggacatcatccgtgcgcgctggctggacgaagacaacaagtccacgttgcaggaactggctgaccgttacggtgtttccgctgaacgtgtgcgccaactggaaaagaacgcgatgaaaaaacttcgcgccgctattgaagcgtaa

SEQ ID NO: 470699 - DNA, 1059 bp, Shigella flexneri
atgaataagcgcgatgcaatcaatcatattcggcagtttggtgggcgtctggatcgcttccgtaaatcggtcggcggctcaggcgacggcggtcgtaacgcaccgaaacgcgcgaaatcctcgccaaaaccggtaaatcgcaaaaccaacgttttcaacgaacaggtgcgctatgccttccacggcgcattgcaggatctgaaaagcaaaccgttcgccacgtttttaacggtgatggttatcgccatctccctgacgctgcccagcgtctgttatatggtgtacaaaaacgttaatcaggcggcgacgcagtattatccgtcaccgcaaatcactgtttacttgcaaaaaacgctggacgatgacgccgctgcgggcgtggtggcacagttgcaggccgagcaaggcgtggagaaagtgaactatatttctcgtgaagacgcactgggcgagttccgtaactggtctggttttggtggtgcgctggatatgctggaagaaaacccgcttccggcagtggcggtggtgatcccgaaactcgattttcaggggacggaatcactcaatacgctgcgtgatcgtatcacgcagattaacggtattgacgaagtgcggatggatgacagctggtttgcccgtctggcggcgttgaccgggctggttgggcgcgtttcggcgatgatcggcgtgttgatggtggcggcagtgttcctcgtcatcggcaacagcgtacgtctgagcatctttgctcgccgtgactccatcaacgtgcagaaactgattggtgcgacggatggtttcatccttcgcccgttcctgtacggcggtgcgctgctgggattttctggcgcattgttgtcattaattttgtcagaaattctggtactgcgtttgtcgtcagcggtggcggaagtggcacaggttttcggaacgaagtttgatatcaatggtttatcgttcgatgaatgcctgctattgctgctggtatgctcgatgattggctgggtggcagcgtggcttgccacggtacaacatttacgccactttacgcctgaataa

SEQ ID NO: 470700 - DNA, 669 bp, Shigella flexneri
atgattcgctttgaacatgtcagcaaggcttatctcggtgggagacaggcgctgcagggcgttacgttccatatgcagccgggtgagatggcgtttctgaccggtcattccggcgcagggaaaagtaccctcctgaagctgatctgtgggattgagcggcccagcgccgggaaaatctggtttagcggccatgacatcacgcgtctgaaaaaccgtgaagttccgtttctgcgccgccagattggcatgattttccaggatcaccatctactgatggaccgtactgtctacgataacgtggcgatcccgctgattatcgctggtgccagcggtgacgatattcgtcgccgggtgtcggcggcactggataaagtcgggctactggacaaagcgaagaacttccctattcagctttccggcggtgaacaacagcgtgttggcattgcccgcgcggtggtgaataagcccgcggtactgctggcggacgaaccgaccggtaacctggacgacgcgttgtcggaagggattctacgtctgtttgaagagtttaaccgcgttggggtaaccgtattgatggcaacgcacgacattaacctgatttcacggcgttcctatcgcatgctcaccctgagcgatggtcacttgcatggaggcgtgggccatgaataa

SEQ ID NO: 470701 - DNA, 1497 bp, Shigella flexneri
atggcgaaagaaaaaagacgtggctttttttcctggctgggctttggtcaaaaagagcagaccccggaaaaagagacagaagttcagaatgaacaaccggttgtagaagaaatcgttcaggcgcaagagcctgcgaaggcttctgaacaagccgttgaagagcagccgcaggcgcatactgaagccgaggcggaaacttttgctgccgacgttgtggaagtcactgaacaggttgttgaaagtgaaaaagcgcagcctgaagcggaagttgttgcacagccggaaccggtcgtagaagaaacgccggagccagtggctatcgaacgtgaagagctgccgttgccggaagacgtcaacgccgaagaggtttcgccagaagagtggcaggctgaagcggaaaccgtagagattgtcgaagcggcagaagaagaagcggctaaagaagaaatcaccgacgaagagctggaagcacaggcgctggctgccgaagcggcagaagaggcggtgatggtagttcctccggcagaagaagagcagccggttgcagaaattgcccaggagcaagaaaaaccgaccaaagaaggcttcttcgcgcgcctgaaacgcagcctgttaaaaaccaaagaaaatctcggttccggatttatcagcctgttccgcggtaaaaaaatcgacgatgatctgtttgaagagctggaagaacagctgttgatcgccgatgtgggcgtggaaaccacacgtaaaattatcaccaatctgacggaaggcgcatcccgcaagcagcttcgtgatgccgaggcgctctatggcctgctgaaagaagagatgggcgagattctggcgaaagtcgatgagccgctgaatgttgaagataaaacgccgttcgtgatcctgatggtgggcgtcaacggtgtgggtaaaaccacgacgattggtaagctggcgcgtcagtttgagcagcagggtaaatcggtgatgctggcggcgggcgatactttccgtgcagctgcggttgaacagcttcaggtctggggtcagcgcaacaatattccggtgattgcccagcataccggtgcggattccgcctctgttatcttcgacgccattcaggcagctaaagcgcgtaatatcgacgtcctgattgccgataccgccggacgtctgcagaacaaatcgcatctgatggaagagttgaagaaaatcgtccgcgtgatgaagaaactcgacgttgaagcgccgcatgaagttatgctgactattgatgccagcaccgggcagaacgcggtaagccaggccaaactgttccacgaagctgttggcttaaccggcatcacgctaacgaaactggacggcacggcgaaaggcggggtaattttctcggtggctgaccagtttggtatccctatccgctacattggtgtcggcgaacgtattgaggatttgcgtccgtttaaggcggacgactttatagaggcactttttgcccgagaggattaa

SEQ ID NO: 470702 - DNA, 597 bp, Shigella flexneri
atgaaaaaaccgaatcattccggcagcggccaaatccgcattattggcgggcagtggcgaggccgtaaactcccggttcctgatagcccaggtctgcgccccaccaccgaccgcgtacgcgaaacgttgtttaactggctggctccggtcattgttgacgcccaatgtctggattgcttcgccgggagcggcgcgctggggctggaagcgttatcgcgctacgctgcgggggcaacgttgattgagatggatcgcgtggtttctcagcagttaattaagaatctggcgacactaaaagcaggcaatgcacgcgtggtgaacagcaacgcaatgtcattcctggcgcaaaaaggcacaccgcataatatcgtgtttgtcgatccaccgttccgccgtggcttgttagaagagacgataaatttactggaagataacggctggctggctgacgaagccctgatttatgtcgaaagcgaagtcgaaaacggtctgcccactgttccggcaaactggtcattacatcgggaaaaagtggcgggtcaggtggcttatcggctgtatcaacacgaagcacaaggagaaagtgatgctgattaa

SEQ ID NO: 470703 - DNA, 270 bp, Shigella flexneri
atgctgattaatattggtcgtttgttaatgctctgcgtttggggatttttaatcctcaatctggtgcatcccttcccgcgcccgctaaatattttcgttaacgtggcgctgatttttaccgtgctgatgcatggtatgcagctggcgctattgaaatccactttaccgaaagatggcccgcagatgaccaccgccgaaaaggtgcggattttccttttcggcgtgtttgaactgctggtctggcagaagaaatttaaagttaaaaaataa

SEQ ID NO: 470704 - DNA, 360 bp, Shigella flexneri
atgagtaaaccacctcttttctttattgttatcattggcttaattgtcgtcgccgcatcgtttcgttttatgcaacagcgacgggaaaaagctgataatgatatggctccgctccagcaaaagctggtggtggtgagcaacaagcgggaaaaaccgattaacgatcgccgttcgcgccagcaggaagtgactccggcaggcaccagtatgcgctatgaggcaagcttcaaaccgcaaagcggaggaatggagcagacgtttcgcctcgacgcccagcagtaccacgccctgacagtgggcgataaaggtacgctgagctataaaggaacgcgctttgttagctttgttggcgaacaataa

SEQ ID NO: 470705 - DNA, 627 bp, Shigella flexneri
atgctttggtcgtttatcgctgtctgtctttccgcatggctatctgtggatgcatcgtatcgtgggccaacctggcaacgctgggtgtttaaaccgttaacccttcttctcctgctgttactggcctggcaagcaccgatgttcgacgccattagctatctggtgctggcgggactgtgcgcctcactgctgggcgatgcgctaaccctgttgccacgtcaacgtctgatgtacgccatcggcgcgtttttcctctcgcacctgctgtacaccatctatttcgccagtcagatgacgctctctttcttctggcctctgccactggtgttgctggttctgggtgcgctactactggcgattatctggacgcggctggaagagtaccgttggcctatctgcacgtttatcggcatgacgctggtgatggtgtggctggcaggtgaactgtggttcttccgtccgaccgctccggcgctctctgcgtttgttggcgcttcgttgctgtttatcagtaactttgtctggctggggagccactatcgccgacgcttccgtgcggataacgcgattgctgcggcctgctactttgccggtcacttcctcatcgtccgctcactgtatctctga

SEQ ID NO: 470706 - DNA, 2199 bp, Shigella flexneri
atgtcgacacctgacaatcacggcaagaaagcccctcaatttgctgcgttcaaaccgctaaccacggtacagaacgccaacgactgttgctgcgacggcgcatgctccagctcgccaacgctctctgaaaacgtctccggcacccgctatagctggaaagtcagcggcatggactgcgccgcctgtgcgcgcaaggtagaaaatgccgtgcgccagcttgcaggcgtgaatcaggtgcaggtgttgttcgccaccgaaaaactggtggttgatgccgacaatgacatccgtgcccaggttgaatctgcggtgcaaaaagcgggctattccctgcgcgatgagcaggccgccgacgagccacaagcatcgcgcctgaaagagaatctgccgctgattacgcttatcgtgatgatggcaatcagctggggtctggagcagttcaatcatccgttcgggcaactggcgtttatcgcgaccacgctagttgggctgtacccgattgctcgtcaggcattacggctgatcaaatccggcagctacttcgccattgaaaccttaatgagcgtagccgctattggtgcactgtttattggcgcaacggctgaagctgcgatggtgttgctgctgtttttgattggtgaacgactggaaggctgggccgccagccgcgcgcgtcagggcgttagcgcgttaatggcgctgaaaccagaaaccgccacgcgcctgcgtaacggtgagcgggaagaggtggcgattaacagcctgcggcctggcgatgtgattgaagtcgccgcaggtgggcgtttgcctgccgacggtaaactgctctcaccgtttgccagttttgatgaaagcgccctaaccggagaatccattccggtggagcgcgcgacgggcgataaagttcctgcaggagccaccagcgtagaccgtctggtaacgctggaagtgctgtcagaaccgggtgccagcgccattgaccggattctgaaactgatcgaagaagccgaagagcgccgcgcccccattgagcggtttatcgaccgtttcagccgtatttatacgccagcgattatggccgtcgccctgctggtaacgctagtgccgccgctgctgtttgccgccagctggcaggagtggatttataaaggtctgacgctgctgctgattggttgcccgtgtgcgttagttatctcaacgcctgcggcgataacctccgggctggcagcagcagcgcgtcgtggggcgttaattaaaggcggtgcggcgctggaacaactaggtcgtgttacccaagtggcgtttgataaaaccggtacgctgaccgtcggtaaaccgcgcgttaccgcgattcatccggcaacgggtattagtgaatctgaactgctgacactggcggcggcggtcgagcaaggcgcgacgcatccactggcgcaagccatcgtacgcgaagcacaggttgctgaactcgccattcccaccgccgaatcacagcgggcactggtcgggtctggcattgaagcgcaggttaatggtgagcgcgtgttgatatgcgctgccgggaaacatcccgctgatgcatttgctggtttgattaatgaactggaaagcgccgggcaaacggttgtgctggtagtacgtaatgatgacgtgctgggtatcattgcattgcaggataccctgcgcgccgacgctacaactgccatcagtgaactgaacgcgctgggggttaaaggagtgatcctcaccggcgataatccacgcgcagcggcggcaattgccggggagctggggctggagtttaaagcgggcctattgccggaagataaagtcaaagcggtgaccaagctgaatcaacatgcgcccctggcgatggtcggtgatggtattaacgacgcgccagcgatgaaagctgccgccatcgggattgctatgggtagcggcacagacgtggcgctggaaaccgccgacgcagcattaacccataaccacctgcgcggcctggtgcaaatgattgaactggcacgcgccactcacgccaatatccgccagaacatcaccattgcgctgggactgaaagggatcttcctcgtcaccacgcttttagggatgaccgggttgtggctggcagtgctggcagatacgggtgcgacggtgctggtgacggcgaatgcgttaaggttgttgcgcaggagataa

SEQ ID NO: 470707 - DNA, 246 bp, Shigella flexneri
atgaccgatctcttttccagccctgaccacacactcgacgcgcttggcctgcgctgcccggaaccggtgatgatggtgcgcaaaaccgtgcgcaatatgcagcctggcgaaacgttgctgattatcgccgacgatccggccactacccgcgatattcctgggttttgtacctttatggaacacgaactggttgcgaaagagacggatggactgccttatcgttatttgattcgtaaaggcggttga

SEQ ID NO: 470708 - DNA, 666 bp, Shigella flexneri
atgaacgttttctcgcaaactcaacgctataaggcgttgttctggttatcgttatttcatcttctggtgatcacctccagtaactatctggttcagcttcccgtctccatttttggtttccataccacctggggcgcgtttagctttccgtttatttttcttgctaccgacctgaccgtgcgtatttttggcgcaccgctggcccgacgcattatcttcgcggtaatgatccctgcgttattaatctcctacgtcatctcgtcgctattctatatgggttcctggcagggattcggcgcactcgcccacttcaacctgtttgtcgcccgtatcgccaccgccagtttcatggcctacgcgctggggcaaatcctcgacgtgcacgtttttaaccgcctgcgtcagagtcgccgctggtggctggcaccgacagcgtccacactgttcggtaacgtcagcgacacgctggcctttttcttcattgccttctggcgtagcccggatgcctttatggctgaacactggatggaaatcgcgctggtcgattactgtttcaaagtgttaatcagtatcgttttcttcctgccaatgtatggcgtattactcaatatgctgttgaaaagactggcagataaatccgaaatcaacgctttgcaggcgagttaa

SEQ ID NO: 470709 - DNA, 558 bp, Shigella flexneri
atgcgcaatctggttaaatatgtcggaattggcctgctggttatggggcttgcggcctgtgatgataaagacactaacgctacggcgcagggttcggttgcggaaagtaacgctaccgggaatcccgtcaacctgcttgatggcaagttaagtttctcgctgccagcggatatgaccgaccagagcggtaagctgggaacgcaggccaataacatgcatgtctggtccgacgccaccgggcagaaagcagtcatcgtcatcatgggcgatgatccgaaagaagatctggcggtgttggcgaagcgtctggaagatcagcaacgtagccgcgatccgcagctgcaagtggtaaccaataaagccattgagctgaaaggtcacaaaatgcagcagttagacagtattatctccgcgaaaggccagacggcgtactcttccgttattctgggtaacgtgggtaatcaactgctgaccatgcaaattacgctgccagctgacgatcagcaaaaagcgcaaaccaccgcagaaaacatcattaatacgctggttattcagtaa

SEQ ID NO: 470710 - DNA, 1260 bp, Shigella flexneri
atggtaaaaatgaaacactgttgtaaaaatgtggtgatcctcatgcccgaacccgtagccgaacccgcgctaaacggattgcgcctgaatttgcgcattgtctccattgtcatgtttaacttcgccagctacctcaccatcgggttgccgctcgctgtattaccgggctatgtccatgatgtgatgggctttagcgccttctgggcaggattggttatcagcctgcaatatttcgccaccttgctgagccgccctcatgccggacgttacgccgatttgctgggacccaaaaagattgtcgtcttcggtttatgcggctgctttttgagcggtctggggtatctgacggcaggattaaccgccagtctgcctgtcatcagcctgttattactttgcctggggcgcgtcatccttgggattgggcaaagttttgccggaacgggatcgaccctatggggcgttggagtggttggctcgctgcatatcgggcgggtgatttcgtggaacggcattgtcacttacggggcgatggcgatgggtgcgccgttaggcgtcgtgttttatcactggggcggcttgcaggcgttagcgttaatcattatgggcgtggcgctggtggccattttgttggcgatcccgcgtccgacggtaaaagccagtaaaggcaaaccgctgccgtttcgcgcggtgcttgggcgcgtctggctgtacggtatggcgctggcactggcttccgccggatttggcgtcatcgccacctttatcacgctgttttatgacgctaaaggttgggacggtgcggctttcgcgctgacgctgtttagctgtgcgtttgtcggtacgcgtttgttattccctaacggcattaaccgtatcggtggcttaaacgtagcgatgatttgctttagcgttgagataatcggcctgctactggttggcgtggcgactatgccgtggatggcgaaaatcggcgtcttactggcgggggccggggtttcgctggtgttcccggcattgggtgtagtggcggtaaaagcggttccgcagcaaaatcagggggcggcgctggcaacttacaccgtatttatggatttatcgcttggcgtgactggaccactggctgggctggtgatgagctgggcgggcgtaccggtgatttatctggcggcggcgggactggtcgcaatcgcgttattactgacgtggcgattaaaaaaacggcctccggaacacgtccctgaggccgcctcatcatcttaa

SEQ ID NO: 470711 - DNA, 1050 bp, Shigella flexneri
atggaaacccctcaacccgataaaacgggcatgcacattctgctcaagttggcctcgctggtagtgatcctcgcgggcattcacgcagcggcagatatcattgtgcagctgttactggcgctgttttttgccatcgtcctcaacccgctcgttacctggtttattcgtcggggagtacaacgccccgttgccattacgattgtagtggtggtgatgctgatcgcactaaccgcgctggtcggcgtactggcggcatcgtttaacgaatttatctctatgctgccgaagtttaataaggagctgacgcgcaaactttttaaattgcaggagatgttgccttttcttaatttgcatatgtcgccggagcgaatgctgcagcggatggactcggaaaaagtggttaccttcaccacagcgctaatgaccgggctttccggggcaatggcgagcgtgcttttgctggtgatgaccgtagtttttatgctgtttgaagtgcgccacgtcccttacaaaatgcgttttgcgctgaataacccacagattcacatcgcaggattacaccgcgcacttaaaggcgtttcgcattatctggcgttaaagacgctactcagtttatggacaggtgtcatcgtctggctggggctggcgctaatgggcgtacagtttgcgctgatgtgggcagtactggcgtttttgctcaactacgtgcccaatatcggcgcggtaatttccgccgtaccgccaatgattcaggtgctgctgtttaatggtgtttacgaatgtattctggtcggcgcattgtttttagtggtccatatggtcatcggcaatattttagaaccacggatgatgggccatcgcctggggatgtccaccatggtggtatttctttcattgttaatctggggatggctgctcggcccggtagggatgctactttcggtgccattaaccagcgtgtgtaaaatctggatggaaacgacgaaaggtggcagcaaactggcgattttactggggccgggcagaccgaaaagtcggttaccgggatga

SEQ ID NO: 470712 - DNA, 588 bp, Shigella flexneri; identical to SEQ ID NO: 463050

SEQ ID NO: 470713 - DNA, 1575 bp, Shigella flexneri
atgctctccacactccgccgcactctatttgcgctgctggcttgtgcgtcttttatcgtccatgccgctgcaccagatgaaatcaccaccgcctggccggtgaatgtcgggccactaaacccgcacctttacacgcctaaccagatgttcgcccagagcatggtttatgaaccattggtgaaatatcaggcagacggttcggtgatcccgtggctggcaaaaagctggactcattcagaagatggtaaaacctggaccttcaccctgcgtgatgacgtgaaattctccaacggtgaaccgttcgatgccgaggcggcggcagaaaacttccgcgcagtgctcgataaccgtcaacgtcacgcctggctggagctggcaaaccagattgttgatgttaaagcactcaataaaacagagctgcaaattaccctgaaaagcgcctactatcctttcctgcaagaactggccctgccccgtcctttccgttttatcgctccctcgcagtttaaaaaccatgaaaccatgaacggaattaaagcgccgattggcaccggaccgtggattttgcaggaatcgaaactgaatcagtacgatgtcttcgtccgtaacgaaaactactggggcgaaaagccagcgattaaaaagatcacctttaacgtcatcccggacccgactacccgcgcggtggcgtttgaaactggcgatatcgacctgctgtacggaaacgaagggttattaccgctcgataccttcgcccgctttagccagaatccggcttaccacacccaactgtcacagccgatcgaaaccgtgatgctggcgctcaataccgccaaagcccccaccaacgagctggcagtacgtgaagctcttaattacgcggtaaacaaaaaatcgctgattgataacgcgttatatggcacccagcaggtcgccgacaccctgtttgccccttctgtgccttacgctaatctcggcctgaaaccgcgccagtacgatccgcagaaagcgaaagagttgctggaaaaagccggttggacgctgcctgcgggcaaagacatccgcgagaaaaatggtcagccgctgcgcattgaactgtcgttcatcggcaccgatgcgttaagcaaatcgatggcggaaatcattcaggctgatatgcgccagattggcgcagatgtctcgctgattggcgaagaagagagcagtatctatgctcgtcagcgcgacggtcgttttggcatgattttccaccgcacctggggcgcgccatacgatccacacgccttcctgagttcaatgcgcgtaccgtcgcacgctgacttccaggcacagcaaggattagccgacaagccgctgattgataaagagatcggcgaagtgctggcgacccatgacgaaacgcaacgtcaggcgctgtatcgcgacattctgacccgtctgcatgacgaggcggtttatctgcctatcagctacatctcgatgatggtggtatcaaaaccggagctgggtaatatcccctacgcgccgatcgccaccgaaattccgttcgaacagattaaaccggtgaaaccttaa

SEQ ID NO: 470714 - DNA, 945 bp, Shigella flexneri
atgttgcgttacgtattacgccgctttctgctgctgatcccgatggtgctcgccgcctcggtgatcatttttctgatgctgcgcctcggtaccggcgacccggcgctcgattatctgcgtttatctaacctgccgccgacgccggagatgctggcctctacccgcaccatgctcgggctggatcagccgctgtacgtccagtacggtacctggttgtggaaggcgctgcatcttgactttggtatctcattcgccagccaacgcccggtactggacgatatgctgaacttcctgcccgccacgctggaacttgcaggtgcggcgctggtattaattctgctcacttccgtaccgctcggtatctgggcggcgcgccaccgcgatcgtttgccggatttcgccgtgcgctttatcgcgtttcttggcgtgtcgatgcccaacttctggctggcatttttgctagtgatggcgttttcggtgtatctgcaatggctacccgcgatgggctacggcagctggcagcacatcattttacctgcggtttccatcgcctttatgtcgctggcgattaacgcgcgactgctgcgcgccagtatgctggacgtcgccggtcagcgtcacgtcacctgggcgcggctacgcggcctgaatgacaaacagaccgaacgccgccatattctgcgcaatgcctcgctgccgatgatcaccgccgtggggatgcacattggcgaattgattggcgggacgatgattatcgaaaacatctttgcctggcctggcgtcgggcgctatgcggtgtcggcgatttttaaccgtgactatccggtgattcagtgctttacgctgatgatggtggtggtttttgtggtctgtaatttgattgtcgatttgctcaacgccgcgctggacccgcgcattcgtcgtcatgaaggagcgcacgcgtga

SEQ ID NO: 470715 - DNA, 834 bp, Shigella flexneri
gtgaactttttcctctcttcccgctggtcggtacgcctggcgctgatcattatcgccctgctggcgctgattgcgctcaccagccagtggtggcagccgtacgatccacaggcaattgatttgccgtcgtgcctgctttcgccggatgcgcagcactggctgggcaccgatcacttaggtcgcgatattttctcgcggctgatggcagcgacccgcgtgtcgctcggttcggtaatggcctgcctgctgctggtgctgacattagggctggttattggcggcagcgccgggttgattggcgggcgcgttgatcaggccaccatgcgcgtcgccgatatgtttatgaccttcccgacctcgattctgtcgttctttatggttggcgtgctcggcaccgggctgaccaacgtaattatcgccatcgccctgtcgcactgggcgtggtatgcacgcatggtgcgcagcttggtgatttcactacgccaacgcgagtttgtgctggcgtcacggctttccggtgcgggccatgtgcgggtgtttgtcgatcatctggcaggcgcggtgatcccttcgctgctggtgctggcaacgctggatatcggccatatgatgctgcacgtcgcggggatgtctttccttggcctcggtgtgaccgcgccgaccgccgaatggggcgtgatgattaacgacgcgcgccagtatatctggacccagccgctgcaaatgttctggccggggctggcgctgtttatcagcgtgatggcctttaacctggtgggtgacgcactgcgcgatcatctggatcctcatctggtgacggagcacgcacactaa

SEQ ID NO: 470716 - DNA, 765 bp, Shigella flexneri
atgccgcaacagattgaactacgtaatatcgcgctacaggccgcgcagccgctggtacacggtgtatcgttaaccctgcaacgcgggcgcgtgctggcgttagtcggcggtagcggcagcgggaaatcattaacctgcgccgcgacgctgggcattttgcccgctggcgttcgccagacggcgggggaaattttagccgatggcaaaccggtttcgccttacgccctgcgcggcatcaaaattgccaccatcatgcagaacccgcgcagcgcctttaatccactgcacaccatgcacacccacgcgcgggaaacctgcctggcgttagggaaacccgccgatgacgctacgcttaccgctgccatagaagcggtggggctggaaaacgccgcgcgcgtgctgaagctgtacccgttcgagatgagcggcggcatgttgcagcgcatgatgattgcgatggcggtgctgtgtgaatcaccgtttatcatcgccgatgaaccgaccaccgacctcgacgtggtagcacaggcgcgcatcctcgatctgctggaaagcattatgcaaaaacaagcgccgggaatgctgctggtcacccatgatatgggcgttgtggcgcgtctggcggatgacgtggcggtgatgtcacaaggtaaaattgtcgaacagggcgatgtagaaacgctgtttaacgcccccaaacatacggtgacgcgcagcctggtttccgctcatctcgccctctacggtatggagctggcatcatga

SEQ ID NO: 470717 - DNA, 807 bp, Shigella flexneri
atgaccttacttaacgtctgcggcctttcccatcactatgcccacggtggatttagcggaaaacatcaacatcaggcggtgctgaataacgtttccctgaccctgaaaagcggcgaaaccgtcgccctgctgggacgcagcggctgcggaaaaagcaccctcgcgcggctgctggtaggcttagagtctccctcacaagggaatattagctggcacggcgaatcgctggcgaaacttaatcgcgcccaacgtaaagccttccgccgtgatattcagatggtgtttcaggactccatcagtgccgtgaatccgcgcaaaaccgtgcgcgagatcctgcgtgaaccgatgcgccacctgctatcactgaaaaaatccgaacaactggcgcgcgccagcgaaatgctgaaggcggtcgatctcgatgacagcgttctcgacaaacgcccaccgcagttaagcggcggccagctccagctcgtctgcctggcacgcgcgctggcggtcgaaccgaaattgctgattctggatgaagccgtttctaaccttgatctcgtgttacaggcgggcgtcattcgcctgctgaaaaagctacaacaacagtttggcactgcctgcctgttcatcactcatgacttacgcctggtggaacgcttttgccagcgagtgatggtgatggacaacggacaaatcgccgaaacccaggcggtgggagataaattaaccttttcctctgacgccggacgtgtgctacaaaacgcggtattacccgcattccccgtgcgccgtcgcacctcagaaaaggtttaa

SEQ ID NO: 470718 - DNA, 402 bp, Shigella flexneri
atgcaacgagtcaccatcacgcttgatgacgatttactgaagacgctggacagcctgagccagcgtcgtggttataacaaccgttccgaagctatccgcgatattctgcgtagtgccctggcgcaggaagctacccagcagcacggcacacaaggtttcgcggtgctgtcgtatgtgtatgaacacgaaaaacgcgacttagccagccgtattgtttccacccagcatcatcaccacgacctctccgtcgccacgctacatgtgcacatcaaccacgacgactgtctggaaatcgccgtgttgaaaggtgacatgggtgacgtgcagcattttgccgatgacgttatcgcccagcgcggcgtgcggcacgggcatttgcagtgcctgccgaaggaagattga

SEQ ID NO: 470719 - DNA, 360 bp, Shigella flexneri
atgatcaaactgaagacgccaaactctatggagattgccgggcaaccagctgttattacctacgtgccagaactgaatgcatttcgtggcaaattcctgggcttgtcaggttattgtgattttgtctctgacagtattcaggggctgcaaaaagaaggagagctttccctgcgagagtatcttgaggattgtaaagctgcgggtattgagccgtatgcgcgtacagaaaagattaagacctttacgttacgctatccagaatcgctgagtgaacgccttaataatgcggctgcgcagcaacaagtctctgttaatacctatattattgaaacactgaatgagcgtttgaatcatttataa

SEQ ID NO: 470720 - DNA, 231 bp, Shigella flexneri
atgagaaccaaggtacaggctttacggaagaaacaaaaaaatacattggatcaaatatttaaaactcctgttcctcaagggatcaagtggtctgatatagagtcactggttaaagcattaggcggagaaattaaggaaggaagaggttcgcgttgcaagttcatactaaatatgagcgtgcgtgtttccatcggcctcatccgtcgccagataccgataaaggcgctgtag

SEQ ID NO: 470721 - DNA, 1125 bp, Shigella flexneri
atgcgccatttacgcaatatttttaatctgggtatcaaagagttgcgcagtctgctcggtgataaagcgatgctgacgctgattgtcttctcgtttacggtgtcggtgtattcgtcagcgaccgttacgccaggatcgttgaacctcgcgccgatcgccattgccgatatggatcaatcgcagttatcgaaccggatcgttaacagcttctatcgtccgtggtttttgccaccggagatgatcaccgccgatgagatggatgccggactggacgccggacgctataccttcgcgataaatattccgcctaattttcagcgtgatgtcctcgccggacgccagccggatattcaggtgaacgtcgatgccacgcgcatgagccaggcatttaccggcaatgggtatatccagaatattatcaacggtgaagtgaacagctttgtcgcgcgctaccgtgataacagcgaaccgttggtatcgctggaaacccggatgcgctttaacccgaaccttgatcccgcgtggtttggcggggtgatggcgatcatcaacaacattaccatgctggcgattgtattgaccggatcggcgctgatccgcgagcgtgaacacggcacggtggaacatttactggtgatgccgataacgccgtttgagatcatgatggcgaagatctggtcgatggggctggtggtgctggtggtatcgggattatcgctggtgctgatggtgaaaggtgtactgggcgtaccgattgaaggctcgatcccgctgtttatgctgggcgtggcgctcagtctgtttgccaccacgtcaatcggcatttttatggggacgatagcgcgttcaatgccgcaactggggctgctggtgattctggtgctgctgccgctgcaaatgctttccggtggatccacgccgcgcgaaagtatgccgcagatggtgcaggacattatgctgaccatgccgacgacacactttgttagcctcgcgcaggccatcctctaccggggtgccggattcgaaatcgtctggccgcagttcctgacgctgatggcaattggcggcgcgtttttcaccatcgcactgctgcgattcaggaagacgattgggacaatggcgtaa

SEQ ID NO: 470722 - DNA, 2736 bp, Shigella flexneri
atgacgcatctggaactggttcccgtcccgcctgtcgcgcaactggcgggcgtgagccagcattatggaaaaaccgttgcgctgaacaatatcactctcgatattccggcccgttgcatggtcgggctgattggtccggatggcgtcgggaagtcgagtttattgtcactgatttccggtgcccgcgtcattgagcagggcaatgtggtggtgctgggtggcgatatgcacgacccgaagcatcgccgagacgtctgcccgcgcatcgcctggatgccgcaggggctgggcaaaaacctctaccacaccttgtcggtgtatgaaaatgtcgattttttcgctcgcctgttcggtcacgataaagcggagcgggaagtgcgaattaatgagctgctgaccagcaccgggttagcaccgtttcgcgatcgtccggcaggtaaactctccggcgggatgaagcaaaaacttgggctgtgctgcgcgttaatccacgacccggaactgttgatccttgatgagccaacaacgggggttgacccgctctcccgcgcccagttctgggatctgatcgacagtattcgccagcggcagagcaatatgagcgtgctggtcgccaccgcctatatggaagaggccgaacgcttcgactggctggtagcgatgaatgccggagaagtgctggcaaccggcagcgccgaagagctgcggcagcaaacgcaaagcgccacgctggaagaagcatttattaatctgttaccgcaagcgcaacgccaggcgcatcaggcggtagtgatcccaccgtatcaacctgaaaacgcagagattgccatcgaagcgcgcgatctgaccatgcgttttggttccttcgttgccgttgatcacgtcaatttccgcattccacgcggggagatttttggattccttggttcgaacggctgcggtaaatccaccaccatgaaaatgcttaccggactgctgcccgccagcgaaggtgaggcgtggctatttgggcaaccggttgatccaaaagatatcgatacccgccgtcgtgtgggctatatgtcgcaggcgttttcgctctataacgaactcaccgtgcggcaaaacctggagttacatgcccgtttgtttcacatcccggaagcggaaattcccgcgcgagtggctgaaatgagcgagcgttttaagctcaacgacgttgaagatgttctgccggagtcattgccgctcggcattcgccagcggctttcgctggcggtggcggtgattcatcgcccggagatgttaatcctcgatgagcctacttctggtgtcgatccggtggcgagggatatgttctggcagttgatggtcgatctctcgcgccaggacaaagtgactatcttcatctccacccactttatgaacgaagcggaacgttgcgaccgcatctcactgatgcacgccggaaaagtgcttgccagcggtacaccgcaggaactggttgagaaacgcggagccgccagtctggaagaggcatttatcgcctatttgcaggaagcggcagggcagagcaacgaagccgaagcgccgcccgtggtacacgacaccacccacgcgccgcgtcagggatttagcctgcgccgtctgtttagctacagccgccgcgaagcgctggaactgcgacgcgatccagtacgttcgacgctggcgctgatgggaacggtgatcctgatgctgataatgggttacggcatcagtatggatgtggaaaacctgcgctttgcggtgctcgaccgcgaccagaccgtcagtagccaggcgtggacactcaacctctccggttcccgttactttatcgaacagccgccgctcaccagttatgacgagcttgatcgtcggatgcgtgcgggcgatatcacggtggccattgagatcccgcccaatttcgggcgcgatatcgcgcgtggtacgcctgtggaactcggcgtctggatcgacggagcgatgcccagtcgtgccgaaacggtaaaaggttacgtgcaggcaatgcaccagagttggcttcaggatgtggcgagccgacaatcgacacccgccagccaaagcgggctgatgaacattgagacgcgttatcgctataacccggacgtaaaaagcctgccagcgattgttccggcggtgatcccgcttctgctgatgatgatcccgtcaatgctaagcgcccttagcgtggtgcgggaaaaagagctagggtcgattatcaacctttacgtgacccccaccacccgtagcgaatttttgcttggcaaacagctgccgtacatcgcgctggggatgctgaactttttcctgctctgcggcctgtcggtgtttgtgtttggcgtaccgcataaaggcagtttcctgacgctcaccttggcggcgctgctgtatatcatcattgccactggaatggggctgctgatctccacctttatgaaaagccagattgccgccattttcggaacggcgattatcacattgatcccggcgacacagttttccgggatgatcgatccggtagcttcgctggaagggcctggacgttggatcggcgaggtttacccgaccagtcattttctgactatcgcccgcggaacgttctcgaaagcgctggatctgactgatttgtggcaactttttatcccgttgctgatagccatcccgctggtgatgggcttaagcatcctgctgctgaaaaaacaggagggatga

SEQ ID NO: 470723 - DNA, 1068 bp, Shigella flexneri
atggataagagtaagcgccatctggcgtggtgggttgtcggggcactggcggtggctgccgtcgtggcgtggtggctgttgcgcccggcgggtgtgccggaaggctttgctgtcagcaatgggcgcattgaagcgacggaagtggatatcgccagcaaaattgccgggcgtatcgacaccattctggtgaaagaaggccagtttgttcgcgaaggcgaagtgctggcgaagatggatactcgcgtgttgcaggaacagcgactggaagccatcgcgcaaatcaaagaggcacaaagcgccgttgccgccgcgcaggctttgctggagcaacgacaaagtgaaactcgtgccgcacagtcgctggtcaatcaacgccaggccgaactggactctgttgccaaacgtcatacgcgttcccgctcgctcgcccaacgaggggctatttctgcgcaacagctggatgacgaccgcgccgccgctgagagcgcccgagctgcgctggaatcagcgaaagcccaggtttcggcttctaaagcggctatagaagcagcacgcaccaatatcattcaggcgcaaactcgggtcgaagcagcgcaagccactgaacggcgcattgccgcagatatcgatgacagtgaactgaaagccccgcgtgacggacgcgtgcagtatcgggttgccgagccaggggaagtgctggcggcaggcggtcgggtgctgaatatggtcgatctcagcgacgtctatatgaccttcttcctgccaaccgaacaggcgggcacgctgaaactgggcggtgaagcccggctgatcctcgatgccgcgccagatctgcgtattcctgcaaccatcagttttgtcgccagtgtcgcccagttcacgccaaaaaccgtcgaaaccagcgatgaacggctgaaactgatgttccgcgtcaaagcgcgtatcccaccggaattactccagcagcatctggaatatgtcaaaaccggtttaccgggcgtagcgtgggtgcgggtgaatgaagaacttccgtggcctgacgacctcgtggtgaggttgccgcaatga

SEQ ID NO: 470724 - DNA, 1623 bp, Shigella flexneri
atgaaaattggaactgtggcaggcactaatggcagtacaacgacaatcgcaacaaatgatatggtgcaagagcatgttaccaacttcactaaagaactgtttgggtatattgcaaatggtataggtgatgatatatcaagtattgccaggacaatgctcggtgaagttgtggaaaaaattgatgattggcaaatagaacgtttccaacaatctattcaagatgacaaaatttcatttaccatacaaacgaatcattcagaaaaatatagtatgctatcgggcatgcgcgctcatattctacgtaggaataactgttatcagtttattgtgacaattaatagtaaaaattacggttgccctcttgataataccgatattaattggtgcagcattgtttatttacttaataatatgacagtaaatgataatgctaatgatgttgcagttactgagtcgtacaaacccatctggaactgggaaatatcgcaatacaatgtatttgatattaaattcgaaacaattataaaaccccagttcgctgacagaacctatttctccaattgttcacctgttgatcccacaagtaccaggccgacctattttggcgataccgatggctcagtcggtgcagttttgtacgcgctttttgcaacaggacatttgggaatcatggctgaaggagaaaatttccttagccagttgcttaatatagaagatgaagttctcaacgtattgctaagggagaactttaatgagcaacttgacactaatgttaatacaataatcagtatactgaacagaagagataatgttttagaaagtcttcagccttatttggttattaataaagacgcagtcacgccatgtacgtttcttggcgaccaaaccggcgatcgatttagtaatatctgtggcgatcaatttatcatcgatttgttaaaacgcataatgagtatcaatgaaaatgttcatgtattagctggaaatcatgaaacgaattgcaatggtaactatatgcaaaacttcacgcgcatgaaaccacttgatgaggatacctacgacgggataaaagattatcctgtatgtttctatgaccccaaatacaaaataatggcaaatcatcatgggataacttttgatgatcagcgaaaacgttacattataggaccgataactgtctctattgatgaaatgaccaatgctctcgatccggtcgaattagcggaaattattaataaaaagcatcatgctataattaatggcaaaaagtttaaaactagccgggctatctcttgtcgatcctttaatcgttatttttctgtttcgacagattacagacctaaacttgaagcactattagcatgttcacaaatgttaggtataaatcaagttgttgcacataacggaaatggtgggagagaacgcataggtgaaacggggacagttttaggtcttaacgcccgtgacagtaaacatgctggaagaatgttcagcatgcataattgccaaattaaccctggtgcagggccagagataaccactccctggaagtcttaccagcatgaaaaaaacagaaatggacttatgcctttgattagaaggcgcacaatgttacagctctga

SEQ ID NO: 470725 - DNA, 1722 bp, Shigella flexneri
atgtctaataaaatctttacgcattccctacctatgcgctatgccgattttccaacgctggttgatgctttggactacgccgctctgagtagagccggaatgaatttttatgacagacgttgccaacttgaagatcaactggaatatcagacattaaaaacgcgtgccgaagctggtgcgaagcggttgttatcgctgaacctgaaaaaaggcgaacgcgtggcgctgattgccgaaacgagtagcgggtttgtagaggctttttttgcctgtcagtatgctggcttagtcgccgtcccgttggcgattccaatgggcgtcggtcagcgggattcctggagcgccaaactccagggtttactggcaagttgccagcccgcagccattatcactggtgatgagtggttgccactggtcaatgccgcgacgcataacaaccccgaattacatgttttaagccacgcttggtttaaggcattaccggaagccgatgttgcgctccagcgtccagttccgaacgatatcgcctacctccagtacacctccggcagcacccgttttccccgtggcgtcattatcacccatcgcgaagtgatggctaatctacgtgctataagccacgatggcattaaattacgccctagcgaccgctgcgtctcctggcagcctttctaccatgatatgggactggtcggctttctcctgccccccgtcgccacgcaactttcagtagattatttgcgcactcaggattttgccatgcgtcctttgcaatggcttaaattgatcagtaaaaatcgcggcaccgtttccgttgcgccgccgtttggctatgaattgtgccaacgccgcgtgaatgaaaaagatctcgctgaactggatctttcctgctggcgcgtcgctggtattggtgctgagccgatctccgcagaacaactccatcaattcgctgaatgtttccgtcaggttaactttgacaataaaactttcatgccgtgctacggactggcagaaaatgcgctggctgtcagcttctctgatgaagcctccggggttgtggttaacgaagtggatcgcgacatcctcgaatatcagggtaaagccgtcgcgccgggtgcagagacacgcgccgtatcgactttcgtcaactgcggcaaagcgttgccggaacatggtattgaaatccgcaatgaagcaggtatgccggtcgcggaacgtgtggtaggccatatttgcatctccggtcccagtctgatgagcggttactttggcgaccaggtttcgcaagacgagattgccgcgacgggctggttagacaccggcgacctcggttatctgctggacggttatctgtatgtcaccggacgcattaaagatctgattattattcgtggccgtaatatctggccgcaggatattgaatatatagcggaacaggaaccggaaattcattctggcgatgcgattgcttttgttaccgcccaggaaaaaatcattttgcagatccagtgtcggatcagcgacgaagaacgtcgcgggcagcttatccacgcgctggcggcacggatccaaagcgaatttggcgtgaccgcggctatcgatctgttaccgccccacagtattccccgaacgtcctccggcaagcctgcccgtgcggaagcgaaaaaacgttatcagaaggcttatgctgccagtcttaatgtgcaggaatccctggcataa

SEQ ID NO: 470726 - DNA, 897 bp, Shigella flexneri
gtgacgggcgctaccgggtttatcggtaaatatattatcgataacctgctcgcccgcggctttcacgttcgcgcattgacgcgtactgcccgcgctcacgtcaatgataatctcacctgggtgcgcggttcgctggaagatactcattcacttagcgagctggttgccggagccagcgtagtggtccattgcgccgggcaagtgcgcgggcacaaagaagagattttcacccgctgtaacgttgacggcagcctgcgcctgatgcaagcagcaaaagagagcggcttttgccaacgttttctgtttatctcttcgctggcggcgcgccatcccgagctctcctggtatgcaaaatccaaatacgtcgccgagcaacgactggcagcaatggcggacgaaattacgctgggcgtttttcgcccgacagccgtgtatggtcccggcgataaagagttaaaaccgctgtttgactggatgctacgcggcctgctgccacgacttggtgcgccagatacacaactctcttttcttcacgtcaccgattttgcgcaagcagtgggtcagtggttaagcgccgaaactgtacagacgcaaacctatgaattatgcgatggcgtcgccggtggctatgactggcaacgcgtacgacagcttgccgccaaagcccgttgtggttccgtgcgaatggttgacattcctctgccggtactcacaggccttgcggatatcagtaccgcgttgagtcgcctggcaggtaaagaacctatgctgacccgctcgaaaattcgtgaattaacccacgccgactggtcggcaagtaataaccgtatttctgaagatatcaattggtttcccgggattagcctggaacacgcattacgcaacgggctattttga

SEQ ID NO: 470727 - DNA, 249 bp, Shigella flexneri; identical to SEQ ID NO: 261696

SEQ ID NO: 470728 - DNA, 351 bp, Shigella flexneri
atggggctatacgataaatatgcgcgccttgctggcgagcgtctgcaatttagtgacaacgggttaacaccgtttggcacctgtattgatgaagtgtattccgccaccgaaggccggatcggcaataaaaaagtgattctggccgggaccaataattatctcggtttaacctttaatcatgatgccatcagcgaaggtcaggccgcgttagcggcccaaggcaccggcaccaccggttctcgtatggcaaacggcagttatgcgccgcacctggcgttagagaaagagattgccgagtttttcaatctccctaccgctatcgtttttcaaccggttataccgctaatttag

SEQ ID NO: 470729 - DNA, 789 bp, Shigella flexneri
gtggtgttactggatgccgacagccacgccagtatttatgacgcctgttctctcggtggcgcggaaattattcgtttccgccataacgatgctaaagatctggaacggcgcatggttcgcctcggtgaacgggcgaaagaggcgattatcatcgttgagggcatctacagcatgctcggtgacgttgcgccgctggcggaaattgttgatatcaaacgtcgtctcggtggttatttgattgtcgatgaagcgcattcgtttggcgtgttaggcgcaacggggcgcggactggctgaagctgtcggcgttgaagatgatgtggatattatcgttggtactttcagtaaaagtctggcctcgattggcggttttgctgtcggttcggaagcgatggaagtgctgcgctacggcagccgcccgtatatttttaccgcctctccttctccgtcctgcattgcgaccgtgcgctcgtcgttaagaactattgccacacaaccagagctgcggcaaaagctgatggataacgccaaccatctgtatgacggtctgcaaaaactgggttatgagttaagttcacatattagcccggtagtgccagtaataatcggttcgaaagaggaaggtttacgcatctggcgcgagcttatctcgccgggcgtgtatgtgaatcttatcctgccgcctgccgcgcctgcaggcatcacgctgctgcgctgtagcgtaaatgctgcccacagtcgtgagcaaatcgatgccatcattcaggcatttgctactctgaagcagtaa

SEQ ID NO: 470730 - DNA, 1080 bp, Shigella flexneri
atgaatgttttcagtcgctatttaatccgtcatctctttctcggttttgccgccgctgcagggctattgctgccgctttttaccaccttcaacctgattaacgaactggatggtgtcagcccgggcggttatcgctggactcaggcggtgctggtggtgctaatgaccttaccgcgcacactggtcgaactttcgccgtttatcgcgttattgggtggtattgttggactggggcagttatcgaaaaacagtgagcttaccgccattcgcagcacggggttttctatcttccgtattgcactggtggcgctggttgccgggatattgtggactgtctcgttaggcgcgatagatgagtgggtggcgtcgccattgcagcaacaggcgttgcaaatcaaatcgaccgccaccgcgttgggggaggacgatgacattaccggcaatatgctgtgggccaggcgtggtaatgaatttgtgacggtgaaatcgctgaacgagcagggccagccggtgggcgtggagatatttcattatcgcgacgatctctcgcttgaatcctacatttatgcacgcagtgccaccattgaagacgacaaaacgtgggtcctgcatggtgtgaatcataaaaaatggctgaatggcaaagaaacgctggaaacattagataatcttgcctggcaatcggccttcaccagtatgaatcttgaagagttatcaatgccggggaatactttttctgtccgtcagcttaatcattacatccattatttgcaggaaaccgggcaacccagcagcgaataccgccttgcactgtgggaaaaactggggcaacccatcctgaccctggcgatgattttgctggctgtgccgtttacctttagtgccccgcgttcgcctgggatgggtagccgtctcgctgtaggcgtcatcgtgggcttactcacctggatcagctatcaaatcatggttaatctgggattgctatttgcgttaagcgcacctgttaccgcgctcggtttaccggtagcgtttgtgttggtggcgttgagcctggtgtattggtatgacagacaacattaa

SEQ ID NO: 470731 - DNA, 1071 bp, Shigella flexneri
atgaagctggttgaacactacatcatgcgtggtacgcgccgtctggtgctgattatcgtcggttttctgatctttattttcgccagctactccgcacagcgttatctgaccgaagcggcaaatgggacattagctcttgatgttgtgctggatatcgttttctacaaagtactgattgcactggagatgttgttacctgttggtctgtatgtgtcagttggcgtgacgctagggcagatgtataccgactcggaaattaccgctatctctgcggcggggggcagtccgggacgcttgtacaaagccgttctttatctggcgataccgctaagtatttttgtcacccttctgtcgatgtatggtcgtccgtgggcttatgcgcagatttatcaactggagcagcagtcgcagtcggagctggatgttcgccagttgcgggcaaagaaatttaacactaacgataacggacgaatgatcctttcgcagacggttgatcaggataataatcgcctgactgacgcgctgatttatacttctactgccaatcgaacccgtattttccgcgccggttcggttgatgtggttgacccatcacccgagaaaccgaccgttatgttgcacaacggcactgcctatcttctcgatcatcaggggcgtgacgacaacgaacagatctaccgtaatctgcaattacatctgaatccgctggatcaaagcccgaacgtcaaacgcaaagcgaaatcggtcacggagctggcgcgctccgcctttcctgccgatcatgccgaactgcaatggcgacaaagccgtggcctgaccgcattgttgatggcgctgctggccatttcattaagtcgggtaaaaccgcggcaagggcgattttcaacgttattgccactgacgttgctgtttattgccattttttatggcggcgacgtctgccgtacactggtggctaacggcgcgattcccctcattcctggtttgtggttagtgcccggactcatgctaatgggcctgctgatactggtcgcacgtgacttctctttgctgcagaaattttcccgatga

SEQ ID NO: 470732 - DNA, 561 bp, Shigella flexneri
atgtcatctcgtttgattattgcgttgattatcatgctcttagccccgggtgtgcaggcacacaatttcgtcactggcaaaacggttacccctgtttatatccaggaaggcggcgagctgcttctgaatagcgacgacgaaattcactaccaaaagtggaacagcacacaattagcgggaaaagtccgcattattcagtatatcgccgggcgtaagtcggcgaagaaaaagaactcactgttaattaaagcggttgaagcggcaaactttccgcaggatcgttttcagcccaccaccattgtgaacaccgatgatgccatctttggtactggctattttgttgttggcaaaatcgaaaaaaataaacgccgctatccgtgggcgcaattcgttattgacggcaatggacagggacgcgttgcctggcgcttgccggagcagagttcaaccattctggtgctgaataaagccgggcaaattcagtgggcaaaggacggcagcctgacgccggaagaggtagatcatgtcattgcgttggcgcagaaactgatcaatgaataa

SEQ ID NO: 470733 - DNA, 825 bp, Shigella flexneri
atgatgagaaaatatttcccgcttgaggcgagcgagcgtctatttgttgcgattgaagaagatgatgtcgttgatgcacaggttagtttgccgccgactattgcactaagttgtaccaccgaaatcattcatgataattacgcgttatgcctgcaattctggctcaatggcgttgatcgtcaggaattactgcgtttagttcgcaaacaagccaaaggcgatgagctgactgctgatgagcgcaaacaatttaaatacatgcgagcgcgctacaagcacctgcgttttgcgcaacggctgtatttaaagaagcatcaggccggatttttattcggcaaaacgaccgtttttctggggcgttttcaggacggctttcgtaacggtaagaaaaatattgtgtcgtattacggcaacctgttacggatttatttaagctctccggtctggtcgttggtgaactattcattacgccatagccagttagaaagcgtaagcagttttattgcctatcggcaaaagcaaatgcataccctgaaagagattattgccaaaccgcgactaaccggcagggaatttcatgatgtgcgaaaaatcatcagccagcaggtttcttattacgacaccttaagatcgcttgatcctgaaaataaagaggcgttacagatttcccgtttcctcgccgccattaatggcctgatgggagataaacacgacgacatggtggcggatgatatggaaaaccgccagtcgtattatgcaccgttggcgctggatagcgatatttgtcagcgcttagagctgctgatttcgcgttttccgctatag

SEQ ID NO: 470734 - DNA, 1350 bp, Shigella flexneri
ttggcgggttttaacatcaaacattggtttgcagatggcgcgtttcgcaccattattcgcaatagcgcctggttaggctccagtaatgtcgagagcgccttgctggggctgttggcgctctcgtgtgccggtaaagggatgacgcccgccatgtttggtgtactggtgattgtgcaatcgtacgccaagtcgatcagcgattttattaagtttcagacatggcagctggtggttcagtacggaacgccagccttgaccaacaataatccgcagcaatttcgcaatgtcgtctcattttccttctcgctggatatcgtcagcggcgcggtggcgattgtcggcggcattgccttactgccattcctttcccattcattaggtctggatgaccaaagcttttggctggcggcgctgtattgcacgctcattccttcaatggcttcctccacgccgaccggcattctgcgtgcggtagatcgctttgatttgattgctgtacagcaggcgacgaaaccttttctgcgcgcagcggggagcgtcgcagcctggtattttgactttggttttgcgggttttgttattgcctggtacgtgtcgaatctggttggcggcaccatgtactggtggtttgccgcgcgcgaattacgccgtagaaatatccataacgccttcaaattgaatctgtttgagtctgcccgacacattaaaggcgcgtggagttttgtctggtcaaccaacattgcccactccatctggtcggcgcgtaactcgtgcagcacagtgttggtggggatcgtgttaggacccgctgccgccgggttatttaaaatcgccatgacattcttcgacgccgccggaacgccagcgggtttgctgggtaaaagtttttacccagaggtgatgcgtttagatccgcgcaccaccagaccgtggttgttaggtgtgaagtccggtttactggcgggcggaatcggtattctggtggcgctcgcggtgttgatcgtcggcaagccgctcatttcgctggtgtttggcgttaagtatctcgaagcgtatgacctgattcaggtgatgctgggcgcaattgtgatttcgatgctgggcttcccgcaggagtcattgctattgatggcgggaaaacagcgcgcttttctcgtggcgcaaaccatcgcctcaatcggctacatcgtattgctgttcatgttctgtcatctgtttggtgtgctgggagcagcgtttgcttacttcggtgggcaatgtctggacgtggcgctctcgttaattccaaccttaaaggcattttttcagcgccattccttgctttataacgcagccggagagaaatcctga

SEQ ID NO: 470735 - DNA, 759 bp, Shigella flexneri
atggatgcactacaaacacaaactgttaatagtacaaccgcgccgcagcccaactacattccggggctgattgcggtggtcgggtgtgatggcaccggtaaatccacgctgaccaccgacctggtgaaatcgctgcaacaacactggcaaaccgagcgccgctatctggggctgctctccggcgaagacggcgacaaaatcaaacgattgccgttggttggcgtctggctggaacggcgattggcggccaaatcctcgaaaacccaaagcatgaaaaccaaatctccggcgctatgggcggcggtgattatgtactgcttctcgctgcgaagaatggcgaatctacgcaaggttcagcgactggcgcaaagtggcgttctggtggtcagcgatcgcttcccgcaggctgaaatttcgggcttttattatgacggaccggggatcggcgtcgaacgtgcgaccgggaaaatcagcatgtttctggcgcagcgcgaacggagtttataccaaaaaatggcgcaataccgtcctgaattaatcattcgtttggggattgatattgatactgccatctcccgcaagcctgaccatgagtatgccgaactgcaggacaaaatcggcgtcatgtcgacgattggctataacggcacaaaaattcttgagattgattccagagcgccctacagcgaagtgctggaacaggtacagaaggcggtttctctggttgccatcgtttctgaccgccgaagtttaacttaa

SEQ ID NO: 470736 - DNA, 699 bp, Shigella flexneri
atgtcaataattaattccacgccagtgcgtgttattgccattgtaggatgtgatggttcaggtaaatcgaccctcacggcaagcctggtaaatgaactggcagcaagaatgccaacagaacacatttatctcgggcaatcgtccgggcgaattggcgaatggatttcacagctccctgttattggcgcaccttgtgggtgttatctgcgaagtaaagcggcacatgtacacgaaaagcccttaactccgcctggcaatattactgcgctggttatctatctgctttcctgctggcgggcgtacaagtttcgcaaaatgttgtgtaaaagccagcaaggctatctgctcatcaccgaccgctacccgcaggttgaagtgccgggttttcgctttgatggcccgcaattggcaaaaaccacgggcggtaacggttggataaaaatgttaaggcagcgcgagttgaagctgtaccaatggatggcgtcttatttacccgtattgttgattcgtcttggcattgatgaacaaaccgcgtttgcgcgtaaacctgaccaccaactggcagcgttacaggaaaaaatcgccgttacgccgcaactgacattcaatggcgccaagatccttgaactggatggtcggcaaccagccgatgaaattatgcaagcgtcactacgcgcaattcacgccgcgctttcctga

SEQ ID NO: 470737 - DNA, 693 bp, Shigella flexneri
atgcagtcaataacacctccattaattgccgttattggtagcgatggttcaggcaagtcaacggtgtgtgaacatcttattaccgttgtcgaaaaatatggtgctgccgaaagagttcatttaggaaaacaggccggaaatgtcggtcgtgcagtgacaaaattacctttgatgggaaaatccttacataaaacaattgaacgaaatcaggtgaaaacagcaaaaaaattgcctggaccagttccggcgctggtaattacagcgtttgtcgcccgtcgcttactgcgctttcgtcatatgcttgcctgtcgtcgtcgcgggttaattgttctaaccgaccgttatcctcaggaccaaattcctggcgcttacgatggtacggtgttcccacctaacgttgaaggtggtcgttttgtctcatggctggcaagccaggaacgtaaagcgtttcactggatggcgagccataagcctgatctggtcatcaaactcaatgttgaccttgaagttgcctgtgcacgtaaacccgaccataaacgggaatcgctggcgaggaagattgccataacgccacagttaacctttggtggtgcacaactggttgatatcgatgccaatcagccactggaacaggtgttggttgatgcagaaaaagcgattacggattttatgaccgcgcgtggttatcactag

SEQ ID NO: 470738 - DNA, 1500 bp, Shigella flexneri
atgctaaatttatttgttggccttgatatatatacggggcttttgttattacttgccctggcatttgtgttgttctacgaagcaatcaatggttttcatgacacggcgaatgcggtggcaaccgttatttatactcgtgccatgcagccacaacttgctgtggtgatggcggcattttttaacttttttggcgtgttattgggcggacttagcgttgcctatgccattgtccatatgttaccaatcgatttgttgctgaatatggggtcaactcacggtttggcgatggtcttttccatgctgctggcggcgattatctggaacctgggaacgtggttctttggtttaccggcctccagttcgcacaccttgattggtgcgattatcggcatcggtttaaccaacgcgctgttaaccggctcatcggtgatggatgcgttaaacctgcgtgaagtaaccaaaattttctcctcgctgattgtttcccctatcgtcggcctggtcattgcgggtggtctgattttcctgctgcgccgtttctggagtgggacgaaaaagcgtgaccgtattcaccgcattccggaagatcgcaaaaagaaaaagggcaaacgtaaaccgccattctggacgcgtattgcgctgattgtttccgctgcgggcgtggcgttttcgcacggcgcgaacgacgggcagaaagggatcggcctggtaatgctggtactggtggggattgcccctgctggcttcgtcgtcaatatgaatgcgtccggctatgaaattacccgtacccgcgatgccgttaccaacttcgaacactacctgcaacagcatcctgaactgccgcagaagttgattgcgatggaacctccattgcctgcagcatcgactgatggcacgcaagtaacagagtttcactgtcatccggcaaatacctttgatgcgattgcgcgcgttaaaacgatgctgccaggcaatatggaaagttacgagccgttaagcgtgagtcagcgcagccagctgcgccgcattatgctgtgcatctccgatacctccgcgaagctggcgaaactgccaggcgtcagtaaagaagaccagaacctgctgaaaaaactgcgcagcgatatgttaagcaccattgagtacgctccggtgtggatcatcatggcggtagcactggcgctcggcattggcaccatgattggctggcgtcgtgtagcgatgaccatcggtgagaagattggtaagcgcggcatgacgtatgcgcaaggcatggcggcacaaatgacggcggcagtgtctatcggccttgccagttatattgggatgcctgtctccacaacacacgtcctctcgtctgcggtagcagggacgatggtggtggacggcggtgggttacagcgtaaaacggtaaccagcatcctgatggcgtgggtgtttactttaccggcggcaatttttctttctggtgggctgtactggatagcattgcagttgatttaa

SEQ ID NO: 470739 - DNA, 1860 bp, Shigella flexneri
atgagcaaaggaacgaccagccaggatgccccgttcgggacattattgggctacgccccaggtggggtagcaatctactcttcagattacagttctctcgatccgcaggaatacgaagatgacgccgtattccgtagctatatcgacgacgaatatatgggccacaagtggcaatgcgttgaatttgctcgccgttttctctttctgaattacggtgtggtctttactgacgtgggtatggcgtgggagattttctcgctgcgcttcctgcgagaagtggttaatgacaacatcctgccattgcaggcatttcctaacggctcgccgcgtgcgccggtcgcgggtgcgcttcttatctgggataaaggcggtgaatttaaagacactggccatgtcgccatcattacccaattgcatggcaacaaagtccgtattgcggaacagaacgtgattcattccccgttgccgcaagggcaacagtggacgcgcgagctggagatggtggtcgaaaacggctgctatacccttaaagacacttttgatgacaccaccattctgggctggatgatccagacggaagatactgaatacagcttaccgcagccggaaattgcaggcgagctgctgaaaatcagtggagcgcgtctggaaaacaaaggccagtttgacggtaaatggctggatgaaaaagatccgctacaaaacgcctatgtgcaggccaacggtcaggtgctcaatcaggatccgtatcattactacaccattaccgagagtgccgagcaggagctaattaaagccaccaacgagctgcatctgatgtatcttcacgcaaccgacaaggtgctgaaagatgacaacctgctggcgctgttcgacattccgaaaatcctctggccacgtttgcgtctctcctggcagcgtcgccgtcaccatatgatcactggtcgtatggatttctgcatggatgagcgtggcctgaaggtttacgaatacaacgccgactccgcctcctgtcataccgaagcgggcttgatcctcgaacgttgggcggagcagggctataaaggcaacggcttcaatccggcggaagggctgattaacgaactggctggtgcctggaaacacagtcgtgcacgtccgtttgtccatatcatgcaggacaaagatatcgaggaaaactatcacgcgcagtttatggagcaggcgctgcaccaggcgggctttgaaacgcgtatcttgcgcgggctggatgaactgggctgggatgctgccgggcaactgattgatggggaagggcgactggttaactgcgtgtggaaaacctgggcgtgggaaaccgcgtttgatcagattcgtgaagttagcgaccgtgagtttgctgcggtgccaatccgtaccggtcatccgcaaaacgaagtgcgtcttatcgacgtattgctgcgcccggaagtgctggtctttgagccgctgtggacggtgatccccggcaacaaagcgattctgccgatcctctggtcgctgttcccgcaccatcgttacctgctggataccgatttcactgttaatgatgaattggtgaaaacaggttacgcagtgaaaccgatcgccggtcgctgtggtagcaatatcgacctggtcagccatcatgaagaggtgctggacaaaaccagcggtaaatttgccgagcagaaaaacatctatcagcaactgtggtgtttgccgaaagtggacggtaaatacattcaggtatgtaccttcaccgttggcggcaactacggtgggacgtgtttgcgcggtgatgaatcactggtcatcaaaaaagagagtgatattgaaccgttaattgtggtgaaaaagtaa

SEQ ID NO: 470740 - DNA, 867 bp, Shigella flexneri
atgacagacaatacttatcagcccgcgaaagtctggacgtgggataaatccgctggcggcgcgttcgccaatatcaatcgcccgttttctggtccgacgcatgaaaaaacgctgcccgttggcaaacatccattgcaactttattcgctgggaacgccgaacggtcagaaagtaacgattatgcttgaggagctactggcgctgggcgttactggtgcagagtacgacgcctggctgattcgtattggcgatggcgatcaattctccagcggctttgtcgaagtgaacccaaactcgaagatcccggcgctgcgcgatcatacgcataatccgccgatccgcgtgtttgaatctggttcgatcctgctttatctggcggagaaatttggctacttcctgccgcaggatctggcaaaacggactgaaacgttgaactggctgttctggttacagggtgccgcgccgttcctcggcggtggttttggtcacttttaccattacgcgccggtgaaaattgagtacgccatcaaccgctttaccatggaagccaagcgcctgctcgacgtgctggataagcaactggcgcagcataagtttgttgcgggcgatgagtacaccattgcggatatggcgatttggccgtggtttggcaacgtggtgctcggcggcgtgtatgatgccgcagagtttctggatgcgggaagttataaacatgtgcaacgctgggcgaaagaagtgggcgaacgtccggcagtgaaacgtgggcgtattgttaaccgcaccaacgggccgctgaacgagcagttgcatgagcgccatgacgccagtgattttgagacaaatacagaagataagcgtcaggggtaa

SEQ ID NO: 470741 - DNA, 249 bp, Shigella flexneri
atgtgtattggcgttccaggccaggtgctggctgtcggtgaagatattcaccagcttgcgcaggttgaagtatgtggtatcaagcgcgacgtgaatatcgccctgatttgcgaaggtaaccctgccgatctgctgggccagtgggtgctggtacacgtcggatttgccatgagcatcatcgacgaagatgaagccaaagccacattagacgcactgcgccaaatggattacgacattaccagcgcgtga

SEQ ID NO: 470742 - DNA, 342 bp, Shigella flexneri; identical to SEQ ID NO: 460296

SEQ ID NO: 470743 - DNA, 489 bp, Shigella flexneri
atgactgaagagatagcaggtttccagacctccccgaaggcgcaagtacaggcagcgtttgaagaaattgcccggcgttcgatgcacgatctctcttttctgcatccttcaatgccggtgtatgtttctgattttacgctgttcgaaggtcagtggacggggtgtgtgatcaccccgtggatgctgagtgcagttatcttccccggcccggatcaactctggccgctgcgcaaagtgagtgaaaaaattggtctgcaactgccgtatggcaccatgacctttaccgttggcgaactggacggtgtttcgcaatacctctcctgttcgctgatgtcgccgctttcgcacagcatgtcgattgaagaaggccaacgcctgacggatgactgcgcacgaatgatcctttcgttgccagtcaccaatccggatgtaccacacgcagggcgtcgcgccctgctgtttggccgcaggaggggcgaaaatgcatga

SEQ ID NO: 470744 - DNA, 495 bp, Shigella flexneri
atgcgtattttagtcttaggggtcggcaatattttgctgaccgatgaagccatcggcgtgcggattgtcgaagcgttagagcaacgatacattctgccggattatgttgagatcctcgatggcggcacggcgggaatggagctgcttggcgacatggcaaatcgcgatcatctgattattgcggatgccattgtgtcgaaaaagaacactccgggaacgatgatgatcctgcgggatgaagaagttccggcgttgtttaccaacaaaatctctccgcatcagcttggcctggccgacgtattgtcggccctgcgcttcaccggtgagtttccgaaaaagctgaccctggtcggcgtgatcccggaatcgctggagccacacatcggcttaacgccgacggttgaagcaatgattgaacctgcgcttgagcaggttctggctgcgctgcgcgaatcaggcgtggaagccatcccacgggaggcgattcatgactga

SEQ ID NO: 470745 - DNA, 1704 bp, Shigella flexneri
atgagccagagaattactattgatccggtaacccgtattgaggggcatttacgcatcgattgcgaaatcgaaaatggcgtcgtttcgaaagcatgggcttccggtaccatgtggcgcggcatggaagagatcgtgaaaaaccgcgatccgcgcgatgcatggatgattgtgcaacgtatctgtggcgtatgtactaccactcacgcgctgtcttccgttcgtgcggcagaaagtgcgctgaatatcgacgttccggttaacgcgcaatacatccgtaacatcattctggctgcgcacaccacgcatgaccatatcgttcatttctatcagctttcggcgctggactgggtggacatcacttctgcactgcaagctgacccaaccaaagcctccgaaatgctgaaaggcgtttcgacctggcatctgaacagtccggaagagttcactaaagttcagaacaagatcaaagatctggttgccagcggtcagttgggtattttcgccaatggctactggggtcacccggcgatgaaactgccgccggaagtgaacctgattgcggtagcgcactacctgcaggcgctggagtgccagcgtgacgctaaccgcgtcgtggcgctgctgggcggtaaaacgccgcacattcagaacctggcagtgggtggtgtcgcgaacccaatcaacctcgacgggttgggcgtgttgaaccttgagcgcctgatgtacatcaagtctttcatcgacaaactgagcgactttgttgagcaggtttataaggttgataccgcggttatcgccgcgttctacccggaatggctgacgcgcggtaaaggtgcggtgaactacctgagcgtgccggaattcccgaccgacagcaaaaacggcagcttcctgttcctgggaggctacattgagaatgcggatctgtcctcgtatcgtccgatcacttctcattccgatgaatacctgatcaaaggcattcaggaaagcgcgaagcactcctggtataaagacgaagcgccacaggcgccgtgggaaggtaccaccattccggcttatgatggttggtctgacgacgggaaatattcctgggtgaaatcaccgactttctacggcaaaacggtagaagtgggtccgctggctaatatgctggtgaaactggcggcaggtcgcgaatctacccagaacaaactgaatgaaatcgttgcgatttatcagaaactgactggcaacacgctggaagtggcacagctgcactccacgctgggccgtattattggtcgtaccgttcactgctgtgaattgcaggatatcctgcaaaaccaatacagtgcactgatcaccaatatcggcaaaggcgatcacaccacctttgtgaagccgaacattccggcaacgggtgagttcaaaggtgttggcttcctcgaagcgccgcgcggtatgctctctcactggatggttattaaagacggtatcatcagcaactaccaggcggttgttccatcaacctggaactctggtccgcgtaacttcaatgatgacgtcggtccttacgagcagtcgctggtgggtacaccggttgccgatccgaataaaccgctggaagtggtgcgtaccattcactccttcgacccgtgcatggcctgtgcggtacacgtagtggatgccgacggcaacgaagtggtttcagtgaaggttctgtaa

SEQ ID NO: 470746 - DNA, 1179 bp, Shigella flexneri
atgagtcatgatccacaaccgctgggcggcaaaatcatcagtaaaccggtcatgatttttggaccgttaatcgtcatctgtatgctcctgattgtgaagcgtctggtgttcggtctgggctctgtctctgacctgaacggcggcttcccgtggggcgtgtggatcgcgtttgacctgctgattggcaccggctttgcctgtggcggctgggcgctggcgtgggcggtatacgtctttaaccgtgggcaataccatccgctggtgcgtccggcgctgttggcgagtctgtttggttactcactgggtggcttgtcgatcactatcgacgtgggtcgctactggaacctgccgtacttctacattccgggtcacttcaacgtgaactcggtactgttcgagacggcggtctgtatgaccatctacatcggcgtgatggctctggagtttgctccggcactgtttgaacgtctgggctggaaggtgtcgctacaacgtctgaacaaggtgatgttcttcatcatcgcgctcggtgcgctgctgccgaccatgcaccagtcttcaatggggtcgctgatgatctcggcgggctacaaggtgcatccgctctggcagagctatgaaatgttgccgctgttctcgctgctgacggcgttcatcatgggcttctcgattgtcatctttgaaggttcactggtgcaggcgggtctgcgtggcaacggtccggatgaaaagagcctgttcgtcaagctgaccaacaccatcagtgtgttgctggcgattttcatcgggctgcgctttggcgagcttatctatcgcgacaagctgtcgttagcgtttgccggtgacttctactccgtgatgttctggattgaagtcctgctgatgctcttcccgctggtcgttctgcgtgtggcgaagctgcgtaatgattcccgcatgctgttcctgtcagcactgagcgcactgttaggttgtgcaacctggcgtctgacctattcgttggtggcattcaacccgggcggcggttacgcctacttcccgacctgggaagaactgttgatttctattggttttgtggctattgagatttgcgcttacatcgtactcattcgtctactgccgatacttcctcctttaaaacaaaacgatcataatcgtcatgaggcgagcaaagcatga

SEQ ID NO: 470747 - DNA, 987 bp, Shigella flexneri
gtgaacagacgtaattttattaaagcagcctcctgcggggcattgctgacgggcgcgctgccgtctgtcagtcatgcggctgctgaaaaccgcccgccaattccgggatcgctggggatgttgtacgactcgaccttgtgcgtaggctgccaggcttgcgtcaccaagtgtcaggatatcaacttccctgaacgtaacccgcaaggggaacagacctggtcgaacaacgacaaactgtcgccgtataccaataacatcattcaggtgtggaccagcggcacaggggtcaacaaagaccaggaggagaacggctacgcgtacattaagaaacagtgtatgcactgcgtcgatccgaactgtgtctctgtgtgcccggtctctgcactgaaaaaagatccgaaaaccggcattgtccattacgacaaagacgtgtgcaccggttgccgttactgcatggtcgcctgtccgtacaacgtgccgaagtacgactacaacaacccgtttggtgcgctgcataagtgcgagctgtgcaaccagaaaggtgtggaacgtctcgataaaggcggtctgcctggctgcgtagaagtgtgcccggcgggcgcggtgattttcggtacgcgtgaagagctgatggcggaggcgaaaaaacgtctggcgctgaagcctggcagcgaataccactatccgcgtcagacgctgaaatctggcgacacttacctgcatacggtgccgaaatattatccgcatctgtacggcgagaaagagggcggcggtactcaggttctggtactgacgggtgtgccttatgaaaatctcgacctgccgaaactggacgatctttctaccggtgcgcgttccgaaaatattcaacacaccctgtataaaggcatgatgctaccactggctgtgctggcgggcttaaccgtgctggttcgtcgcaacaccaaaaacgaccatcacgacggaggagacgatcatgagtcatga

SEQ ID NO: 470748 - DNA, 1119 bp, Shigella flexneri
atgactggagataacaccctcatccattctcacggcattaaccgtcgtgatttcatgaagctttgtgcagcattagccgccaccatggggttaagtagcaaagccgctgcagagatggccgaatcggttactaacccgcagcgtccgccagttatctggattggcgcgcaggagtgcaccggttgtacggaatctctgcttcgtgcaacgcatccaacggtagaaaacctcgtgctggagactatctctctggaatatcacgaagtgctttccgccgccttcggtcatcaggtcgaagagaacaaacataacgctctcgagaagtacaaagggcagtatgtgttagtggtggatggttccatcccattaaaagataacggtatttattgcatggttgccggtgagccgattgtggatcacatccgcaaagcggcggaaggctcagcagccattatcgctattggttcctgctccgcgtggggcggtgttgccgcagctggagttaacccaactggcgcagtcagcttgcaagaagttctgccaggcaaaaccgttatcaatattccgggctgcccgccgaacccgcacaacttcctcgcgaccgttgcgcacatcatcacttacggcaaaccgccgaaactggatgacaaaaaccgtccgaccttcgcctatggccgtctgattcacgaacactgcgaacgtcgcccgcacttcgatgctggtcgttttgccaaagagttcggtgatgaaggccaccgcgaaggctggtgcctgtaccacctcggctgtaaagggccagaaacttacggcaactgctcaacgctgcaattctgcgatgttggcggtgtgtggccggtggcgattggtcacccgtgctatggctgtaacgaaaaaggtatcggcttccataaaggcatccatcagcttgccaacgtcgaaaatcagactccgcgttcacagaaaccggatgttaacgctaaagagggcggcaacgtctctgcaggcgctattggtttgctcggcggtgtggttgggctggttgccggtgtcagcgtgatggcggtgcgtgaactgggtcgtcagcaaaagaaagataacgctgactcacggggagaataa

SEQ ID NO: 470749 - DNA, 288 bp, Shigella flexneri
atgaataaccattttggtaaaggcttaatggcgggattaaaagcaacgcatgccgacagtgcggttaatgtgacaaaattctgtgccgattataaacgcggttttgtattaggctactcacaccggatgtacgaaaagaccggagatcgccagcttagcgcctgggaagcgggtattctgacgcgccgctatggactggataaagagatggtaatggatttctttcgtgagaataattcctgttctacgttgcgcttttttatggccggttattgcctcgaaaattga

SEQ ID NO: 470750 - DNA, 888 bp, Shigella flexneri
atgccgcgtttaaccgccaaagatttcccacaagagttgttggattactacgactattacgttcacgggaaaatttcgaaacgtgagttcctcaaccttgcggcgaagtatgcggtgggcgggatgacggcattagcgttgtttgatttgctcaagccaaattatgcgctggcgactcaggtagagtttaccgacccggagattgttgctgagtacatcacgtatccttcgccaaatggtcacggcgaggtacggggttatctggtgaaacccgcaaaaatgagcggcaaaacgccagccgtgggggtggtgcatgagaatcgtggactgaatccgtatatcgaagatgtggcacggcgagtggcgaaggcggggtatatcgccctggcacctgacggattaagttccgttggaggttatccgggaaatgatgataaaggtcgtgagctgcaacagcaggttgatccaaccaaactgatgaatgatttctttgccgcaattgagtttatgcaacgctatccgcaagcgacaggtaaagtgggtattaccggattttgctatggcggtggcgtatcgaacgcggcggctgtcgcgtatccggaactggcctgcgcggtgccgttttatggtcgtcaggcacccactgccgatgtggcgaagattgaagcgcctttactactccacttcgcggaactggacacccgaatcaacgagggctggcctccttacgaggcggcgttgaaagacaataataaggtttatgaggcttatatctatccgggggttaatcacggattccataatgattccacgccccgttatgacaaatctgccgccgatcttgcctggcaaaggacactgaaatggttcgataaatatctctcctga

SEQ ID NO: 470751 - DNA, 1041 bp, Shigella flexneri
atggtctggttagcgaatcccgaacgttacgggcagatgcagtaccgctattgcggaaaaagtggtttacgcctgcccgcattatcgctcggtttatggcacaatttcggtcacgttaacgcgctggaatcacagcgtgcaatcctgcgtaaagcgtttgatttaggcattacgcactttgatttagccaacaattacgggccgcctccaggaagcgcagaagagaactttggtcgcctgctgcgcgaggattttgctgcttatcgcgatgaactgattatctctaccaaggctggctacgatatgtggcccggcccgtacggctctggcggttcacgtaaatacctgctcgccagcctcgaccaaagcctgaagcgtatggggcttgagtatgtcgatatcttttactctcatcgcgtcgatgaaaatacgccgatggaagaaaccgcctctgcgctggctcatgcggtacaaagcggtaaggcgctgtatgtcgggatctcctcttactcgccagagcggacgcaaaaaatggtcgagttgctgcacgagtggaaaattccgcttttaattcatcaaccttcgtacaatttactgaaccgctgggtggataaaagcggcctgctggataccctgcaaaataacggcgtgggctgtattgcctttactcctctggctcagggattgctgaccggaaaatatctcaacggcattccgcaagattcacggatgcatcgtgaagggaataaagttcgtggtctgacgccgaaaatgcttaccgaagccaacctcaacagcctgcgcttattgaatgaaatggcacagcagcgtggacaatcaatggcgcaaatggcgttaagctggttgctgaaagatgatcgcgtgacgtcggtattgattggtgccagccgcgcggagcaactagaggagaacgtgcaggcgctgaataatctgacatttagcaccgaggagctggcgcagattgatcagcatatcgccgatggcgagctgaatctgtggcaggcgtcgtccgataaatga

SEQ ID NO: 470752 - DNA, 495 bp, Shigella flexneri
atggaacgttttcttgaaaatgcaatgtatgcttctcgctggctgcttgcccccgtgtactttggcctttcgctggcgttagttgccctggcgctgaagttcttccaggagattattcacgtactgccgaatatcttctcgatggcggaatcagatttgatcctcgtgttgctgtcgctggtggatatgacgctggttggcggtttgctggtgatggtgatgttttccggttatgagaatttcgtctcacagctggatatctccgagaacaaagagaagctgaagtggctggggaaaatggacgcaacgtcgctgaaaaacaaagtagcagcgtcgattgtggcaatttcttccattcacttactgcgcgtctttatggatgcgaaaaatgtcccggataacaaactgatgtggtacgtcattatccatctgacgtttgtgctttctgcatttgtgatgggctatcttgaccgactgactcgtcataatcactga

SEQ ID NO: 470753 - DNA, 885 bp, Shigella flexneri
atgtctcatttaaaagacccgaccacgcagtattacactggtgaatatcccaaacagaaacaaccgacgccaggcatccaggcgaagatgacaccgataccggattgcggcgagaaaacctatgttggtagcggtcgcctgaaagatcgtaaagcactggtgacagggggcgattccggaataggtcgcgctgccgccatcgcttacgcgcgtgaaggggctgacgtggcgatcagttatcttcccgtggaagaagaagacgctcaggatgtgaaaaagatcattgaagaatgcggacgcaaagccgttctgctgccaggcgatttaagcgatgagaaattcgcccgttcgctggttcacgaagcgcacaaggcgttaggcgggctggatattatggcgctggtcgccgggaaacaggttgccattccggatattgcagacctcaccagcgaacagtttcaaaagacctttgccattaacgttttcgcgctgttctggctaacccaggaagcgatccccctgctaccgaaaggtgcaagtgtcatcaccacttcgtcaatccaggcataccagccaagtccgcatttactggactatgcggctacgaaggcggcgattctgaactacagccgtggcctggcaaaacaggtcgcggagaaaggtattcgggtgaatattgtcgcgccaggccctatctggacggcactgcaaatttccggcggacaaacgcaggataagatcccgcagtttggtcagaaaacgccgatgaagcgtgcggggcaaccggcggaactggcccctgtatatgtttatctggcaagtcaggagtcgagctacgtcaccgcagaagtgcacggcgtgtgcggcggcgagcatttaggttaa

SEQ ID NO: 470754 - DNA, 426 bp, Shigella flexneri; identical to SEQ ID NO: 261264

SEQ ID NO: 470755 - DNA, 735 bp, Shigella flexneri
gtgggtaataatttaatgcagacggacctttccgtctggggtatgtatcagtacgccgatattgtcgttaagtgcgtgatgattgggcttattttggcctctgtagtcacctgggcaatcttcttcagtaagagcgtagagttcttcaatcagaagcgtcgccttaagcgcgagcagcaactgctggctgaagcacgttccttaaaccaggccaacgatatcgccgctgattttggtagcaaaagcttaagcctgcatttgctcaatgaagcgcagaatgagctggaactgtcagaaggcagcgacgataacgaaggtattaaagaacgtaccagcttccgtctggagcgtcgggtcgccgcagtgggtcgtcaaatgggccgcggtaacggctatctggcaaccatcggcgcgatttctccgttcgttggtctgtttggtacggtctggggcatcatgaacagctttattggtatcgcgcaaacgcagaccactaacctggcagtcgttgcgccgggtatcgcagaagctctgttagcaacggcaatcggcctcgtggcagcgattcctgcggtcgttatctataacgtatttgcacgccagattggcggctttaaagcgatgctgggtgatgttgcagcgcaggtattgttgctgcaaagccgtgacctggatctggaagccagcgccgctgcgcatccggttcgtgtcgcacaaaaattacgcgcaggataa

SEQ ID NO: 470756 - DNA, 1188 bp, Shigella flexneri
atggcggacaaaaagcttgatactcaactggtgaatgcaggacgcagcaaaaaatacactcttggcgcggtaaatagcgtgattcagcgcgcttcttcgctggtatttgagagtatggaagccaaaaagcacgcgacgcgcaatcgcgccaatggcgagttgttctatggacggcgcggaacgttaacccatttttccttacaacaagcgatgtgtgaactggaaggtggcgcaggctgcgcgctatttccctgcggggcggcagcggttgctaattcgattcttgcttttgtcgaacagggcgatcatgtgttgatgaccaacaccgcctatgaaccgagtcaggatttctgtagcaaaatcctcagcaaactgggcgtaacgacatcgtggtttgatccgctgattggtgccgatatcgttaagcatctgcagccaaacactaaaatcgtgtttctggaatcgccgggttccatcactatggaagtccacgacgttccggcgattgttgccgccgtgcgcagtgtggtgccggatgccatcattatgatcgacaacacctgggcagccggtgtgctgtttaaggcgctggattttggcatcgatgtttctattcaggccgccaccaaatatctggttgggcattcagatgcgatgattggcactgccgtgtgcaatgcccgttgctgggagcagctacgggaaaatgcctatctgatgggccagatggtcgatgccgataccgcctatataaccagccgtggcctgcgcacattaggtgtgcgtttgcgtcaacatcatgaaagcagtctgaaagtggccgaatggctggcagaacatccgcaagttgcgcgagttaaccaccctgccctgcctggcagtaaaggacacgaattctggaaacgagactttacaggcagcagcgggctattttcctttgtgcttaagaaaaaactcaatgatgaagagctggcgaactatctggataacttcagtttattcagcatggcctactcgtggggcgggtatgaatcgttgatcctggcaaatcaaccagaacatatcgccgccattcgcccacaaggcgagatcgattttagcgggaccttgattcgcctgcatattggtctggaagatgtcgacgatctgattgccgatctggacgccggttttgcacggattgtataa

SEQ ID NO: 470757 - DNA, 660 bp, Shigella flexneri
atggctgttattcaagatatcatcgctgcgctctggcaacacgactttgccgcgctggcggatcctcatattgttagcgttgtttactttgtcatgtttgccacgctgtttttagaaaacggcctgctgcccgcctcatttttgccaggcgacagcttgttgatactggcaggcgcattgattgcccaaggggttatggattttctgcctacgattgcgattctgaccgccgcagcaagtctgggctgctggctaagttatattcaggggagctggttagggaataccaaaacggtgaaaggctggctggcacagcttcctgctaaatatcaccagcgcgccacctgcatgtttgaccgccacggtctgctggcgctgctggctggacgttttcttgcatttgtccgtacgctgctgccaaccatggcgggaatttccggtctgccaaaccgccgcttccagtttttcaactggttaagtggattgctgtgggtcagcgtggtaaccagttttggctatgccttaagtatgattccgttcgttaaacgccatgaagatcaggtaatgacgttcctgatgatcctgccaattgccttgttaaccgctggcttgttaggcacgctgtttgtggtgattaaaaaaaaatactgtaacgcctga

SEQ ID NO: 470758 - DNA, 957 bp, Shigella flexneri
atgctacaaaattgcgcacaatcaaattgccgcattattcctaagaaattacgcgatatgaaacgtgaagagatttgtcgcttgctggcggataaagttaataaactgaaaaataaagaaaatagtttgtcagaactgttgcccgatgtgcgtttgttgtatggcgagacgcctttcgcacgtacaccggtgatgtacgagcctggcatcataattctcttttccgggcataaaatcggttatatcaatgaacgcgtgtttcgttatgatgccaatgaatacctgctgctgacggtgccgttgccgtttgagtgcgaaacctatgccacgtcagaggtgccgctggcagggttgcgtctcaatgtcgatattttgcagttacaggaactgttgatggacattggcgaagatgagcatttccagccgtcgatggcagccagcgggattaactccgccacgttatcagaagagattttatgcgcggcggagcggttactcgacgtgatggagcgaccactggatgcgcgtattctcggcaaacagatcatccgcgaaattctgtactacgtgctgaccggaccttgcggcggcgcgttactggcgctggtcagtcgccagactcacttcagtctgattagccgcgtgctgaaacgaattgagaataaatacaccgaaaacctgagcgtcgagcaactggcggcagaagccaacatgagcgtatcggcgttccaccataattttaagtctgtcaccagcacctcgccgttgcagtatttgaagaattaccgtctgcataaggcgcggatgatgatcatccatgacggcatgaaggccagcgcagcagcgatgcgcgtcggctatgaaagcgcatcgcaatttagccgtgagtttaaacgttacttcggtgtgacgccgggggaagatgcggcaagaatgcgggcgatgcaggggaattaa

SEQ ID NO: 470759 - DNA, 1164 bp, Shigella flexneri
atgaacaactttaatctgcacaccccaacccgcattctgtttggtaaaggcgcaatcgctggtttacgcgaacaaattcctcacgatgctcgcgtattgattacctacggtggcggcagcgtgaaaaaaaccggcgttctcgatcaagttctggatgccctgaaaggcatggacgtgctggaatttggcggtattgagccaaacccggcttatgaaacgctgatgaacgccgtgaaactggttcgcgaacagaaagtgactttcctgctggcggttggcggcggttctgtactggacggcaccaaatttatcgccgcagcggctaactatccggaaaatatcgatccgtggcacattctgcaaacgggcggtaaagagattaaaagcgccatcccgatgggctgtgtgctgacgctgccagcaaccggttcagaatccaacgcaggcgcggtgatctcccgtaaaaccacaggcgacaagcaggcgttccattctgcacatgttcagccggtatttgccgtgctcgatccggtttatacctacaccctgccgccgcgtcaggtggctaacggcgtagtggacgcctttgtacacaccgtggaacagtatgttaccaaaccggttgatgccaaaattcaggaccgtttcgcagaaggcattttgctgacgctaatcgaagatggtccgaaagccctgaaagagccagaaaactacgatgtgcgcgccaacgtcatgtgggcggcgactcaggcgctgaacggtttgattggcactggcgtaccgcaggactgggcaacgcatatgctgggccacgaactgactgcgatgcacggtctggatcacgcgcaaacactggctatcgtcctgcctgcactgtggaatgaaaaacgcgagaccaagcgcgctaagctgctgcaatatgctgaacgcgtctggaacatcactgaaggttccgacgatgagcgtattgacgccgcgattgccgcaacccgcaatttctttgagcaattaggcgtgccgacccacctctccgactacggtctggacggcagctccatcccggctttgctgaaaaaactggaagagcacggcatgacccaactgggcgaaaatcatgacattacgttggatgtcagccgccgtatatacgaagccgcccgctaa

SEQ ID NO: 470760 - DNA, 828 bp, Shigella flexneri
atggctaatccaaccgttattaagctacaggatggcaatgtcatgccccagctgggactgggcgtctggcaagcaagtaatgaggaagtaatcaccgccattcaaaaagcgttagaagtgggttatcgctcgattgataccgccgcggcctacaagaacgaagaaggtgtcggcaaagccctgaaaaatgcctcagtcaacagagaagaactgttcatcaccactaagctgtggaacgacgaccacaagcgcccccgcgaagccctgctcgacagcctgaaaaaactccagcttgattatatcgacctctacttaatgcactggcccgttcccgctatcgaccattatgtcgaagcatggaaaggcatgatcgaattgcaaaaagagggattaatcaaaagcatcggcgtgtgcaacttccagatccatcacctgcaacgcctgattgatgaaactggcgtgacgcctgtgataaaccagatcgaacttcatccgctgatgcaacaacgccagctacacgcctggaacgcgacacacaaaatccagaccgaatcctggagcccattagcgcaaggagggaaaggcgttttcgatcagaaagtcattcgcgatctggcagataaatacggcaaaaccccggcgcagattgttatccgctggcatctggatagcggcctggtggtgatcccgaaatcggtcacaccttcacgtattgccgaaaactttgatgtctgggatttccgtctcgacaaagacgaactcggcaaaattgcaaaactcgatcagggcaagcgtctcggtcccgatcctgaccagttcggcggctaa

SEQ ID NO: 470761 - DNA, 927 bp, Shigella flexneri
atgaaaataatacttctgtttttagcagccctggcaagttttaccgtacacgcgcagcctccttcacagaccgtagaacaaacagtccggcagatttatcagaactataaatcagatgccagtacgccttatttcggtgaaaccggagagcgggcgataacttcagcgcgtattcaacaggcgcttaccctgaacgacaatcttacactaccgggcaatattggctggctggattatgatccggtttgtgattgtcaggattttggcgatctggtgttagaaagcgtagcgataacccaaactgacgtcgatcatgccgatgctgttgtgcgctttcgtatctttaaagatgataaagaaaagaccacacagacactgaaaatggtggcggaaaatggtcgttgggtcattgatgatattgtcagcaatcatggcagcgtcttacaagcagttaatagcgagaatgaaaaaacgctggccgctttagcttcgttgcagaaagaacagccagaatcctttgttgctgaactctttgaacatattgctgattatagctggccgtggacgtgggtggtttccgactcttaccgccaggcggttaatgccttctataaaaccaccttcaagacggccaataatcccgatgaagatatgcaaatagaacggcaatttatttacgacaatccgatctgttttggcgaagagtcgctattttcacgcgttgatgaaattcgagtcctggagaaaaccgccgattccgcccgcattcatgttcgttttacgctgaccaatggcaacaatgaagagcaagagctggttttacagcggcgcgaaggtaagtgggaaatcgctgattttatccgcccgaacagcggcagcctacttaagcagattgaggcaaaaaccgccgccagattaaagcaatga

SEQ ID NO: 470762 - DNA, 258 bp, Shigella flexneri
atgaaaacgattttcaccgtgggagctgttgttctggcaacctgcttgctcagtggctgcgtcaatgagcaaaaggtcaatcaactggcgagcaatgtacaaacattaaatgccaaaatcgcccggcttgagcaggatatgaaagcactacgcccacaaatctatgctgccaaatccgaagctaacagagccaatacgcgtcttgatgcacaggactattttgattgcctgcgctgcttgcgtatgtacgcagaatga

SEQ ID NO: 470763 - DNA, 2220 bp, Shigella flexneri
atgagctctatctccctgatccaaccggatcgcgacctgttctcctggccgcagtactgggccgcctgttttggaccggcaccgtttttgccgatgtctcgtgaagagatggatcaacttggctgggatagctgcgacatcattttggttactggcgacgcgtatgtcgatcacccaagcttcgggatggcgatttgcggtcgtatgctggaagcgcagggctttcgcgtcgggatcatcgcccagccggactggagcagcaaagacgactttatgcgtctgggtaaaccgaatctgttttttggtgttactgctggcaacatggattcgatgatcaaccgctataccgccgatcgccgtttacgtcatgatgatgcctacacgccagataatgtcgcgggtaagcgaccggatcgcgccacgctggtttatacccagcgttgtaaagaggcgtggaaagatgtgccggtgatcctcggcggtattgaggctagcctgcgccgtaccgcgcattatgattactggtccgataccgtgcgccgttccgttctggtagattcgaaagccgacatgctgatgtttggtaacggtgaacgtccgctggtggaagtagcgcatcgtctggcgatgggcgagccgattagtgaaatccgcgatgtgcgtaataccgcaattatcgtaaaagaggcgctgcctggctggagcggtgtggattccacccgtcttgataccccagggaaaatcgacccaatcccgcatccgtatggcgaagatttgccgtgtgcggataacaaacctgttgcgccgaaaaagcaggaagcgaaagctgtaatcgtgcagccaccgcgccagaaaccgtgggaaaaaacctacgtattgctgccttctttcgagaaagtgaagggcgataaagtgctgtacgcccatgcttcgcgcattctgcaccacgaaaccaacccaggctgcgcccgcgcattgatgcaaaaacacggtgaccgctatgtgtggatcaacccgcctgctatcccgctttctaccgaagagatggacagcgtttttgcgctgccgtacaagcgcgtgccacatccggcctatggcaatgcccgtattccggcttacgaaatgatccgtttttcggtcaacattatgcgcggctgctttggcggctgttctttctgttctattaccgagcacgaagggcgcattattcagagccgttcggaagattcgatcattaatgagatcgaagcgatccgcgacaccgttccaggttttacgggcgtgatttccgatctcggtgggccaactgccaacatgtatatgttgcgctgcaaatcgccacgcgctgaacaaacttgtcgccgtttgtcgtgcgtttatccggatatttgtccgcacatggacactaaccacgaaccgacgatcaacctctatcgccgtgcgcgtgatctgaaaggcattaaaaaaatccttatcgcctcaggcgtacgttatgacatcgccgtggaagatccgcgctatatcaaagagttggcgacccatcacgtcggcggttatctgaagattgctccggaacataccgaagaagggccgttgtcgaagatgatgaagccgggcatgggcagctatgaccgctttaaagagctgttcgatacctactcgaaacaggcaggtaaagagcagtatctgatcccgtatttcatctctgcgcaccccggtacgcgtgatgaagatatggtgaatttggcgctgtggctgaaaaagcatcgtttccgtctcgaccaggtacagaacttctacccatcgccgctggcgaactcaaccaccatgtattacaccgggaaaaaaccgctggcgaagattggttataagagcgaaggcgtcttcgtaccgaagggcgacaaacagcgtcgtttgcataaagcgttgttgcgttaccacgatccggcaaactggccgttaatccgccaggcgctggaagcgatgggcaaaaagcatctgattggcagccgtcgcgattgcttagtgcctgcgccaaccattgaagagatgcgtgaagctcgtcgccagaaccgcaatacccgtccggcgttgactaaacatacgccgatggcgactcagcgtcagacgcctgctacggcaaaaaaagcgtcgtctacgcaatctcgtccggtgaatgctggtgcgaagaaacgccctaaagcggcggttggacgttaa

SEQ ID NO: 470764 - DNA, 1413 bp, Shigella flexneri
atgtcactcagtcggcgtcagttcattcaggcatcggggattgcactttgtgcaggcgctgttcccctgaaggccagcgcagccgggcaacagcaaccgctacccgttccgccgctacttgaatctcgccgtgggcaaccgctgtttatgactgtacaacgtgcgcactggtcatttacgccagggacacgcgcgtcggtctggggaatcaatggtcgttacctggggccgactatccgcgtctggaaggacgacgatgttaagcttatttacagcaaccgcctgacagaaaatgtctcaatgacggtggccgggctacaggtaccaggcccgctgatgggcggtccggcacggatgatgtcgccaaacgctgactgggcacccgtactgcctattcgccagaacgcagctactctgtggtatcacgccaatactcccaaccgcacggctcagcaggtctataacggccttgccggaatgtggctggtggaagatgaagtcagcaagtcgctgcctatccccaaccattatggtgtggatgattttccggtcattatccaggataaacggctggataactttggtacgccagaatacaacgaaccgggaagcggcggctttgttggtgatacgctgctggttaacggtgtacaaagcccgtacgttgaagtctcgcgtggctgggtgcgcttgcgactgctgaacgcgtcgaactctcgtcgctatcaactacagatgagcgatggtcgcccgttacatgtgatttctggcgatcagggattcctgcctgctcctgtatcggtgaagcaactttcgctggcaccgggcgagcgccgcgagattctggtggatatgagcaacggcgatgaagtgtcgatcacctgtggtgaagcggcgagcattgttgatcgtattcgcggcttctttgagccatccagtattctggtttctaccttggtgctaacgctgcgcccaaccggccttctgccgctggtcacagacagtcttccgatgcgcttgctgccaactgaaatcatggctggttcgccaattcgcagtcgcgatatcagtctgggtgatgacccgggtattaatggacagctgtgggacgtcaaccgtattgatgtcaccgcgcagcaaggaacgtgggaacgctggacggtacgcgcggacgagccgcaagcgttccatattgaaggcgtaatgttccagatccgtaacgtgaatggcgcgatgccgttcccggaagacagaggctggaaagataccgtttgggttgacggacaagtggagctgcttgtttatttcggtcagccttcctgggcgcacttcccgttctacttcaacagtcagacgctggaaatggcggaccgtggctcgattgggcaactgttggtcaatccggtaccgtaa

SEQ ID NO: 470765 - DNA, 738 bp, Shigella flexneri
atgctatatatctttcgtcttattattaccgtgatttacagcatcttagtctgtgtattcggctccatttactgccttttcagcccgcgtaacccgaaacatgtggccacctttgggcatatgtttggccgtcttgcgccactgttcggcctgaaagttgagtgccgcaaacctgcagatgctgaaagctacggcaatgctatctatatcgctaaccaccagaacaactatgacatggtgacagcatcgaacattgtgcaaccgccgacggtgacggtaggtaaaaagagcttgctgtggatccccttcttcgggcagttgtactggttaaccggcaacttattgatcgacagaaacaatcgcactaaagctcacggcaccattgcggaagtcgtgaatcatttcaaaaaacgccgtatttccatctggatgttcccggaaggaacccgcagccgtggtcgcggcctgctaccgttcaagactggagcatttcacgcggcaattgcggcgggcgtcccgattattcccgtgtgcgtctctacaacttcgaataagattaatcttaatcgactgcacaacggtctggtgattgtcgaaatgctgccgccaattgacgtcagtcagtatggcaaagatcaggttcgtgagctggctgcccattgtcgttcgataatggaacaaaaaatcgccgagctcgataaagaagtcgcagaacgcgaagccgccggaaaagtttaa

SEQ ID NO: 470766 - DNA, 2259 bp, Shigella flexneri
atgagcgatatggcagagcgccttgcgctacatgaatttacggaaaacgcctacttaaactactccatgtacgtgatcatggaccgtgcgttgccgtttattggtgatggtctgaaacctgttcagcgccgcattgtgtatgcgatgtctgaactgggcctgaatgccagcgccaaatttaaaaaatcggcccgtaccgtcggtgacgtactgggtaaataccatccgcacggcgatagcgcctgttatgaagcgatggtcctgatggcgcagccgttctcttaccgttatccgctggttgatggtcaggggaactggggcgcgccggacgatccgaaatcgttcgcggcaatgcgttacaccgaatcccggttgtcgaaatattccgagctgctattgagcgagctggggcaggggacggctgactgggtgccaaacttcgacggcactttgcaggagccgaaaatgctacctgcccgtctgccaaacattttgcttaacggcaccaccggtattgccgtcggcatggcgaccgatattccaccgcataacctgcgtgaagtagctcaggcggcaatcgcattaatcgaccagccgaaaactacgctcgatcagctgctggatatcgtgcaggggccggattatccgactgaagcggaaattatcacttcgcgcgccgagattcgtaaaatctacgagaacggacgtggttcagtgcgtatgcgcgcggtgtggaagaaagaagatggcgcggtggttatcagcgcattaccgcatcaggtttcaggtgcgcgcgtactggagcaaattgctgcgcaaatgcgcaacaaaaagctgccgatggttgacgatctgcgcgatgaatctgaccacgagaacccgacccgtctggtgattgtgccgcgttccaaccgcgtggatatggatcaggtgatgaaccacctcttcgctaccaccgatctggaaaagagctatcgcattaacctcaatatgatcggtctggatggtcgtccggcggtgaaaaacctgctggaaatcctctccgaatggctggtgttccgtcgcgataccgtgcgccgccgactgaactatcgtctggagaaagtcctcaagcgcctgcatatcctggaaggtttgctggtggcgtttctcaacatcgacgaagtgattgagatcattcgtaacgaagatgaaccgaaaccggcgctgatgtcgcggtttggccttacggaaacccaggcggaagcgatcctcgaactgaaactgcgtcatcttgccaaactggaagagatgaagattcgcggtgagcagagtgagctggaaaaagagcgcgaccagttgcagggcattttggcttccgagcgtaaaatgaataacctgctgaagaaagaactgcaggcagacgcgcaagcctacggtgacgatcgtcgttcgccgttgcaggaacgcgaagaagcgaaagcgatgagcgagcacgacatgctgccgtctgaacctgtcaccattgtgctgtcgcagatgggctgggtacgcagcgctaaaggccatgatatcgacgcgccgggcctgaattataaagcgggtgatagcttcaaagcggcggtgaaaggtaagagtaaccaaccggtagtgtttgttgattccaccggtcgtagctatgccatcgacccgattacgctgccgtcggcgcgtggtcagggcgaaccactcaccggcaaattaacgttgccgcctggggcgaccgttgaccatatgctgatggaaagcgacgatcagaaactgctgatggcttccgatgcgggttacggtttcgtctgcacctttaacgatctggtagcgcgtaaccgtgcgggtaaggctttgatcaccttaccggaaaatgcccatgttatgccgccggtggtgattgaagatgcttccgatatgctgctggcaatcactcaggcaggccgtatgttgatgttcccggtaagcgatctgccgcagctgtcgaagggcaaaggcaacaagattatcaacattccatcggcagaagccgcgcgtggcgaggatggtctggcgcaactgtacgttctgccgccgcaaagcacgctgaccattcatgttgggaaacgcaaaattaaactgcgtccggaagagctacagaaagtcactggcgaacgtggacgccgcggtacgttgatgcgcggtttgcagcgtatcgatcgtgttgagatcgactctcctcgccgtgccagcagcggtgatagcgaagagtaa

SEQ ID NO: 470767 - DNA, 219 bp, Shigella flexneri
atggggaatctttaccggagtgtgagccaaatcactcgcgataagtttgagcgaacaatgtcacaggcgtattgttgttgggcttataatttctccggtaaggaataccatgtatacgcgaaatttattatccggtgcgccgtaagccgtctcggggatatccatgagcaagccgcacttatggcaggaggcgcggggcactggtggagacacagctaa

SEQ ID NO: 470768 - DNA, 483 bp, Shigella flexneri
atgacaaacctgacactggatgtaaacattatcgatttcccatcaatccctgtggcgatgttgccgcaccgctgtagccctgagttgctcaactacagtgtggcgaaatttatcatgtggcgtaaagagacggggctttctcctgttaaccaaagccagacttttggcgtcgcctgggacgcccctgccaccaccgcaccggaagcgtttcgctttgatatctgcggcagcgttagcgaaccgattcccgataatcgttatggtgtgagcaatggtgaacttaccggtggacgttatgccgtggcccgccacgttggcgagctggacgatatttcacacacgatatggggcattattcgccactggctgcctgcaagcggcgagaaaatgcgtaaagcaccgattctgtttcactacaccaatcttgccgaaggggtgacagagcagcgactggaaacggatgtttatgtgccgttggcgtga

SEQ ID NO: 470769 - DNA, 402 bp, Shigella flexneri
atgaaaaaattcgcagcagtaatcgcagtaatcgcagtaatggccctgtgcagtgcaccggtgatggcagcagagcagggcggtttttctggcccatcggtaacgcaaagtcaggccggaggatttcaggggccgaacggcagcgtaacgactgtagaaagcgcaaaatccctgcgtgacgacacctgggtaaccctgcgcggcaatatcgttgaacgcatctctgacgatctctacgtgtttaaagatgccagcggtactatcaatgttgatatcgatcacaaacgctggaacggtgtgacggtgacgccgaaagatacggttgagattcagggtgaagtcgataaagactggaattctgttgaaattgacgtcaaacagatccgcaaagtaaatccgtaa

SEQ ID NO: 470770 - DNA, 660 bp, Shigella flexneri
atgcgaattttactgatagaagatgacatgctgattggtgacggcatcaaaactggccttagtaaaatgggttttagtgtcgactggtttacacaaggtcgtcagggaaaagaggcgctttatagcgcaccttatgatgcggtgatcctggatttaaccttaccaggcatggatggtcgcgatattttgcgcgaatggcgagagaaaggtcagcgtgagccggtactgaacctgaccgcgcgtgatgcgttagcggaacgtgtagaagggctgcgtctgggagctgacgattatctgtgtaaaccttttgcgttgatagaagtcgccgccaggctggaggctctgatgcgccgaaccaacggccaggccagcaacgagctgcgccacggtaacgtcatgctcgaccccggcaaacgtatcgccacgctggctggcgaacccttaacactgaaaccaaaagaatttgccctgctggaattactgatgcgtaacgctggtcgggtactgccgcgcaaactgattgaagagaaactgtatacctgggacgaagaggtcaccagtaatgccgttgaagtgcatgtgcatcatctgcgacgcaaactcggtagtgattttattcgtaccgtgcatggtattggctacacattaggtgagaaatga

SEQ ID NO: 470771 - DNA, 1275 bp, Shigella flexneri
atgaaatttacccaacgtcttagtctgcgcgtcaggctgacgctaatctttttaattctggcctcggtgacctggctgctttccagctttgtcgcctggaaacaaacaacggataacgtcgatgaattgttcgacacccaactgatgctgtttgccaaacggttaagtacgctcgatctcaacgaaatcaacgcggcggatcgcatggcacagacgccaaataaattaaaacacggtcatgttgatgacgatgcgctgacctttgccatctttacccacgacggcagaatggtccttaatgatggcgataacggagaagatattccctatagctatcaacgggaaggttttgctgacgggcaactggtcggtgaagacgatccttggcgttttgtctggatgacctcacctgatggcaaatatcgcatcgttgttggccaggaatgggaataccgtgaagacatggcgctggcgattgttgccgggcaattgatcccgtggctggtcgcactgccgattatgttaatcatcatgatggtactactgggtcgtgaactcgcgccgctgaacaaactggcgctggcactacgtatgcgtgaccctgactcggaaaaaccactaaacgcgactggcgtacccagcgaagtgcggccactggttgagtcgctaaatcaactgttcgcccgcacacatgcgatgatggttcgagaacgacgctttacctccgatgcagctcacgaactacgtagcccgttaacagcgctgaaagtgcaaaccgaagttgcgcagctctctgacgatgatccgcaggcgcggaaaaaagcactgctccaattacattccgggatcgatcgcgctactcgtctggttgatcaactgctcacgctatcgcggctggactcactggataaccttcaggacgtcgcggagatcccgcttgaagatctcctacaatcgtcggtgatggatatttaccacacggcgcagcaggcgaaaattgacgtgcgactgacactcaatgcccacggcatcaaacgcaccggacaaccgctattgctaagtttgttggtgcgaaatttgctggataacggccccggtgtgacaccagaggcactggcgcgaattggcgaacgcttctatcgcccacccggacaaaccgctaccggcagtggacttgggctatcgattgtccagcgaatcgccaagctgcatgacatgaatgttgagtttgggaatgcggaacaaggtggatttgaggcgaaggtaagctggtaa

SEQ ID NO: 470772 - DNA, 582 bp, Shigella flexneri
atgagcaacatcctgattatcaacggcgcgaaaaaattcgcccactccaatggtcaactgaacgacaccctgaccgaagtcgcggatggcacactgcgcgacctcgggcatgatgtccgcatcgttcgcgccgacagcgactacaatgtcaaagcggaagtacaaaactttctctgggctgatgtggtgatctggcagatgccaggctggtggatgggcgcgccgtggacagtgaaaaaatatattgatgatgtattcaccgaaggtcacgggactctgtatgccagcgatggtcgtacccgcaaagatccgtcgaaaaaatacggttccggcagcctggtacagggcaaaaaatatatgctttctctaacctggaacgcaccaatggaagccttcaccgaaaaagatcagttcttccacggcgttggcgttgacggtgtgtatctgccgttccataaagcaaaccaattcctcggtatggaaccgctgccgacatttatcgctaatgacgtgataaaaatgcctgatgttccccgctatactgaagaatatcgcaagcatcttgtggaaatttttggttaa

SEQ ID NO: 470773 - DNA, 315 bp, Shigella flexneri
atgcttaccgtaatcgcagaaatccgtactcgtcctggtcaacatcaccgtcaggcggtattggatcagtttgctataatcgttccaaccgtactgaaagaagaaggttgccacggctatgcgccaatggtggattgcgctgctggcgtgagtttccagtctatggcaccggattctatcgtgatgattgagcagtgggaaagcatcgcgcaccttgaagcgcatctgcaaaccccgcacatgaaggcgtacagcgaagccgtaaaaggcgacgtgctggagatgaatatccgtattctgcagccagggatttaa

SEQ ID NO: 470774 - DNA, 1893 bp, Shigella flexneri
atgacgcaaacttataacgctgatgccattgaggtactcaccgggcttgagccggttcgccgccgtccggggatgtataccgataccactcgccctaaccatttggggcaagaagttattgataacagtgtcgatgaagcactggcgggtcacgcaaaacgcgtggatgtaatcttacatgctgaccagtcgttagaagtgattgacgatgggcgcgggatgccggtggatattcacccggaagaaggagtaccggcggttgaactgattctttgccgtctgcatgcaggcggtaaattctctaacaaaaattaccagttctctggcggcctgcatggcgtggggatttcggtagttaacgccttgtcgaagcgcgtagaagttaacgtgcgccgcgatggtcaggtttataacatcgcctttgaaaatggcgaaaaggtgcaggatttacaggttgtcggcacttgcggtaaacgcaataccggtaccagcgtgcacttctggccggatgaaaccttctttgacagcccgcgtttttctgtttcacgcctgacgcatgtgctgaaggccaaatcagtactgtgccccggcgttgagattacctttaaagatgagatcaacaacaccgaacagcgctggtgctatcaggacggtctgaatgattacctggcggaagcggtaaacggtttaccgacgctgccagaaaaaccgtttatcggtaatttcgctggcgatactgaagctgtggactgggcgctactgtggctgccggaaggcggtgaactgctgaccgaaagctacgtcaaccttatcccaacgatgcagggcggtacccatgttaatggtctgcgtcagggcctgttggacgcgatgcgtgagttctgtgaataccgcaacattctgccgcgcggcgtgaagctgtcggcggaagatatctgggatcgctgcgcctatgttctgtcggttaaaatgcaggatccgcagtttgccgggcagaccaaagagcgtctctcttcgcgtcagtgtgcggcattcgtttcgggcgtggtgaaagatgccttcatcctgtggctgaaccagaacgttcaggcggcggagttgctggcagagatggcgatttccagcgcccagcgtcgtatgcgtgcggctaaaaaagtggtgcgtaaaaagctgaccagcggcccggcgctgcctggcaaactggctgattgtaccgcgcagggccttaaccgtaccgaactgttcctcgtggaaggtgactccgcaggcggatctgccaagcaggcgcgcgatcgtgaatatcaggcgatcatgccgctgaaaggtaagatccttaacacctgggaagtttcttccgacgaagtgctggcctcgcaggaagtgcatgatatttcggtagcgatcggtatcgatcctgacagcgacgatctgagccagcttcgttatggcaaaatctgtatcctcgcggatgcggactctgatggtctgcacattgccacgctgctctgcgctttgttcgtaaaacacttccgcgcgttggtgaaacacggtcacgtttacgtcgcactgccaccgctctaccgtattgatctcgggaaagaggtttattacgcgctgacggaagaagagaaagagggcgtacttgagcaattaaaacgcaagaaaggcaagccgaacgtccagcgttttaaaggtctgggggaaatgaacccgatgcaattgcgtgaaaccacgcttgatccgaacactcgccgtctggtgcagttgactatcgatgatgaagacgatcagcgtactgacgcgatgatggatatgctgctggcgaagaaacgctcggaagatcgccgcaactggttgcaagagaaaggcgacatggcggagattgaggtttaa

SEQ ID NO: 470775 - DNA, 582 bp, Shigella flexneri
atgtctacgcttctttatttacacggtttcaacagctcgccgcgctctgcaaaagcgagcttgttaaaaaactggctggcggaacatcaccctgacgttgagatgatcattccgcagttgccgccgtatccttccgacgcggcagaactgctggaatccattgtcctggaacatggcggcgattcgctgggtattgtcggttcgtcactggggggatattacgccacctggttgtcgcaatgttttatgctgcccgcagtggtggtaaacccggcggtacgcccgtttgaattgctgacggactatctcggtcagaacgagaacccctacaccgggcagcaatatgtgctagagtcacgccatatttacgatctcaaagtcatgcagattgacccgctggaagcgccggatttgatctggctgctgcaacagacgggagatgaagtgctggattaccgccaggcggtggcgtactacgcttcctgccgccagactgtcatagaaggcggcaaccacgcattcacgggcttcgaagattatttcaacccgatcgtcgattttcttggtctgcaccatctctga

SEQ ID NO: 470776 - DNA, 828 bp, Shigella flexneri
ttggaaagcctgttaacccttcctctggctggtgaggccagaggaaggattttacaaattaccgatactcacctgtttgcacaaaagcacgaagccctgttaggggtaaacacctgggaaagctaccaggcggtgctggaggcgattcgtccacaccagcacgaattcgacctgattgtcgcgacaggtgatttagcgcaggatcaatcctctgcggcctatcagcatttcgctgaaggcatcgcaagttttcgtgcgccctgcgtctggctgccgggcaaccacgatttccagcccgcgatgtacagcgcgttacaggatgcgggtatctccccggcgaagcgggtgtttattggtgagcaatggcaaatcctgttgctggatagccaggtgtttggcgtgccgcacggtgagctgagcgagtttcagcttgagtggctggaacgtaaactggccgatgcgccagaacgccatacgttgctgctgctgcatcatcatccgctacctgcgggttgtagttggctcgatcaacacagtctgcgtaacgcgggcgaactggataccgtgctggcgaagtttccgcacgtcaaatacttgctgtgcggtcatattcatcaggagctggatctcgactggaacggtcgccgcctgctggcaacgccgtcgacctgtgtgcagtttaagccgcactgttccaactttacgctggatactatcgcgcccggctggcgtactctcgagttacatgctgatggcacgctgaccaccgaggtgcatcgcctggcggacacacgtttccaacctgataccgcttcagaaggctactga

SEQ ID NO: 470777 - DNA, 423 bp, Shigella flexneri; identical to SEQ ID NO: 459150

SEQ ID NO: 470778 - DNA, 630 bp, Shigella flexneri
atgcttaagccagacaacctgcccgttacatttggcaaaaacgatgtagaaattattgcacgagaaacactttatcgcggctttttttcattagatctttatagatttcgtcatcgtctattcaacgggcaaatgagtcatgaggtacggcgggaaatttttgagcgcggtcacgccgcagtcttgctaccctttgacccagtgcgtgatgaagttgtgctgattgagcagattcggattgccgcgtacgacaccagcgaaaccccctggctactggagatggttgccgggatgattgaagagggtgaaagtgtggaagatgttgcccgtcgcgaagcgattgaagaggcgggactgatagtcaaacggaccaaaccggtgttaagtttcctggcaagcccggggggcaccagtgagcgttcgtcaattatggtgggcgaagtggacgccacgaccgcaagcggtattcatggtctggctgatgaaaacgaagatattcgcgttcatgtggtaagccgggaacaggcataccagtgggtagaagaggggaaaatcgacaacgcagcgtcggtcatcgctttgcaatggctgcagctgcatcatcaagcgttaaaaaatgagtgggcataa

SEQ ID NO: 470779 - DNA, 1482 bp, Shigella flexneri
atgaagaaattgctccccattcttatcggcctgagcctttctgggttcagttcgttgagccaggccgagaacctgatgcaagtttatcagcaagcacgccttagtaacccggaattgcgtaagtctgccgccgatcgtgatgctgcctttgaaaaaattaatgaagcgcgcagtccattactgccacagctaggtttaggtgcagattacacctatagcaacggctaccgcgacgcgaacggcatcaactcgaacgcgaccagtgcgtccctgcagttaactcaatccatttttgatatgtcgaaatggcgtgcgttaacgctgcaggaaaaagcagcagggattcaggacgtcacatatcagaccgatcagcaaaccttgatcctcaacaccgcgaccgcttatttcaacgtgttgaatgctattgacgttctttcctatacacaggcacaaaaagaagcgatctaccgtcaattagatcaaaccacccaacgttttaacgtgggcctggtagcgatcaccgacgtgcagaacgcccgcgcgcagtacgataccgtgctggcgaacgaagtgaccgcacgtaataaccttgataacgcggtagagcagctgcgccagatcaccggtaactactatccggaactggcggcgctgaatgtcgaaaactttaaaaccgacaaaccacagccggttaacgcgctgctgaaagaagccgaaaaacgcaacctgtcgctgttacaggcacgcttgagccaggacctggagcgcgagcaaattcgccaggcgcaggatggtcacttaccgactctggatttaacggcttctaccgggatttctgacacctcttatagcggttcgaaaacccgtggtgccgctggtacccagtatgacgatagcaatatgggccagaacaaagttggcctgagcttctcgctgccgatttatcagggcggaatggttaactcgcaggtgaaacaggcacagtacaactttgttggtgccagtgagcaactggaaagcgcacatcgtagcgtcgtgcaaaccgtacgttcctccttcaacaacattaatgcttctatcagtagtattaacgcctacaaacaagccgtagtttccgcgcaaagctcattagacgcgatggaagcgggctactcggtcggtacgcgtaccattgttgatgtgttggatgcgaccaccacgctgtacaacgccaagcaagagctggcgaatgcgcgttataactacctgattaatcagctgaatattaagtcagccctgggtacgttgaacgagcaggatttgctggcactgaacaatgcgctgagcaaaccggtttccactaatccggaaaacgttgccccgcaaacgccggaacagaatgctattgctgatggttatgcgcctgatagcccggcacccgtcgttcagcaaacatccgcacgcactaccaccagtaacggtcataaccctttccgtaactga

SEQ ID NO: 470780 - DNA, 672 bp, Shigella flexneri
atgaaacggacaaaatccatacgccacgcatcgttccgcaaaaactggagcgcacgccatctgacaccagtcgctctcgcggttgccactgtttttatgctggctggctgtgaaaagagtgatgaaacagtgtctctctatcaaaatgctgacgactgttcagctgcaaacccaggcaaaagcgccgaatgtaccaccgcgtacaacaatgcgctgaaagaagccgaacgtactgcgccgaaatacgccacccgtgaagactgtgttgctgaatttggtgaaggtcagtgtcagcaagcaccagcccaggctggcatggcaccagaaaaccaggcgcaggctcagcaatccagcgggagtttctggatgccgctgatggccggttacatgatggggcgtctgatgggcggcggcgcgggatttgcacagcagccgctgttctcctcgaaaaacccggccagtccggcttacggtaaatataccgacgcgacgggtaaaaactatggcgcagcccagccaggccgcaccatgaccgtaccgaagacggcaatggcaccaaaaccggcgaccaccactaccgttacccgtggcggttttggtgaatctgttgccaaacaaagcactatgcagcgtagcgcaaccggcacctcttctcgttcaatgggtggctga

SEQ ID NO: 470781 - DNA, 1161 bp, Shigella flexneri
atggaaagagtcagtattaccgagcgcccggactggcgtgagaaagcccacgaatacggtttcaattttcacaccatgtacggcgagccgtactggtgtgaagatgcttactacaagttgaccctcgcccaggttgaaaagctggaagaagtcaccgccgaactgcaccagatgtgcctgaaagtggtggaaaaagtgatcgccagcgatgagctgatgaccaaattccgcataccaaaacacacctggagttttgtgcgtcaatcatggctgactcaccagccatcgctttattcgcgtcttgatctggcgtgggatggcactggcgaacctaaacttctggaaaataacgccgatacgccaacgtcactatacgaggcggcgttctttcagtggatctggctggaagatcagcttaacgccggtaacttgtcggagggcagcgaccagtttaacagtctgcaagaaaaactgatcgatcgcttcgttgagctgcgtgaacagtatggcttccagttgctgcatctcacctgctgtcgcgacacggtggaagatcgcggaaccattcagtatttgcaggactgcgcaaccgaagctgaaatcgccaccgagttcctctacatcgacgagataggtttaggcgaaaaaggccagttcacggatttacaggatcaggtgatttctaacctgttcaagctttatccgtgggaatttatgctgcgcgaaatgttctccaccaagctggaagatgctggcgtacgctggctggaaccggcgtggaagagcattatctccaacaaggcacttctaccgctactgtgggagatgttcccgaatcacccgaacctgctgcccgcttattttgcggaagatgatcatccgcaaatggaaaaatatgtggttaaaccgatcttctcccgtgaaggcgcaaacgtgtcgatcattgagaacggcaaaaccattgaagcagcggaaggtccgtatggcgaagaagggatgattgttcagcaattccacccgttaccgaaattcggcgacagctatatgctgattggtagctggctggtgaacgatcaacctgccggaattggcattcgtgaagaccgtgcgttgatcacccaggatatgtctcggttttatccacatatttttgttgaataa

SEQ ID NO: 470782 - DNA, 816 bp, Shigella flexneri
atgacacctttagttaaggatatcatcatgtcttcaacacgtatgccagcattgtttttaggtcacggtagtccgatgaacgtgctggaagataatttgtatacccgcagctggcagaagttggggatgacattgccacgcccgcaagcgattgtggtggtttcggctcactggtttacccgtggaacaggagtgaccgcgatggagacgccgcccacgattcatgactttggtggcttcccgcaggcgctgtacgatacgcattatcctgctccgggttcgcctgcgctggcacagcgtctggttgagctgttagcgccgatcccggtgacgctggataaagaagcctggggctttgaccacggctcgtggggcgtgctgattaagatgtatcctgacgccgatatccctatggtgcagttgagtatcgacagtagcaaacctgccgcctggcatttcgaaatggggcgcaaactcgcggcgctgcgtgatgaaggaataatgttggtcgccagcggtaacgtggtgcataacctgcgcacagtgaagtggcacggtgatagttcaccgtatccgtgggcgacgtcgtttaatgagtatgtgaaagcgaatctgacgtggcaagggccggtagagcagcatcctctggtgaattatctcgaccatgaaggtggcgcgttatcgaacccaacgccagagcactatctgccgttgttgtatgtgttaggtgtgtgggatgggcaggagccaattaccattccggtcgatggtatagaaatgggcagtttaagtatgctgtcggtgcagataggctaa

SEQ ID NO: 470783 - DNA, 774 bp, Shigella flexneri
atgtcagtacctctcattctgaccatactggcgggggcagccacgtttattggcgcgtttctcggcgttctcggacaaaaaccctcgaaccgcttactggcgttttcgctaggttttgcggcggggatcatgttgctcatctcattaatggaaatgcttcctgccgcactagcagctgaaggaatgtcgccggtgttgggttatggaatgtttatcttcggtctgcttggctactttggcctggaccgcatgttgccgcatgcgcatccgcaggatttaatgcaaaaatcggtgcagctgttgccaaaatcgatcaagcgcacagccattctgctcactctcggcatcagtctgcataacttcccggaagggattgccacctttgtcacggcgagcagcaacctggagctgggatttggcatcgcactggccgtcgcgttgcacaatatccctgaaggtctggcagtggcaggcccggtttatgcggcaacggggtctaaacgcaccgcgattctgtgggcggggatttctggactagcagaaattcttggtggtgtgctggcgtggttaatcctcggtagcatgatttccccggtggtcatggcggcaatcatggcggcggttgcaggaattatggtggcgctctcggttgatgaattaatgccgctcgccaaagagattgaccctaataataaccccagctatggcgtactatgtggaatgtcagtgatgggattcagtttagtgctgctacaaacggcgggaattggttaa

SEQ ID NO: 470784 - DNA, 171 bp, Shigella flexneri; identical to SEQ ID NO: 261292

SEQ ID NO: 470785 - DNA, 654 bp, Shigella flexneri; identical to SEQ ID NO: 459142

SEQ ID NO: 470786 - DNA, 291 bp, Shigella flexneri
atgattgacccgaaaaaaattgagcaaatcgctcgccaggttcacgaatcaatgcctaaaggaatcagggagttcggggaagatgtggagaaaaaaatccgccaaaccctacaagctcagctgacgcgcctcgaccttgtaagccgtgaagagttcgacgtccaaacgcaagtcctgttacggactcgtgagaaactggcgctgcttgaacaaagaatcagcgaactggaaaatcgcagtactgagatcaaaaagcagccagatccagagactctccccccaacgctgtaa

SEQ ID NO: 470787 - DNA, 1119 bp, Shigella flexneri
gtggtcctgtttattactgctctggtcgcctggcctttaacatattggccacataaagccttatgccagttcatcctctcatcaaaaacatcagcaggtgaagggataacgggcgcggtaacacactactatggcaagaagattggtaatctgattaccacgctgtacttcatcgccttttttgtcgtcgtgttgatatatgcagtggcaattaccaactcacttacggaacagctggcaaagcatatggttattgatcttcgcatccgtatgttggtgagtctgggtgttgtattaattctgaatctcatttttctgatgggacgtcatgccactattcgggtaatgggatttttggtattcccattgattgcctatttcttatttctttccatttaccttgtcggtagttggcaacctgatctattaacaacccaggtagagttcaatcagaatacccttcaccagatatggatatcgattcccgtgatggttttcgcctttagccatacgcccattatttctacgtttgccatagacagacgtgaaaaatatggcgaacacgctatggataaatgcaaaaaaattatgaaagtcgcttatctcatcatctgcataagtgtactgttctttgtctttagctgcctgctttctattccatcttcgtatattgaagcggctaaagaagaaggggtcaccattttatcggcgctttctatgctgccgaacgccccagcatggttgtcaatttccgggattattgtcgcagtagttgcgatgtcgaaatcattcctgggtacgtactttggcgttattgaaggtgccacagaggtcgtcaaaacaacactacagcaggttggtgtaaagaaaagtcgtgcatttaaccacgcactatcaattatgttggtatcgctgattaccttcattgtttgttgcattaacccgaacgcgatttcgatgatttacgcgatcagcggcccgctcattgccatgatacttttcatcatgcctacgctgtcaacgtatctcatcccggcgcttaaaccctggcgttccatcggaaatctgattacgctgatcgtgggtatcctgtgcgtatcggtaatgttctttagctaa

SEQ ID NO: 470788 - DNA, 1182 bp, Shigella flexneri
atgaaagacgttgtgattgtcggggcgttacggacacctatcggctgctttcgtggtgcgttagcgggtcattccgccgtggaacttggtagtctggtcgtgaaagcgttaatagaacgtaccggcgttcctgcatatgcggtggatgaagtaattcttggtcaggtgttgactgcaggggcagggcagaatccggcaaggcaatcggctattaaaggtggtcttcctaacagcgtttctgcaatcacgattaatgacgtttgcggttccggtcttaaagcactgcatctggctactcaggcgatacagtgtggcgaggctgatattgtcatcgccggtggccaggaaaacatgagccgcgcaccacatgttctgactgatagccgcaccggtgcacagcttggcaatagccagttggttgacagtctggtgcatgatgggttgtgggatgccttcaatgattatcatattggtgtcaccgccgaaaatctggctcgcgaatatggcatcagccgtcagttgcaggatgcttacgcacttagctcgcaacaaaaagcgcgagcggcgattgacgccggacgatttaaagatgagatcgtcccggtaatgatccaaagtaacggtcagacgttggttgttgataccgatgaacagccacgcactgacgccagtgcagaaggtttagcccgtttaaatccttcatttgatagtctcggttctgtgaccgcggggaatgcatcatccataaacgatggcgcagctgcggtaatgatgatgagcgaagccaaagcacgagcgttgaatttacccgtgctggcccgcatccgcgcatttgccagcgttggtgtagatccggcattgatgggaattgcgccggtgtatgcgacccgccgttgcctggagcgtgtaggctggcagttggctgatgtcgatcttatcgaggctaatgaagcgtttgctgcacaggcgctttcggttggcaagatgcttgagtgggatgagcgtcgggtcaatgtcaatggtggcgcgatcgcactcggtcacccgataggcgcttccggttgccgaatcctggtttctctggttcatgaaatggtgaaacgtaatgcccgcaaagggctggcaacgctttgtatcggcgggggccagggcgtggcattgaccattgaacgtgacgagtag

SEQ ID NO: 470789 - DNA, 837 bp, Shigella flexneri
gtggacgtaagacagagcatccacggtgcgcacgcaaaaacgctggatacccaagggctgcgcaatgaatttttggttgaaaaggtatttgtcgccgatgagtacaccatggtttacagccacattgaccgaattattgttggcggcattatgccgataactaaaacggtttccgttggcggggaagttggtaaacaactcggcgtaagctatttccttgaacgtcgcgagttaggtgttatcaatattggcggtgccggtacgattactgtcgatggtcaatgctatgaaatcggtcaccgcgacgccctgtatgttggtaaaggtgcaaaagaagttgtctttgccagtattgataccgccactccggcgaagttttattacaattgcgcacccgcgcatacgacgtatcccaccaaaaaagtcacaccggacgaagtatctccagtcacgttaggcgataacctcaccagtaaccgtcgcacgattaacaaatattttgtcccggatgtactggaaacctgtcaattgagtatggggctgacggagctggctccaggtaacttgtggaacaccatgccgtgtcacacccacgagcgccggatggaagtttatttctatttcaatatggatgatgacgcctgcgttttccacatgatggggcagccgcaagaaacgcgtcacattgtgatgcataacgagcaggcggtgatctccccgagctggtcgatccattccggcgtcggaaccaaagcttatacctttatctggggcatggtcggtgaaaaccaggtctttaatgatatggaccatgtgggcgttaaagatttgcgctag

SEQ ID NO: 470790 - DNA, 762 bp, Shigella flexneri
atgattttaagtgcattttctctccaaggtaaagttgcggtcgtcactggttgtgatactgggctgggccaggggatggcgttggggctggcgcaagcgggctgtgacattgttggcattaacatcgttgaaccgactgaaaccatcgagcaggtcacggcgctggggcgtcgttttttaagcctgaccgccgatctgcgaaagattgatggcattcctggactgctggatcgcgcggtagctgaatttggtcatattgatatcctggtgaataacgccggattgattcgccgcgaagacgctctcgagttcagcgaaaaagactgggacgatgtcatgaacctgaatatcaagagcgtattcttcatgtctcaggcagcggcgaaacactttatcgcgcaaggcaatggcggcaagattatcaatatcgcgtcaatgctctccttccagggcgggatccgtgtgccttcttataccgcatcaaaaagcggcgtgatgggtgtgacgcgattgatggcaaacgaatgggctaaacacaacattaatgttaatgcgatagctccgggttacatggcgaccaacaatacccaacaactgcgggcagatgaacaacgtagcgcggaaattctcgatcgcattccagctggccgttggggactgccgagtgacctgatggggccggtagtgtttcttgcctccagcgcttcagattatgtaaatggttatgccattgctgtggatggcggttggctggcgcgttaa

SEQ ID NO: 470791 - DNA, 1419 bp, Shigella flexneri
atggttactatcaatacggaatctgctttaacgccacgttctttgcgtgatacgcggcgtatgaatatgtttgtttcggtagctgctgcggtcgcaggattgttatttggtcttgatatcggcgtaatcgccggagcgttgccgttcattaccgatcactttgtgctgaccagtcgtttgcaggaatgggtggttagtagcatgatgctcggcgcagcaattggtgcgctgtttaatggttggctgtcgttccgcctggggcgtaaatacagcctgatggcgggggccatcctgtttgtactcggttctatagggtccgcttttgcgaccagcgtagagatgttaatcgccgctcgtgtggtgctgggcattgctgtcgggatcgcgtcttacaccgctcctctgtatctttctgaaatggcaagtgaaaacgttcgcggtaagatgatcagtatgtaccagttgatggtcacactcggcatcgtgctggcgtttttatccgatacagcgttcagttatagcggtaactggcgcgcaatgttgggggttcttgctttaccagcagttctgctgattattctggtggtcttcctgccaaatagcccgcgctggctggcggaaaaggggcgtcatattgaggcggaagaagtgttgcgtatgctgcgcgatacgtcggaaaaagcgcgagaagaactcaacgaaattcgtgaaagcctgaagttaaaacagggcggttgggcactgtttaagatcaaccgtaacgtccgtcgtgctgtgtttctcggtatgttgttgcaggcgatgcagcagtttaccggtatgaacatcatcatgtactacgcgccgcgtatcttcaaaatggcgggctttacgaccacagaacaacagatgattgcgactctggtcgtgggactgacctttatgttcgcgaccttcattgcggtctttacggtagataaagcaggtcgtaaaccggctctgaaaattggtttcagcgtgatggcgttaggcactctggtgctgggctattgcctgatgcagtttgataacggtacggcttccagtggcttgtcctggctctctgttggcatgacgatgatgtgtattgccggttatgcgatgagcgccgcgccagtggtgtggatcctgtgctctgaaattcagccgctgaaatgccgcgatttcggtattacctgttcgacgacgacaaactgggtgtcgaatatgattatcggcgcggccttcctgacactgcttgatagcattggcgctgccggtacgttctggctctacactgcgctgaacattgcgtttgtgggtattactttctggctcattccggaaaccaaaaatgtcacgctggaacatatcgaacgcaaactgatggcaggcgagaagttgagaaatatcggcgtctga

SEQ ID NO: 470792 - DNA, 693 bp, Shigella flexneri
atgaaaacaattggtttgctgggaggaatgagctgggaatccaccattccttactatcgtctgataaatgaaggcattaaacagcggcttggtgggcttcactctgcgcaaatgctgctacatagcgtcgattttcatgaaatagaagagtgccagcgtcgcggggaatgggataaaaccggggacattctggctgaggcggcgcttggcttacagcgggcgggcgcagaaggtattgtgttatgtaccaatacgatgcataaagtggcggatgccattgagtcacgttgcactctgcctttcttacacattgcggatgccaccggacgtgcaattaccggggccggaatgactcgtgtggcgctgctgggtacgcgttacaccatggaacaggatttttatcgcgggcggctgacggaacaattttccatcaattgtcttattcctgaagcggatgaacgggcgaaaattaatcagattatttttgaagaactgtgtctggggcaatttaccgaagcgtcacgcgcttattatgcgcaagtgattgctcgccttgcagaacagggcgcacagggcgtcatttttggctgcacagaaattggtttactggtgccagaagagcgcagtgttttgcctgtgtttgataccgcggcgatccatgccgaggatgctgtcgcttttatgctgtcgtag

SEQ ID NO: 470793 - DNA, 936 bp, Shigella flexneri
atggccgccgttaacttacgtcatattgaaatttttcatgcggtaatgaccgccggaagcctgactgaggcagcacacctgctacacacctcacagccaaccgtcagccgcgaactggcgcgctttgagaaggtgatcgggctgaaattgtttgagcgcgtacgtggacgattacatcctaccgtgcaaggactgcgtctgtttgaagaagtgcaacgatcctggtacggactggatcgcattgtcagcgccgcagaaagtctgcgcgagtttcgccagggagaactgtctattgcctgcctgccggtcttttcgcaatcttttttaccgcagctcctgcaaccctttctggcacgttatcccgatgtcagcttaaatatcgtgccccaggaatcaccgctacttgaagagtggctctcggcccagcgtcatgatttaggactcactgagacactccatacgcctacgggaacagaacgtaccgaattactctctttagatgaagtgtgtgtgttacctccgggtcatccgctggcggtaaaaaaggtattaacgccggatgattttcagggtgagaattacatcagcctttcccgtactgacagctatcgccagttgctggatcagctatttactgaacatcaggttaaacgacgcatgatcgtagaaacccacagcgccgcgtcagtctgcgcaatggtacgggcgggggtaggtatttcggtggttaacccgctcaccgcactagattatgcggcaagcggtttagtggtgcggcggttcagtattgcggttccgttcaccgtcagcctgatccgccccctgcaccgcccgtcatcagcgctggttcaggcgtttagtgggcatttacaagcggggttaccgaaactggtcacttctcttgacgctattttgtcgtcagctacgacagcataa

SEQ ID NO: 470794 - DNA, 1263 bp, Shigella flexneri
atgccacattcactgttcagcaccgataccgatctcaccgccgaaaatctgctgcgtttgcccgctgaatttggctgcccggtgtgggtctacgatgcgcaaattattcgtcggcagattgcagcgctgaaacagtttgaagtggtgcgctttgcacagaaagcctgttccaatattcatattttgcgcttaatgcgtgagcagggcgtgaaagtggattccgtctcgttaggcgaaatagagcgtgcgttggcggcgggttacaatccgcaaacgcaccccgatgatattgtttttacggcagatgttatcgatcaggcgacgcttgaacgcgtcagtgaattgcaaattccggtgaatgcgggttctgttgatacgctcgaccaactgggccaggtttcgccagggcatcgggtatggctgcgcgttaatccggggtttggtcacggacatagccaaaaaaccaataccggtggcgaaaacagcaagcacggtatctggtacaccgatctgcccgccgcactggacgtgatacaacgtcatcatctgcagctagtcggcattcacatgcacattggttctggcgttgattatgcccatctggagcaggtgtgtggtgctatggtgcgtcaggttatcgaattcggtcaggatttacaggctatttctgcgggcggtgggctttctattccttatcaacagggtgaagaggcggttgataccgaacattattatggtctgtggaatgccgcgcgtgagcaaatcgctcgccatttgggccaccctgtgaaactggaaattgaaccgggtcgcttcctggtagcgcagtctggcgtattaattactcaggtgcggagcgtcaaacaaatgggtagccgccactttgtgctggttgatgccgggttcaacgatctgatgcgcccggcaatgtacggtagttaccaccatatcagtgccctggcagctgatggtcgttctctggaacacgcgccaacggtggaaaccgtcgtcgccgggccgttatgtgaatcgggcgatgtctttacccagcaggaagggggaaatgttgaaacccgcgccttgccggaagtgaaggcaggtgattatctggtactgcatgatacaggggcatatggcgcatcaatgtcatccaactacaatagccgtccgctgttaccagaagttctgtttgataatggtcaggcgcggttgattcgccgtcgccagaccatcgaagaattactggcgctggaattgctttaa

SEQ ID NO: 470795 - DNA, 1032 bp, Shigella flexneri
atggcgaccataaaggatgtagcccgactggcaggcgtttcagtcgccaccgtttcccgcgtcattaataattcacccaaagccagcgaagcttcccggctggctgtgcatagtgcaatggagtctcttagctatcacccgaacgccaacgcccgtgcgctggcgcagcagaccactgaaacggtcggtctgatcgttggtgatgtttccgatccgtttttcggtgcaatggtgaaagcggtcgaacaggtggcttatcacaccggtaatttcttattgattggcaacggttaccacaacgaacaaaaagagcgtcaggctattgagcaactgatccgccatcgctgtgctgcgttggtcgtccatgccaaaatgatcccggatgccgatttagcctcattaatgaaacaaatgcccggtatggtgctgatcaaccgtatcctgcctggctttgaaaaccgttgtattgctcttgacgatcgttacggtgcctggctggcaacgcgtcatttaattcagcaaggtcatacccgcattggttatctgtgctctaaccactctatttctgacgccgaagatcgtctgcaagggtattacgatgcccttgctgaaagtggtattccggccaatgatcggctggtgacatttggcgaaccagacgaaagcggcggcgaacaggcaatgaccgagcttttgggacgaggaagaaatttcactgcggtagcctgttataacgattcaatggcggcgggcgcgatgggcgttctcaatgataatggtattgatgtaccaggtgagatttcgttaattggctttgatgatgtgctggtgtcacgctatgtgcgtccgcgcctgaccaccgtgcgttacccaatcgtaacgatggcgacccaggctgccgaactggctttggcactggcggataatcgccctctcccggaaattactaatgtatttagtccgacgctggtacgtcgtcattcagtgtcaactccgtcgctggaggcaagtcatcatgcaaccagcgactaa

SEQ ID NO: 470796 - DNA, 2160 bp, Shigella flexneri
atgctttttagcttttttcgaaatttgtgccgtgttttgtatcgcgttcgcgttacgggtgacacccaggcactgaagggcgagcgcgtactaattacgcctaatcacgtctcttttattgatggcattttgcttggactgtttttacctgtgcgtccagtgtttgccgtttacacctcaataagccaacagtggtatatgcgttggctgaaatcatttatcgactttgttcctctcgacccgacgcaacctatggctattaaacatctggtacgtctggtggaacagggccgaccagtggtgattttccctgaaggacgcatcaccactacaggctcgctgatgaaaatctacgatggcgcgggttttgtcgcggcgaagtctggtgcaacggttattcctgtgcgtattgaaggggcggaacttacgcacttcagccgcctgaaaggtctggttaaacgtcgcttgttcccgcaaattactctgcatattttgcctccaacgcaggtggcgatgccggatgcgccgcgtgcccgtgaccgtcgcaaaatcgctggcgaaatgctgcatcaaataatgatggaagcgcgtatggcggtgcgcccgcgtgaaactctgtacgaatctttactgagtgcaatgtaccgcttcggagccgggaagaaatgtgtcgaagacgtcaactttaccccagactcctatcgcaaattgcttacgaaaacgctgtttgttggacgcatccttgaaaaatacagtgttgaaggcgaacgcatcggcttaatgctgcccaatgcaggcatcagtgcggcagtgatttttggggccatcgcgcgtcgccgcattcccgcaatgatgaactacactgccggggtaaaagggctgaccagtgctattacggcggctgaaatcaaaaccatcttcacttcccgccagtttctcgataaaggcaaactctggcatctgccggagcaacttactcaggtgcgctgggtctatctggaagatttaaaagcagatgtcaccactgccgacaaagtatggatcttcgctcatttgctgatgccgcgcctggcgcaggtaaaacagcagccggaagaagaggcgctgatcctctttacctccggttctgaaggccatccaaaaggcgtcgtccatagccataaaagcattctggcgaacgtcgagcagattaaaacgattgccgacttcaccaccaacgatcgctttatgtcggcattaccgctgtttcactcctttgggctgacggtaggcctgtttacgccactgcttacaggtgcagaagtgttcctttatccaagcccgctgcattaccgcattgtgccggacttggtgtatgaccgcagttgcaccgtgttgttcggtacctcgactttcctcggtcactacgcgcgtttcgccaacccgtatgacttctatcgtctacgctatgtggtggcaggcgcagaaaaactacaagaaagtaccaaacagctttggcaggataaatttggcctgcgcatccttgaaggctacggtgtgaccgaatgcgcgcctgtcgtttctatcaacgtaccgatggcggcgaaacccggtacggtagggcgtattctaccaggaatggatgcacgcctgttgtcggtccctggtatcgaagagggcggacgcctgcaactgaaagggccgaacataatgaacggctatctgcgggtggagaagccaggtgtactggaagtgcccaccgccgagaatgttcgcggcgaaatggagcgcggctggtatgacactggcgatattgtgcgttttgacgagcagggctttgtgcagattcagggccgcgcaaaacgctttgccaaaattgcaggcgaaatggtgtcgctggaaatggtggaacaactggcacttggtgtttcgccagataaagtccatgccactgcgattaagagcgatgccagcaaaggcgaggcactggtgcttttcaccacagataacgaactgacgcgcgataagttgcaacagtatgcccgcgagcacggcgtgccggagcttgctgtaccgcgcgatattcgctatctgaaacagatgccattacttggcagcggcaaacctgactttgtcacgttgaaaagctgggtagacgaagcggaacaacacgatgagtga

SEQ ID NO: 470797 - DNA, 1191 bp, Shigella flexneri
atgagtgagtcagtgcacactaacacttcgttgtggtcgaaggggatgaaagcggttatcgtggcgcagtttctctctgcgtttggcgataacgcgctactgtttgccactctggcgttactgaaagcgcagttctatccggagtggagccagcccatcctgcaaatggtgtttgtaggtgcttacattcttttggcgccgtttgtcgggcaggtggcggatagcttcgccaaaggccgggtgatgatgtttgccaacggcctgaagctgctgggcgcagccagtatctgctttggtatcaatccgtttctcggctatacgctggtgggtgttggtgctgcagcctattcaccggcgaaatacggtattctcggcgaattaaccacgggtagtaagttagtaaaagctaacggtttaatggaagcttctgccatagcggcgattttactcggttccgtagccggtggtgtgctggctgactggcatgtcctggtcgctctggccgcatgcgcactggcctacggtggtgcggtcgttgccaatatctacattcccaaactggcggcgcgtccggggcagtcctggaatctcatcaacatgacccgcagtttcctgaatgcctgcacctcgctatggtgcaatggtgaaacgcgtttttcgctggtgggcaccagtttattctggggagcgggtgtcacgctgcgtttcctgttggtgctgtgggtaccggtggcgctgggcattaccgataacgctacgccgacctatctcaacgcgatggtagcgattggtatcgtggttggcgcaggtgcggcagcgaagctggttacgctggaaaccgtgtcacgctgtatgccagccgggattttgattggcgtggtggtaccgattttctccctgcaacacgagctgctgccagcctatgccttgttgatgctgattggcgtgctggggggcttttttgtcgttccgctcaatgcgttgctacaggagcggggtaaaaaaagcgtcggggcggggaatgcgattgcagtacaaaaccttggcgaaaacagcgccatgttgttgatgctgggcatttactcgctggcggtaatggtaggcatcccggtcgtgcccattggcattggcttcggtgcgctatttgcgctggcaataacggcgctgtggatctggcagcgccgtcattaa

SEQ ID NO: 470798 - DNA, 1041 bp, Shigella flexneri
atgcaatatcaccgtataccccacagttcgctggaagtcagcacgctggggcttggcacgatgacgtttggtgaacagaacagcgaagccgacgcccacgcacaactcgactatgccgtcgctcagggcattaaccttatcgacgttgccgaaatgtacccagtacctccgcgccccgaaacgcaagggttaaccgaaacctacgtcggcaactggctggcgaaacatggcagccgcgaaaagttaattatcgcctccaaagtgagcggaccgtcgcgcaataatgacaagggcatccgcccggatcaggcgctggatcggaagaatatccgcgaagcgctgcatgacagcctcaagcgcctacagactgattacctcgatctttatcaggtgcactggccgcagcgcccgaccaactgcttcggcaaactcggttatagctggacggattctgcgcctgcggtttcgctgctggatacgctggacgcactggcagagtaccaacgcgcgggaaaaattcgttatatcggcgtgtcgaacgaaactgcatttggcgtaatgcgctacctgcatctggcggacaaacacgatctgccgcgtattgtcaccattcagaacccttacagtctgttaaaccgcagttttgaagtaggtctggcagaagtcagccagtatgaaggggtcgaactgctggcctattcgtgcctgggtttcggcacgctgaccgggaaatatctcaatggtgcaaaacccgctggcgcacgtaatacgctctttagtcggttcacccgctatagcggtgagcaaacgcaaaaagccgtcgcggcgtatgttgatatcgccagacgtcatggccttgatcctgctcagatggcgctcgcgtttgtacgccgtcaaccgtttgttgccagcactctgctgggcgcaaccacgatggatcagctgaaaactaacatcgaaagtttgcatctggagttaagcgaagacgtattagctgaaattgaagcggtacatcaggtttatacttatcctgcaccataa

SEQ ID NO: 470799 - DNA, 219 bp, Shigella flexneri; identical to SEQ ID NO: 2259

SEQ ID NO: 470800 - DNA, 714 bp, Shigella flexneri
atgttatttgcatggataaccgatcctaacgcttggcttgcgctcggtacgctgacgctgctggagatcgttcttgggatcgacaatattattttcctttctctggtggtggcaaagcttcccacagcacaacgtgctcatgcgcgccgtctggggttggcgggagccatggttatgcgtctggcgctgctggcatcaatctcttgggttacgcgcctgacaaatccgctttttacaatattcagtcaggaaatttctgcccgtgatttgattctgcttctgggtggcttgttccttatctggaaagccagcaaggaaatccacgaatccattgaaggtgaagaagaagggctgaaaacacgcgtttcatcattcctcggcgctatcgtgcagattatgctgctggatattatcttcagcctcgactcggtgattaccgctgtgggtctgtcagatcacctgtttattatgatggcagccgtggtgattgccgtaggcgtgatgatgttcgccgcgcgctcgattggtgattttgtcgaacgccatccttcggtaaaaatgctggcgctctctttcctgattctggtgggctttaccctgattctggaaagtttcgacatccacgtaccgaaaggttacatctacttcgcgatgttcttctctattgcggttgaaagcctcaacttgattcgcaacaaaaagaatccgctctga

SEQ ID NO: 470801 - DNA, 690 bp, Shigella flexneri
atgtcccaacctcgcccactgctctctcctcccgaaactgaagaacagttgttagcgcaagcacagcaactttctggttatacattgggagaactggcggcacttgccgggctggttacgccagagaatttaaaacgcgataagggctggattggcgtgttactggagatctggctaggtgccagcgcagggagtaaacctgagcaagattttgctgctctgggcgtggaacttaaaactatccctgtggatagtcttggtcgtccgctggaaacaacattcgtttgtgttgccccgttaacgggtaatagcggggtgacctgggaaaccagccatgtgcgccacaagctcaaacgcgtactgtggataccggttgaaggcgagcgcagcatcccgctggcgcagcgtcgcgtaggatcaccgttgctgtggagcccgaatgaagaggaagaccgacagctacgcgaagactgggaagaattaatggatatgattgttctcggtcaggttgagcggatcaccgctcgtcacggggaatatttacagataagaccgaaagcagcgaatgcgaaagcgcttaccgaagccattggtgcccggggcgaacggattctgacgctgccacgcggcttttatttgaagaagaatttcaccagtgcactactggcccgtcattttctgatccagtag

SEQ ID NO: 470802 - DNA, 147 bp, Shigella flexneri
atgttatccacagaaagctgggataactgtgaaaaacctccactactgttttcatttacagccttgacgtgcgacgaaactccagtttttagtggttcagtgcttaacttagtggcacattctgtggataaatacggaattggttga

SEQ ID NO: 470803 - DNA, 531 bp, Shigella flexneri
gtgattgatgacgatggctaccgcccaaacgtaggtatcgtgatttgtaatcgccaggggcaggtaatgtgggcccggcgatttggtcagcactcctggcaatttccgcaaggcggaatcaaccccggagaatccgcagagcaggcgatgtaccgtgaattgtttgaagaagtaggattaagccgcaaagacgttcgaatccttgcttcaacgcgtaactggttgcgctacaaattaccgaaacgtttggtgcgttgggacacgaagccggtttgtatcggccaaaaacaaaaatggtttctcttgcagctggtaagcggcgatgcagaaatcaatatgcaaaccagcagtacaccagagtttgacggctggcgatgggtaagttactggtatccggtcagacaggtggtgtcatttaaacgtgatgtctaccgtagggtaatgaaagagttcgcgagtgtggtgatgtcactgcaggaaaatacgccaaaaccacaaaacgcatctgcttatcgacgtaaaagaggttaa

SEQ ID NO: 470804 - DNA, 2247 bp, Shigella flexneri
atgctcactcgcctgcgcgaaatagtcgaaaaggtagccagcgcaccacgcctgaatgaggcgttaaatattctggttaccgacatctgtcttgcgatggataccgaggtctgttcggtctacctggccgatcatgatcgacgttgttactacctgatggcgacccgggggctgaaaaaaacacgcggtcgcactgtaacgctcgcgtttgatgaagggatcgtcggcctggttggcaggctggcggaaccgataaaccttgcagatgcgcaaaagcaccccagcttcaaatacatcccctccgtaaaagaagaacgtttccgcgcgtttttaggcgtaccaattattcaacgtcgccagttgcttggtgtactggtggtacagcaacgagagttgcgccagtatgacgaaagtgaagaatccttcctggtgacgcttgccacccagatggcagctattctttctcagtcgcagttgactgccctgtttgggcaatatcgccagacgcgaatccgcgcattaccggcagcacctggtgtggcgattgccgaaggctggcaggatgccacgttacctttaatggaacaggtgtatcaggcatcaacgctggatccggctctggaacgcgaacgactgaccggggcgctggaagaagcggcaaacgagtttcgccgctacagcaaacgctttgccgccggagcacaaaaagaaacggcggctattttcgatctttactcgcacctgctttcggacacccggctgcgtcgcgaattgtttgccgaggttgataaaggctcggtggcagagtgggcggtaaaaacggtcattgaaaaatttgccgaacagtttgccgcgctaagcgataactatctcaaagagcgggctggcgatttacgtgcgctgggtcagcgattgctgtttcatcttgatgacgctaatcaagggccgaacgcctggccggaacgtttcattctggtggcagatgaactgtcagcgacaactcttgctgagctgccccaggatcgcttagtcggtgttgtcgtgcgagatggcgcagccaactcccatgctgcgatcatggtacgtgcgctggggatccctaccgtgatgggcgcggatattcagccttcggtgctgcatcgtaggacgctgatcgttgatggctatcgcggtgaattgctggtcgatccggagccggtactgctgcaagaatatcagcggctaattagtgaagagattgagcttagccgtctggcggaagatgacgtcaatttacccgcgcagttaaaaagcggtgagcgtataaaagtcatgctcaatgctggtttaagcccggaacatgaagaaaaactgggcagctgtattgatggcatcggtctttatcgcactgaaatcccattcatgctgcaaagtggtttcccgtcggaagaagaacaggtggcgcagtatcaggggatgctgcaaatgttcaatgataaacccgtcaccttgcgtacgctggatgtcggagcagataagcagctgccttacatgccgatcagcgaagagaatccatgcctgggttggcgtgggattcgcattacgctcgatcagccggagatcttcttgatccaggtgcgggcgatgctgcgtgctaatgccgctacgggcaacctgaatattctgttgccgatggtcaccagcctcgatgaagttgacgaagcacgccgcctgattgaacgtgccggacgtgaagtcgaggagatgatcggttacgaaattcccaaaccacgtatcggcatcatgctggaagtgccgtcaatggtatttatgctgccgcatctggcaaagcgggtcgatttcatctctgttggcaccaacgatctgactcaatacattctggccgttgatcgcaacaatacccgggtggcgaacatttacgacagtcttcatcctgcaatgttacgagctctggcgatgatcgcccgggaagcggaaatacatggtatcgatcttcgtttgtgcggtgaaatggcgggcgatcccatgtgcgtggcaatcctcattgggcttgggtatcgccatctgtctatgaacggacgttctgtagcgcgggtaaaatacctgctgcggcgcattgattttgccgaagcagaaaatcttgcgcagcgtagtctggaagcgcaactggcgaccgaagttcgtcatcaggttgcagcctttatggagcgtcgcggcatgggcgggctgattcgcggagggttatag

SEQ ID NO: 470805 - DNA, 876 bp, Shigella flexneri
atgaccagtagctatctgcattttccggagtttgatccggtcattttctcaataggacccgtggcgcttcactggtacggcctgatgtatctggtgggtttcatttttgcaatgtggctggcaacacgtcgggcgaatcgtccgggcagtggctggaccaaaaatgaagttgaaaacttactctatgcgggcttcctcggcgtcttcctcgggggacgtattggttatgttctgttctacaatttcccgcagtttatggccgatccgctgtatctgttccgtgtctgggacggcggcatgtctttccacggcggcctgattggcgttatcgtggtgatgattatcttcgcccgccgtactaaacgttccttcttccaggtctctgattttatcgcaccactcattccgtttggtcttggtgccgggcgtctgggcaactttattaacggtgaattgtggggccgcgttgacccgaacttcccgtttgccatgctgttcccaggctcccgtacagaagatattttgctgctgcaaaccaacccgcagtggcaatccattttcgacacttacggtgtgctgccgcgccacccatcacagctttacgaactgctgctggaaggtgtggtgctgtttattatcctcaacctgtatattcgtaaaccgcgcccaatgggagctgtctcaggcttgttcctgattggctacggcgcgtttcgcatcattgttgagtttttccgccagcccgacgcgcagtttaccggtgcctgggtgcagtacatcagcatggggcaaattctttccatcccgatgattgtcgcgggtgtgatcatgatggtctgggcatatcgtcgcagcccacagcaacacgtttcctga

SEQ ID NO: 470806 - DNA, 795 bp, Shigella flexneri
atgaaacagtatttagaactgatgcaaaaagtgctcgacgaaggcacacagaaaaacgaccgtaccggaaccggaacgctttccatttttggtcatcagatgcgttttaacctgcaggatggattcccgctggtgacaaccaaacgttgccacctgcgttccatcatccacgaactgctgtggttcctgcagggcgatactaacattgcttatctacacgaaaacaatgtcaccatctgggacgaatgggccgatgaaaatggcgacctcgggccagtgtatggtaaacagtggcgcgcctggccaacgccagatggtcgtcatattgaccagattactacggtactgaaccagctgaaaaacgacccggattcgcgccgcattattgtttcagcgtggaacgtaggcgaactggataaaatggcgctggcaccgtgccatgcattcttccagttctatgtggcagacggcaaactctcttgccagctttatcagcgctcctgtgacgtcttcctcggcctgccgttcaacattgccagctacgcgttactggtgcatatgatggcgcagcagtgcgatctggaagtgggtgattttgtctggaccggtggcgatacgcacctgtacagcaaccatatggatcaaactcatctgcaattaagccgcgaaccgcgtccgctgccgaagttgattatcaaacgtaaacccgaatccatcttcgactaccgtttcgaagactttgagattgaaggctacgatccacatccgggcgttaaagcgccggtggctatctaa

SEQ ID NO: 470807 - DNA, 564 bp, Shigella flexneri
atgcctgtaaaagagcaaggtttttctctgctggaagtgttgattgctatggcgatcagtagcgtattgttgctgggggctgcacgctttctgcctgcgttacagcgtgaaagtttaacgagcactcgtaagctggcactggaagatgaaatctggctgcgggtatttaccgtcgcgaagcatctccagagggcgggttattgtcatggcagctgtaccggcgaagggctggaaattgtcggacagggtgactgtatcattgtgcagtgggatgcgaacagtaacggtatctgggatcgcgaaccggtaaaagagtccgaccagattggatttcgtctgaaggagcatgtgctggaaacgctacgcggtgcgacatcctgtgaaggtaagggctgggataaagtcactaatccggatgccatcattatcgacacttttcaggtcgtacgtcaggatgtcagcggcttctcgccggtgttgacggttaatatgcgtgctgccagtaagtctgaaccgcaaaccgtggtggatgccagctatagcgtgacaggattcaacctgtga

SEQ ID NO: 470808 - DNA, 408 bp, Shigella flexneri
gtgaaccgcgaaaaaggtgtttcgtcactggctctggtcctgatgctgctggttttgggtagcttgctattgcaaggaatgagtcagcaggatcgcagttttgcctctcgcgtgagcatggaaagtcagtcattgcgccgccaggccatcgttcagtcggcgctggcgtggggaaaaatgcactcctggcagacgcagccagcagttcagtgctcgcagtacgctggaaccgatgcccaggtttgtttgcgtttactggcagataatgaagccttattgattgccggttatgaaggcgtttcgttgtggcgaacaggcgaagtcattgatggaaaaattgttttttcgccacgcggctggagcgatttttgtccgctgaaagagggggcattatgtcagcttccctga

SEQ ID NO: 470809 - DNA, 333 bp, Shigella flexneri
atgtcagcttccctgaagaatcaacaaggctttagcctgccggaggtaatggttgcgatggtgctgatggtgctgatggtgatgattgtcactgcgttatcgggtatccagcgaacatcaatgaacagtctcgccagcagaaaccagtaccaacagctctggcggcatggttggcagcaaacgcaactgcgcgcgatttcgccacctgccaactggcaggtcaaccgaatgcagacatcgcaggcgggatgtgtcagcatcagcgttacgctagtttcacccgggggcagagaaggcgagatgacccgcctgcattgcccgaatcgtcagtag

SEQ ID NO: 470810 - DNA, 3369 bp, Shigella flexneri
atgttaagggtctaccattccaatcgtctggacgtgctggaagcgttgatggagtttattgtcgaacgcgaacggctggacgatcctttcgaaccagagatgattctggtgcaaagtaccggtatggcgcagtggctgcaaatgaccctgtcgcaaaagtttggtattgcggcaaacattgattttccgctgccagcgagctttatctgggatatgttcgtccgggtgttaccggaaatccccaaagagagcgcctttaacaaacagagcatgagctggaaactgatgactctgctgccgcaattgctggagcgcgaagactttaccctgttgcggcattatctgactgacgatagcgacaagcgaaaactgttccagctttcctcaaaagcggcggacctgtttgaccagtatctggtctatcgtccggactggctggcacagtgggaaacaggacatttggttgaagggctgggagaagcacaggcctggcaagccccgttgtggaaggcgctggtggaatatacccatgaactcggacaaccgcgctggcaccgcgcgaatctctatcagcgctttatcgaaacgctggagtccgcgacgacctgcccgccggggttaccttcgcgcgtctttatatgcggtatttccgcgttaccgcctgtttatctccaggcgctccaggcgctgggtaaacatattgaaatccatctcctgtttaccaacccctgccgttattactggggcgatattaaagatcctgcttatctggcgaaactgctgactcgtcagcgtcgacacagttttgaagatcgcgaattgccgctatttcgcgatagcgaaaatgccggacagctctttaacagcgatggtgaacaggatgtcggcaactcgctgctggcctcatgggggaagcttgggcgcgactacatttatctcctttctgacctggagagcagccaggagctggacgcttttgtcgatgtgacgccagataacctgctgcataacattcagtctgacattctggaactggaaaaccgcgccgttgcgggtgtgaacatcgaagagttttcccgtagcgataacaaacgcccgcttgatccactggatagcagtatcacattccacgtttgccatagcccgcagcgtgaagttgaagttttacacgatcgcttgctggcgatgctggaggaagccccgacacttactccgcgcgacatcatcgtgatggtggctgatatcgacagctacagtccgtttattcaggcagtgtttggtagcgcacctgcggatcgttacctgccttacgccatttccgaccgtcgtgcgcggcagtcacatccggtactggaagcgtttatcagcctgttatcactgcctgacagtcgctttgtgtcagaggatgtgctggcgctgctggatgtgccggtgctggcggcgcggtttgacatcaccgaagaagggctgcgttatttacgccagtgggtcaacgaatccggcattcgttgggggatagatgacgacaacgttcgcgagctggaactccccgccaccggacaacacacctggcgatttggcctgacgcgtatgttgctgggctacgcgatggagagcgcgcagggcgagtggcaatcggttctaccttatgatgaatcgagcggcttaattgcagaactggtggggcatctggcttcactgctaatgcagctaaacatctggcgtcgcgggctggcacaggagcgtccgctagaagagtggttgccggtttgtcgcgatatgctcaacgccttcttcctgccggatgcggaaaccgaagcggcgatgacgctgatcgaacaacaatggcaggcgattatcgccgaaggtttaggtgcgcagtatggcgacgcggtgccgctgtcactattgcgtgatgaactggcacagcgtctggatcaagaacgtatcagccagcgttttctcgccggaccggttaacatttgtactctgatgccaatgcgttcaattccgttcaaagtggtttgcctgctgggaatgaacgacggcgtttatccacgtcagcttgcgccattgggctttgacctgatgagccagaaaccgaagcgtggcgaccgtagccgtcgcgatgacgaccgctacctgttcctggaagcgttaatttccgcgcagcaaaaactctatatcagctatatcgggcgttccattcaggataacagtgaacgtttcccgtcggtactggtgcaggaactgatcgactacatcgggcaaagtcattatctaccgggcgatgaagcgctcaactgtgatgaaagcgaggcaagggtaaaagcgcatcttacttgcctccatacccggatgccgtttgatccgcaaaactaccagccaggcgaacgacaaagctatgctcgtgaatggctacctgcggccagccaggctggtaaagcacattctgaatttgttcagccgctgccgtttaccttaccggaaaccgtgccgctggaaacgctacaacgattctgggcacatccggtgcgggcgttcttccagatgcgtttgcaggtgaacttccatactgaagacagcgaaatcccagacaccgagccatttattctggaaggacttagccgttatcaaatcaatcagcagttattgaatgcactggttgagcaggatgatgccgaacgcttgttccgccgcttccgggcggcaggggatttaccgtatggcgcttttggtgaaattttctgggaaacacagtgccaggagatgcagcagcttgccgacagagtcattgcctgtcgccagccggggcagagtatggaaattgatctcgcctgcaacggtgtgcagataactggctggttgccgcaggtgcagccggatggcctgttgcgctggcgtccctctttattaagtgtggcgcagggaatgcaactttggctggaacaccttgtctactgtgccagcggtggtaatggcgaaagtcgcctttttctacgcaaagacggtgagtggcgttttccgccgcttgcagccgaacaggctttgcattacctctcacaactgattgaggggtatcgtgaaggaatgtccgcgccattgctggtgttacctgaaagtggcggcgcgtggctaaaaacctgttatgacgcgcaaaacgatgccatgctggatgacgattccacgttgcaaaaagcccgtacgaaattccttcaggcttacgaaggcaacatgatggtgcgtggcgaaggtgatgatatctggtatcaacggctctggcggcaattaacaccagagacaatggaggccatcgttgaacagtcgcaacgtttcctgttaccgctgtttcgctttaatcagtcatga

SEQ ID NO: 470811 - DNA, 2889 bp, Shigella flexneri
atgccccgcagcacctggttcaaagcattattgttgtttgttgccctctgggcaccattaagtcaggcagaaacgggatggcagccgattcaggaaaccatccgtaaaagtgataaagataaccgccagtatcaggctatacgtctggataacggtatggtggtcttgctggtttctgatccgcaggcagttaaatcgctctcggcgctggtagtgcccgttgggtcgctggaagatcccgaggcgtaccaggggctggcacattaccttgaacatatgagtctgatggggtcgaaaaagtacccgcaggctgacagtctggccgaatatctcaaaatgcacggcggtagtcacaatgccagcactgcgccgtatcgcacggctttctatctggaagttgagaacgacgccttgcccggtgcggtagaccgcctggccgatgctattgcagaacccttgctcgacaagaaatacgccgaacgtgagcgtaatgcagtgaacgctgaattaaccatggcgcgtacgcgtgacgggatgcgcatggcacaggtcagcgcagaaaccattaacccggcacaccccggttcaaagttttctggtggtaacctcgaaactttaagcgacaaacctggtaatccggtgcagcaggcgctgaaagatttccacgagaagtactattccgccaatttgatgaaggcggttatttacagtaataaaccgctgccggagttggcaaaaatggcggcggacacctttggtcgcgtgccgaacaaagagagcaaaaaaccggaaatcaccgtgccggtagtcaccgacgcgcaaaagggcattatcattcattacgtccctgcgctgccgcgtaaagtgttgcgcgttgagtttcgcatcgataacaactcagcgaagttccgtagtaaaaccgatgaattgattacctatctgattggcaatcgcagcccaggtacactttctgactggctgcaaaagcagggattagttgagggcattagcgccaactccgatcctatcgtcaacggcaacagcggcgtattagcgatctctgcgtctttaactgataaaggcctggctaatcgcgatcaggttgtggcggcaatttttagctatctcaatctgttacgtgaaaaaggcattgataaacaatacttcgatgaactggcgaatgtgctggatatcgacttccgttatccgtcgatcacccgtgatatggattacgtcgaatggctggcagataccatgattcgcgttcctgttgagcatacgctggatgcagtcaatattgccgatcggtacgatgctaaagcagtaaaggaacgtctggcgatgatgacgccgcagaatgcgcgtatctggtatatcagcccgaaagagccgcacaacaaaacggcttactttgtcgatgcgccgtatcaggtcgataaaatcagcgcacaaactttcgccgactggcagaaaaaagccgccgacattgcgctctctttgccagagcttaacccttatattcctgatgatttctcgctgattaagtcagagaagaaatacgaccatccagagctgattgttgatgagtcgaatctgcgcgtggtgtatgcgccaagccgttattttgccagcgagcccaaagctgatgtcagcctgattttgcgtaatccgaaagccatggacagcgcccgcaatcaggtgatgtttgcgctcaatgattatctcgcagggctggcgcttgatcagttaagcaaccaggcgtcggttggtggcataagtttttccaccaacgctaacaacggccttatgattaatgctaatggttacacccagcgtctgccgcagctgttccaggcattgctcgaggggtactttagctataccgctacggaagagcagcttgagcaggcgaagtcctggtataaccagatgatggattccgcagaaaagggtaaagcgtttgagcaggcgattatgcccgcgcagatgctctcgcaagtgccgtacttctcgcgagatgaacggcgtaaaattttgccctccattacgttgaaagaggtgctggcctatcgcgacgccttaaaatcaggggctcgaccagagtttatggttatcggcaacatgaccgaggcccaggcaacaacgctggcacgcgatgtgcaaaaacagttgggcgctgatggttcagagtggtgtcgaaacaaagatgtagtggtcgataaaaaacaatccgtcatctttgaaaaagccggtaacagcaccgactccgcactggcagcggtatttgtaccgactggctacgatgaatacaccagctcagcctatagctctctgttggggcagatcgtacagccgtggttctacaatcagttgcgtaccgaagaacaattgggctatgccgtgtttgcgtttccaatgagcgtggggcgtcagtggggcatgggcttccttttgcaaagcaatgataaacagccttcattcttgtgggagcgttacaaggcgtttttcccaaccgcagaggcaaaattgcgagcgatgaagccagatgagtttgcgcaaatccagcaggcggtaattacccagatgctgcaggcaccgcaaacgctcggcgaagaagcatcgaagttaagtaaagatttcgatcgcggcaatatgcgcttcgattcgcgtgataaaatcgtggcccagataaaactgctgacgccgcaaaaacttgctgatttcttccatcaggcggtggtcgagccgcaaggcatggctattctgtcgcagatttccggcagccagaacgggaaagccgaatatgtgcatcctgaaggctggaaagtgtgggagaacgtcagcgcgttgcagcaaacaatgcccctgatgagtgaaaagaatgagtga

SEQ ID NO: 470812 - DNA, 3543 bp, Shigella flexneri
atgagtgatgtcgccgagacactagatcctttgcgcttgcccttacagggcgagcgcctgattgaagcctctgccggcacaggcaaaacctttacgattgcggcgctctatttgcgcctgttacttggactaggcggttccgccgcctttccccgcccgctgatcgttgaagaactgctggtggtcacctttaccgaggctgccacggcagaattgcgcggtcgtatccgtagcaatatccacgagttgcgcatcgcctgtctgcgtgaaaccaccgacaatccactgtacgaacgcctgctggaagagatcgacgataaagcgcaagccgcgcagtggttgttgttagccgaacggcagatggatgaagcggcagtctttactattcacggcttttgccagcgcatgctcaacctgaatgcctttgaatccggcatgctgtttgagcagcagctgattgaagatgagtctctgctacgctaccaggcctgcgccgatttctggcgtcgccactgctacccgctgccgcgtgaaatagcccaggtcgtctttgaaacctggaaagggccgcaggcgttgctgcgcgatattaatcgttatctgcaaggcgaaccgccggttatcaaagcaccgccgcccgatgatgaaacgctggcttcccgccacgcgcaaattgtggcgcgtattgatacggtaaaacagcagtggcgcgacgcagtgggtgaactggatgcgctgatcgaatcttctggtattgatcgacgcaagtttaaccgtagcaatcaggctaaatggatcgaaaagatcagcgcctgggcagaagaagagacaaacagttatcagttgccggagtcgctggaaaaattctcccagcgtttcttagaagatcgcacgaaggccgggggggaaaccccgcgacatccactgtttgaggcgatcgatcaactgcttgcagaaccattgtcgatccgcgatctgttgatcacccgcgcattggctgagatccgcgaaacagtagcgcgtgaaaaacgccgccgtggcgaattgggttttgatgacatgttaagtcggctcgattccgcgctgcgtagcgaaagcggcgaggtgttggcagcggcgatccgtacgcgattcccggtggcaatgatcgatgaatttcaggataccgacccccagcagtaccgaatttttcgccgtatctggcaccatcagccggaaaccgcattgttgctgattggcgacccgaagcaggccatatatgcattccggggtgcggatatcttcacttatatgaaggcgcgtagtgaagttcacgcccactacactttagacaccaactggcgctccgcacctggaatggtgaacagtgtgaacaagcttttcagccagactgatgacacgttcatgtttcgcgaaataccgtttattccagtgaaatcagccgggaaaaatcaggcgttacgttttgtatttaaaggtgaaacgcagcctgcgatgaaaatgtggctgatggaaggcgaaagctgcggcgttggcgactatcaaagtaccatggcgcaggtatgtgctgcgcaaatccgcgactggctacaagccggacagcggggcgaagcgttgctgatgaacggcgacgacgcgcgtccggtgcgtgcttcggacatcagcgtgctggtgcgcagccgccaggaggccgcccaggtgcgcgatgccttaacgttgctggaaatcccttccgtttacctttcgaaccgcgacagtgtttttgaaactctggaagcgcaggaaatgctttggttgttgcaggcggtgatgacgcccgaacgtgagaacaccctgcgcagtgcgctggcaacgtcaatgatggggctgaatgcgctggatattgaaacgctgaataatgacgaacatgcgtgggatgcggtagtcgaagagttcgatggttatcggcaaatctggcgcaaacgtggcgttatgccgatgctgcgggcgctgatgtcggcgcgtaacattgcagaaaacttgctggcaacggcaggcggtgagcggcgtcttaccgatatcttgcatatcagcgaactgcttcaagaagccggaacgcagctggaaagtgaacatgcgctggtacgctggttatcgcaacatatcctcgagccagacagtaatgcctccagccaacaaatgcgcctcgaaagtgataaacatctggtgcagattgtcacgatccataaatcgaaagggctggaatatccgctggtctggttgccatttattaccaatttccgcgtccaggatcaggcgttttatcacgatcgccactcgtttgaggcagttttggatcttaatgctgcgccagaaagcgtcgacctcgcggaggtcgaacgtctggcggaagatctgcgtttgctttacgtggcgctgacgcgttcggtttggcattgcagtctcggcgttgcaccgctggtgcgccgtcgtggcgataaaaaaggtgacaccgacgtccaccaaagtgcgctcgggcgtttgctgcaaaaaggggaaccgcaagatgcggcagggcttcgcacctgtattgaagcgttatgcgatgatgatattgcctggcaaacggcacaaactggtgataaccagccctggcaggttaatgatgctttaactgcagaactgaatgcgaggacactacaacgattgcccggcgataactggcgtgtcaccagctactccggcttgcagcagcgtggtcacggtatcgctcaggatctgatgccacggctggatgttgatgccgcaggcgtggtcagcgtcgttgaagaaccgacgttaacaccgcatcagttcccgcgcggtgcgtcaccggggacattcttgcacagtttgtttgaagacctcgattttacccagccggttgacccgaactgggtacaggaaaaactggaactcggcggctttgaatcgcagtgggaaccggtgttgaccgagtggatcacggctgtcctccaggcacctctcaatgaaacgggtgttagcctgagtcagctttccgaccgcgataaacaggtggagatggagttttacctgccgattagcgaaccgctcatcgccagccagcttgatgcactaattcgccagtttgacccgctatccgctggctgcccgccgctggagttcatgcaggtacgcggcatgttaaaaggctttatcgacctggtattccgccacgaagggcgttattacctgctcgactataaatccaactggctgggtgaagacagttcggcttacacccaacaggctatggcagcagcgatgcaggcacaccgctatgatctgcaatatcagctttataccctggcgctgcatcgttatctgcgccatcgcattgctgattacgactatgatcttcactttggcggcgttatctatctgttcctgcgtggcgttgataaagaacatccgcaacaagggatttacacaacccgacccaacgccgggttgattgccctgatggatgagatgtttgccggtatgaccctggaggaggcgtaa

SEQ ID NO: 470813 - DNA, 1827 bp, Shigella flexneri
atgaaattgcaaaagcaattactggaagctgtggagcacaaacagctacgcccgctggatgtgcaatttgccctgaccgtggcgggagatgaacatcctgccgtcaccctcgcggcggcactgttaagtcatgatgccggagagggacacgtctgtttgccgctttcacgactggaaaataacgaggcgtcgaatccgctgttggcgacctgtgtcagtgaaatcggtgagctacaaaattgggaagaatgcttgctggcttctcaagcggtcagcaggggagatgaacccacgccgatgatcctctgtggcgatcgtctttatttgaatcgcatgtggtgtaacgagcggacggtagcgcgcttcttcaatgaggtgaatcataccattgaggttgatgaagctctactggcgcaaaccctggacaaactttttccagtaagcgatgaaattaactggcaaaaagttgcagcggcagtggcgctgacgcggcggatctcggtgatttccggcggcccaggcaccggtaaaacgaccaccgtggcgaagttgctggcagcgttaattcaaatggccgacggcgaacgctgccgtatccgtctggctgcaccaacgggtaaagctgccgcgcgcttaaccgaatctctcggcaaggctttgcgacagttaccgctgaccgatgaacaaaagaaacgcattccggaagatgccagcactttgcaccgattgctgggcgcgcagccgggtagccagcgtttacgtcatcatgccggtaacccgctgcatcttgatgtgctggtggtagatgaagcgtcaatgatcgatctgcctatgatgtcgagactgatcgacgccttgccagatcatgcgcgagtgatctttctcggcgatcgtgatcaactggcctcggttgaggctggggctgtgctgggcgatatctgcgcttatgccaacgcgggctttaccgccgagcgtgccaggcagctaagccgcctgacggggactcacgttccggcaggaaccggcacagaagcggcatctttgcgcgacagtctctgcctgctgcaaaaaagctatcgtttcggcagcgattctggcattggtcagttagctgcggcgatcaaccgtggtgataaaacggcagtgaaaaccgtttttcagcaggattttactgatatcgaaaaacgacttttacagagcggcgaagattatattgcgatgcttgaggaagctcttgcgggttacggacgttatctggatctgctgcaagcgcgtgccgagccggatttaatcattcaggcgttcaatgagtaccagcttttgtgcgccctgcgggaagggccgtttggcgtggctggactgaatgagcgaattgaacagtttatgcaacagaagcgcaaaattcatcgtcatccgcactctcgttggtacgaaggccgaccggtgatgattgcccgtaatgacagcgcgcttgggttgtttaatggcgatatcggtattgcgctggatcgcgggcaggggacgcgcgtctggtttgcgatgccggacggcaatattaagtctgtgcaaccgagtcgcttgccagagcacgaaactacgtgggcgatgacggtacataaatcgcagggatcggagttcgaccatgcggcgttgattttaccgagccaacgcacgccggtagtaacgcgagagctggtatacaccgcggtgacccgcgcgcgtcgtcgtctgtcgctgtatgccgatgagcgtatattaagtgcggcaatcgccactcgtactgagcggcgcagtggtctggcggcgttgtttagttcgcgggaataa

SEQ ID NO: 470814 - DNA, 1332 bp, Shigella flexneri
gtggtaaaggaacgtaaaaccgagctggtcgagggattccgccattcggttccctatatcaatacccaccggggaaaaacgtttgtcatcatgctcggcggtgaagccattgagcatgagaatttctccagtatcgttaatgatatcgggttgttgcacagcctcggcatccgtctggtggtggtctatggcgcacgtccgcagatcgacgcaaatctggctgcgcatcaccacgaaccgctgtatcacaagaatatacgtgtgaccgacgccaaaacactggaactggtgaagcaggctgcgggaacattgcaactggatattactgctcgcctgtcaatgagtctcaataacacgccgctgcagggcgcgcatatcaacgtcgttagtggcaattttattattgcccagccgctgggcgtcgatgacggcgtggattactgccatagcgggcgtatccggcggattgatgaagacgcgctccatcgtcaactggaaagcggtgcaatagtgctaatggggccggtcgctgtttcagtcactggcgagagctttaatctgacctcggaagagattgccactcaactagccatcaaactgaaagctgaaaagatgattggtttttgctcttcccagggcgttactaatgacgacggtgatattgtctccgaacttttccctaacgaagcgcaagcacgggtagaagcccaggaagagaaaggcgattacaactccggtacggtgcgctttttgcgtggcgcagtgaaagcctgccgcagcggcgtgcgccgctgtcatttaatcagttatcaggaagatggcgcgctgttgcaagagttgttctcacgcgacggtatcggtacgcagattgtgatggaaagcgccgagcagattcgtcgcgcaacaatcaacgatattggcggtattctggagttgattcgcccgctggagcagcaaggtattctggtgcgccgttctcgcgagcagctggagatggaaatcgacaaattcaccattattcagcgcgataacacgactattgcctgcgccgcgctctatccgttcccggaagagaagattggggaaatggcctgtgtggcagttcacccggattaccgcagttcatcacggggcgaggttctgctggaacgcattgccgctcaggcgaagcagagcggcttaagcaaattgtttgtgctgaccacgcgcagtattcactggttccaggaacgtggatttaccccggtggatattgatttactgcccgagagcaaaaagcagttgtacaactaccagcgtaaatccaaagtgttgatggcggatttagggtaa

SEQ ID NO: 470815 - DNA, 1254 bp, Shigella flexneri
atgtcaggatccaacactgcaatcagccgtcgtcgtttactgcaaggcgcgggcgctatgtggctattgagcgtaagtcaggtcagcctggctgcggttagccaggtcgtggcggtgcgcgtctggcctgcgtccagctacacccgcgtgacggtagaatcaaatcgtcagctgaaatataagcagttcgcgttgagtaaccctgaacgcgtggtggtggatatcgaagatgtaaacctgaactcggtactcaaggggatggcggcacaaattcgtgcagacgacccgttcatcaagtcggcgcgcgtcgggcaatttgacccgcaaaccgtacgcatggtttttgaattaaagcaaaacgtaaaaccgcagctgtttgcccttgcgccggtcgccgggtttaaagagcgtctggtgatggacctctatccggccaatgcacaggatatgcaggacccgctgctggcgctgctggaggattacaacaaaggcgacctcgaaaagcaggtgccgccagcgcaaagtggtccacaaccgggtaaagcagggcgcgatcgtccgattgtcattatgcttgaccctggccacggtggcgaagactccggtgcggtggggaaatacaaaacgcgcgaaaaagatgtggtattgcaaatagctcgccgtttgcgctctctgatcgaggaagagggcaatatgaaggtgtacatgacgcgcaatgaagacatcttcattccgttgcaagtgcgcgtagcaaaagcccagaaacagcgtgctgacctgtttgtctctatccatgccgacgcctttaccagtcgtcagccgagcggttcctcggtgtttgcgctctcaaccaaaggcgcaaccagtactgcggcaaaatatctggcacaaacccagaacgcctcggacttgattggtggcgtgagcaaaagcggtgaccgctatgtcgaccacaccatgttcgatatggtgcagtcgctgactattgctgacagccttaagtttggtaaagcggtactgaataagctcggaaaaatcaacaagctgcataaaaatcaagttgaacaggccgggtttgccgtactaaaggcaccagatattccctccattctggtcgaaacggcgtttatcagtaacgttgaggaagagcgtaaactgaaaacggcgactttccagcaggaagttgcggagtctattcttgcggggattaaagcgtattttgccgatggggcaacgctggcgagaaggggatga

SEQ ID NO: 470816 - DNA, 1098 bp, Shigella flexneri
atgaaaggacgttgggtaaagtaccttcttatgggcacggttgtggcaatgcttgccgcctgctcttccaaaccaaccgatcgcggacagcaatataaagacgggaaatttacccagcctttctctctggtgaaccagccagatgccgttggcgcgccgattaacgccggtgattttgccgagcaaattaaccatatccgtaattcgtcaccgcgtctgtatggcaaccagagtaatgtttataacgcggtgcaagagtggctgcgcgcaggcggtgatacccgcaatatgcgccagttcggcattgatgcctggcagatggaaggtgccgacaactatggtaacgtgcagtttacaggctattacacgccggtaattcaggcgcgccatacccgccagggcgagttccagtatcctatttaccgtatgccgccaaaacgtggtcgtctgccgtctcgtgcggagatctacgccggggcattgggcgataaatacatcctcgcttacagcaactctctgatggataacttcattatggatgtgcagggtagtgggtatatcgactttggtgatggcagtccgcttaactttttcagctatgcagggaaaaacggtcatgcctatcgcagcattggtaaggtgctgatcgaccgtggcgaagtgaaaaaagaagatatgtcgatgcaggcgattcgtcattggggcgaaacacacagtgaagccgaggttcgcgagctgctggaacagaacccgtctttcgtcttctttaaaccgcaatcttttgcaccggtgaaaggggcaagtgcggtgccgctggttggccgtgcttctgtagcctccgatcgttcaattattccgccaggtactaccttgctggcagaagtgccgctgctggataataacggcaaatttaacggtcagtacgaattgcgtctgatggtggcgttggatgtcgggggcgcaatcaaaggccaacacttcgatatctatcaagggatcgggccggaagccggacaccgcgcaggttggtacaaccactatggacgggtttgggtgctgaaaacggctccgggcgcaggtaacgtctttagcggctga

SEQ ID NO: 470817 - DNA, 807 bp, Shigella flexneri
atgtctgtggtaattagtgatgcatggcgtcagcgttttggtggcacagcgcgtctgtatggtgaaaaagcgttgcaactgtttgctgacgcgcatatttgtgtggttggtatcggtggtgtcggttcctgggcggcggaagcgctggcgcgcacggggattggcgcaatcacgcttatcgatatggatgatgtgtgcgtcaccaataccaatcggcaaattcacgctctgcgcgataacgtcgggctggcaaaagcggaagtcatggcggagcgcattcgccagattaacccggagtgccgtgtaacggtggtggatgatttcgtgacgccggataacgtagcgcaatatatgagtgccggttattcgtacgtgattgatgccattgatagtgtacggcccaaagcggcgctgattgcttattgtcggcgcaataaaatcccgctggtcacgaccggtggcgcgggtgggcagattgacccgacgcagattcaggttaccgatctggcgaaaacgattcaggatccgctggcggcgaagttgcgcgagcgcctgaaaagcgattttggcgtagtgaaaaacagtaaaggtaagctcggcgtggattgcgtgttttctactgaagcgctggtgtacccgcagtcagacggtacggtgtgtgcgatgaaagccacggcagaagggccgaagaggatggattgtgcatctggatttggcgcggcaacgatggtgaccgccacctttgggtttgttgcggtttctcatgcgctgaagaagatgatggcgaaagcggcgcgtcagggttaa

SEQ ID NO: 470818 - DNA, 444 bp, Shigella flexneri
atgacaaacccgcaattcgccggacatccgttcggcacaaccgtaaccgcagaaacgttacgcaataccttcgcaccgttgtcgcaatgggaagataaatatcgccagttgatcatgctggggaaacagcttccggctttgccagacgagttaaaagcgcaggctaaagagattgccggatgcgaaaaccgcgtctggctgggatataccgtggctgaaaacggcaaaatgcacttctttggcaacagcgaagggcgcattgtgcgcggcctgttggcggtgttgttgactgccgttgaggggaaaaccgccgccgaattacaggcacagtcgccgctggcattgtttgatgagctgggattacgtgcgcagcttagcgcctcacgcagccaggggttaaatgcgttaagcgaggcgattatcgctgcgacgaagcaggtttaa

SEQ ID NO: 470819 - DNA, 1206 bp, Shigella flexneri
atgaacgtttttaatcccgcgcagtttcgcgcccagtttcccgcactacaggatgcgggcgtctatctcgacagcgccgcgaccgcgcttaaacctgaagccgtggttgaagccactcgacagttttacagcctgagcgccggaaacgtccatcgcagccagtttgccgaagcccaacgcctgaccgcgcgttatgaagctgcacgagagaaagtggcgcaattactgaatgcaccggatgataaaactatcgtctggacgcgcggcaccactgaatccatcaacatggtggcacaatgctatgcgcgtccgcgtctgcaaccgggcgatgagattattgtcagcgtggcagaacaccacgctaacctcgtcccctggctgatggtcgcccaacaaactagagccaaagtggtgaaattgccgcttaatgcgcagcgactgccggatgtcgatttgttgccagagctgattactccccgtagtcggattctggcgttgggtcagatgtcgaacgtgactggcggttgcccggatctggcgcgagcgattacctttgctcattcagccgggatggtggtgatggttgatggtgctcagggggcggtgcatttccccgcggatgttcagcaactggatatcgatttctatgctttctctggtcacaaactgtatggcccgacgggtatcggcgtgctgtatggcaaatcagaactgctggaagcgatgtcgccctggctgggtggcggcaaaatgattcacgaagtgagttttgacggtttcaccactcaatctgcgccgtggaaactggaagcaggaacgccaaatgtcgctggcgtcataggattaagcgcggcgctggaatggctggcagattacgatatcaaccaggccgaaagctggagccgtagcttagcaacgcttgcagaagaagcgctggcgaaacgtccaggctttcgttcattccgctgccaggattccagcctgctggcctttgattttgctggcgttcatcacagcgatatggtgacgctactagcggagtacggtattgccttgcgggccgggcaacattgcgctcagccgctactggcagaattaggcgtaaccggcacactgcgcgcctcatttgcgccatataatacaaagagtgatgtggatgcgctggtgaatgccgttgaccgcgcgctggaattattggtggattaa

SEQ ID NO: 470820 - DNA, 228 bp, Shigella flexneri
atgaaaaagactgccgcaattatttctgcctgtatgctgacttttgccctgagcgcctgttccggttcgaactatgtgatgcacaccaatgacggacgtaccatcgtctctgacggcaaaccacagactgataacgatatcggtatgatttcgtataaagacgctaatggcaacaaacagcagatcaaccgtactgacgtgaaagagatggtcgaactggaacagtaa

SEQ ID NO: 470821 - DNA, 918 bp, Shigella flexneri
atgtctaaacgattaccaccgctaaatgccttacgagtttttgatgccgcagcacgccatttaagttttactcgcgcagcagaagagctttttgtgacccaggccgcagtaagtcatcaaatcaagtctcttgaggattttttggggctaaaactgttccgccgccgtaatcgttcactcctgctgaccgaggaagggcaaagctatttcctcgatatcaaagagatattttcgcaattaaccgaagcgacgcgtaaactccaggcccgtagcgccaagggggcgttgacggtcagtttactccccagtttcgccattcattggttggttccgcgactttccagctttaattcagcttatccgggaattgacgttcgaatccaggcggttgatcgtcaggaagataagctggcggatgatgttgatgtggcgatattttatggtcggggcaactggccggggctacgggtggaaaaactgtacgccgaatatttattgccggtgtgttcgccgctactgctgacaggcgaaaaacccttgaagaccccggaagatctggctaaacatacgttattacatgatgcgtcacgccgtgactggcagacatatacccgacagttggggtttaatcatatcaacgttcagcaagggccaatttttagtcatagcgccatggtgctgcaagcggctattcacgggcagggagtggcgctggcaaataacgtgatggcgcaatctgaaatcgaggccggacgtcttgtttgcccgtttaatgatgttctggtcagtaaaaatgctttttatctggtttgtcatgacagccaggcagaactgggtaaaatagccgcctttcgccaatggatcctggcgaaagccgctgctgaacaagaaaaattccgctttcgttatgaacaataa

SEQ ID NO: 470822 - DNA, 396 bp, Shigella flexneri
atgaccagccgttttatgctgattttcgccgctattagcggcttcatttttgtggcactgggcgcttttggtgcgcatgtgttaagtaaaaccatgggggccgttgagatgggctggatccaaaccggtctcgaataccaggcgtttcatacgctggcgatcttaggtctggcggtggcaatgcagcgtcgcatcagtatctggttttactggagtagcgttttcctcgcgttaggcacggtgctgttcagcggcagcctttattgcctggcgctgtcccatctgcgtttgtgggcgtttgtcacaccggttggcggcgtgagcttccttgcgggctgggcgttaatgttagttggtgctatccgtttaaagcgcaagggcgtaagtcatgaataa

SEQ ID NO: 470823 - DNA, 1101 bp, Shigella flexneri
atgaataaggttgtattgctgtgccgtccgggctttgaaaaagagtgcgccgcagaaattaccgataaagccggccagcgggaaattttcggttttgcccgcgtgaaagagaatgcgggttatgtcatttatgaatgttatcaacctgatgatggcgataagttaatccgtgagctgccgttcagttcattaatttttgcccgccagtggtttgtggtgggggaactcctgcagcatttgccgccagaagatcgtattacccccattgtcggcatgttacagggtgtagtagagaagggcggtgaactgcgtgttgaagttgccgataccaacgaaagcaaagagttgctgaaattctgccgtaagttcactgttccgctacgcgctgccttgcgcgatgctggggtgctggcgaactatgaaacgccgaagcgtccggttgtgcatgtattctttattgcaccaggatgctgctataccggttactcatacagcaacaataattcgccgttctatatgggcattccgcgcctgaaatttccggcagaggcgccgagtcgttccacgctcaaactggaagaggcatttcatgtgtttattcctgcggatgagtgggatgaacgcctggcgaacgggatgtgggcggtggatttaggcgcttgccctggcggctggacctaccaactggtgaagcgcaacatgtgggtttattccgtcgacaacggcccgatggcgcaaagtctgatggataccgggcaggtgacgtggctgcgggaagacggtttcaaattccgtccgacacgcagcaatatctcctggatggtatgcgatatggttgaaaaaccggctaaagttgcggcattgatggcgcagtggctggttaatggctggtgccgtgaaaccattttcaatctcaaactgccgatgaaaaaacgctacgaagaagtatcacacaatctggcgtatattcaggcacagcttgatgaacatggcataaatgctcagattcaggcgcggcagttgtatcacgatcgcgaagaagtgacggtgcacgtccgccgcatctgggctgcggtgggtggtcgtcgcgacgagcgataa

SEQ ID NO: 470824 - DNA, 732 bp, Shigella flexneri
atgaaagcggcacgccagcaagcgatagtcgacctgctgctgaaccataccagcctgaccacggaagctctctctgaacagctaaaggtcagtaaagaaaccattcgtcgcgatctcaatgaattacagacgcagggtaaaattctgcgcaatcatggacgcgctaaatatatccaccgtcaaaatcaagacagtggcgatccctttcacatcaggctgaaaagccattatgcgcataaagcagatatcgcgcgcgaggcgctcgcgtggattgaagaagggatggtgatagccttagacgccagttcaacttgctggtatctggcacgccagttgcctgacatcaacattcaggtcttcaccaatagccatccgatttgccatgaactcggtaaacgcgaacgcattcaactgatcagttccggcggcacacttgagcgcaaatatggctgttacgtcaatccctcgctgatttcccaacttaaatcgctggaaatcgatctgtttattttttcttgtgaagggatcgatagcagcggcgcactgtgggactccaatgcgatcaacgctgattacaaatcgatgctattaaaacgtgccgcgcaatcgttgttattgattgataaaagtaaatttaatcgttcaggggaagcccgcatcgggcatctggatgaggtaacgcacattatttctgatgagcgccaggttgcaacttctttggtaacagcctga

SEQ ID NO: 470825 - DNA, 657 bp, Shigella flexneri
ttgcaacgctttgctgattgctgtcggcaaatcaatagtgaactgactgaatgccacatccgcggtatcgccgtcaccacctttagtgtggatggcgctctggtagataagcaaggcaatctgctctatccgatcattagctggaaatgtccgcgaacagcagcggttatggacaatattgaacggttaatctccgcacagcggttgcaggctatttctggcgtcggagcctttagtttcaatacgttatataagttggtgtggttgaaagaaaatcatccacaactgctggaacgcgcgcacgcctggctcttcatttcgtcgctgattaaccaccgtttaaccagcgaattcactactgatatcacgatggccggaaccagccagatgctggatatccagcaacgcgatttcagtccgcaaattttacaagccaccggtattccacgccgactcttccctcgtctggtggaagcgggtgaacagattggtacgctacagaacaacgccgcagcaatgctcggcttacccgttggcataccggtgatttccgcaggtcacgatacccagttcgccctttttggcgctggtgccgaacaaaatgaacccgtgctctcctccggtacatgggaaattttaatggttcgcagcgcctag

SEQ ID NO: 470826 - DNA, 180 bp, Shigella flexneri
atgaaacaagaagttatcctggtactcgactgtggcgcgaccaatgtcagggccatcgcggttaatcggcagggaaaaattgttgcccgcgcctcaacgcctaatgccagcgatatcgcgatggaaaacaacacctggcaccagtggtctttagactgccattttgcaacgctttgctga

SEQ ID NO: 470827 - DNA, 1776 bp, Shigella flexneri
atgaaaaaaatcagcttaccgaaaattggtatccgcccggttattgacggtcgtcgcatgggtgttcgtgagtcgcttgaagaacaaacaatgaatatggcgaaagctacggccgcactgctgaccgagaaactgcgccatgcctgcggagctgccgtcgagtgtgtcatttccgatacctgtatcgcgggtatggctgaagccgctgcttgcgaagaaaaattcagcagccagaatgtaggcctcaccattacggtaacgccttgctggtgctatggcagtgaaaccatcgacatggatccaacccgcccgaaagccatttggggctttaacggcactgaacgccccggcgctgtttacctggcagcggctctggcagctcacagccagaaaggcatcccggcattctccatttacggtcatgacgttcaggatgccgatgacacatcgattcctgccgatgttgaagaaaaactgctgcgctttgcccgcgccggtttggccgtcgccagcatgaaaggtaaaagctatctgtcgctgggcggcgtttcgatgggtatcgccggttctattgttgatcacaacttctttgaatcctggctgggaatgaaagtccaggcggtggatatgaccgaactgcgtcgccgtatcgatcagaagatttacgacgaagccgaactggaaatggcactggcctgggctgataaaaacttccgctatggcgaagatgaaaataacaaacagtatcaacgcaatgccgagcaaagccgcgcagttctgcgcgaaagtttactgatggcgatgtgtatccgcgacatgatgcaaggcaacagcaaactggccgatattggtcgcgtggaagaatcacttggctacaacgccatcgctgcgggcttccaggggcaacgtcactggaccgatcaatatcccaatggtgacaccgccgaagcgatcctcaacagttcatttgactggaatggcgtgcgcgaaccctttgtcgtggcgaccgaaaacgacagtcttaacggcgtggcaatgctaatgggtcaccagctcaccggcaccgctcaggtatttgccgatgtgcgtacctactggtcaccagaagcaattgagcgtgtaacggggcataaactggacggactggcagaacacggcatcatccatttgatcaactcaggttctgctgcgctggacggttcctgtaaacaacgcgacagcgaaggtaacccgacgatgaagccgcactgggaaatctctcagcaagaggctgacgcttgcctcgccgctaccgaatggtgcccggcgatccacgaatacttccgtggcggcggttactcttcccgcttccttaccgaaggcggcgtcccgttcaccatgactcgtgtcaacatcatcaaaggcctgggaccggtactgcaaatcgcggaaggctggagcgtggaattgccgaaggatgtgcatgacatcctcaacaaacgcaccaactcaacctggccaaccacctggtttgcaccgcgcctcactggtaaagggccgtttacggatgtgtattcggtaatggcgaactggggtgccaaccacggagttctgaccatcggccacgttggcgcagactttatcacccttgcctccatgctgcgtatcccggtatgtatgcacaacgttgaagagaccaaagtgtatcgtccttctgcctgggctgcgcacggcatggatattgaaggccaggattaccgcgcttgccagaactacggtccgttgtacaagcgttaa

SEQ ID NO: 470828 - DNA, 1317 bp, Shigella flexneri
atgggaaacacatcaatacaaacgcagagttaccgtgcggtagataaagatgcagggcaaagcagaagttacattattccattcgcgctgctgtgctcactgttttttctttgggcggtagccaataaccttaacgacattttattacctcaattccagcaggcttttacgctgacaaatttccaggctggcctgatccaatcggccttttactttggttatttcattatcccaatccctgctgggatattgatgaaaaaactcagttataaagcagggattattaccggattatttttatatgccttgggcgctgcattattctggcccgctgcagaaataatgaactacaccttatttttagttggcctatttattattgcagccggattaggttgtctggaaactgccgcaaacccttttgttacggtattagggccggaaagcagtagtcacttccgcttaaatcttgcgcaaacatttaactcgtttggcgcaattatcgcggttgtctttgggcaaagtcttattttgtctaacgtgccacatcaatcgcaagacgttctcgataaaatgtctccagagcaattgagtgcgtataaacacagcctggtattatcggtacagacaccttatatgatcatcgtggctatcgtgttactggtcgccctgctgatcatgctgacgaaattcccggcattgcagagtgataatcacagtgacgccaaacaaggatcgttctccgcatcgctttctcgtctggcgcgtattcgtcactggcgctgggcggtattagcgcaattctgctatgtcggcgcacaaacggcctgctggagctatttgattcgctacgctgtagaagaaattccaggtatgactgcaggctttgccgctaactatttaaccggaaccatggtgtgcttctttattggtcgtttcaccggtacctggctcatcagtcgcttcgcaccacacaaagtcctggccgcctacgcattaatcgctatggcactgtgcctgatctcagccttcgctggcggtcatgtgggcttaatagccctgactttatgcagcgcctttatgtcgattcagtacccaacaatcttctcgctgggcattaagaatctcggccaggacaccaaatacggttcgtccttcatcgttatgaccattattggcggcggtattgtcactccggtcatgggttttgtcagtgacgcggcgggcaacatccccactgctgaactgatccccgcactctgcttcgcggtcatctttatctttgcccgtttccgttctcaaacggcaactaactga

SEQ ID NO: 470829 - DNA, 648 bp, Shigella flexneri
atggaacgaaataaacttgctcgtcagattattgacacttgcctggaaatgacccgcctgggactgaaccaggggacagcggggaacgtcagtgtacgttatcaggatgggatgctgattacgcctacaggcattccatatgaaaaactgacggagtcgcatattgtctttattgatggcaacggtaaacatgaggaaggaaagctcccctcaagcgaatggcgtttccatatggcagcctatcaaagcagaccggatgccaacgcggttgttcacaatcatgccgttcattgcacggcagtttccattcttaaccgatcgatccccgctattcactacatgattgcggcggctggcggtaattctattccttgcgcgccttatgcgacctttggaacacgcgaactttctgaacatgttgcgctggctctcaaaaatcgtaaggcaactttgttacaacatcatgggcttatcgcttgtgaggtgaatctggaaaaagcgttatggctggcgcatgaagttgaagtgctggcgcaactttacctgacgaccctggcgattacggacccggtgccagtgctgagcgatgaagagattgccgtagtgctggagaaattcaaaacctatgggttacggattgaagagtaa

SEQ ID NO: 470830 - DNA, 1149 bp, Shigella flexneri
atggctaacagaatgattctgaacgaaacggcatggtttggtcggggtgctgttggggctttaaccgatgaggtgaaacgccgtggttatcagaaggcgctgatcgtcaccgataaaacgctggtgcaatgcggcgtggtggcgaaagtgaccgataagatggatgctgcagggctggcatgggcgatttacgacggcgtagtgcccaacccaacaattactgtcgtcaaagaagggctcggtgtattccagaatagcggcgcggattacctgatcgctattggtggtggttctccacaggatacttgtaaagcaattggcattatcagcaacaacccggagtttgccgatgtgcgtagcctggaagggctttccccgaccaataaacccagtgtaccgattctggcaatccccaccacagcaggtactgcggcagaagtgaccattaactacgtgatcactgacgaagaaaaacggcgcaagtttgtttgcgttgatccgcatgatatcccgcaggtggcgtttattgatgctgacatgatggatggtatgcctccggcgctgaaagccgcgacgggtgttgatgcgctcactcatgctattgaggggtatattacccgtggcgcgtgggcactaaccgatgcactgcacattaaagcgattgaaatcattgctggggcgctgcgaggatcggttgctggtgataaggatgccggagaagaaatggcgctcgggcagtatgttgcgggtatgggcttctcgaatgttgggttagggttggtgcatggtatggcgcatccactgggcgcgttttataacactccacacggtgttgcgaacgccatcctgttaccgcatgtcatgcgctataacgctgactttaccggtgagaagtaccgcgatatcgcgcgcgttatgggcgtgaaagtggaaggtatgagcctggaaggggcgcgtaatgccgctgttgaagcggtgtttgccctcaaccgtgatgtcggtattccgccacatttgcgtgatgttggtgtacgcaaggaagacatttcggcactggctcaggcggcactggatgatgtttgtaccggtggcaacccgcgtgaagcaacgcttgaggatattgtagagctttaccataccgcctggtaa

SEQ ID NO: 470831 - DNA, 846 bp, Shigella flexneri
ttgcgaagcctcttcctgttttctcaaccagccatagcctgttccggcatcgaatgttacccttatcgcctgatctttaagggggttatcgtggctgttcatttgcttattgtcgatgcactgaatcttatccgtcgcattcatgccgttcagggttcgccctgtgtcgaaacctgccagcatgcgctcgatcagctcattatgcacagccagccaacccacgcggtcgccgtttttgatgatgaaaaccgcagtagcggctggcgtcatcagcgtttaccagattacaaagcggatcgaccgccaatgccggaagagttgcacgacgagatgcctgcattacgcgccgcctttgagcaacgcggcgtcccgtgctggtcagccagcggcaacgaagccgatgacttagccgccacactggcggtcaaagtgacacaggccgggcatcaggcaacgattgtttcgacagataaaggctactgtcagttactttcaccgacattacgtattcgtgattacttccagaaacgttggctggatgcgccatttatcgataaagaatttggcgttcaaccgcagcagttgcccgattactggggacttgcggggatcagcagttcaaaggtaccgggtgttgcgggaatcggaccaaaaagcgccacgcagctgctggtcgagtttcagagtctggaagggatatatgagaatctggatgcggttgccgaaaagtggcgcaaaaaattagaaacccataaagagatggcgtttctgtgccgcgatattgcccgcttacaaaccgatttgcatatcgacggcaatttacagcaattgcggttggtacggtaa

SEQ ID NO: 470832 - DNA, 1368 bp, Shigella flexneri
atgattagcgtattcgatattttcaaaatcggcattggcccttccagttctcataccgttggaccaatgaaagcgggtaaacaatttaccgacgatctgattgcccgtaacctgcttaaagacgtgacccgcgtggtggttgacgtgtacggctcgctctctctgactggtaaaggccaccacacagatatcgccattattatgggcctggcgggtaacctgccggataccgtggatatcgattccatccccggttttattcaggatgtgaatactcatggtcgcctgatgctggcaaacggtcagcatgaagtggagttcccggttgatcagtgcatgaacttccatgcagacaacctttctctgcatgaaaacggtatgcgcattaccgcgctggcgggcgataaagtcgtttacagccagacttactactctattggcggtggctttatcgttgatgaagagcattttggccagcaggatagcgcaccggttgaagttccttatccgtacagttcagcagccgatctgcaaaaacattgtcaggaaaccgggctgtcactctctggcctgatgatgaaaaacgagctggcgctgcacagtaaagaagagctggaacagcacctggcgaacgtctgggaagtcatgcgtggcggtattgagcgcggtatttccaccgaaggcgtgttgcctggcaaactgcgcgttccacgccgtgctgcggcactacgccggatgctggtcagccaggataaaaccaccactgacccgatggcggttgttgactggatcaacatgtttgcactggcagtgaacgaagagaacgctgctggcggtcgcgtggtgactgcgccgactaacggtgcgtgcgggattatcccggctgtgctggcgtactacgataagtttatccgcgaagtgaacgctaactcactggctcgttacctgctggtagccagcgccattggttctctttataagatgaacgcgtcgatttctggtgccgaagtgggttgccagggtgaagttggcgtggcgtgctctatggcggcagctggtctggcagaactgttaggcgcaagcccggcgcaggtttgcatcgcagcggaaatcgcgatggagcacaacctcggtctgacttgtgacccggtcgcggggcaggttcaggtaccgtgcattgagcgtaacgccattgcagcagtgaaagcggtgaacgccgcgcgtatggcactgcgccgtaccagcgaaccgcgcgtctgcctcgataaagttatcgaaaccatgtacgaaacaggtaaagacatgaacgccaagtaccgcgaaacctctcgcggcggcctggcgatgaagatcgttgcctgcgattaa

SEQ ID NO: 470833 - DNA, 1290 bp, Shigella flexneri
atggaaacgactcaaaccagcacgattgcgtcgaaagactctcgtagtgcctggcgcaagacagacaccatgtggatgctgggcctttacggcacggcaatcggcgcgggcgtgctgttcctgccaatcaacgccggtgttggcggtatgatcccgctgatcatcatggctatccttgcgttcccgatgacgttttttgctcaccgcggcctgactcgcttcgtactgtctggtaaaaacccgggcgaagacatcaccgaggttgtagaagaacactttggtattggcgcaggtaaactgattaccctgctctacttcttcgctatctacccgatcctgctggtttatagcgtggcaatcaccaataccgttgaaagcttcatgtctcaccagctgggtatgacgccaccgccgcgtgcgattctgtcgctgatcctgatcgtgggtatgatgaccatcgttcgctttggtgagcagatgatcgttaaagcgatgagtattctggtattcccgtttgttggcgtactgatgctgctggctctgtacctgatcccgcagtggaacggcgcagcactggaaacgctgtctctggacactgcatctgcaaccggaaacggtctgtggatgaccctgtggctggcaattccggtaatggtgttctcgttcaaccactctccgatcatctcttctttcgccgttgcgaagcgtgaagagtacggcgatatggcagaacagaaatgctcgaagatcctggcattcgcacacatcatgatggtgctgaccgtaatgttcttcgtcttcagctgcgtactgagcctgactccggtagacctggctgcggctaaagagcagaacatctcgattctgtcttacctggctaaccactttaacgcaccggttatcgcgtggatggctccgattatcgcgattatcgctatcaccaaatccttcctcggccactacctgggcgcacgtgaaggcttcaacggtatggtgattaaatctctgcgtggtaaaggtaagtctatcgaaatcaacaagctgaaccgtatcactgcgctgttcatgctggtaacgacctggattgttgccaccctgaacccgagcatcctgggtatgattgaaaccctgggcggcccaatcatcgcgatgatcctgttcctgatgccgatgtacgcaattcagaaagtaccggcaatgcgtaagtacagcggtcacatcagcaacgtattcgttgtcgtgatgggtctgattgcaatctccgcaatcttctactctctgttcagctaa

SEQ ID NO: 470834 - DNA, 225 bp, Shigella flexneri; identical to SEQ ID NO: 133446

SEQ ID NO: 470835 - DNA, 297 bp, Shigella flexneri; identical to SEQ ID NO: 459916

SEQ ID NO: 470836 - DNA, 723 bp, Shigella flexneri
atgattatgacttcaataacccttgatttacctcgccgcttcccctggccgacgttactttcggtctgcattcatggtgctgttgtggcggggctgctctatacctcggtacatcaggttattgaactacctgcgcctgcgcaaccaatttctgtcacgatggttgcgcctgctgatctcgaaccgccacaagccgttcagccgccaccggagccggtggtagagccagaaccggaacctgagccgatccccgaaccgccaaaagaagcaccggtggtcattgaaaagccgaagccaaaaccgaagccggtgaaaaaggtacaggagcagccaaaacgcgatgtcaaacccgtagagtcgcgtccggcatcaccgtttgaaaatacggcacccgcgcgccccacatcaagtacggcaacggctgcaaccagcaagccggttaccagtgtggcttcaggaccacgcgcattaagccgtaatcagccgcagtatccggcacgagcacaggcattgcgcattgaagggcaggttaaagttaaatttgacgtcacgccggatggtcgcgtggataacgtacaaatcctctcagccaagcctgcgaacatgtttgagcgtgaggtgaaaaatgcgatgcgcagatggcgttatgagccgggtaagccaggcagtgggattgtggtgaatatcctgtttaaaattaacggcaccaccgaaattcagtaa

SEQ ID NO: 470837 - DNA, 399 bp, Shigella flexneri
atgtctacaacacataacgtccctcagggcgatcttgttttacgtactttagccatgcccgccgataccaatgccaatggtgacatctttggtggttggttaatgtcacaaatggatattggcggcgctattctggcaaaagaaattgcccacggtcgcgtagtgactgtgcgggttgaaggaatgactttcttacggccggttgcggtcggcgatgtggtgtgctgctatgcacgctgtgtccagaaagggacgacatcggtcagcattaatattgaagtatgggtgaaaaaagtagcgtctgaaccaatcgggcaacgctataaagcgacagaagcattatttaagtatgtagcggttgatcctgaaggaaaacctcgcgccttacctgttgagtaa

SEQ ID NO: 470838 - DNA, 540 bp, Shigella flexneri
atgaagcagtttcttgattttttaccgctggttgtctttttcgcgttttacaagatttatgacatctatgcggctactgcagcgctgatcgtcgccacggcgattgtgcttatctatagctgggttcgctttcgtaaggttgagaagatggccctgatcacttttgttctggtggtcgtcttcggtggcttgacgctgttcttccacaatgatgagtttattaaatggaaggttacagtcatttatgctctgtttgcgggagccctgttagtcagccaatgggtgatgaaaaagccgctaattcagcggatgctgagtaaagaactcacgctgccgcaaccggtatggtcgaagctaaatctggcctgggctgttttctttatcctttgcggtctggcaaacatctacatcgcattctggctgccgcaaaatatttgggtcaactttaaagtctttggcctgaccgcccttaccttaatcttcacattgttaagcggtatctatatctaccgccacatgccgcaggaagataaatcctaa

SEQ ID NO: 470839 - DNA, 744 bp, Shigella flexneri
atgtctatcacggcgcagtccgtataccgtgacaccggaaatttcttccgtaatcaatttatgaccattctgttggtatcgttgctatgtgcgtttatcacagtggtgttagggcatgttttctcacccagtgatgcacagcttgcgcagctcaatgacggcgtgcccgttagcggcagtagtgggttgttcgacctggttcagaatatgtcaccggaacagcaacaaattttgctgcaggcttcagcggcgtccactttttcagaattaatcggtaacgccattctcgccggaggcgtaatattaattatccagctggtgtctgcgggtcagagagtcagtgcgctgcgagctattggtgccagtgcgccgatattgcccaagttatttattctgatttttctgactacccttttagtacagattggcatcatgctggtggtcgttccgggaattatcatggccattttactggccctggcaccggtgatgctggtacaggacaaaatgggcatttttgcctcgatgcgtagcagtatgcggctgacttgggcgaatatgcgtctggtggcacccgcagtactgagctggttgctggcaaaaacactgttgctgctttttgcctcttcttttgccgcattaaccccggaaattggtgccgtactggcgaacaccttgagcaacctgatttctgccatattgctcatctatctgttccgcctgtatatgttgattcgccaataa

SEQ ID NO: 470840 - DNA, 639 bp, Shigella flexneri
atgaaaaagttaacagtggcggctttggcagtaacaactcttctttctggcagtgcctttgcgcatgaagcaggcgaattttttatgcgtgcaggttctgcaaccgtacgtccaacagaaggtgctggtggtacgttaggaagtctgggtggattcagcgtgaccaataacactcaactgggcttgacgtttacttatatggcgaccgacaacattggtgtggaattactggcagcgacgccgttccgccataaaatcggcacccgggcgaccggcgatattgcaaccgttcaccatctgccgccaacactgatggcgcagtggtattttggtgatgccagcagcaaattccgtccttacgttggggccggtattaactacaccaccttctttgataatggatttaacgatcatggcaaagaggcggggctttccgatctcagtctgaaagattcctggggagctgccgggcaggtgggggttgattatctgattaaccgtgactggttggttaacatgtcagtgtggtacatggatatcgataccaccgccaattataagctaggcggtgcacagcaacacgatagcgtacgcctcgatccgtgggtgtttatgttctcagcaggatatcgtttttaa

SEQ ID NO: 470841 - DNA, 507 bp, Shigella flexneri
atgaatcgtattgaacattatcatgactggttacgtgacgcccacgcaatggaaaagcaagccgaatctatgcttgaatccatggccagccgtatagataattatcctgaactacgcgctcgtattgaacaacatcttagtgaaaccaaaaaccagattgttcaactggaaactattcttgatcgtaatgacatttcacgttcagtcattaaagattccatgagtaaaatggctgcgcttgggcagtcaatcggtggtatattcccttctgatgaaatagttaaaggctctattggcggatatgtcttcgagcaatttgaaatcacctgttacacctcactattagcagcagcaaaaaatgccggtgatacagtctcaattccgatcatcgaagcgattttaaatgaggaaaagcaaatggccgactggctgattcagcatattccgcaaacaactgagaaatttttaattcgttctgaaactgatggcgtagaagcgaagaaataa

SEQ ID NO: 470842 - DNA, 501 bp, Shigella flexneri
atgaatatgaagaccattgaagatgtatttattcaactgctttcagatacctacagcgcagaaaaacaattaacccgggcactggcaaaactcgcaagagcaacatcaaatgaaaaattaagtcaggcttttcatgcgcacctcgaggaaactcatggacagattgaacgaattgatcaagttgtggaatcagaatcaaatctgaaaattaagcgcatgaaatgtgtggcaatggaaggtcttattgaagaagctaatgaggtcatcgaaagtaccgagaaaaacgaagtgcgtgatgccgcactgattgccgcagcacagaaagtcgagcattatgagattgccagttacgggacattagcgacgctggctgaacaattaggttaccgtaaagcagcgaagcttctgaaagaaaccctggaagaagaaaaggccaccgacatcaaactgactgatctggcccttaataacgtaaataagaaagccgaaaataaagcctga

SEQ ID NO: 470843 - DNA, 180 bp, Shigella flexneri
atggccgaacatcgtggtagttcaggaaatttcgccgaagaccgtgagaaggcatccgacgcaggccgtaaaggcggtcagcatagcggcggtaattttaaaaatgatccgcaacgcgcatctgaagcgggtaaaaaaggcggtcaacaaagcggtggtaataaatcaggcaaatcctga

SEQ ID NO: 470844 - DNA, 807 bp, Shigella flexneri
atggaacgctacgaatctctgtttgcccagttgaaggagcgcaaagaaggcgcattcgttcctttcgtcacgctcggtgatccgggcattgagcagtcattgaaaattatcgatacgctaattgaagccggtgctgacgcgctggagttaggtatccccttctccgacccactggcagatggcccgaccattcaaaacgccactctgcgcgcctttgcggcaggtgtgactccggcacaatgttttgaaatgctggcactgattcgccagaaacacccgaccattcccattggcctgttgatgtatgccaatctggtgtttaacaaaggcattgatgagttttatgcccagtgcgagaaagtcggcgtcgattcggtgctggttgccgatgtgccagttgaagagtccgcgcccttccgccaggccgcgttgcgccataatgtcgcacctatcttcatctgcccgccaaatgccgatgacgacctgctgcgccagatagcctcttacggtcgtggttacacatatttgctgtcacgagcgggcgtgaccggcgcagaaaaccgcgccgcgttacccctcaatcatctggttgcgaagctgaaagagtacaacgctgcacctccattgcaggggtttggtatttccgccccggatcaggtaaaagcagcgattgatgcaggagctgcgggcgcgatttctggttcggccattgttaaaatcatcgagcaacatattaatgagccagagaaaatgctggcggcactgaaagtttttgtacaaccgatgaaagcggcgacgcgcagttaa

SEQ ID NO: 470845 - DNA, 1194 bp, Shigella flexneri
atgacaacattacttaacccctattttggtgagtttggcggcatgtacgtgccacaaatcctgatgcctgctctgcgccagctggaagaagcttttgtcagcgcgcaaaaagatcctgaatttcaagcccagttcaacgacctgctgaaaaactatgccgggcgtccaaccgcactgaccaaatgccagaacattacagccgggacgaacaccacgctgtatctcaagcgtgaagatttgctgcacggcggcgcacataaaaccaaccaggtgctggggcaggcgttgctggcgaagcggatgggtaaaaccgaaatcatcgccgaaaccggggccggtcagcatggcgtggcgtcggcccttgccagcgccctgctcggcctgaaatgccgtatttatatgggtgccaaagacgttgaacgccagtcgcctaacgtttttcgtatgcgcttaatgggtgcggaagtgatcccggtacatagcggttccgccacgctgaaagatgcctgtaatgaggcgctacgcgactggtccggcagttatgaaaccgcgcactatatgctgggcaccgcggctggcccgcatccttatccgaccattgtccgtgagtttcagcggatgattggcgaagaaaccaaagcgcagattctggaaagagaaggtcgcctgccggatgccgttatcgcctgtgttggcggcggttcgaatgccatcggcatgtttgctgatttcatcaatgaaaccaacgtcggcctgattggtgtggagcctggtggtcacggtatcgaaactggcgagcacggcgcaccgctaaaacatggtcgcgtgggcatttatttcggtatgaaagcgccgatgatgcaaaccgaagacgggcagattgaagaatcttactccatctccgccggactggatttcccgtctgtcggtccacaacacgcgtatcttaacagcactggacgcgctgattacgtgtctattaccgatgatgaagcccttgaagccttcaaaacgctgtgcctgcacgaagggatcatcccggcgctggaatcctcccacgccctggcccatgcgctgaaaatgatgcgcgaaaacccggataaagagcagctactggtggttaacctttccggtcgcggcgataaagacatcttcaccgttcacgatattttgaaagcacgaggggaaatctga

SEQ ID NO: 470846 - DNA, 1359 bp, Shigella flexneri
atgcaaaccgttttagcgaaaatcgtcgcagacaaggcgatttgggtagaaacccgcaaacagcagcaaccgctggccagttttcagaatgaggttcagccgagcacacgacatttttatgatgcgctacagggtgcacgcacggcgtttattctggagtgtaaaaaagcgtcgccgtcaaaaggcgtgatccgtgatgatttcgatccggcacgcattgccgccatttataaacattacgcttcggcaatttcggtgctgactgatgagaaatattttcaggggagctttgatttcctcctcatcgtcagccaaatcgccccgcagccgattttatgtaaagacttcattatcgacccttaccagatctatctggcgcgctattaccaggccgatgcctgcttattaatgctttcagtactggatgacgaccaatatcgccagcttgcagccgtcgctcacagtctggagatgggggtgctgaccgaagtcagtaatgaagaggaactggagcgcgccattgcattaggggcaaaggtcgttggcatcaacaaccgcgatctgcgtgatttgtcgattgatctcaaccgtacccgcgagcttgcgccgaaactggggcacaacgtaacggtaatcagcgaatccggcatcaatacttacgctcaggtgcgcgagttaagccacttcgctaacggttttctgattggttcggcgttgatggcccatgacgatttgcacgccgccgtgcgccgggtgttgctgggtgagaataaagtatgtggcctgacgcgtgggcaagatgctaaagcagcttatgacgcgggcgcgatttacggtgggttgatttttgttgcgacatcaccgcgttgcgtcaacgttgaacaggcgcaggaagtgatggctgcggcaccgttgcagtatgttggcgtgttccgcaatcacgatattgccgatgtggtggacaaagctaaggtgttatcgctggcggcagtgcaactgcatggtaatgaagatcagctgtatatcgatacgctgcgtgaagctctgccagcacatgttgccatctggaaagcattaagcgtcggtgaaaccctgcccgcccgcgagtttcagcacgttgataaatatgttttagacaacggccagggtggaagcgggcaacgttttgactggtcactattaaatggtcaatcgcttggcaacgttctgctggcggggggcttaggcgcagataactgcgtggaagcggcacaaaccggctgcgccggacttgattttaattctgctgtagagtcgcaaccgggcatcaaagacgcacgtcttttggcctcggttttccagacgctgcgcgcatattaa

SEQ ID NO: 470847 - DNA, 1596 bp, Shigella flexneri
atggctgacattctgctgctcgataatatcgactcttttacgtacaacctggcagatcagttgcgcagcaatggtcataacgtggtgatttaccgcaaccatattccggcgcagaccttaattgaacgcctggcgacgatgagcaatccggtactgatgctttctcctggccccggtgtgccgagcgaagccggttgtatgccggaactcctcacccgcttgcgtggcaagctgcccattattggcatttgcctcggacatcaggcaattgtcgaagcttacgggggctatgtcggtcaggcgggcgaaattcttcacggtaaagcgtcgagcattgaacatgacggtcaggcgatgtttgccggattaacaaacccgctgccggtggcgcgttatcactcgctggttggcagtaacattccggccggtttaaccatcaacgcccattttaatggcatggtgatggcagtacgtcacgatgcggatcgcgtttgtggattccagttccatccggaatccattctcaccacccagggcgctcgcctgctggaacaaacgctggcctgggcgcagcagaaactagagccagccaacacgctgcaaccgattctggaaaaactgtatcaggcgcagacgcttagccaacaagaaagccaccagctgttttcagcggtggtgcgtggcgagctgaagccggaacaactggcggcggcgctggtgagcatgaaaattcgcggtgagcacccgaacgagatcgccggggcagcaaccgcgctactggaaaacgcagcgccgttcccgcgcccggattatctgtttgctgatatcgtcggtactggcggtgacggcagcaacagtatcaatatttctaccgccagtgcgtttgtcgccgcggcctgtgggctgaaagtggcgaaacacggtaaccgcagcgtctccagtaaatccggctcgtcggatctgctggcggcattcggtattaatcttgatatgaacgccaataaatcgcgccaggcgctggacgagttaggcgtatgtttcctctttgcgccgaaatatcacaccggattccgccacgcgatgccggttcgccagcaactgaaaacccgcaccctgttcaatgtgctggggccattgattaacccggcgcatccgccgctggcgttaattggtgtttatagtccggaactggtgctgccgattgccgaaaccttgcgcgtgctggggtatcaacgcgcggcggtggtgcacagcggcgggatggatgaagtttcattacacgcgccgacaatcgttgccgagctgcatgacggcaaaattaagagctatcaattgaccgctgaagattttggcctgactccctaccaccaggagcaactggcaggcggaacacctgaagaaaaccgtgacattttaacacgcttgttacaaggtaaaggcgacgccgcccatgaagcagccgtcgctgcgaacgtcgccatgttaatgcgcctgcatggccatgaagatctgcaagccaatgcgcaaaccgttcttgaggtactgcgcagtggttccgcttacgacagagttaccgcgctggcggcacgagggtaa

SEQ ID NO: 470848 - DNA, 1563 bp, Shigella flexneri
atgcaaacacaaaaaccgactctcgaactgctaacctgcgaaggcgcttatcgcgacaacccgactgcgctttttcaccagttgtgtgggaatcgtccggcaacgctgctgctggaatccgcagatatcgacagcaaagatgatttaaaaagcctgctgctgatagacagtgcgctgcgcattacagcattaggtgacaccgtcacaattcaggcactttccggcaatggcgaagccctgctggcactactggataacgccctgcctgcgggtgtggaaagtgaacaatcaccaaactgccgtgtgctgcgcttcccccctgtcagtccactgctggatgaagacgcccgcttatgctccctttcggtttttgacgctttccgtttattgcagaatctgttgaatgtaccgaaggaagaacgagaagcaatgttcttcggcggcctgttctcttatgaccttgtggcgggatttgaagatttaccgcaactgtcagcggaaaataactgccctgatttctgtttttatctcgctgaaacgctgatggtgattgaccatcagaaaaaaagcacccgtattcaggccagcctgtttgctccgaatgaagaagaaaaacaacgtctcactgctcgcctgaacgaactacgtcagcaactgaccgaagccgcgccgccgctgccagtggtttccgtgccgcatatgcgttgtgaatgtaatcagagcgatgaagagttcggtggcgtagtgcgtttgttgcaaaaagcgattcgcgctggagaaattttccaggtggtgccatctcgccgtttctctctgccctgcccgtcaccgctggcggcctattacgtgctgaaaaagagtaatcccagcccgtacatgttttttatgcaggataatgatttcaccctatttggcgcgtcgccggaaagctcgctcaagtatgatgccaccagccgccagattgagatctacccgattgccggaacacgcccacgcggtcgtcgcgccgatggttcactggacagagatctcgacagccgtattgaactggaaatgcgtactgaccataaagagctgtctgaacatctgatgctggttgatctcgcccgtaatgatctggcacgcatttgcacccctggcagccgctacatcgccgatctcaccaaagttgaccgttattcctatgtgatgcacctcgtctctcgcgtagtcggcgaactgcgtcacgatcttgacgccctgcacgcttatcgcgcctgtatgaatatggggacgttaagcggtgcgccgaaagtacgcgctatgcagttaattgccgaggcggaaggtcgtcgccgcggcagctacggcggcgcggtaggttatttcaccgcgcatggcgatctcgacacctgcattgtgatccgctcggcgctggtggaaaacggtatcgccaccgtgcaagcgggtgctggtgtagtccttgattctgttccgcagtcggaagccgacgaaacccgtaacaaagcccgcgctgtactgtgcgctattgccaccgcgcatcatgcacaggagactttctga

SEQ ID NO: 470849 - DNA, 882 bp, Shigella flexneri
ttgagcgacacgaattatgcagtgatttacgacctgcacagccataccacagcttccgatggctgcctgacgccagaagcattggtgcaccgtgcagtcgagatgcgcgtcggcaccctggcgatcaccgaccatgacaccacagctgcaatcgcgccagcaagagaggaaatttcacgttcgggactggcgctgaatcttattcccggcgtggaaatttccacggtctgggaaaatcatgaaattcatattgtcgggctgaatattgatattactcatccgctaatgtgtgagttcctcgcgcagcagacagaacggcgcaatcagcgggcgcagcaaattgccgaaagacttgaaaaagcgcaaatacctggggcgctggaaggcgcacaacgactggcgcagggcggcgcagtgacgcgcggtcattttgcgcgtttccttgtggagtgcggcaaagccagttcaatggcagatgtctttaaaaagtatctggcgcgcgggaaaaccggatacgttccgccacagtggtgtacaatagaacaagctattgatgtcattcatcattctggcggtaaggcggtgctagctcatcctgggcggtacaatcttagtgctaaatggctgaaaagattggttgcgcattttgccgaacaccacggcgacgcgatggaagtcgcgcagtgccagcaatcgcccaatgaacgcacccagctggccacacttgcgcgtcagcatcatttatgggcatcacaaggatctgattttcatcagccatgcccgtggatcgaactgggtcgtaaactctggctgcccgcaggcgttgaaggcgtctggcagctatgggaacagccgcagaacaccacagagagggaattatga

SEQ ID NO: 470850 - DNA, 621 bp, Shigella flexneri
atgagccagtttttttatattcatcctgataacccgcagcaacgtctgatcaaccaggcggtggagatcgtgcgtaaaggcggggtgattgtctatccaactgattccggctatgcgctcggctgtaaaattgaagataaaaacgccatggagcgtatttgtcgtattcgccagctgccggacggtcacaactttaccctgatgtgtcgcgatctttctgaactctcgacctattcattcgtggataacgttgcgtttcgtttgatgaaaaacaacacgccgggcaactataccttcatcctgaaggggacgaaggaagtgccacgccgtctgttgcaggagaaacgcaaaaccatcggtatgcgtgtgccttctaacccgattgcgcaggcgttgcttgaagcactgggcgaaccgatgctttccacttcgctaatgctgccaggcagcgaatttaccgaatccgatcccgaagaaattaaagaccgtctggaaaaacaggtagatttgattattcacggcggctatctcgggcagaaaccaacaacggttattgatcttaccgatgatacgccggtcgtggtgcgtgaaggcgtaggtgatgtgaagcctttcttataa

SEQ ID NO: 470851 - DNA, 873 bp, Shigella flexneri
atgagcgaaaaattacagaaagtgctggcccgcgctggccacggctcccgccgtgaaatcgaatctattattgaagccggtcgtgtgagtgttgatggcaaaattgctaaactcggcgatcgcgttgaagttacccctgggctgaaaattcgtatcgatggtcatctgatttcggtacgtgagtccgctgaacaaatttgtcgcgttctggcctattacaaaccggaaggtgagttgtgtacccgtaacgatccggaagggcgtccgacggtgtttgaccgtctgccaaagctgcgtggcgcacgctggattgccgtaggtcgtctggacgttaacacctgtggtctgctgctgttcaccaccgatggtgaactggcaaaccgtttaatgcatccaagccgtgaagttgaacgtgaatacgccgtgcgtgtatttggtcaggttgacgacgcgaaactgcgtgatttgagtcgtggcgtgcaactggaagatggtccggcagcttttaaaaccatcaagttcagcggcggcgaagggatcaaccagtggtacaacgtgactctgaccgaaggccgtaaccgtgaagttcgtcgtctgtgggaagcggttggtgtgcaggtgagccgcctgatccgtgttcgttacggtgatatcccactgccaaaaggtctgccacgcggtggctggacggagctggacctcgcccagactaactatctgcgcgaactggtggagcttccgccagaaaccagctctaaagtcgctgtagaaaaagaccgtcgtcgcatgaaggctaatcagattcgtcgtgcggtgaaacgtcacagtcaggtgagcggcagtcgtcgttctggcgggcgtaataacggttaa

SEQ ID NO: 470852 - DNA, 591 bp, Shigella flexneri
atgagtgatgaacgctaccaacagcgtcagcagcgagtgaaagaaaaagtagatgctcgtgtggcccaggcccaggatgaacgcggtattatcatcgtctttaccggcaatggaaaaggcaaaaccaccgcggcatttggtacggcaacacgcgcagttggtcacggaaaaaaagtgggcgtcgtgcagtttattaaaggcacctggcctaatggcgaacgcaatctgctggagccacatggcgttgagtttcaggtgatggcaacgggctttacctgggatacacaaaaccgcgagtctgataccgccgcctgccgcgaagtctggcaacatgcaaagcggatgcttgctgattcctcactggatatggttttgcttgatgaactgacgtatatggtggcgtatgactatttgccactggaagaagtggtgcaggcgttaaatgaacgtccacatcaacagacggtgattatcacgggtcgaggctgtcatcgggatattcttgaactggcggatacggtaagtgagctgcgccccatcagacatgcgtttgatgccggtgttaaggtgcaaatagggattgattattaa

SEQ ID NO: 470853 - DNA, 759 bp, Shigella flexneri
atgcattaccagccaaaacaagatttactcaatgatcgcattatcctggtgacgggagccagcgatgggattggtcgtgaagccgcgatgacgtatgcacgctatggtgcgacagtgattctgttgggccgtaatgaagaaaaattacgtcaggtagccagccacataaacgaagaaactgggcgtcagccacagtggtttattctcgatttgctgacctgcacgtccgaaaattgccaacaactggcacagcgcattgtcgttaattatccgcgtctggatggtgttttgcataatgccggattgctcggcgatgtttgcccaatgagcgaacaaaatccgcaggtctggcaggacgtcatgcaggtcaacgttaatgccacctttatgctcacccaggcactgcttcctttattactcaaatcggacgccggttcactggtctttacttcatcaagcgttggacgtcagggacgagccaactggggtgcatatgcagcgtcgaaatttgccaccgaagggatgatgcaggtactggccgatgaatatcagcagcgcctgcgcgtcaactgcattaacccaggcggtacgcgcaccgcaatgcgcgcaagcgccttcccgaccgaagatccacagaaacttaaaacacccgctgatatcatgccgctctacctctggctgatgggcgatgacagccgccgtaaaaccggcatgacctttgacgcccaaccgggccgtaaaccaggaatttcccaatga

SEQ ID NO: 470854 - DNA, 1050 bp, Shigella flexneri
gtggaattgttgtctgaatatggtttgtttttggctaaaatcgttaccgttgtgctagcgattgcggcgattgccgccattattgtcaatgttgctcaacgtaataaacgccagcgtggcgagttacgggtcaacaatctcagcgaacagtataaggagatgaaagaagaactggccgcggcgctgatggactcacatcagcaaaaacagtggcacaaagcgcagaagaaaaagcacaagcaagaagcgaaagcagcaaaagcgaaagccaaactgggcgaggtggcaactgacagtaaacctcgcgtctgggtgctggattttaaaggcagcatggacgcccatgaagtgaactcgctacgtgaagagataacggcggtactcgcagcattcaaaccgcaggatcaggttgtgctccgtctggaaagccctggtggcatggtgcatggttacgggttggcggcttcgcagctgcagcgtctgcgtgataaaaacattcctttaactgttacggtagacaaagtcgctgccagcggcggttacatgatggcctgtgtggcggacaaaattgtttccgcaccgtttgctattgtgggttccattggggtggtggcgcaaatgcccaactttaaccgcttcctgaaaagcaaagatattgatatcgaactgcacaccgccgggcagtataagcgcacgctgaccttgctgggtgaaaataccgaagaagggcgggagaaattccgcgaagagctgaacgaaacgcatcagttatttaaagattttgtgaagcgtatgcgtccgtctctggatattgaacaggtggcaacgggtgaacactggtacggacaacaggcggtagagaaaggcctggttgatgaaatcaacaccagtgatgaagttattcttagcctgatggaaggccgtgaagtggttaatgtacgctatatgcagcgtaaacgactcattgaccgattcaccggcagcgcggcagagagcgccgatcgattgttgctacgctggtggcagcggggtcaaaagccattgatgtaa

SEQ ID NO: 470855 - DNA, 252 bp, Shigella flexneri; identical to SEQ ID NO: 459459

SEQ ID NO: 470856 - DNA, 2598 bp, Shigella flexneri
atgggtaaagctcttgtcatcgttgagtccccggcaaaagccaaaacgatcaacaagtatctgggttgtgactacgtggtgaaatccagcgtcggtcacatccgcgatttgccgaccagtggctcagctgccaaaaagagtgccgactctacctccaccaagacggctaaaaagcctaaaaaggatgaacgtggcgctctcgtcaaccgtatgggggttgacccgtggcacaattgggaggcgcactatgaagtgttgcctggtaaagagaaggtcgtctctgaactgaaacaactggctgaaaaagccgaccacatctatctcgcaaccgaccttgaccgcgaaggggaagccattgcatggcacctgcgggaagtgattggtggtgatgatgcgcgctatagccgagtggtgtttaacgaaattactaaaaacgcgatccgccaggcatttaacaaaccgggtgagctgaatattgatcgtgttaatgcccagcaggcgcgtcgctttatggaccgcgtggtggggtatatggtttcgccgctgctgtggaaaaagatcgctcgtggtctgtctgccggtcgtgtgcagtcggtggcggtccgcctggtggtagagcgtgagcgtgaaattaaagcgttcgtaccggaagagttctgggaagtcgatgccagcacgactacgccatctggtgaagcgttggcgttgcaggtgactcatcagaatgacaaaccgttccgtccggtcaacaaagaacaaactcaggctgcggtaagtctgctggaaaaagcgcgctacagcgtgctggaacgtgaagacaaaccgacaaccagtaaacctggcgctccttttattacctctacgctgcaacaagctgccagcacccgtcttggttttggcgtgaaaaaaaccatgatgatggcgcagcgtttgtatgaagcaggctatatcacttacatgcgtaccgactccactaacctgagtcaggacgcggtaaatatggttcgcggttatatcagcgataattttggtaagaaatatctgccggaaagtccgaatcagtacgccagcaaagaaaactcacaggaagcgcacgaagcgattcgtccttctgacgtcaatgtgatggcggaatcgctgaaggatatggaagcagatgcgcagaaactgtaccagttaatctggcgtcagttcgttgcctgccagatgaccccagcgaaatatgactccacgacgctgaccgttggtgcgggcgatttccgcctgaaagcacgcggtcgtattttgcgctttgatggctggacaaaagtgatgcctgcactgcgtaaaggcgatgaagatcgtatcttaccggcagtcgataaaggcgatgctctgacgctcgttgaactaacaccagcccagcactttaccaagccgccagcccgtttcagtgaagcattgctggttaaagaactggaaaaacgtggtatcggtcgtccgtctacctatgcgtcgatcatttcgaccattcaggatcgtggctatgtgcgagtagaaaatcgtcgtttctatgcggaaaaaatgggcgaaatcgtcaccgatcgccttgaagaaaatttccgcgagttaatgaactacgactttaccgcgcagatggaaaacagcctcgaccaggtggcaaatcacgaagcagagtggaaagctgtactggatcacttcttctcggatttcacccagcagttagataaagctgaaaaagatccggaagagggtggtatgcgcccgaaccagatggttctgaccagcattgactgcccgacttgtggtcgcaaaatggggattcgcacagcgagtaccggggtattccttggctgttctggctatgcgctgccgccgaaagagcgttgcaaaaccaccattaacctggtgccggaaaacgaagtgctgaacgtgctggaaggcgaagatgctgaaaccaacgcgctgcgcgcaaaacgtcgttgcccgaaatgcggcacggcgatggacagctatctcatcgatccgaaacgtaagttgcatgtctgtggtaataacccaacctgcgacggttacgagatcgaagagggcgaattccgcattaaaggttatgacggcccgatcgttgagtgtgaaaaatgtggctctgaaatgcacctgaaaatggggcgtttcggtaaatacatggcctgcaccaacgaagagtgtaaaaacacacgtaagattttacgtaacggcgaagtggcaccaccgaaagaagatccggtgccattacctgagctgccgtgcgaaaaatcagatgcttatttcgtgctgcgtgacggtgctgccggtgtgttcctggctgccaacactttcccgaaatcgcgtgaaacgcgtgcgccactggtggaagagctttatcgcttccgcgaccgtctgccggaaaaactgcgttatctggccgatgcgccacagcaggatccggaaggtaataagaccatggttcgctttagccgtaaaaccaaacagcaatatgtctcttcggaaaaagacggaaaggcgactggctggtcagcattttatgttgatggcaaatgggttgaaggaaaaaaataa

SEQ ID NO: 470857 - DNA, 975 bp, Shigella flexneri
atgaaattacaacaacttcgctatattgttgaggtggtcaatcataacctgaatgtctcatcaacagcggaaggactttacacatcacaacccgggatcagtaaacaagtcagaatgctggaagacgagctaggcattcaaattttttcccgaagcggcaagcacctgacgcaggtaacgccagcaggacaagaaataattcgtatcgctcgcgaagtcctgtcgaaagtcgatgccataaaatcggttgccggtgagcacacctggccggataaaggctcgctgtatatcgccaccacgcatacccaggcacgctacgcgttaccaaacgttatcaaaggctttattgagcgttatccccgcgtttctttgcatatgcaccagggcccgccgacacaaattgctgatgccgtctctaaaggcaatgccgatttcgctatcgccacagaagcgctgcatctgtatgaagatttagtgatgttaccgtgctaccactggaatcgggctattgtagtcactccggatcacccgctggcaggcaaaaaagccattaccattgaagaactggcgcaatatccgttggtgacatataccttcggctttaccggacgttcagaactggatactgcctttaaccgcgcagggttaacgccgcgtatcgttttcacggcaacggatgctgacgtcattaaaacttacgtccggttagggctgggggtaggggtcattgccagcatggcggtggatccggtcgccgatcccgaccttgtgcgcgttgatgctcacgatatcttcagccacagtacaaccaaaattggttttcgccgtagtacttttttgcgcagttatatgtatgatttcattcagcgttttgcaccgcatttaacgcgtgatgtcgttgatgcggctgtcgcattgcgctccaatgaagaaattgaggtcatgtttaaagatataaaactgccggaaaaataa

SEQ ID NO: 470858 - DNA, 129 bp, Shigella flexneri
atgccttctggaaatcaggaaccccgccgtgatcctgaattaaaacgtaaagcctggctggcggtttttcttggttctgcacttttctgggtggttgtcgcactgctgatttggaaagtgtggggataa

SEQ ID NO: 470859 - DNA, 168 bp, Shigella flexneri
atggtcggtcaggagcaactggagtcgtcaccattatgccagcatagtgacaatgaaccagaaacgaaacgggaatgttccgtcgttattccagacgactggcaactaacatcgcagcagcaagcctttatagaactgtttgctgaagatgatcagccgaaacaataa

SEQ ID NO: 470860 - DNA, 2676 bp, Shigella flexneri
atgtcgtcaaccctacgagaagccagtaaggacacgttgcaggccaaagataaaacttaccactactacagcctgccgcttgctgctaaatcactgggcgatatcacccgtctacccaagtcactcaaagttttgctcgaaaacctgctgcgctggcaggatggtaactcagttaccgaagaggatatccacgcactggcgggatggctgaaaaatgcccatgctgaccgtgaaattgcctaccgcccggcaagggtgctgatgcaggactttaccggcgtacctgccgttgttgatctggcggcaatgcgcgaagcggttaaacgcctcggtggcgatactgcaaaggttaacccgctctcaccggtcgacctggtcattgaccactcggtgaccgtcgatcgttttggtgatgatgaggcatttgaagaaaacgtacgcctggaaatggagcgcaaccacgaacgttatgtgttcctgaaatggggaaagcaagcgttcagtcggtttagcgtcgtgccgccaggcacaggcatttgccatcaggttaacctcgaatatctcggcaaagcagtgtggagcgaattgcaggacggtgaatggattgcttatccggatacactcgttggtactgactcgcacaccactatgatcaacggccttggcgtgctggggtggggcgtgggtgggatcgaagcagaagccgccatgttaggccagccggtttccatgcttatcccggacgtagtgggctttaaacttaccggaaaattacgtgaaggtattaccgccacagacctggttctcactgttacccaaatgctgcgcaaacatggcgtggtggggaaattcgtcgaattttatggtgatggtctggattcactaccgttggcggatcgcgccaccattgccaatatgtcgccagaatatggtgccacctgtggcttcttcccaatcgatgcagtaaccctcgattacatgcgtttaagcgggcgcagcgaagatcaggtcgagttggtcgaaaaatatgccaaagcgcagggcatgtggcgtaacccgggtgatgaaccgatttttaccagtatgttagaactggatatgaatgacgttgaagcgagcctggcagggccaaaacgcccacaggatcgcgttgcactgcccgatgtaccaaaagcatttgccgccagtaacgaactggaagtgaatgccacgcataaagatcgcctgccagtcgattatgttatgaacggacatcagtatcagttacctgatggcgctgtggtcattgctgcgataacctcgtgcaccaacacctctaacccaagtgtgctgatggccgcaggcttgctggcgaaaaaagccgtaactcttggcctcaagcggcaaccgtgggtcaaagcgtcgttggcaccgggttcgaaagtcgtttctgattatctggcaaaagcgaaactgacaccgtatctcgacgaactggggtttaaccttgtgggatacggttgtaccacctgtattggtaactctgggccgctgcccgatcctatcgaaacggcaatcaaaaaaggcgatttaaccgtcggtgcggtgctgtccggcaaccgtaactttgaaggccgtatccatccgctggttaaaactaactggctggcctcgccaccgctggtggttgcctatgcgctggcgggaaatatgaatatcaacctggcttctgagcctatcggccatgatcgcaaaggcgagccggtttatctgaaagatatctggccatcggcacaagaaattgcccgtgcggtagaacaagtctccacagaaatgttccgcaaagagtacgcagaagtttttgaaggcacagcagagtggaaggaaattaacgtcacacgatccgatacctacggttggcaggaggactcaacctatattcgcttatcgcctttctttgatgaaatgcaggcaacaccagcaccagtggaagatattcacggtgcgcggatcctcgcaatgctgggggattcagtcaccactgaccatatctctccggcgggcagtattaagcccgacagcccagcgggtcgatatctacaaggtcggggtgttgagcgaaaagactttaactcctacggttcgcggcgtggtaaccatgaagtgatgatgcgcggcaccttcgccaatattcgcatccgtaatgaaatggtgcctggcgttgaaggggggatgacgcggcatttacctgacagcgacgtagtctctatttatgatgctgcgatgcgctataagcaggagcaaacgccgctggcggtgattgccgggaaagagtatggatcaggctcaagccgtgactgggcggcaaaaggacctcgtctgcttggaattcgtgtggtgattgccgaatcgtttgaacgaattcaccgttcgaatttaattggcatgggcatcctgccgctggaatttccgcaaggcgtgacgcgtaaaacgttagggctaaccggggaagagaagattgatattggcgatctgcaaaatctacaacctggcgcgacggttccggtgacgcttacgcgcgcggatggtagccaggaagtcgtaccctgccgttgtcgtatcgacaccgcgacggagttgacctactaccagaacgacggcattttgcattatgtcattcgtaatatgttgaagtaa

SEQ ID NO: 470861 - DNA, 591 bp, Shigella flexneri
atgcagcttaaacgtgtggcagaagccaaactgccaaccccatggggcgatttcctgatggtgggatttgaagaactggcaaccggacacgatcatgtcgcgctagtctatggcgatatttccgggcataccccggtacttgcgcgcgtccattccgaatgtctgaccggtgacgccctgttcagcttgcgctgcgattgtggcttccagctcgaagcggcattgacgcaaattgccgaggaaggccgtggtattttgctgtatcaccgtcaggaaggtcgtaacattggtctgctgaataaaatccgcgcttacgcactgcaggatcaaggttacgataccgtagaggctaaccaccagttaggcttcgccgctgatgagcgcgacttcactctttgcgctgatatgttcaaactccttggcgtcaatgaagtccgcttgttaaccaataacccgaaaaaagtcgaaattctgaccgaagcagggattaatattgttgaacgcgtaccattgattgtaggtcgtaaccccaataacgaacattatctcgataccaaagccgagaaaatgggccatttgctgaacaaataa

SEQ ID NO: 470862 - DNA, 765 bp, Shigella flexneri
atgcgttcgattgcccgacgtaccgcagtgggagctgcactattgcttgtcatgccagtagccgtatggatttctggctggcgttggcaacctggagaacaaagttggctactaaaagcggctttttgggttactgaaactgtcacccagccctggggcgtcattacacatttgattttgttcggctggtttctctggtgtctgcgttttcgcattaaggctgcctttgtattatttgccattctggcggcggcaatccttgttggacaaggcgttaaatcctggatcaaagacaaagtacaggaaccacgaccttttgttatctggttggaaaaaacacatcatattccggttgatgagttctacactttaaagcgagcagaacgcggaaatctagtaaaagaacagttggctgaagagaaaaatattccacaatatttgcgttcacactggcagaaagagacggggtttgcctttccttccggtcacacgatgtttgctgccagttgggcactgctggccgttggtttgctgtggccgcgtcggcgaacgttaaccattgctatcttgttggtctgggcaacgggagtcatgggaagccgcctgctgctcgggatgcattggccacgcgatctggtggtagctacgttgatttcgtgggcgctggtggcggtggcaacgtggcttgcgcaacgaatttgtgggccattaacaccacctgcggaagaaaatcgcgaaattgcacaacgagaacaagaaagttaa

SEQ ID NO: 470863 - DNA, 309 bp, Shigella flexneri; identical to SEQ ID NO: 460565

SEQ ID NO: 470864 - DNA, 1170 bp, Shigella flexneri
atgctggagttgttgtttctgcttttgcctgtagccgctgcctatggctggtatatgggccgcagaagtgcgcaacaaaacaagcaagatgaagccaaccgcttgtcgcgtgattacgtagcgggggttaacttcctgcttagtaatcaacaggataaagcggtagacctgtttctcgatatgcttaaagaggatacaggcaccgttgaagcccaccttacgctcggaaacctgttccgttcgcgtggcgaagttgatcgcgctattcgcatccatcagaccctaatggaaagcgcctcgctgacctatgaacagcgtctgttggcgattcaacaactggggcgtgattacatggccgccgggttatacgaccgcgcggaagacatgttcaatcagctgaccgatgaaactgacttccgcattggcgcgctgcaacagttgctacaaatctaccaggctaccagtgagtggcagaaagcaattgatgttgccgaacgcctggtgaagctgggtaaagataaacagcgcgtcgaaattgcccatttctactgtgagttagccctgcagcatatggccagcgacgatctcgatcgtgccatgaccttgctaaaaaaaggggcggcggcagataaaaacagcgcccgcgtatccatcatgatgggacgcgtgtttatggcgaaaggagaatacgccaaagccgtcgaaagtttgcaacgcgtcatatcccaggacagagaactggtcagcgaaacgctggaaatgttgcaaacctgctatcagcagttgggtaaaactgccgaatgggcagaattcctgcaacgcgcggtggaagagaacaccggtgccgatgctgaattgatgcttgctgatatcatcgaagcgcgcgacggtagtgaggctgcacaggtctatattacacgccagcttcagcgtcatccgaccatgcgtgtattccataagctaatggattaccacttaaatgaagcggaagaagggcgcgccaaagagagtctgatggtgctgcgtgacatggttggcgagaaggtgcgtagtaagcctcgttatagctgccagaaatgtggttttaccgcatacaccctctactggcattgtccgtcttgtcgtgcctggtcaactattaaaccgattcgcggtcttgatggcctgtaa

SEQ ID NO: 470865 - DNA, 798 bp, Shigella flexneri
atgctcgccgtttacctgtttcgcgccactcccggtgcccatcatcaagaaggtctggtcatgacgttaactgcttcatcttcttcccgcgccgttacgaattctcctgtggttgttgcccttgattatcataattgtgatgacgcgctgtcctttgtcgacaagatcgacccacgcgattgtcgtctgaaggtcggtaaagagatgtttacattgtttgggccacagtttgtgcgcgaacttcaacagcgtggttttgatatctttcttgacctgaaattccacgatatccccaacactgcagcgcacgctgtcgctgctgcagctgacttaggcgtgtggatggtgaatgttcatgcctccggtggggcgcgtatgatgaccgcagcgcgtgaggcactggttccgtttggcaaagatgcaccgcttttgattgctgtgacagtgttgaccagcatggaagccagcgacctggccgatcttggcgtgacactgtcacctgcagattatgcagaacgtctggcagcactgacgcaaaaatgtgaccttgatggtgtggtgtgttctgctcaggaagctgtgcgctttaaacaggtattcggtcaggagttcaaactggttacaccgggcattcgtccgcaggggagtgaagctggtgaccagcgccgcattatgacgccagaacaggcgttggcggctggtgttgattatatggtgattggtcgcccggtaacgcaatcggtagatccagcgcagacactgaaagcgatcaacgcctctttacagcggagtgcatga

SEQ ID NO: 470866 - DNA, 327 bp, Shigella flexneri
atgagtgattccaacagccgtctggtctactcaacggaaaccgggcgtattgatgagcccaaagcggccccagtacgccctaaaggcgatggagcggtgcgtattcagcgtcagaccagtggacgtaaaggtaagggcgtttgcctgattaccggtatcgatctcgatgatgccgaactgacaaaacttgcagcggaactgaagaaaaaatgcggctgcggcggagcagttaaagatggagttattgaaatccagggcgataagcgtgatttattaaaatcactacttgaagcgaaagggatgaaggtaaaactcgcaggcggttaa

SEQ ID NO: 470867 - DNA, 219 bp, Shigella flexneri; identical to SEQ ID NO: 461657

SEQ ID NO: 470868 - DNA, 750 bp, Shigella flexneri
atgaattcccgacaacaaactattctacagatggtcattgaccagggtcaggttagcgtaaccgatctggcaaaagccactggagtttctgaagttaccattcgccaggatctcaacaccctcgaaaaactgagttacctccgccgtgcacatggctttgcagtttcgcttgatagtgatgacgtcgaaacccgtatgatgagcaactatacgctgaagcgtgaactcgccgagtttgccgcgtcactggttcaaccgggcgaaaccatctttatcgaaaatggcagcagcaatgccctgctcgcccggactctgggggagcagaagaaaaatgtcactatcatcacggtcagcagctacatcgcgcatttgctgaaagacgcgccttgtgaagtcattttgctcggtggcgtgtaccagaaaaaaagcgaaagtatggttggccctttgacacgccagtgcatccagcaggtacatttcagcaaagcatttattggtattgatggctggcaacctgaaactggattcaccggtcgcgatatgatgcgcaccgatgtggtcaatgccgtgctggaaaaagagtgcgaagcgatagtcctgactgacagctcgaaatttggtgctgtacattcatactccatcggtcccgttgagcgattcaatcgcgtgattaccgattcgaaaatacgcgccagcgatctgatgcatcttgagcacagtaaactcaccgttcacgtcgttgacatttaa

SEQ ID NO: 470869 - DNA, 174 bp, Shigella flexneri
atgtctgaatttgatgcccagcgcgttgccgaacgtattgatattgtgttagatatccttgtggcaggcgattaccactctgcgatccataatctcgagatacttaaagcagaactcttgcgccaggttgctgaatctacgccagacatcccgaagacaccgtgggagatttaa

SEQ ID NO: 470870 - DNA, 681 bp, Shigella flexneri; identical to SEQ ID NO: 465663

SEQ ID NO: 470871 - DNA, 855 bp, Shigella flexneri
atgagccgtcgtgaagctgcggcatccaggcgcaataaccgtgtattttttcgaagcggcaatgcatatgaagtcgaactgtggataccaacacgtaaaggccagcggctgtttctgtttcgcaataaatttgtccacagcggcagtggcaaaaacgagatttttttaatctgttccggtaccgacattaccgaagagcgccgcactcaggagcgactgcgtattctggcaaataccgacagtatcaccggactgccgaatcgtaacgcaatgcaggagttaatcgatcacgctattaatcaggcagataacaataaagttggggttgtgtatcttgatttggataattttaaaaaggtcaacgacgcctatgggcatttgtttggtgaccagttattacgcgacgtgtcattggctattttaagctgtctcgaacatgaccaggtgttggcgcgtccaggtggcgatgagtttctggtactggcatccaatacctcacaaagcgcgctggaagcaatggcatcacgaattttgacccgcttacgcctcccctttcgtattggtttaattgaagtttataccagctgttcagtaggtatttcgctctctcccgaacatggttcggacagcgcgactattattcgtcacgccgacacagcaatgtacacagcgaaggaaggcggacgaggacaattttgcgtttttactccagaaatgaatcagcgggtatttgaatatctctggctggataccaacttgcgtaaagcactggaaaacgatcagttggttatcgaaaatcacctagcgtggcgaagtgcgcagtctggaagcactagtacgttggcagtcacctga

SEQ ID NO: 470872 - DNA, 462 bp, Shigella flexneri
atgaaaaccgttagggagtccacaacgttgtacaactttctcggatcgcacaatccatactggcggttgacggaaagcagcgatgctttgcgcttttctaccaccaaaaccacagaacctgatcgtacattgcagttatctgccgaacaggctgctcgcatcagggaaatgacggtcatcacctccagcctgatgatgagtctgaccgtcgatgaaagcgatctttctgtgcatctggtaggacgaaaaatcaataaacgggaatgggctggcaacgcgtctgcatggcatgacacaccggcggttgctcgtgatttatcacacgggctttcctttgctgagcaggtagtttctgaagcacattccgcaatagtgattctcgacagccgggggaatatccaacgcttcaatcggttatgtgaagattacacagggttgaaagaacacgacgtcattgggtaa

SEQ ID NO: 470873 - DNA, 144 bp, Shigella flexneri
atgacttacatgaaattaacggcggctaaacgcattgttttttatatatttatttgtaatccagttttggaaaaacgccagttttcaaacgaaagtcagttaaaaaatctgcctggatataacgaaggtagagcggggaaataa

SEQ ID NO: 470874 - DNA, 1935 bp, Shigella flexneri
atgtttcaggacaacccgctgctagcgcagcttaaacagcaactgcattcccagacgccacgcgctgaaggggtggtaaaagccacagaaaaaggctttggcttcctggaagtcgacgcacaaaaaagttatttcattccgccgccgcagatgaaaaaagtcatgcatggcgaccgaattatcgcggtgatccacagtgaaaaagaacgtgaatccgcagagccagaagaactggttgaaccgttcctgactcgtttcgtgggtaaagttcagggcaaaaatgaccgtctgaccatcgttcctgatcatccacttttaaaagacgccattccttgccgcgcagcccgtggcctgaaccacgagtttaaagaaggcgactgggcggttgccgaaatgcgccgtcatccgctgaaaggcgatcgttctttctatgctgaactgacacaatacatcacttttggtgacgaccactttgtaccgtggtgggttacccttgcgcgccataatctggaaaaagaagcaccagacggcgtcgctaccgaaatgctcgatgaaggtctggttcgtgaagatctgacctcgctggattttgtcaccatcgacagtgccagcactgaagatatggatgacgcccttttcgctaaggcgctgccggatgacaaacttcagctgattgtggcgattgccgatccaaccgcgtggattgctgaaggcagcaagctggacaaagccgcgaaaattcgcgcattcaccaactatctgcctggcttcaacatccctatgctgcctcgcgagctttctgacgatctctgctcactgcgcgccaatgaagtccgcccggtactggcatgccgcatgacgctctccgctgatggcaccactgaagataatatcgaattctttgccgccaccatcgaatccaaagcgaagctggtgtatgaccaggtttctgactggctggaaaataccggtgactggaagcctgaaagtgaagcaattgccgaacaagtccgtttgctagcgcaaatttgccaacgccgcggcgagtggcgtcataaccacgcactggtgtttaaagatcgcccggattaccgctttattctcggtgaaaaaggtgaagtgctggatatcgtcgccgagcctcgtcgcattgccaaccgtatcgtcgaagaagcgatgattgccgctaacatttgtgcggcccgcgtactgcgcgataagctcggttttggcatctataacgtgcatatgggctttgatccggcgaatgccgacgcgctggcagcgttgctgaaaacgcacggtctgcatgtcgatgccgaagaagtgctcacgctggacggtttctgcaaactgcgtcgtgaactggatgcgcaaccaactggtttcctcgacagccgcattcgtcgcttccagtcatttgctgaaattagctctgaacccggtcctcactttggcctcggtctggaagcatacgccacctggacttcgccgatccgtaaatatggcgacatgatcaaccaccgtctgctgaaagcggttatcaaaggcgaaactgcgacgcgtccgcaggatgaaatcactgtccaaatggccgaacgtcgccgtctcaaccggatggcagaacgtgatgttggcgactggttatacgcacgcttcctgaaagataaagccgggaccggcacccgtttcgcggcggaaattgtcgatatcagccgtggcggcatgcgtgtgcgtttggttgataacggcgctatcgcctttattccggcacctttcttacacgctgtgcgcgatgaactggtttgcagccaggaaaacggcactgtacaaattaaaggtgaaacggtttacaaagtaactgacgttattgacgtcaccattgccgaagtccgcatggaaacccgcagcattattgcgcgcccggtcgcgtaa

SEQ ID NO: 470875 - DNA, 1128 bp, Shigella flexneri
atggaacaacgccacatcaccggcaaaagccactggtatcatgaaacgcaatccagtactacggagtatgacgttctgcctctggtcccggaagccgcaaaggtcagcgatccctttctgctcgacgtgatccttgatgaagagacgctggcccccttcctttcatggctggtccctgcgcgcgttcttgcagtggagttgttccctgaccagcttaccgtgacccgttcacaaaccttcaccgcttatgaacgcttgtcgacggccctgacggttgctcaggtttgcggcgtccagcggttatgtaactactattcggcgcgacttacgccgctccccggacctgattcctccagggaaagtaatcatcggttggcacaaatcacgcaatatgcccgccaactggctagctcgccttctattatcgacaaccgatcgcgccagcatctgaatgacgtcggtcttactgtctgggactgtgtgatcattaaccaaatcattggttttattggctttcaggcgcggacaattgcgacatttcaggcttatctcgggcatccggtacgctggttacccgggctggcgatacaaaactacgccgacgcgtcactgtttgctgatgaatcaatacgctggcgaagcagctatgaggtggaaaaactacctgaagagcacacaaaaagttcaactgcagaactttgccaactggccgaaacactctctctccaccctatttcactttcccttctcgaaaagttgttaaacagcacacgggtcaatgcacagccggataatcagcttgcggcgttgttatgcgcgcgtataaatggcagtcctgcttgtttttccacctgtatggattcatcaaatgaatataaaaaaatcagcacccttctgcgcaagggcgaaaatgaaattaaccgatgggctgaccgtcattctgttgagcgcgctaccgttcaggcgatacaatggctgacccgagcacccgatcgctttagcgccgcccagttcagccctttactcgaacacgaaaaatcatcaacgcagattattaatctgctggtatggagcgggctgtgtggctggataaatcgcttaaaaatcgcgttgggtgagacatattaa

SEQ ID NO: 470876 - DNA, 789 bp, Shigella flexneri
atgggttttctttccggtaagcgcattctggtaaccggtgttgccagcaaactgtccatcgcctacggtatcgctcaggcgatgcaccgcgaaggagctgaactggcattcacctaccagaacgacaaactgaaaggccgcgtagaagaatttgccgctcaattgggttctgacatcgttctgcagtgcgatgttgcagaagatgccagcatcgacaccatgttcgctgaactggggaaagtttggccgaaatttgacggtttcgtacactctattggttttgcacctggcgatcagctggatggtgactatgttaacgccgttacccgtgaaggcttcaaaattgcccacgacatcagctcctacagcttcgttgcaatggcaaaagcttgccgctccatgctgaatccgggttctgccctgctgaccctttcctaccttggcgctgagcgcgctatcccgaactacaacgttatgggtctggcaaaagcgtctctggaagcgaacgtgcgctatatggcgaacgcgatgggtccggaaggtgtgcgtgttaacgccatctctgctggtccgatccgtactctggcggcctccggtatcaaagacttccgcaaaatgctggctcattgcgaagccgttaccccgattcgccgtacagttactattgaagatgtgggtaactctgcggcattcctgtgctccgatctctctgccggtatctccggtgaagtagtccacgttgacggcggtttcagcatcgctgcaatgaacgaactcgaactgaaataa

SEQ ID NO: 470877 - DNA, 351 bp, Shigella flexneri
atggataaaataaaatcaaatgcgcgtgatttaagacgcaatctcactttgcaggaacgaaagctctggcgatatcttcgcagccgacgttttggtgatttcaaatttcgccgtcaacatccggtggggagctacattctcgattttgcttgctgctcggcgcgcgtagtcgttgagctggatggtgggcagcatgatttggcagttgcctatgataccaggcgcactagctggcttgagtcgcagggctggaccgtgctgcgtttctggaataacgagattgattgtaatgaggaggcggtgctggagattattctgcaggaactgaaccgccggtcaccctcaccctga

SEQ ID NO: 470878 - DNA, 807 bp, Shigella flexneri
atgatcgaaacgctgcttgaagtgcgtaatttaagtaaaacgttccgctaccggaccggttggtttcgtcgtcagaccgtagaagcggtaaaacccttgagctttacgctacgtgaaggccagacactggcgattattggcgagaatggttcgggtaaatccacactggcaaaaatgctggcgggaatgatagaacctaccagcggcgagttattgattgacgatcatccgctgcattttggcgattattccttccgtagtcagcgtattcgcatgatttttcaggatccttcgacctcgttgaatccccgtcaacgtatctcacaaattctggattttccactgcgcctgaacaccgacctggaaccggaacagcgtcgcaaacagattattgaaacgatgcgtatggttgggctgctaccggatcacgtcagttactatccgcatatgttggcacccggacaaaaacagcgtctgggtctggcgcgcgcgctgatattgcgcccaaaagtcattattgccgatgaagccctcgcttcactggatatgtcaatgcgttcgcagttgattaatctgatgctggagttacaggaaaaacagggcatttcgtatatttatgttacccagcatatcggaatgatgaagcacattagcgaccaggtgctggtgatgcatcagggcgaggttgtcgagcgaggcagcaccgcggatgtgctggcatcgccgctgcatgaactcaccaaacggctgattgccgggcactttggcgaagcattgacagcggatgcgtggcgtaaagatcgctaa

SEQ ID NO: 470879 - DNA, 993 bp, Shigella flexneri
atgccattactcgatattcgtaacctgaccattgaatttaaaaccggtgatgagtgggttaaagccgtcgaccgggtaagtatgaccttaaccgaaggtgaaatccgcggtcttgttggtgaatccggttccggcaagagtttgattgcgaaagcgatttgtggggtgaataaagataactggcgtgttactgctgaccgtatgcgttttgatgatatcgatttgctgcgtctctccgcacgcgaacggcgcaaactggttggccataacgtgtcgatgattttccaggaaccgcagtcgtgtcttgacccttcagaacgtgtgggtcgccagttgatgcaaaacatcccagcctggacctataaaggccgttggtggcagcgttttggctggcgcaaacgccgtgccattgaactgctgcaccgcgtggggattaaagatcacaaagatgcgatgcgcagttttccctatgagttgaccgaaggtgaatgtcagaaagtgatgatagccattgcactggcgaatcaaccgcgtctgctgattgctgacgaaccgacaaactcaatggagccaacaacccaggcgcaaatctttcgcctgctgacgcgtctcaaccaaaacagcaataccactattttgcttatcagccatgacttacaaatgcttagccaatgggcggataaaattaacgtgctttactgcggtcaaacagtggaaaccgcgccgagtaaggagttggtgacgatgccacatcatccttatacccaggcgctgatccgcgcgataccagacttcggcagcgcgatgccgcataaaagtcgcctcaatactctacccggcgctatcccattgctggaacagttaccgattggttgtcgtctggggccacgttgcccgtatgcacaacgagaatgcattgtgacgccacgtttgacgggggcgaaaaatcatctctatgcctgtcatttcccgctgaacatggagaaaaagtga

SEQ ID NO: 470880 - DNA, 891 bp, Shigella flexneri
atgccttacgatagcgtatacagcgaaaagcgcccgccgggcacgctgcgtaccgcctggcgcaaattttatagtgacgcctctgcgatggtcggcctgtacggctgcgcgggactggctgtactgtgtatttttggcggctggtttgcgccttacggcatcgaccagcaatttctcggttatcaattattgccgccatcatggtcgcgctatggcgaagtttctttcttcctggggactgacgacctcggacgtgatgttttaagccgtttactgagcggagctgcgccaaccgtgggtggcgcatttgtggtgacgcttgccgcgacgatctgtggcctggtactgggcaccttcgccggggcgacacacggcctccgctcagcggtgcttaaccatattctggataccttactggcgatcccttcgctgctgttggcaattatcgttgtagcgtttgccggaccgagtttgtcccacgctatgtttgctgtctggctggcattgctgccgcgtatggtacgttcgatttacagcatggtgcatgacgaactggaaaaagagtacgttatcgccgcccgtctggatggcgcatcaacgctgaatattctctggtttgctgtgatgccaaacatcaccgccgggctggtcaccgagatcacccgcgcactgtcgatggcaattctcgatatcgccgcgctgggctttctcgatctcggcgcacaactcccctcgcctgaatggggagcgatgctcggtgatgcgctggaactgatttatgtcgccccgtggactgtcatgctgccaggtgcggcaattatgattagcgtgttgttggttaacctccttggcgatggcgttcgtcgtgcgattattgcgggggtggaataa

SEQ ID NO: 470881 - DNA, 966 bp, Shigella flexneri
atgattatcttcaccttacgccgcattttgttattgattgtcaccttgttcctgctgaccttcgttggcttcagcttgagctatttcactccacacgcgccgttacaaggcgcgtcactgtggaatgcctgggtgttctggtttaatggcctgatccactgggattttggtgtttccagcattaacggtcaaccaattgccgaacagttaaaagagctcttcccggcgacgatagaactgtgcatcctcgccttcggttttgcgctgattgttggcatccccgtggggatgattgccgggattacgcgccataagtggcaggataacttgatcaacgccatcgccttactgggcttttcaatcccggtgttctggctggcgcttctgttgacactgttttgttcactcacgctaggttggttgcccgtttcagggcgtttcgatctgctctacgaagtgaaaccgattaccggttttgcgttgattgatgcctggctttcggactcaccatggcgggatgaaatgatcatgagcgcaatccgccatatgatattgcccgtgatcaccctgtcggttgcgccaacaactgaagtgatccgcctgatgcgtatcagcactattgaagtgtatgaccagaactatgtaaaagcggcggcgacccgcggtttgtcgcgctttactattttgcgtcgccacgttctgcataacgcgttaccgccggttattcctcgcctgggcttacagttttccaccatgctgacgctggcgatgatcaccgaaatggtttttagctggccgggtttagggcgctggttaattaacgccatccgccagcaggattacgcagccatttccgccggagtgatggtgtgtggctcactggtcattattgttaacgtgatttctgatattttgggtgccatggctaaccctctgaaacataaggaatggtatgccttacgatag

SEQ ID NO: 470882 - DNA, 1644 bp, Shigella flexneri
atgcgccaggtattatcgtctcttttggtgattgctggacttgtgagtggtcaggcaatcgccgcgcctgaatcccccccgcatgctgatatccgcgacagcggttttgtctattgcgtcagcgggcaagtcaacacctttaacccatccaaagcgagcagtgggttaattgtcgatacccttgccgcccagttttatgatcgactgctggatgtcgatccctatacctatcgcctgatgccggaacttgccgaaagctgggaagtactcgacaacggcgcgacctatcgcttccacctgcgtcgcgatgttccgtttcaaaaaaccgactggtttactcccactcgtaaaatgaatgccgacgatgtggtgtttaccttccagcgaatttttgaccgcaacaacccgtggcataacgtcaacggcagcaacttcccctacttcgacagcctgcaatttgccgataacgtgaaaagcgtccgcaaactggataatcataccgttgagttccgactcgcccagccggatgcttcttttttgtggcacctcgcaacccattatgcttcggtcatgtcggcagaatatgcccggaagttagagaaagaagatcgccaggagcaactcgaccgtcaaccggtcggcaccggtccgtatcagttgtcggaataccgcgccgggcaatttattcgcctacaacgtcatgatgacttctggcgcggtaaaccgttaatgccgcaggtagtggtggatttaggctccggcggcaccggacgtctgtcgaaactcctgaccggggaatgcgacgttctggcctggcctgctgccagccagctatccattttgcgtgacgacccgcgcttgcgtttaacgctgcgtcctgggatgaacgtcgcctatctggcatttaacaccgccaaaccgccgctaaataatcccgctgtccgccatgcactggcactggcgattaataaccagcgcctgatgcaatccatctattatggtacggctgaaacggcggcctctattttaccgcgcgcctcgtgggcctatgacaacgaggctaaaattactgaatacaatccggcgaaatcgcgcgaacagttgaaggcgttggggctggaaaacttaacgctgaaactgtgggtgcccacacgttcgcaggcgtggaaccccagtccactgaaaactgccgaactgattcaggcggatatggcgcaggttggcgtaaaagtggtgattgtgccggtagaaggtcgctttcaggaggcgcggttgatggatatgagccatgatctgacgttatccggttgggcgacggacagtaacgacccggacagtttcttccgtccgttactgagctgcgcggcaattcattcacagaccaacctcgcccactggtgcgatccgaaattcgacagcgtgttgcgtaaggcgctctcctcgcagcagctggcagcgcgtattgaagcctatgacgaagcgcagagtattctggcgcaggaattacctattctgccgctggcgtcgtcattgcgtttgcaggcctatcggtacgatatcaaaggtctggtacttagcccgtttggtaacgcctcctttgctggggtgtatcgcgagaaacaggatgaggtgaaaaaaccatga

SEQ ID NO: 470883 - DNA, 246 bp, Shigella flexneri
atgaaccacgatatcccgctaaaatattttgatattgccgatgagtacgcgaccgaatgcgcagagcctgtcgcagaggctgaacgcacaccgctggcccactacttccagttactgctcacccgtttgatgaacaatgaagagatcagcgaagaagcccaacatgaaatggctgctgaagcggggattaatcccgtacgcattgatgagatcgcagagtttttgaatcaatggggtaatgagtaa

SEQ ID NO: 470884 - DNA, 1386 bp, Shigella flexneri
atggctattaattcaccactgaatattgctgcgcaacccggcaaaacccgtctgcgaaaatcactgaaattgtggcaggtggtaatgatgggtctggcctatctcacgccgatgaccgtatttgatacttttggtattgtctccggcattagcgacggtcacgttccggcgtcctatttgctggcgctggcgggcgtgctgtttaccgctatcagctacggcaaactggttcgccagtttccggaggccggttcggcctatacctacgcgcaaaagtcgattaacccgcacgtcggatttatggtcggctggtcatcactgctggattatctctttttgccaatgatcaacgttttgttggcgaaaatctatctctccgccctcttcccggaagtgccgccgtgggtgtgggtggtaaccttcgtcgccattttaaccgccgcgaatctgaagagcgtcaacctggtcgctaacttcaataccctgtttgtactggtgcaaatctccatcatggtggtgtttatcttcctggtggttcagggactgcataaaggagaaggcgttggcaccgtctggtcacttcagccgtttatcagcgagaacgcgcacctgatcccgattattaccggtgcgacgattgtctgtttctcgttcctcggtttcgatgcggtgaccacgctttcggaagagacgccggacgccgcacgcgtgatcccgaaagccatcttcctgacggcggtatacggcggcgttatctttatcgcggcgtcgttctttatgcagctgttctttcccgatatcagccgctttaaagacccggacgccgcactgcctgaaattgcgttgtacgtcggcggcaagctctttcagtcgattttcctctgcaccacgtttgtgaacacattagcgtctggcctggcttcacatgccagcgtgtcgcgtctgctgtatgtgatggggcgtgacaatgtgtttccggagcgcgtgtttggctatgtgcaccccaaatggcggactccggcactcaacgtcattatggtcgggattgtcgcgctgtcggcgctgttctttgatttagtcaccgcgacagcactgattaacttcggtgctctggtggcgtttaccttcgtgaatctgtcggtgtttaatcatttctggcggcgtaaaggaatgaataaaagctggaaggatcacttccactatttgctgatgccgctggttggcgcgctgacggtgggtgtgctgtgggttaacctagagtcaacgtcactgacactcggtctggtatgggcttcgttaggcggcgcatatttgtggtatctgatccgccactatcgcaaagtgccgctgtacgaaggtgacagaacgccggtgagcgaaacgtaa

SEQ ID NO: 470885 - DNA, 1419 bp, Shigella flexneri
atggaaaccaatatcgttgaagtagagaactttgttcagcagtcagaagagaggcggggtagcgcctttacgcaggaagtgaaacgctacctggagcgctacccgaatacgcaatatgttgatgttttacttactgatttgaatggttgcttccgtggaaaacgtatccctgtttcaagcctgaagaagctcgagaaagggtgttatttcccggcctcggtatttgcaatggatattctgggcaacgtagtagaagaagcaggtctgggtcaggaaatgggcgagccggatcgtacctgtgttcctgttctcggttccttaactccttctgccgccgatccagagtttatcggtcagatgctcctgaccatggtcgatgaagatggcgctccctttgacgttgagccgcggaacgttcttaaccgcctgtggcagcagctgcgccagcgcggattgttcccggttgtagcggtagagctggagttctatttactggatcgccagcgcgacgctgaaggggatctgcaaccgccctgcgcgcctggcaccgatgaccgcaatacacaaagccaggtttactccgttgataacctcaaccacttcgccgacgtgctcaatgatattgatgaactggcgcagttgcagctgattccggcagatggcgcggtcgctgaggcctcgccgggtcagtttgaaatcaacctttaccatactgataacgtgctggaagcctgcgatgatgcgctggcactaaaacgcctagtgcgtctgatggcagaaaagcataagatgcacgccacttttatggcgaagccgtatgaagagcacgcgggcagcgggatgcatatccatatcagtatgcaaaataatcgtggcgagaatgtgctttctgacacagaaggcgaagattcgccgctgctgaaaaagatgctcgccgggatgattgacctgatgccgtcgtcgatggcgttgctggcaccaaacgtgaactcgtatcgccgcttccagccgggaatgtatgtgccgacgcaggcgtcgtggggccataacaaccgcaccgtcgccctgcgtattccgtgcggtgaccgtcataatcaccgcgtggaatatcacgtggcgggtgccgatgccaacccatatctggtgatggcagcgatttttgccggtattttgcatggccttgataacgagctgccgttgcaggaagaagtcgaaggcaacgggctggaacaggaaggcttacccttcccgattcgccagagcgatgccctgggtgagtttatcgagaatgatcacctgcgccgctatttaggcgaacggttttgccatgtgtatcacgcctgtaaaaatgatgagctgttgcagtttgagcgcctcatcacagaaacagaaattgagtggatgttgaaaaacgcgtaa

SEQ ID NO: 470886 - DNA, 765 bp, Shigella flexneri
atggaaaatataatgaacaatccggttatcggtgtcgtaatgtgcaggaacaggcttaagggtcatgcgacccagactctgcaagaaaagtacctgaatgccatcatccacgcaggcggcttgccaattgcgctaccacatgcgctggcggaaccgtcgttacttgaacaacttttgccgaaactcgatggcatttatcttcctagtagtcccagcaatgtgcagccgcacctatatggtgaaaacggcgatgagcctgacgccgatcccgggcgtgatcttctgagcatggcgataattaatgccgcactcgaaaggcgcatccccattttcgccatctgccggggtttacaagaactggtggtggcaaccggtggttcgttgcatcgcaagctgtgcgaacagcctgaattgctggaacatcgggaagatcccgaactgccggtggaacagcaatatgcaccgtcgcatgaagttcaggttgaagaggggggattactgtctgcgttgttacctgaatgtagcaacttttgggtaaactctctacatggacaaggggcgaaggtcgttagcccacggttgcgtgttgaagctcgctcgccggatggcttagttgaggcggttagcgtcatcaatcatccttttgcgctgggcgtacagtggcacccggaatggaacagtagcgagtacgcgctttcgcgtatattgttcgagggctttatcaccgcttggcagcaccatatcgctgaaaaacagcgactctga

SEQ ID NO: 470887 - DNA, 558 bp, Shigella flexneri
atgagtgatgagggactggcgccaggaaaacgcttgtcggaaatccgccagcagcaggggctttcacaacgtcgtgccgccgaactctccgggctgactcacagtgctatcagtacgatagaacaagataaagtcagccctgccatcagtacgctgcaaaagctgctgaaggtgtatggtctgtcactctcggaattcttttccgagccggaaaaacctgatgagccgcaggtcgtcattaatcaggacgacttaattgagatgggcagtcagggtgtgtcaatgaagctggttcataacggtaacccgaatcgcacgctggcgatgatctttgaaacgtaccagccgggcacaaccactggggaaagaattaagcatcagggtgaggaaataggcacagtactggaaggtgaaattgttctgacgattaatggtcaggattaccacctcgtcgcggggcaaagttatgccattaataccggcatcccgcacagtttcagtaatacgtcggcaggtatttgccgaattatcagcgcccatacgcccaccacgttttaa

SEQ ID NO: 470888 - DNA, 1488 bp, Shigella flexneri
atgaattttcatcatctggcttactggcaggataaagcgttaagtctcgccattgaaaaccgcttatttattaacggtgaatatactgctgcggcggaaaatgaaacctttgaaaccgttgatccggtcacccaggcaccgctggcgaaaattgcccgcggcaagagcgtcgatatcgaccgtgcggtgagcgcagcacgcggcgtatttgaacgcggcgactggtcactctcttctccggctaaacgtaaagcggtactgaataaactcgccgatttaatggaagcccacgccgaagagctggcactgctggaaactctcgacaccggcaaaccgattcgtcacagtctgcgtgatgatattcccggcgcggcgcgcgccattcgctggtacgccgaagcgatcgacaaagtgtatggcgaagtggcgaccaccagtagccatgagctggcgatgatcgtgcgtgaaccggtcggcgtgattgccgccatcgtgccgtggaacttcccgctgttgctgacttgctggaaactcggcccggcgctggcggcgggaaacagcgtgattctaaaaccgtctgaaaaatcaccgctcagtgcgattcgtctcgcggggctggcgaaagaagcaggcttgccggatggtgtgttgaacgtggtgacgggttttggtcatgaagcggggcaggcgctttcgcgtcataacgatatcgatgccatcgcctttaccggctccacgcgtacgggtaaacaactgctgaaagacgcgggtgatagcaacatgaaacgtgtctggctggaagcgggcggcaaaagcgccaacatcgttttcgccgattgtccggatctgcaaaaagcggcaagcgccaccgccgcaggcatcttctacaaccagggccaggtgtgcatcgccggaacgcgtttgttactggaagagagcatcgccgatgaattcttagccctgttaaaacagcaggcgcaaaactggcagccgggccatccacttgatcccgcaaccaccatgggcaccttaatcgacagcgctcacgctgactcggtacacacctttattcgtgaaggcgaaggcaaggggcaactgctgctggatggtcgcaacgccgggctggcagcggccatcggcccgaccatcttcgtggatgtggacccgaatgcgtccttaagccgcgaagagattttcggtccggtgctggtggtcacccgtttcacatcagaagatcaggcgctgcagcttgccaacgacagccagtacggccttggcgcggcggtatggacgcgcgacctctcccgcgcgcaccgcatgagccgacgcctgaaagccggttccgtcttcgtcaataactacaacgacggcgatatgaccgtgccgtttggcggctataagcagagcggcaacggtcgcgacaaatccctgcatgcccttgaaaaattcactgaactgaaaaccatctggataagcctggaggcctga

SEQ ID NO: 470889 - DNA, 1281 bp, Shigella flexneri
atgaccgaacataccagcagttactacgccgccagtgcgaataaatatgcaccattcgacacactgaatgagtcaatcacctgcgacgtttgcgtggttggcggcggctataccgggctctcctccgcgctgcatctggcggaagcgggctttgacgtagtggttctcgaagcctcacgcatcggctttggcgcaagcgggcgcaatggcgggcagcttgtgaactcctacagccgcgacatcgacgtgatcgaaaaaagctacggcatggacaccgcccgtatgctcggcagcatgatgttcgagggtggcgagatcatccgcgaacgtatcaaacgttatcagattgactgcgactaccgccccggcggtctgtttgtggcgatgaatgataaacaactcgccacactcgaagagcagaaagagaactgggaacgctacggcaataaacagctggagctgctggacgtcaacgctattcgccgcgaggtcgccagcgatcgctacactggtgcgctgctggatcacagcggtgggcatattcacccgctaaacctcgccattggtgaagccgatgccatccgcctgaacggcgggcgcgtgtatgagctttccgccgtgacgcagatccagcacaccacgccagccgtggttcggactgccaatggtcaggtgacggcgaagtatgtgattgtcgccgggaatgcgtatctgggcgataaagtagagccggaactagcgaaacgcagcatgccgtgcggcacgcaggtgatcaccaccgaacggctgtcggaagatttagcccgttcgctgatcccgaaaaactactgtgtggaagactgtaactatctgcttgattactaccgtcttaccgccgacaaccgcctgctgtacggcgggggtgtagtgtatggtgcacgcaacccggatgacgttgagcgtcttgtggtaccgaaactactaaaaaccttccctcagttgaagggcgtgaaaattgattaccgctggacgggcaacttcctgctgaccttgtcgcacatgccgcagttcggccgccttgataccaacatctattacatgcagggttacagcggccacggcgtcacctgtacccatcttgccgggcgtttgattgctgaactgctgcgcggtgacgccgagcgtttcgatgccttcgccaatctgccgcattacccgttccccggcgggcgcacgctgcgcgtgccatttaccgcgatgggcgcggcttattacagcctgcgcgatcgtctgggcgtttaa

SEQ ID NO: 470890 - DNA, 1266 bp, Shigella flexneri
atgagcaacaatgaattccatcagcgtcgtctttctgctaccccacgcggggttggcgtgatgtgtaacttcttcgcccagtcggcagaaaacgctacgctgaaggacgtagagggcaacgaatacatcgatttcgccgcaggcattgcggtgctgaataccgggcatcgccaccctgatctggtcgcggcggtggagcagcaattgcaacagtttacccacacggcgtatcagattgtgccgtacgaaagctacgtcacgctggcggagaaaattaacacccttgccccagtgagcgggcaggctaaaaccgcattcttcactaccggcgcggaagcggtggaaaacgcggtgaaaattgctcgcgcccataccggacgacctggcgtgattgcgtttagcggtggcttccacggtcgtacatatatgaccatggcgctgaccggaaaagttgcgccgtacaaaatcggcttcggcccgttccctggttcggtgtatcacgtaccttatccgtcagatttacacggcatttcaacacaggactccctcgacgccatcgaacgcttgtttaaatcagacatcgaagcgaagcaggtcgcggccattattttcgaaccggtgcagggcgagtgcggtttcaacgttgcgccaaaagagctggttgccgccattcgccgcctgtgcgacgagcacggtattgtgatgattgccgatgaagtgcaaagcggctttgcgcgtaccggtaaactgtttgccatggatcattacgccgataagccggacttaatgacgatggcgaaaagcctcgcgggcgggatgccgctttcgggcgtggtcggtaacgcgaatattatggacgcgcccgcgccgggcgggttgggtggcacctacgccgggaacccgctggcggtggctgccgcgcacgcggtgctcaatattatcgacaaagaatcactctgcgaacgcgcgaatcaactgggccagcgtctcaaaaacacgttgattgatgccaaagaaagcgttccggccattgctgcggtacgcggcctggggtcgatgattgcggcagagtttaacgatccgcaaacgggcgagccgtcagcggcgattgcacagaaaatccagcaacgcgcgctggcgcaggggctgctcctgctgacctgtggcgcatacggcaacgtgattcgcttcctgtatccgctgaccatcccggatgcgcaattcgatgcggcaatgaaaattttgcaggatgcgctgagcgattaa

SEQ ID NO: 470891 - DNA, 978 bp, Shigella flexneri
atggccgaatacaaagataatttacttggtgaggcgaacagctttctcgaagtgctggaacaggtttcgcatctcgcaccgctggacaaaccggtgctcatcatcggcgaacgcggcaccggtaaagagttgattgccagccgcctgcattatctctcctcccgttggcaagggccgtttatttcccttaactgcgcggcgttaaatgaaaatctgctggattccgaactgtttggtcacgaagcgggggcgtttaccggtgcgcaaaaacgtcatcctgggagatttgaacgtgccgacggcggtacgctatttcttgatgaactcgctacggcaccgatgatggtgcaggaaaaattattgcgtgtgattgagtacggtgaactggagcgcgttggcggtagccagccgttgcaggtgaatgtgcggttggtatgcgcgacgaatgccgatctcccggcgatggtcaatgaaggtacttttcgcgctgacctgctcgaccggctggctttcgatgtagtgcaactgccgcccctgcgcgagcgcgaaagcgacattatgctgatggcagaacactttgccattcagatgtgtcgggaaatcaagctgcctctgttcccggggtttacggagcgcgccagagaaacattgctgaattatcgttggccgggaaatattcgtgaattgaaaaacgtggtggaacgttcagtgtatcgccacggcaccagcgattatccgcttgatgacatcattattgatccctttaaacggcgtccacctgaagaagccatcgccgtttcagaaaatacctcgcttccgacgctgccgctggatttacgcgagtttcagatgcagcaggaaaaagagttgctgcaactcagtttgcaacaggggaaatataaccagaagcgcgcggctgaattactggggttaacttatcatcagttccgcgcgttgttgaaaaagcaccagatttag

SEQ ID NO: 470892 - DNA, 669 bp, Shigella flexneri
atgggtattttttctcgctttgccgacatcgtgaatgccaacatcaacgctctgttagagaaagcggaagatccacagaaactggtgcgtctgatgatccaggagatggaagatacactggttgaagtacgttctacttcggcgcgtgcgttggcagaaaagaaacagctgactcgccgtattgaacaagcgtcggcgcgtgaagttgaatggcaggaaaaagccgaactggcgctgctgaaagagagagaggatctggcacgtgcagcgttaattgaaaaacagaaactgaccgatctgattaagtccctggaacatgaagtgacgctggtggacgatacgctggcacgcatgaagaaagagattggcgagctggaaaacaaattgagcgaaacacgcgctcgccagcaggcattgatgttacgtcatcaggcggcaaactcgtcgcgcgatgtgcgtcgtcagctggacagtggcaaactggatgaagcaatggctcgtttcgaatctttcgaacgtcgtattgaccagatggaagcggaagcagaaagccacagcttcggtaaacaaaaatcgctggacgatcagtttgccgaactgaaagccgatgatgcaatcagcgaacaactggcacaattaaaagccaaaatgaagcaagacaatcaataa

SEQ ID NO: 470893 - DNA, 225 bp, Shigella flexneri; identical to SEQ ID NO: 458939

SEQ ID NO: 470894 - DNA, 360 bp, Shigella flexneri
atggcgggcattaatctcaataaaaagttatggcgtattccacagcagggcatggtccgcggcgtctgcgccgggattgccaactattttgatgtaccggtaaaactggtgcgtatcctggtggtgctgtcgattttcttcggtctggcgctgtttaccctggttgcttacatcattttgtcatttgcgcttgatccaatgccggacaacatggcctttggtgagcagctaccttccagcagcgaattgctggatgaagtcgaccgtgaactggcggcaagtgaaacgcgtttacgcgagatggaacgttatgtcacttccgatactttcacgttacgtagccgtttccgtcaactgtga

SEQ ID NO: 470895 - DNA, 222 bp, Shigella flexneri
atgaatactcgctggcaacaggccgggcaaaaggtgaagcttggtttcaaattagcaggcaagctggtacttcttaccgcactgcgctatggcccggcgggtgtggcgggctgggcgataaaatcagttgctcgccgaccgctgaaaatgttgctggctgtggcgctggaaccgctgttaagttgggctgctaataaactggcacagcgttataaaaggtga

SEQ ID NO: 470896 - DNA, 348 bp, Shigella flexneri
atggcaattttcatccatagaaggacgcttacatgtttaaaaaaaggcttacttgctctggcactggtgttttcactgcccgttttcgccgctgaacactggatcgatgttcgtgttccagagcagtatcagcaagagcacgttcagggggccatcaatattcccctgaaggaagtgaaagagcgcattgccaccgccgttccggataaaaacgacaccgtgaaagtgtattgcaatgccggacgccagtccgggcaggcaaaagagctccttagcgagatgggatatacccacgttgagaacgccggtggcctgaaagacatcgcaatgccgaaggtcaaaggttaa

SEQ ID NO: 470897 - DNA, 1131 bp, Shigella flexneri
atgaaacagaaaattacggattacatggacgaaatctacggtggaacatttaccgcaactcatttacagaaacttgtaacgcgtcttgagagtgcgaaacgattaattacacagcgacgtaaaaaacactgggatgaaagtgatgtcgtgttaattacctatgccgatcaatttcacagtaatgatttaaaaccactacccatatttaatcagttctaccatcaatggctgcaaagcattttttcacatgttcatttattacctttttacccatggtcatctgatgatggattttcggtaattgattatcatcaggtcgccagtgaagcgggggagtggcaggatattcagcaactcggtgaatgcagtcatttaatgtttgattttgtctgcaaccatatgtctgcaaaaagtgaatggtttaaaaactatttacaacagcttccgggttttgaagatttctttattgcggttgatccgaaaaccgatctcagtgccgtcacccttccgcgtgcgttaccgctattaacgccgtttcaaatggatgataattccacgcgccatttatggaccacctttagtgacgatcaaattgacctgaattaccgtagccctgaagtgttgctggcgatggtggatgttttactctgttaccttgagaaaggtgctgagtatgtccgcctggatgccgttggctttatgtggaaagagccgggaacaagctgcatccatctggaaaaaacacatctgattatcaagctgttacggtcgattattgatgacgtagcaccaggtacagtgatcattaccgaaaccaatgttccgcacaaagacaacattgcttactttggcaacggtgatgacgaagcgcatatggtgtaccagttctcgctgccgccgctggtgttacatgcggtgcaaaaacagaacgtcgaggcgctgtgccagtgggcgcaaagtctgagcttgccctccagtaaaacgacctggtttaacttcctcgcctctcacgatggcatcgggttgaacccactgcgtggcttgcttccagaaagcgaaatattagcgctggtcgaggcattacagcaggaaggtgcattagtaggtaatgctgccaacttactgatttag

SEQ ID NO: 470898 - DNA, 1137 bp, Shigella flexneri
gtgtccgttaaactcaggctacctcaatacaagcaaaaactttctcactggctgtcacccttgctggaaccgggtgaagatgtttatcagctttcgggtaacgatctcgcgctgcgactgaatacagaatcgcaccaggagcgcattaccgcactggatagtcatctcaagcaatttcgtttcttttgggatgggatgccgatgcaaccgcagattggcgtcagttactgctatgtgcgctcgccagtgaatcatatctacctgctgctgggagagctaaatacggtcgccgaactttccatcgtgaccaacgccccggaaaatatgcagcgttgcggggcaatgtatttgcaacgcgaattgaaagataaagtcgcgatgatgaatcgactacagcaggcgctggaacacaaccattttttcctgatggcccagccgattaccggtatgcgtggtgatgtttaccatgaaattcttctgcgcatgaaaggtgagaatgatgaactgatcggccccggtagcttcttgccggtcgcgcacgaatttggtttatcgtcgagtatcgacatgtgggtcattgagcatacgctgcaatttatggctgaaaacagagcgaagatgcccgctcaccgttttgctattaatctgtctccaacctcggtatgtcaggctcgttttcctgttgaagtcagtcagttgctggctaaatatcagattgaagcgtggcaacttatttttgaagtcaccgaaagtaatgctctgaccaatgttaagcaggcgcaaatcaccttgcagcatcttcaggaattaggctgccagattgcgattgatgatttcggcaccggctacgccagctatgcacggcttaaaaatgtgaatgccgatctgcttaaaattgacggcagctttatccgcaatattgtgtcaaatagtctggattatcagattgtggcgtcgatttgccatctggcgcgaatgaagaaaatgcgggtagtggcagagtacgttgaaaacgaagagatccgcgaggcggtgctctctttggggatcgattatatgcagggttatcttattggtaagccgcaaccgttaattgatacgctgaatgaaatcgaacccattcgcgaaagtgcctga

SEQ ID NO: 470899 - DNA, 1542 bp, Shigella flexneri
atgccaatacacgataaatcccctcgtccgcaggagtttgctgcggtcgatcttggttcaaacagttttcacatggtcatagcccgtgtggtagatggtgccatgcagattattggccgcctgaaacagcgggtgcatctggcggacggcctggggccagataatatgttgagtgaagaggcaatgacgcgcggtttgaactgtctgtcgctgtttgccgaacggctacaagggttttctcctgccagcgtctgtatagtcggcacccatacgctgcgtcaggcgctgaacgccactgactttctgaaacgcgcggaaaaggtcattccctacccgattgaaattatttccggtaatgaagaagcccgtctgatttttatgggcgtggaacatacccaaccggaaaaaggtcgcaaactggttattgatattggcggcggatctacggaactggtgattggtgaaaatttcgaacctattctcgttgaaagccgccggatgggttgtgtcagctttgcccagctttattttcctggcggggtcatcaataaagagaattttcagcgcgctcgcatggcggcagcacaaaaactggaaactttaacctggcaattccgtattcagggctggaacgttgcaatgggcgcttccggtaccataaaagccgcccatgaagtgttaatggaaatgggcgagaaagacgggataattaccccggaacgtctggaaaaactggtaaaagaaattttacgtcaccgtaatttcgcatcgctgagtttaccgggtctttccgaagagcggaaaacagtcttcgttcctggactggcgattttatgtggtgtgtttgatgctttagccatccgtgaactgcgcctttctgacggggcgttacgcgaaggcgtactgtatgaaatggaaggacgtttccgtcatcaggatgtgcgtagtcgcaccgccagcagcctcgccaaccagtatcacatagacagcgaacaggcccgacgagtgctggataccactatgcaaatgtacgaacagtggcgggaacagcaaccgaagctggcgcatccgcaactggaggcgctactgcgatgggctgccatgctgcatgaggtcgggttgaatatcaaccacagcggtttgcatcgccactccgcttatattctgcaaaacagtgacttgccgggttttaatcaggaacagcagctgatgatggcgacactggtgcgctatcaccgtaaagcgattaagctcgacgatctgccgcgctttaccttgtttaagaagaaacagttcctgccactgatacagctattgcgccttggcgtattactaaacaatcaacgtcaggcaaccaccacaccgccaacattgacactgattactgatgacagtcactggacactgcgtttcccgcatgactggtttagtcagaatgcgctggtactgcttgatctggaaaaggagcaagaatactgggaaggcgtggctggctggcggttgaaaattgaagaagaaagtaccccagaaatcgccgcttaa

SEQ ID NO: 470900 - DNA, 2067 bp, Shigella flexneri
atgggtcaggaaaagctatacatcgaaaaagagctcagttggttatcgttcaatgaacgcgtgcttcaggaagcggcggacaaatctaacccgctgattgaaaggatgcgtttcctggggatctattccaataaccttgatgagttctataaagtccgcttcgctgaactgaagcgacgcatcattattagcgaagaacaaggctccaacgctcattcccgccatttactgggcaaaattcagtcccgggtgctgaaagccgatcaggaattcgacggcctctacaacgagctattgctggagatggcgcgcaaccagatcttcctgattaatgaacgccagctctccgtcaatcaacaaaactggctgcgtcattattttaagcagtatctgcgtcagcacattacgccgattttaatcaatcctgacactgacttagtgcagttcctgaaagatgattacacctatctggcggtggaaattatccgtagcgatagcatccgttacgcgctgctggagatcccatcagataaagtgccgcgctttgtgaatttaccgccagaagcgccgcgtcgacgcaagccgatgattcttctggataacattctgcgttactgccttgatgatattttcaaaggcttctttgattatgacgcgctgaatgcctattcaatgaagatgacccgcgatgccgaatacgatttagtgcatgagatggaagccagcctgatggagttgatgtcttccagtctcaagcagcgtttaactgctgagccggtgcgttttgtttatcagcgcgatatgcccaatgcgctggttgaagtgttacgcgaaaaactgactatttcccgctacgactccatcgtccccggcggtcgttatcataattttaaagactttattaatttccccaatgtcggcaaagccaatctggtgaacaaaccactgccgcgtttacgccatatttggtttgataaagcccagttccgcaatggttttgatgccattcgcgaacgcgatgtgttgctctattatccttatcacacctttgagcatgtgctggaactgctgcgtcaggcttcgttcgacccgagcgtactggcgattaaaattaacatttaccgcgtggcgaaagattcacgcatcatcgactcgatgatccacgccgcacataacggtaagaaagtcactgtggtggttgagttacaggcgcgtttcgacgaagaagccaacattcactgggcgaagcgcctgaccgaagcaggcgtgcacgttatcttctctgcgccggggctgaaaattcacgccaaactgttcctgatttcacgtaaagaaaacggtgaagtggtccgttacgcacacatcgggaccgggaactttaacgaaaaaaccgcgcgtctttatactgactattcgttgctgaccgcagatgcgcgtatcaccaacgaagtacggcgggtatttaactttattgaaaacccataccgcccggtgacatttgattatttaatggtgtcaccgcaaaactctcgccgtctgttatatgaaatggtagaccgcgaaatcgccaacgcgcagcaagggctgcccagtggtatcaccctgaagctaaataaccttgtcgataaaggcctggttgatcgtctgtatgcggcctccagctccggcgtaccggttaatctgctggttcgcggaatgtgttcgctgatccccaatctggaaggcattagcgacaacattcgtgccatcagtattgttgaccgttaccttgaacatgaccgggtttatatttttgaaaatggcggcgataaaaaggtctacctttcttccgccgactggatgacgcgcaatattgattatcgtattgaagtggcgacaccgctgctcgatccgcgcctgaagcagcgggtgctggacatcatcgacatattgttcagcgatacggtcaaagcacgttatatcgataaagaactcagtaatcgctacgttccccgcggcaatcgccgcaaagtacgggcgcagttggcgatttacgactacatcaaatcactcgaacaacctgaataa

SEQ ID NO: 470901 - DNA, 639 bp, Shigella flexneri
atgaatattgtggtgcttatttccggcaacggaagtaatttacaggcaattattgacgcctgtaaaaccaacaaaattaaaggcaccgtacgggcagttttcagcaataaggccgacacgttcggccttgaacgcgcccgccaggcgggtattgcaacgcatacgctcatcgccagcgcgtttgacagtcgtgaagcctatgaccgggagttgattcatgaaatcgacatgtacgcacccgatgtggtcgtgctggctggttttatgcgcattctcagcccggcgtttgtctcccactatgccgggcgtttgctgaacattcacccttctctgctgccgaaatatcccggattacacacccatcgtcaggcgctggaaaatggcgatgaagagcacggtacatcggtgcatttcgtcaccgatgaactggacggtggcccggttattttacaggcgaaagtcccggtatttgctggtgatacggaagatgacatcaccgcccgcgtgcaaacccaggaacacgctatttatccactggtgattagctggtttgccgatggtcgtctgaaaatgcacgaaaacgccgcgtggctggatggtcaacgtctgccgccgcagggctacgctgccgacgagtaa

SEQ ID NO: 470902 - DNA, 1038 bp, Shigella flexneri
gtgaccgataaaacctctcttagctacaaagatgccggtgttgatattgacgcgggtaatgctctggttggaagaatcaaaggcgtagtgaagaaaacgcgtcgtccggaagtgatgggcggtctgggcggcttcggtgcgctgtgtgcattgccgcaaaaatatcgtgaacccgtgctggtttccggcactgacggcgtaggtaccaagctgcgtctggcaatggacttaaaacgtcacgacaccattggtattgatctggtcgccatgtgcgttaatgacctggtggtgcaaggtgcggaaccgctgtttttcctcgactattacgcaaccggaaaactggatgttgataccgcttcagcggtgatcagcggcatcgcggaaggttgtctgcaatcgggctgttctctggtgggtggcgaaacggcagaaatgccggggatgtatcacggtgaagattacgatgtcgcgggtttctgcgtgggcgtggtagaaaaatcagaaatcatcgacggctctaaagtcagcgacggcgatgtgctgattgcactcggttccagcggtccgcactcgaacggctattcgctggtgcgcaaaattcttgaagtcagcggttgtgatccgcaaaccaccgaacttgatggtaagccattagccgatcatctgctggcaccgacccgcatttacgtgaagtcagtgctggagttgattgaaaaggtcgatgtgcatgccattgcgcacctgaccggcggcggcttctgggaaaacattccgcgcgtattgccagataatacccaggcagtgattgatgaatcttcctggcagtggccggaagtgttcaactggctgcaaacggcaggtaacgttgagcgccatgaaatgtatcgcaccttcaactgcggcgtcgggatgattatcgccctgcctgctccggaagtggacaaagccctcgccctgctaaatgccaacggtgaaaacgcgtggaaaatcggtatcatcaaagcctctgattccgaacaacgcgtggttatcgaataa

SEQ ID NO: 470903 - DNA, 627 bp, Shigella flexneri
atgaagatcgtggaagtcaaacacccactcgtcaaacacaagctgggactgatgcgtgagcaagatatcagcaccaagcgctttcgcgaactcgcttccgaagtgggtagcctgctgacttacgaagcgaccgccgacctcgaaacggaaaaagtaactatcgaaggctggaacggcccggtagaaatcgaccagatcaaaggtaagaaaattaccgttgtgccaattctgcgtgcgggtcttggtatgatggacggtgtgctggaaaacgttccgagcgcgcgcatcagcgttgtcggtatgtaccgtaatgaagaaacgctggagccggtaccgtacttccagaaactggtttctaacatcgatgagcgtatggcgctgatcgttgacccaatgctggcaaccggtggttccgttatcgcgaccatcgacctgctgaaaaaagcgggctgcagcagcatcaaagttctggtgctggtcgctgcgccagaaggtatcgctgcgctggaaaaagcgcacccggacgtcgaactgtatactgcatcgattgaccagggactgaacgagcacggatacattattccgggcctcggcgatgccggtgacaaaatctttggtacgaaataa

SEQ ID NO: 470904 - DNA, 1290 bp, Shigella flexneri
atgacgcgccgtgctatcggggtgagtgaaagaccgccacttttacagacaatcccgcttagtttgcaacatttgttcgccatgtttggtgcaaccgtcctggtgcccgtcttatttcatattaacccggcgactgtactgttatttaacggtattggaacgctgctgtatctcttcatctgtaaagggaaaattccggcttatcttggttccagctttgcctttatttcaccggtattgttactgttgccgttagggtatgaagtcgcgctgggcggctttattatgtgcggcgtgctgttctgcctggtttcttttatcgtgaagaaagcggggaccggctggttggacgtgctgtttccacctgcggcaatgggcgcaatcgttgccgtcatcggtctggagctggcgggcgtagctgccggcatggcgggtttactcccggctgaagggcaaacgccaaactccaaaaccatcatcatctctattaccaccctggcggtcacggttttaggttccgtgctgtttcgtggtttcctggcaattatcccgattttaattggcgtgctggtggggtacgcgctctctttcgcaatgggaattgtcgataccacgccgattattaatgctcactggtttgcactgccaaccctctatacgccgcgcttcgagtggtttgccattctgactattctgccagcggcgttagtggttattgccgaacacgtagggcacctggtagtaacggctaatatcgtcaaaaaagatctgctgcgcgatccaggtctgcaccgttcgatgtttgctaacggcctgtcgaccgtgatctccggcttctttggctctacgccaaataccacttacggagaaaacattggcgtgatggcgatcacccgtgtttacagtacctgggttatcggcggggcggcgattttcgctatcctgctttcctgcgtcggtaaactggctgccgctatccagatgatcccattgccggtgatgggcggcgtttcgctgctgctttatggtgtcattggtgcttccggtattcgtgttttgatcgaatcgaaagtggattacaacaaagcacagaacctgatcctgacttccgtgattttgatcatcggcgtcagtggcgcgaaggtaaacatcggcgcggcggagttaaaaggtatggcgctggcgaccatcgtcggtatcggcttaagtttgattttcaaactgatcagtgtgctgcgccctgaagaagtggtgctggacgcagaagacgcggatataacagacaaataa

SEQ ID NO: 470905 - DNA, 747 bp, Shigella flexneri
gtggtaaacttctcgcgattttgtgaaatcctggttgaggtatctctgaacacaccggcacagctctctttgccactttatcttcctgacgacgaaacctttgcaagtttctggccgggggataactcctctttactggccgcgctgcaaaacgtgctgcgtcaggaacatagcggttacatctatctctgggcacgcgaaggcgcggggcgcagccatctgctgcacgcggcttgcgcggaattgtcgcagcgtggcgatgcggtgggctatgtcccgctggataaacgcacctggtttgttccggaagtgctcgacggtatggagcatttgtcgctggtctgtatcgacaacattgagtgtattgcaggcgatgagttgtgggagatggcgattttcgatctctacaatcgaattctggaatcgggcaaaacacggttgttgatcaccggcgatcgtccaccgcggcagttgaatctgggattaccggatctcgcgtcgcgtctcgactgggggcagatctacaaattgcagccactttctgatgaagataagttgcaggcgctacagttacgcgcgcgtttgcgtggttttgaactgccggaagatgtggggcgtttcttgctgaagcggctcgacagagaaatgcgcacgctatttatgacgttggatcagttggatcgtgcgtcgattaccgcgcaacgtaagctgaccattccgtttgtgaaagaaattctgaagttgtag

SEQ ID NO: 470906 - DNA, 360 bp, Shigella flexneri
atgaccaaacaggtaaaaatctaccataacccacgctgttcaaagagccgggaaacgctgaacctgctgaaagaaaacggcgtggagccagaagtggtgctctaccttgagacacccgccgatgcggcaacgctgcgcgatttgctgaaaatgctggggatgaatagcgcccgtgaattgatgcgccagaaagaggatctttataaagaactaaacctggctgacagttcgcttagcgaagaggcgctgattcaggcaatggtggataatccgaagctgatggagcgcccgattatggtcgcgaatggcaaagcgcggattggtcgtccaccggagcaggtactggaaatcgtgggttaa

SEQ ID NO: 470907 - DNA, 1464 bp, Shigella flexneri
atgttcaggcagttgaaaaaaaacctggttgcaaccctcattgctgctatgaccattggtcaggtagccccggcgtttgccgacagcgcagacaccttgccggatatgggaacctccgcaggaagcacgctttccattggtcaggaaatgcagatgggcgactattatgtccgccagctacgcggcagcgcgccgttaattaatgacccgctgttaacgcaatatattaattcgctggggatgcgtctggtttcgcatgccaattcggttaagacaccgtttcatttttttctgatcaacaacgacgaaattaacgcctttgctttctttggcggcaacgtggtgctgcactctgccctgttccgttattccgataacgaaagtcaactggcttcagttatggcgcacgaaatctcccacgtcacccaacgtcacctggcgcgagcgatggaagatcaacaacgcagcgcgccgctgacctgggtcggcgcgttaggttctattttactggcgatggccagtccgcaggcggggatggcggcgctgaccggtacactggcgggaacgcgccaggggatgatcagtttcacccagcaaaatgaacaggaagcggaccgcattggtattcaggtgctgcaacgctcgggattcgatccacaggcgatgccgaccttcctggaaaaattgctcgatcaggcgcgttactcctcgcgcccgccggaaattttattgactcacccgttgccggaaagtcgtctggcagatgcccgcaaccgtgctaatcagatgcgcccgatggtggtgcagtcgtcggaagatttctatctggcgaaagcgcgcacactggggatgtataattccggacgtaaccagctcaccagtgatttgctggatgaatgggcgaaaggaaacgttcgtcagcaacgagcggcgcaatatggtcgtgctttacaggcgatggaagccaataaatacgacgaggcgcgtaaaacgctgcaaccgttactggcggcagaacctggcaacgcatggtatctcgatctggctaccgatatcgatcttgggcaaaacaaagccaatgaggcaatcaatcgcctgaaaaatgcccgcgatttacgcaccaatccggtgttgcagctcaacctggcgaacgcttatctgcaaggcggtcaaccacaagaagcggccaatattctgaatcgctacacctttaataataaagatgacagcaacggctgggatttgctggcacaggcggaagccgcgctaaataaccgcgatcaggagctggctgcgcgagcagaaggttatgcgctcgccggacgactcgatcaggccatttcgctgttgagtagcgccagttcgcaggtgaaattaggcagcctgcaacaagcgcgttacgatgcgcgcatcgaccagttgcgccagctgcaggaacgctttaagccttataccaagatgtaa

SEQ ID NO: 470908 - DNA, 1062 bp, Shigella flexneri
atgctcgaaatgttgatgcaatggtatcgccgccgttttagcgacccggaagcgattgccttgctggttattttagttgccggatttggcattatctttttctttagtggcctgcttgctccgttgctggtggctattgtgctggcttatttgctggaatggccaaccgtgcgcctgcaatctattggctgctcccgccgctgggcgacgtcgattgtattggtggtttttgtcggtatattgctactgatggcgttcgtggtactgcctatcgcctggcaacagggcatctacttaatccgcgatatgccggggatgctcaataagctttctgactttgccgccacgttgccgcgccgctatccggtgttaatggacgcgggcattattgatgcaatggccgaaaatatgcgcagtcggatgctgaccatgggcgattcggtggtgaaaatttccctcgcctcgctggtcggtttgctgaccatagccgtctatctggtgctggtgccattgatggtcttcttcctgctgaaagacaaagagcagatgctgaacgccgttcgccgggtgctgccgcgtaaccgtgggctggcaggacaggtgtggaaggagatgaatcaacaaatcaccaactatatccgcggcaaagtgctggagatgatcgtggtggggatcgccacctggctggggttcttgctcttcgggctgaactattcgctgctgctggcagtgctggtcggcttctcggttcttattccgtacattggcgcatttgtggtgaccattccggtggttggcgtggcgctattccagtttggcgcaggtactgaattctggagctgcttcgcggtgtatctgattattcaggcgctggacggcaacctgctagtaccggtgttgttctccgaagcggttaacctgcatccgctggtgattattttatcggtggtgatcttcggtggtttgtggggattctggggcgtattcttcgccattccattggcgacgctgatcaaagccgtgatccacgcctggcccgatgggcaaatcgcgcaagaataa

SEQ ID NO: 470909 - DNA, 645 bp, Shigella flexneri
gtgggcggcctttgctttacacttggctttattttgctggcggtttgcggcaccagcctgttcacctcgtcggtaatgacggtaatggcaaaaagtcggggcgttattagttggcgaacttggctgattaacgcacttctggtggcctgcggtaatctggcaggtattgcctgtttcagtttgttaatctggttttccgggctggtgatgagtgaaaacgcgatgtggggagtcgcgattttacactgcgccgagggcaaaatgcatcatacatttactgaatctgtcagcctcggcattatgtgcaatctgatggtttgcctggcgctgtggatgagttattgcggacgttcgttatgcgacaaaatcgtcgccatgattttgtccatcaccctgtttgtcgccagtggctttgagcactgtatcgccaatttgtttgtgattccgttcgccattgccattcgccatttcgcccctacctccttctggcaactggcgcacagtagcgcagacaattttccggcactgacggtcagccattttattaccgccaatctgctcccggtgatgctgggtaatattatcggcggtgcagtgctggtgagtatttgttatcgggctatttatttacgtcaggaatcctga

SEQ ID NO: 470910 - DNA, 189 bp, Shigella flexneri
atgagaaacaaactctctttcgacttgcagttgagcgccagaaaagcggcaatcgctgaacggattgccgcccataaaattgcccgcagtaaagtgtcggtctttttaatggcgatgtccgctggcgtgtttatggcgatcggatttactttttacctttccgttatcgccgatgccccgtcttcatag

SEQ ID NO: 470911 - DNA, 2013 bp, Shigella flexneri
atggctatgtcagacgaagcgatgtttgccccgccgcaaggaataacaattgaagcggtaaacggaatgctcgcggagcggttagcgcagaaacacggcaaggcgtctttattacgcgccttcatcccgctgccgccgccgttcagcccggtacaacttattgaactgcatgttctcaaaagcaacttctattaccgctaccatgatgatggcagcgatgtgacggcaacaacagagtatcagggcgagatggtcgattattcgcgttacgccgtccttctcggcagtagtggaatggcggagctacgctttattcgtacccacggcagccgttttactccccaggattgcacactgtttaactggcaggcacgcattatcaccccggttctgcaatcatggctcaatgatgaagcacagcaggtggcgctgcgtttgctggagaaagatcgcgatcatcatcgggtactggtggatatcactaatgcagtgctgtcacatcttgatctcgacgatctgatcgctgacgtcgctcgtgagatccatcattttttcggtctggcttcagtcagtatggtactgggcgatcatcgaaagaacgagaagttcagcctgtggtgcagcgatctttctgcctcacattgtgcgtgtctgccacacaatatgcctggcgacagtgtattgctgacacaaacgctacaaacccgacaaccgaccttgacgcaccgtgcagatgatctgtttctctggcaacgcgacccgttattactcttacttgcatctaacggctgcgaatctgcgctccttataccgcttacctttggcaaccatacaccgggtgcattgttgctggcgcatacctcttccactctctttagtgaggaaaactgccagctactacaacacatagccgatcgcatcgctattgccgttggcaatgccgatgcctgccgtagaatgaccgatttgcaggaaagtttgcagcaagaaaaccaccagcttagcgagcagctcctttcgaatctgggcgtcggtgacattatctatcaaagccaggcaatggaagacctgctccagcaggtagatattgtggcgaagagcgacagtacggtgttgatttgcggtgaaaccggaaccggcaaagaggtgatcgccagagcgatccatcaacttagcccgcgacacgacaagccgctggtcaaaatcaactgcgctgccatccccgccagtcttctggaaagtgagttattcggtcatgacaaaggggcgtttactggtgcgattaatacccatcgtggtcgttttgaaattgccgatggcggcacgttgtttctcgatgaaattggcgatctgccgttagaacttcagcctaaactgctgcgcgtattgcaggaacgggagattgagcgtctcggcgggagtagaacgatcccggtaaatgtcagagtcattgccgccaccaaccgtgatttgtggcaaatggttgaagatcgccagtttcgcagcgatctcttttatcgcctgaatgtcttcccactggaattgcctccgctgcgcgaccgtccggaagatatccctcttttagcaaagcatttcacgcaaaaaatggcgcgccatatgaatcgttcaattgacgccatcccgaccgaggcgctacgccagttgatgtcgtgggactggccgggcaacgtgcgcgagctggaaaacgtgattgagcgagcggtactgctgactcgcggtaacagtctgaatttacatcttaatgtccgacaaagccgtttactgccgacgctaaatgaagattcagcgcttcgcagttcaatggcgcagttgctgcacccgacgacgccagagaatgacgaagaagaacgtcagcgcattgttcaggtattgcgagaaaccaatggcattgttgccgggccccgtggcgcggcgacacgattagggatgaagcgcaccacgctgctgtcacgaatgcagcgtctgggaatctcggttcgcgaggtgttgtaa

SEQ ID NO: 470912 - DNA, 414 bp, Shigella flexneri
atgactgaagagtgcggggaaattgttttctggacgctgcgaaaaaagtttgtcgccagtagcgacgagatgccggaacacagctctcaggtaatgtattactcgctggctatcggtcatcacgttggcgtgattgattgtctgaatgtcgccttccgctgcccactgacggaatacgaagattggcttgcactggtcgaagaggagcaagcccgacgtaagatgctgggggtgatgacttttggtgagattgttattgacgccagccacaccgccctgttgacccgggcattcgcgccactggcagatgacgcgacgtctgtgtggcaagcgcgtagcattcaattcattcatctgttggatgaaattgtgctggaaccggctatctatctgatggccagaaaaattgcgtga

SEQ ID NO: 470913 - DNA, 759 bp, Shigella flexneri
atgagtccagtgcttacgcaatatgtcagccagcccatcacgctggacgagcaaacgcaaaagatgaagcggcatttgctacaggatatccgtcgctcggcttacgtttatcgcatcgattgcggcggctgcaacgcctgtgaaatcgaaatttttgctgccatcacccccgtattcgacgcagaacgttttggcattaaggttgtttcatcaccgcgtcacgccgatattttgttatttactggcacagtcacccgggcgatgcgtatgcctgcacttcgggcgtatgagtctgcccccgatcataaaatctgtgtttcctacggcgcgtgcggtgtcggcggcggtattttccacgatctctacagcgtctggggcggcagcgacaccattgtccccattgatgtttggatccccggctgcccgccaacaccggccgccaccattcacggtttcgccgtggcgctcggtttgctgcaacagaagattcacgcggtggattatcgcgatcccaccggggtgactatgcaaccgttgtggccgcagatcccgccatcacagcgtatcgccattgagcgagaagcgcggcggctggcgggctatcgtcaggggcgagaaatttgcgatcggctcctgcgccatttaagcgacgatcctacaggaaatcgggttaacacctggttgcgcgatgccgacgatctacgtctcaatagtatcgttcagcaactctttcgcgtactccgggggttacatgactga

SEQ ID NO: 470914 - DNA, 546 bp, Shigella flexneri
atgctgaagttactgaaaactattatgcgcgccggaaccgcgacggtgaaatatcccttcgcgccactggaggtcagcccaggctttcgcgggaaaccggacctgatgcccagccaatgtattgcctgcggtgcctgcgcctgtgcttgtccggcaaatgcgctgactatccagaccgacgaccagcaaaattcgcgcacctggcagctctatctggggcgttgtatttactgcggacgttgtgaagaagtgtgcccgaccagagccatccagcttaccaataactttgaactgaccgtcacccataaagccgatctctatacccacgcgacgttccatctacaacgttgcagccgttgcgaacgcccgtttgccccgcaaaaaaccgtcgcactggctgctgaattgttggcacagcaacaaaatgctccacaaaaccgcgaaatgttatgggcgcaagcgagcgtctgcccggagtgcaaacaacgcgcgacgctgatcaacgacgatacagatgtaccgctggtggctaaggagcagctatga

SEQ ID NO: 470915 - DNA, 417 bp, Shigella flexneri
atggtccgtgtcaaagagacgtttgattcgctggcaatgctggaatttgccctcgacaacatgccggataccccactgctgaccgaaggctttagctataaacctcacgcattcgcgctgggctttgttgaagcgccacgcggtgaagacgtgcactggagcatgctcggtgataaccaaaaattgttccgctggcgctgtcgtgccgccacctacgccaactggccggtgttgcgttacatgctgcgcggcaataccgtttctgacgcaccgctgattatcggtagccttgatccctgctactcctgtaccgaccgtgtgacgctggtagatgtgcgcaagcgccagtcaaaaaccgtgctgtataaagagatcgaacgctacggcattgatcgtaaccgttcgccgctgaagtaa

SEQ ID NO: 470916 - DNA, 1299 bp, Shigella flexneri
gtgaacgttaattcatcgtcaaatcgtggcgaagcgattctcgccgccctgaaaacgcagttccccggcgcggtgctggatgaagagcgacaaacgcctgaacaggtcaccattacggtgaaaatcaatctgctgcctgacgttgtacattatctttattatcaacatgatggctggcttccagtcctgtttggcaacgacgagcggacacttaacggtcattacgcggtttattatgccctttcaatggaaggggccgaaaaatgctggatcgtggtgaaggcactggtcgatgccgacagtcgggagtttccgtcagtcacaccgcgcgtccctgccgcggtctggggcgagcgagaaattcgcgatatgtacgggctgattccggttggcctgccggatcagcgtcgcctggtgttgcccgatgactggccggaagatatgcatccgctgcgcaaagatgcgatggattatcgactgcgccctgaaccgacgacagattccgaaacgtatgcgtttatcaatgagggcaacagcgatgcgcgggtgatccctgtcggcccgctgcatatcacctcctatgaaccgggtcacttccgcttgtttgtggatggcgagcaaattgtcgatgctgattaccgcctgttttatgtccatcgcggcatggagaaactggcagaaacgcggatgggctacaacgaagtgaccttcttatcggaccgcgtgtgtgggatttgcggttttgcccacagtgtggcctataccaactcggttgaaaatgcactggggattgaggtgccgcaacgagcacatactattcgctcgattctgctggaagtcgagcggctacacagtcatttgctcaaccttggcctctcctgccattttgttggttttgataccggctttatgcaatttttccgcgtgcgggaaaagtcgatgacgatggcggaattgctgaccgggtcgagtaaaacctacggtctgaatctgattggtggtgttcgccgcgatattctcaaagagcaacgtctgcaaacgctgaaactggtgcgcgagatgcgcgccgacgtgtcggagctggtagagatgctgcttgctacgccgaatatggaacaacgcactcagggcattggcattctcgaccgacaaatcgcccgtgattatagccctgtagggccgctgatccgcgcagtggttttgcccgtgatttgcgctttgatcacccctacgccgactacggcaatattccaaaaacactgtttacctttaccggcggcgatgttttctcccgcgtga

SEQ ID NO: 470917 - DNA, 1587 bp, Shigella flexneri
atgagttattctgtgatgttcgctttactcctgctcacgccgctgcttttttcgctgctctgttttgcctgccggaaacgggggctctctgcgacttgtacggtgactgtattacatagcttagggatcacactgctgctgattctggcactctgggtggtccaaactgccgctgatgcaggagaaatattcgctgcgggactgtggcttcatattgatggtctgggcggtttgttcctcgccattcttggtgtgattggctttctcaccggtgtttactcgattggctacatgcgtcatgaagtggcacacggcgagctttcacccgttacactgtgcgattactacggtttcttccatctgtttttgttcaccatgctgctggttgttaccagcaataacctgattgtgatgtgggcggcgatcgaagccaccaccttaagctcggcgtttctggtaggcatttacggtcagcgttcatcgctggaatcagcatggaagtacatcattatttgtactgttggtgtcgcttttggtctgttcggtaccgtgctggtatacgccaacgccgccagcgttatgccgcaggcagaaatggcgatatcctggagcgaggttcttaagcaatcgtccttgcttgacccaacattaatgctgttggcctttgtgtttgtgctaattggctttggtaccaaaaccgggctatttcccatgcacgcctggctgccggatgctcacagtgaagctccgagtccggtcagcgccctgctctccgccgtattgctgaactgcgcgctgttggtgctgattcgctattacatcattatttgccaggccatcggcagcgatttccccaaccggttgttgctcatcttcggcatgttgtcggttgccgtggcggcatttttcattctggtacagcgggacattaagcgtctgctggcgtactccagcgtggagaacatggggctggtcgcggtggcgctaggcattggcgggccgctgggaatttttgccgcgctgctgcacaccttaaaccacagtctggcaaaaacgctgctgttctgcggttccggcaatgtactgctcaagtacggcacgcgcgatctcaacgtcgtctgtgggatgctcaaaatcatgccatttaccgccgtgctgtttggcggcggtgcgctggcgctggcgctggcagggatgccgcccttcaacatttttcttagcgaatttatgaccgttaccgcaggactggcacgtaatcacctgctgattatcgtcctgctgttattgctgttaacgctggtgctggcgggcctggtacggatggctgcgcgggtgttaatggcgaaaccgccgcaggccgttaaccggggtgatctcggctggttgaccacctcgccaatggtgattctgctggtcatgatgctggcgatgggaacgcatattccacaacctgtcatcaggatcctggcgggcgcttccactatagtcctctcagggacgcacgacctgcctgcacaacgtagcacctggcatgattttttgccttcaggcaccgcatctgtttcggagaaacacagtgaacgttaa

SEQ ID NO: 470918 - DNA, 651 bp, Shigella flexneri
atgaccggttctatgatcgtaaataatctggcgggactgatgatgctgacatcgctgtttgtgattagcgtcaaaagctatcgcctgtcatgcggattttacgcctgccagtcgctggtgctggtgtctattttcgccactctctcgtgcctgttcgccgcagagcaactgctgatctggtccgccagcgcctttatcaccaaagtgctgctggtaccgttaatcatgacttacgctgcacgaaatattccccagaacatcccggaaaaagcgttattcggtccggcaatgatggcactgctcgcggcgttaattgtcctgctttgcgcatttgtcgttcagcccgtgaagctaccgatggctaccgggctgaaaccggcgctggcggtagcgttaggtcattttctgcttggcctgctgtgcattgtcagccaacgcaatatcctgcggcaaatttttggttactgcctgatggaaaacggctcccatctggtgctggcgcttcttgcctggcgagcaccggaactggtggaaataggtatcgctaccgacgccatcttcgccgtcattgtgatggtgttactggcaagaaaaatatggcgtacccacggcacgctggacgtgaacaacttgaccgcgctgaagggataa

SEQ ID NO: 470919 - DNA, 1440 bp, Shigella flexneri
atggaaaatcttgctctgacgacgttaatgctgccttttatcggcgcactggtcgtttcgttttcgccacaacgtcgggccgccgaatggggggttttgttcgccgcgctgaccacgctgtgcatgttgtcgctgatctccgcgttttatcaggccgataaagttgccgtcacgttgacgttggtcaacgtgggggatgtggcattgtttggcctggtcattgatcgcgtgagtacgctgattctgtttgtggtggtgtttctcggtttgctggtcacgatctactccacgggttatctgacggataaaaatcgcgaacacccgcataacggcacgaatcgttattacgcatttttgctggtgtttatcggcgcgatggcgggactggtagtctcctcgacgctgctcggtcagttgttgttttttgaaattacgggcggctgctcctgggcgttgatcagttattaccagagcgataaagcgcagcgttcagcactaaaagcgttgcttatcacccatatcggttcgttggggttgtatcttgccgccgccacgctgtttttgcagaccggaacgtttgtgcttagcgcgatgagcgagttacatggcgacgcacgttatctggtttatggcggcatcctgtttgccgcgtgggggaaatcggcccagctaccgatgcaagcgtggctaccggacgcaatggaagcgccaacaccgatcagcgcctatctccacgccgcatcgatggtgaaagtgggcgtttacatttttgcccgcgccattatcgacggcggcaatatcccgcatgtgattggcggcgttggcatggtcatgacactggtcaccattctttatggctttctgatgtatttgccacagcaggatatgaagcggttgctggcctggtcgaccatcactcaacttggctggatgttcttcggcttgtcgctctccatcttcggctcgcggctggcgctggagggtagcatcgcctacatcgtcaaccacgcgttcgctaaaagcctgtttttccttgtagcaggtgcgctgagttacagctgcggcacgcgcttgttgccgcgtctgcgtggcgtattgcacaccctgccgttgccaggcgtgggtttctgcgtggcagcgctggcaattaccggtgtgccgccgttcaacggcttcttcagtaaattcccgctgtttgccgccggttttgcgttgtcagtggagtactggatcctgctgcccgccatgattctgctgatgattgaatcggtcgccagtttcgcctggtttattcgctggtttggtcgcgtcgtgccgggcaaaccgagcgaggccgtcgccgatgccgcaccgctgccagggtcaatgcgcctggtgttgattgtactgattgtgatgtcgctgatttccagcgtaatcgccgcgacctggttgcagtaa

SEQ ID NO: 470920 - DNA, 948 bp, Shigella flexneri
atgagacaaactctttgcgacggatatctggtcatttttgcgttagcacaggccgtgattctgctgatgctaaccccactttttacgggtatttcccggcagatacgcgcgcgtatgcactcccgccgcgggccggggatctggcaggattatcgcgatatccacaaactgtttaaacgccaggaagttgcgccgacatcttcaggtctgatgttccgcctgatgccgtgggtattaatcagcagcatgctggtgctggcgatggccttaccactatttattaccgtttccccttttgcgggcggcggcgatctgatcacccttatctatcttcttgccctgtttcgttttttctttgctctttccgggctggataccggaagtccgtttgcgggagtcggtgccagtcgcgagttgacgctcggcattctggtcgaaccaatgcttattctctcactgctggtattggcgctgatagcaggttccacgcatatcgagatgatcagcaatacgctggctatgggctggaactcgccgctaaccaccgtactggcgttactggcctgtggttttgcctgcttcattgagatgggaaaaattccctttgatgttgctgaagcagaacaggaattacaggaaggcccgctgaccgaatattccggtgccgggctggcgctagcgaaatgggggctggggctgaaacaggtcgtgatggcagcactgtttgtggccctgtttctgccctttgggcgcgcgcaagaactttctctcgcctgcctgctgacttcacttgtcgttacgctgctcaaggttttgctgatttttgtactggcctcaatcgcagaaaacacgctggcacgcgggcgttttttactcattcaccatgtgacctggcttggcttcagccttgctgcgcttgcatgggtcttttggttaaccggtctgtaa

SEQ ID NO: 470921 - DNA, 1350 bp, Shigella flexneri
atgatgccgttgcacagctggttgccgcgcgctcaccctgccgcaccatcgcacgcttcggcgttgatgtctggcgtaatggtcaaaatcggtattttcggcatcctgaaagtagcgatggatctgctggcgcaaacgggtttgcctctgtggtggggcattctggtgatggcgatcggcgcaatctccgcgctcctgggcgtgctatatgcgctggcggaacaggatatcaaacggctgctggcctggagtaccgtcgaaaacgtcggcattattttgctggcagtcggtgtggcgatggacggtctgtcactgcacgacccgctgctcaccgtggttggactgctcggcgcactgtttcatctgctcaaccatgcgctgttcaaagggctgctatttctcggcgcggacgcgattatttcgcgtttgcatacccacgacatggaaaaaatgggggcactggcgaaacggatgccgtggacagccgcagcatgcctgattggttgcctcgcgatatcagccattcctccgctgaatggttttatcagcgaatggtacacctggcagtcgctgttctcactaagtcgtgtggaagccgtagcgctacaacttgcgggtcctattgctatggtaatgctggcagtcactggtgggctggcagtaatgtgcttcgtaaaaatgtacggtattactttctgtggtgcgccgcgcagtacacacgctgaagaggcacaggaagtgccaaatacgatgatcgtcgccatgctactgctcgcggcactctgcgtattaattgcgcttagtgccagttggctggcaccgaagataatgcatattgcccatgcgtttaccaatacccctcccgtcactgtcgccagcggaatagcacttgtacccggcacgtttcatacacgggtcactccttcattactgttgctgttactactggcgatgcctttgctgccaggcctttactggctgtggtgtcgttcgcgccgcgcagcgtttcgtcgcacaggagatgcctgggcatgcggctacggctgggaaaacgcgatggctccgtcaggcaatggcgtgatgcagccgctgcgtgtggtcttctctgcgttatttcgtctacgacaacagctcgaccctacgctgaggctaaataaaggtcttgcgcacgtcaccgccagggctcagagcacagaacccttctgggatgagcgggtgatccgccccatcgtgagcgccacccaacggctggtcaaagaaatacagcatctgcaaagcggcgactttcgtctctattgcctgtatgtggtcgccgcactggttgtgctgctaatcgctattgccgtctaa

SEQ ID NO: 470922 - DNA, 672 bp, Shigella flexneri
atggatgccctgcaattattaacctggtcgctgatcctctatctgtttgccagtctggcttcgctgtttttactcggtctggacagactggctattaagctttccggcatcacatcgctggtgggcggcgtgattggcatcatcagcggaattacgcaattacatgctggtgtaactttagtcgcccattttgccaccccttttgactttgccgatttaaccctgcgaatggatagcctctcggcatttatggtgctagttatctccttgctggtggtggtttgttcgctctattcattgacttatatgcgcgaatacgagggcaaaggcgcggcggcgatgggcttctttatgaatcttttcatcgcatcgatggttgccctgctggtgatggacaacgctttttggttcatcgtgctgtttgaaatgatgtcgctgtcttcctggtttctggtcattgccaggcaggataaaacgtcgatcaacgctggcatgctctacttttttatcgcccacgccggatcggtgctgattatgatcgccttcttgctgatggggcgcgaaagcggcagcctcgattttgccagtttcgcacgctttcactttctccggggctggcgtcggcggtgtttctgctggcctttttcggttttggcgcgaaagccgggatga

SEQ ID NO: 470923 - DNA, 618 bp, Shigella flexneri
atgaaccgctttgtggtggccgaaccactgtggtgtacaggatgtaatacctgtctcgctgcctgttcggacgtgcataaaacgcaaggtttacagcaacacccgcgcctggccctggcgaagacgtcaacaatcactgcccctgtcgtgtgtcatcactgtgaggaagccccttgcctgcaggtctgcccggtcaatgccatctctcagagggatgatgcgatccaactcaacgaaagcctctgtattggctgcaagctttgcgccgtggtctgcccatttggcgcaatcagcgcttcaggaagccgtccggtgaatgcccatgcgcaatatgtttttcaggctgaaggctcactcaaagacggcgaagaaaacgtgccgccccaacatgcgttgctgcgctgggaaccgggtgtccagaccgtcgcggtgaaatgcgacctgtgtgatttcttgccagaaggtccggcctgcgttcgcgcttgcccgaatcaggcgttacggctgatcaccgacgatagcctgcaacgtcagatgaaagaaaaacagcgccttgccgcaagctggtttgccaatggcggggagtctcccctttccctcactcaggagcaacactaa

SEQ ID NO: 470924 - DNA, 471 bp, Shigella flexneri; identical to SEQ ID NO: 2665

SEQ ID NO: 470925 - DNA, 573 bp, Shigella flexneri
ttgacactgtcatcgcaacattatctggtgatcactgcgttgggtgccgatcgccctggaattgtgaacaccatcacccgtcatgtcagtagttgcggctgtaatattgaagacagtcgcctggcgatgctgggagaagagttcacgtttatcatgctgctttccggttcatggaatgccatcactctgattgaatcaacgttaccgttgaaaggtgccgaactggatcttttaatcgtgatgaagcgcacgacggcgcgtccgcgtccgccaatgccagcatctgtctgggttcaggtcgatgttgcagactccccgcatttaattgaacgcttcacagcacttttcgacgcgcatcatatgaacattgcggagctggtgtcgcgcacacaacctgctgaaaatgaacgggctgcgcagttgcatattcagataaccgcccacagccccgcatctgcggacgcagcaaatattgagcaagcgttcaaagccctatgtacagaactcaatgcacaaggcagtattagcgtcgtcaattattcccaacatgatgaacaggatggagttaagtaa

SEQ ID NO: 470926 - DNA, 879 bp, Shigella flexneri
atgttcacgggaagtattgtcgcgattgttactccgatggatgaaaaaggtaatgtctgtcgggctagcttgaaaaaactgattgattatcatgtcgccagcggtacttcggcgatcgtttctgttggcaccactggcgagtccgctaccttaaatcatgacgaacatgctgatgtggtgatgatgacgctggatctggctgatgggcgcattccggtaattgccgggaccggcgctaacgctactgcggaagccattagcctgacgcagcgcttcaatgacagtggtatcgtcggctgcctgacggtaaccccttactacaatcgtccgtcgcaagaaggtttgtatcagcatttcaaagccatcgctgagcatactgacctgccgcaaattctgtataatgtgccgtcccgtactggctgcgatctgctcccggaaacggtgggccgtctggcgaaagtaaaaaatattatcggaatcaaagaggcaacagggaacttaacgcgtgtaaaccagatcaaagagctggtttcagatgattttgttctgctgagcggcgatgatgcgagcgcgctggacttcatgcaattgggcggtcatggagttatttccgttacggctaacgtcgcagcgcgtgatatggcccagatgtgcaaactggcagcagaagggcattttgccgaggcacgcgttattaatcagcgtctgatgccattacacaacaaactatttgtcgaacccaatccaatcccggtgaaatgggcatgtaaggaactgggtcttgtggcgaccgatacgctgcgcctgccaatgacaccaatcaccgacagtggtcgtgagacggtcagagcggcgcttaagcatgccggtttgctgtaa

SEQ ID NO: 470927 - DNA, 1035 bp, Shigella flexneri
atggcttactctgttcaaaagtcgcgcctggcaaaggttgcgggtgtttcgcttgttttattactcgctgcctgtagttctgactcacgctataagcgtcaggtcagtggtgatgaagcctacctggaagcggcaccgcttgcggagcttcatgccccggctggaatgattttgccggtgacctccggtgattatgcaatcccggtgaccaacggtagtggtgctgtcggtaaggcgctggacattcgtccaccagcccagccgttggcactggtttctggcgcgcgtacccagttcacgggcgataccgcttcattgctggtggaaaatggtcgtggcaatactctgtggccgcaggtggttagcgtgctgcaggcgaaaaactacaccatcacccaacgtgatgatgctggtcagacactgaccaccgattgggtacaatggaaccgtctggacgaagacgagcagtatcgtggtcgttatcaaatctctgttaagccgcagggttatcagcaggcggttacggttaaactgctgaacctggaacaggcgggcaaaccggttgcagacgcggcttccatgcagcgttacagcacggagatgatgaacgttatttccgccggtctggataaatctgccactgacgccgcgaacgctgcgcaaaatcgtgcctccaccactatggacgtacaaagtgcagctgatgacaccggtttaccaatgctggtcgtacgcgggccgttcaatgtggtttggcaacgtctgccagcggcgctggaaaaagtgggcatgaaagtgaccgacagcacccgttcgcagggcaacatggccgtaacttataagccgctgtctgacagcgactggcaggaactgggcgcgagcgatccaggcctggcatccggtgactataaactgcaggttggcgatttagataaccgcagcagcctacagttcatcgatccgaaaggtcatactctgactcagagtcagaacgacgcgctggtagctgtcttccaggctgcgtttagcaagtaa

SEQ ID NO: 470928 - DNA, 231 bp, Shigella flexneri
atgcggcgtgaacgccttatccgaactacgtccgacaaacaaatttcgtgcgaattaccgctaaaatcgcgttttcctgccgacgcacacgtttgcgtatcatatcagaaaaaagggccggatgattccagccctgtatttttacttgctaaacgcagcctggaagacagctaccagcgcgtcgttctgactctgagtcagagtatgacctttcggatcgatgaactgtag

SEQ ID NO: 470929 - DNA, 714 bp, Shigella flexneri
atgcaaaagcaagctgagttgtatcgtggtaaagcgaaaaccgtatacagcacggaaaacccggacctgttggtgctcgaattccgcaatgatacgtcagcaggggatggcgcgcgcattgagcagtttgatcgcaaaggtatggtgaacaacaagttcaactacttcattatgagcaaactggctgaagcgggtatcccgactcaaatggagcgtctgctctccgataccgaatgtctggtgaaaaagctggatatggtgccggttgagtgtgtcgtgcgtaaccgtgctgctggctctctggtgaaacgtcttggaatcgaagaaggtattgagctgaacccgccgctgttcgatctgttcctgaaaaacgatgccatgcacgatccgatggtcaacgaatcttactgcgaaacctttggctgggtgagcaaagagaacctggcgcgtatgaaagagctgacctacaaagcgaacgacgtgctgaaaaaactgttcgatgatgctggtctgattctggtcgacttcaagctggagtttggtctgtacaaaggtgaagtggtactgggcgatgagttctccccggacggcagccgcctgtgggacaaagaaacactggagaaaatggacaaagaccgtttccgccagagcctcggtggcctgatcgaagcctatgaagccgtcgcccgccgcctgggtgtacagctggactga

SEQ ID NO: 470930 - DNA, 864 bp, Shigella flexneri
atgcgttggcaagggcgacgtgaaagtgacaatgttgaagacaggcgcaacagctctggcggtccgtcaatgggcggtcccggtttccgtctgccgagcggtaaaggcgggctgattttactgatagtcgtgctggttgcaggctactatggcgttgatttaaccgggttgatgaccgggcagccggtttctcaacaacaatcaacgcggtcaattagccctaatgaagacgaagccgcaaaattcacctcggtgattctggcaaccacggaagacacctggggacaacagttcgaaaagatgggtaagacctatcagcaaccgaagctggtcatgtaccgtggaatgacgcgcaccggctgcggggcgggccagtccattatggggccgttctattgcccggcggatggcacagtttatatcgatctctccttctatgatgacatgaaagacaaacttggcgcggatggcgattttgcccaggggtacgttatcgcccatgaagtcggtcatcatgtgcagaaactgttaggcatcgagccgaaagttcgtcaactgcaacaaaacgcgacgcaggcggaagtaaaccgcttatctgtgcgtatggaactccaggccgactgttttgccggtgtctgggggcatagtatgcagcagcaaggcgttctggaaactggcgatctggaagaggcgctgaatgcggcgcaggccatcggcgatgaccgtttacaacagcaaagtcaggggcgagtagtaccagacagtttcacacatggcacttctcagcaacgctacagctggtttaaacgtggtttcgacagcggcgatccggcacaatgcaatacttttggtaaaagcatttaa

SEQ ID NO: 470931 - DNA, 2016 bp, Shigella flexneri
atggctgaactgactgcgctttacacattaacagcgcaaatgaaacgtgaagggatctgccgcttgctggtgttgagcggggaagagggttggtgttttgatcatgctcttaagttgcgtgatgccttacctggcgactggctgtggatttcgccgcagctagatgctgaaaaccactgttcaccctcggcgctacaaactttacttgggcgcgagttccggcatgcggtattcgacgcccgccacggctttgatgccgctgcctttgcagcacttagcggaacgttgaaagcgggaagctggctggttttgttactccctgtatgggaagagtgggaaaaccaacctgatgccgactcgctgcgctggagtgattgccctgaccctattgcgacgccgcattttgtccagcatctcaaacgcgtacttacggcggataacgacgctatcctctggcggcaaaaccagccgttctcgttggcgcattttactccccgtactgactggcaccccgcgaccggcgcaccacaaccagaacaacagcaactcttacagcagctactgaccatgccgccgggcgtggcagcggtaacggctgcgcgtgggcgcggtaagtcggcgttggcagggcaactcatttctcgtattgcgggcagtgcgattgtcaccgcgcccgcaaaagcggcaacggatgtactggcacaatttgcgggcgagaagtttcgctttattgcaccggatgccttgttagccagcgatgagcaagccgactggctggtggtcgacgaagccgcagccatacctgcgccgttgttgcatcaactggtatcgcgttttcctcgaacgttgttaaccactacggtgcagggctacgaaggtaccggacgtggttttttgctgaaattttgcgctcgctttccgcatttacaccgttttgaactgcaacagccgatccgctgggcacagggatgcccgctggaaaaaatggttagtgaggcactggtttttaacgatgaaaacttcacccatacaccacaaggcaatatcgtcatttccgcatttgaacaaacgttatggcgaagcgagccagaaacgccgttaaaggtttatcagttattgtctggtgcgcactaccggacctcgccgctggatttacgccggatgatggatgcaccagggcaacattttttacaggcggctggcgaaaacgagattgccggggcgttgtggctggtggatgagggcggattatctcaagaactcagtcaggcggtatgggcaggttttcgtcgcccgcggggtaatctggtggcccagtcgctggcggcgcacggcagcaatccactggcggcgacattgcgcggaaggcgggttagccggatagcagttcatccggctcgtcagcgggaaggcacagggcgacaacttattgctggagctttgcaatatacgcatgacctcgactatctttcggtgagttttggttacactggggagttatggcgtttctggcaacgctgcggttttgtgctggtgcggatgggtaatcatcgggaagccagcagcggttgctatacggcgatggcgctgttaccgatgagtgatgcgggtaaacagctggctgaacgtgagcattaccgtttacgtcgcgatgcgcaagctctcgcgcagtggaatggcgaaatgcttcctgttgatccactaaacgatgccatcctttctgacgacgactggcttgaactggccggttttgctttcgctcatcgtccgctattaacatcgttaggttgcttattgcgtctgctacaaaccagtgaactggcattaccggcgctgcgtgggcgtttacagaaaaacgccagtgacgcgcagttatgtaccacacttaaactttcaggccgcaagatgttactggttcgccagcgggaagaggccgcgcaggcgctgttcgcactaaatgaggttcgcactgagcgtctgcgcgatcgcataacgcaatggcaattttttcactga

SEQ ID NO: 470932 - DNA, 699 bp, Shigella flexneri
atgaaacatgaccattttgttgttcaaagcccggataaacctgcacaacagttgttactgcttttccacggtgtcggggataacccggtggcaatgggggaaataggcagctggtttgcaccgctgtttcctgatgcgctggtggtgagtgtcggtggcgcggagccgagcggtaatccggcggggcgtcagtggttttcagtgcagggtattacggaagataatcgccaggcgcgtgtggatgccatcatgccgacgtttattgaaacggtacgctactggcagaaacagagcggagtaggggctaacgccacggcgctaattggtttctcacaaggcgcgattatggcgctggagagcattaaagccgaaccgggccttgcttcgcgcgtcattgcctttaacggacgctatgcgagcctgccggagaccgcgtctacagccacgacaattcacttgattcatggtggtgaagatccggttatcgatctggcgcatgcagttgcggcgcaggaagcgttaatcagtgccggtggtgacgtgacgctggatatcgtggaggatttaggccatgcgatcgacaatctcagtatgcaatttgccctggatcacttgcgttataccattccgaaacattatttcgaccaagcgctaagtggcggtaagcctggcgatgatgatgtgattgaaatgatgtaa

SEQ ID NO: 470933 - DNA, 201 bp, Shigella flexneri; identical to SEQ ID NO: 35785

SEQ ID NO: 470934 - DNA, 1128 bp, Shigella flexneri
atgtcgtgcccggttattgagctgacacaacagcttattcgccgcccttccctgagtcctgatgacgcaggatgtcaggctttgttgattgaacgtttgcaggcgatcggttttaccgttgaacgcatggattttgccgatacgcagaatttttgggcatggcgtgggcaaggtgaaacgttagcctttgccgggcataccgacgtggtgccgcctggcgacgccgatcgttggatcaatccgccgtttgaacccaccattcgtgacggcatgttattcgggcgcggtgcggcagatatgaaaggctcgctggcggcgatggtggtagcagcagaacgttttgtcgcacaacatcccaaccatacggggcgactggcatttctgatcacttctgatgaagaagccagtgcccacaacggtacggtaaaagtcgtcgaggcgttaatggcacgtaatgagcgtctcgattactgcctggtcggcgaaccgtcgagtatcgaagtggtaggtgatgtggtgaaaaatggtcgtcgcggatcgttaacctgcaacctcaccattcatggcgttcaggggcatgttgcctacccacatctggctgacaatccggtacatcgcgcagcacctttccttaatgaattagtggctattgagtgggatcagggcaatgaattcttcccggcgaccagtatgcagattgccaatattcaggcgggaacgggcagtaacaatgttattccgggtgaactgtttgtgcagtttaacttccgcttcagcaccgaactgactgatgagatgatcaaagcgcaggtacttgccctgcttgaaaaatatcaactgcgctatacggtggattggtggctttccgggcagccatttttgaccgcgcgcggtaaactggtggatgcggtcgttaacgcggttgagcactataatgaaattaaaccgcagctactgaccacaggcggaacgtccgacgggcgctttattgctcgcatgggggcgcaggtggtggaactcgggccggtcaatgccactattcataaaattaatgaatgtgtgaacgctgccgacctgcagctacttgcccgtatgtatcaacgtatcatggaacagctcgtcgcgtga

SEQ ID NO: 470935 - DNA, 357 bp, Shigella flexneri
atggttacactttacggcatcaaaaattgtgacaccattaaaaaggctcgccgttggctggaagccaataacatcgactatcgttttcatgattaccgcgtcgatgggctggacagcgaattattgaacggttttatcaacgaattaggctgggaagcgttactcaacacccgtggtacaacctggcgtaaactggacgaaactacccgcaataaaatcaccgatgcggcctctgcggcggcattaatgactgaaatgcctgcaattatcaaacgtccattgctctgcgcgcctggtaagcctatgctgctgggtttcagtgattccagttatcagcaatttttccatgaggtgtag

SEQ ID NO: 470936 - DNA, 3114 bp, Shigella flexneri
atggcgaatttctttattgatcgccccatttttgcctgggtgctggcaatcctgttgtgtctgacaggtaccctggcgattttttcattgcccgttgaacaataccccgatctcgcgccaccgaatgtgcgagtgaccgctaactatcccggcgcatcggcccagacgctggaaaacaccgtgacccaggttatcgagcaaaatatgaccggcctcgataatctgatgtatatgtcatctcagagcagtggcaccggtcaggcatctgtcactttaagttttaaagcaggcaccgatccggacgaagccgtgcagcaagtacaaaaccagctgcaatcagccatgcgaaagttaccgcaggcggtgcaaaatcagggcgtgacggtgcgtaaaaccggcgataccaacattctgaccattgccttcgtctctaccgatggctcgatggataaacaggatattgctgattatgttgccagtaatattcaggacccgttaagccgcgtgaatggcgtcggggatatcgatgcctatggttcgcaatattccatgcgtatctggctggacccggcgaaactcaacagtttccagatgacggctaaagatgtcactgatgccattgagtcacagaacgcgcagattgcggttgggcaacttggtggtacaccttccgtcgataagcaggcgctcaacgccaccattaacgcccagtcactgctgcaaacaccagaacagttccgcgatatcaccttgcgggtgaatcaggacggctcagaggtaaggctgggcgatgtcgccaccgtcgaaatgggggcggagaaatacgattatcttagccgcttcaatggtaagccagcctccgggttgggggtaaaactggcctccagcgcaaacgaaatggcgacagcggagctggtgctcaatcgtctcgacgagctggcgcagtatttcccgcacggactggaatacaaggtggcgtatgaaaccacctcgtttgttaaagcctccattgaagacgtggtgaaaacgctgctggaagctatcgctctggttttcctcgttatgtatctgttcctgcaaaacttccgcgccacgctgatacccactatcgccgtgccggtggtgttgatgggaaccttctccgtactttacgccttcggttacagcgtcaacaccttaaccatgttcgcgatggtgctggcgatcggtctgctggtggatgacgccatcgtggtggtggaaaacgtcgaacgtattatgagtgaggaaggactcactcctcgcgaagccacacgtaaatcgatggggcagatccagggggcactggtcgggattgcgatggtgctttcggcggtatttgtaccaatggccttcttcggcggcaccaccggtgccatctatcgccagttctctattaccattgttgcggcgatggtgctgtcagtactggtagcgatgctcctcactccggctctgtgtgccacgctacttaagccactgaaaaaaggtgagcatcacgggcaaaaaggtttttttgcctggtttaaccagatgtttaaccgcaacgccgaacgctacgaaaaaggggtggcgaaaattctccaccgtagcctgcgctggattgtgatttatgtcctgctgcttggcggcatggtgttcctgttcctgcgtttgccgacgtcgttcttaccgctggaagaccggggcatgtttactacctcggtacaattgcccagcggttcaacccaacaacagaccctgaaagtcgttgagcaaatcgagaaatattacttcacccatgaaaaagacaacatcatgtcggtgtttgccaccgttggttctggccctgggggtaacgggcaaaacgtggcgagaatgtttatccgcctgaaagactggagcgaacgcgacagtaagaccggcacctcgtttgccattatcgagcgtgcaacgaaggcgtttaaccaaattaaagaagctcgcgttatcgccagcagcccaccagcaattagcggtcttggtagttctgcaggttttgatatggagttgcaggaccacgctggagcgggtcacgatgcactgatggcagcacgtaatcagttgctggcgctggcggcggaaaacccggagctaacccgtgtgcgccataacggcctcgatgacagtccgcagttgcagattgatatcgaccagcgtaaagctcaggcgctgggcgttgatatcgacgatattaacgacacactgcaaaccgcctggggttcgagctatgtgaatgactttatggatcgcggtcgcgtgaagaaagtctatgtgcaggcagctgcgccgtatcgcatgctgccagatgacatcaatctctggtatgtccgaaataaagatggcggcatggtgcccttctctgctttcgcgacctcacgctgggaaacaggctcgccgcgtctggaacgctataacggttattctgcggttgagattgttggggaagccgcaccgggggtcagtaccggtacggcgatggatattatggaatcgttagtgaagcagctgccaaacggctttggtctggagtggacggcgatgtcgtatcaggagcggctttccggcgcgcaggctccggcgctgtacgccatttccttgctggtggtattcctgtgtctggcggcattgtatgaaagctggtcggtaccgttctcggtaatgctggtcgtgccgctgggggtaatcggcgcgctgctggcaacctggatgcgcgggctggaaaacgacgtttacttccaggtgggcctgttaacggtcattggtttatcggcgaaaaacgccatcctgatcgtcgagtttgctaacgagatgaaccaaaaaggccatgacctgtttgaagcgacgctccacgcctgccgtcagcgtttacgcccgattctgatgacctcgctggcatttatcttcggcgtattgccaatggcaaccagcacgggtgccggttccggtggtcagcatgcggtgggtactggcgtaatgggcgggatgatttcagctactattctggctatttacttcgtgccgctgttctttgtgctggtgcgccgccgcttcccgctgaagccgcgcccggaataa

SEQ ID NO: 470937 - DNA, 963 bp, Shigella flexneri
gtgcagtgttcccaggcgctgaacaccagccagattgatgtgcattgtttccgccatattttgcagattgttcgcgacaatgaagcagctgaatatctggagctgaacgttggggataactggcggattagcgaagggaagccaaaccctgagctgccaatgcagattttaccggtgacaatgcaagagacggtttacggcgaactgcactggcaaaatagtcacgtttcatcatcagaaccgctgcttaacagtgtttcatcgatgctgggacgcggtttgtactttaatcaggcgcagaagcattttcagcagttattgttgatggaagaacgtgcgaccatcgcccgcgaattgcacgactcgctggctcaggtgctttcttacttacgtatccagttgacgttactgaagcgttcgataccggaagataacgccaccgcacaaagtatcatggccgatttttcccaggcgttgaatgatgcttatcggcagttacgcgagctgttgactactttccgcctgacgctgcagcaggcggatctcccctccgcgttgagggaaatgctggatacgttacaaaatcaaaccagcgctaaactgaccctcgactgccgtctgccaaccctggcactggatgcgcaaatgcaggtgcatttgttgcaaattattcgcgaagcggtgctgaatgcgatgaagcacgccaacgccagcgaaatcgccgtcagttgcgtcaccgcgccggacggcaatcacacggtttatatccgtgataacgggattggtatcggtgaaccgaaagaacccgaaggtcattatggactgaatatcatgcgcgaacgcgcggaacggctgggcgggacgctgactttttcacaaccttccggcggcggcacgttagtgagtattagctttcgctccgcagagggtgaggggaaggggaacacgccggctgaggtgtaa

SEQ ID NO: 470938 - DNA, 777 bp, Shigella flexneri
gtgattgttaaacgacccgtctcggccagtctggcccgggcctttttttacattgtgctgctgtcgattctttccacgggtatcgctctgctaactctggcgagcagtttgcgcgacgctgaggctatcaatattgccggatcgctgcgtatgcagagttaccgcctgggctacgacttgcaaagtggcagtccacaactcaatgcacatcgccagttgtttcagcaggcactgcattcaccggtattaaccaacctcaacgtctggtatgtgccagaagcagtaaaaactcgctatgcgcatctgaatgccaactggctggagatgaataatcggctcagcaagggcgatttgccgtggtatcaggccaatattaataattatgttaatcagatagacctgttcgtgctggctttacagcactacgctgaacgcaaaatgctgctggtggtggcgatttccctggctggcggtatcggtattttcacgctggtcttttttactttgcgccgcatacgccatcaggtggttgccccgctgaatcagctggttaccgccagtcagcgtattgaacacgggcagttcgactcgccgccgctggataccagtctgccgaatgagcttggtctgcttgcaaaaacctttaaccaaatgtcgagcgagctgcataaattgtacctttcgctggaggcgtcagtagaagaaaagacccgcgatctccacgagaccaagcgtcgtctggaggtgttgtatcagtgcagtgttcccaggcgctga

SEQ ID NO: 470939 - DNA, 1980 bp, Shigella flexneri
atgaatcgttttattatggccaacagtcagcaatgtctgggttgtcatgcttgtgaaatcgcctgtgtcatggctcacaatgatgagcaacatgtcctgagccaacaccattttcatccccgaattacggttatcaaacatcagcagcaacgtagtgcagtgacctgtcaccattgtgaagatgcgccctgcgcccgtagctgccctaatggcgcaatcagccacgttgatgacagcattcaggtcaatcagcaaaagtgtattggctgtaaatcctgcgtggtggcctgtccgtttggtacgatgcaaatcgtcctgacacccgtcgcggcaggaaaagtaaaagccacggcgcataaatgcgacctttgtgcagggcgcgaaaacggtcctgcctgtgtcgagaattgcccggcggacgcgctgcaactggtcactgacgtcgcactctccggcatggcgaaatcccgccgcttgcgcaccgcacgtcaggagcatcaaccgtggcatgccagtaccgctgcacaagaaatgccggtaatgagtaaagtcgaacaaatgcaggcaacgcccgcgcgtggcgagccggataaactggcgattgaagcgcgcaaaaccggttttgatgaaatttatctgccatttcgcgccgaccaggcacaacgggaagcctcgcgctgccttaagttcggcgagcacagcgtttgtgaatggacctgcccgctgcataaccatattccgcagtggattgaactggtgaaagccggaaacatcgacgccgccgtcgagctttctcaccagaccaacaccctgccggaaattaccggacgcgtttgtccgcaagaccgtttgtgtgaaggtgcctgtactattcgcgatgagcacggcgcggtaactatcggcaacattgaacgctatatttcagatcaggcgttggcgaaaggttggcgtcctgacttaagtcatgtcaccaaagtggacaagcgggtggcgattatcggggcaggtccggcagggctggcctgtgcggatgttctgacccgcaatggcgtggcggtgacggtgtacgatcgccatccagaaatcggtggcttgctcactttcggcattccttctttcaaactggataaatccctgctggcacgccgtcgggaaatcttcagcgcgatggggattcacttcgaactcaattgtgaagtgggtaaagatgtctctttggatttgcttttggaacaatacgacgcggtcttcgttggcgtaggcacttaccgttccatgaaagcgggtttacccaatgaagatgcgccgggcgtttatgacgcgctgccgttcctcattgccaacactaaacaggtgatggggctcgaagagctaccggaagagccgtttatcaataccgccggacttaacgtcgtggtactgggcggcggcgacaccgcgatggactgtgtgcgtactgcgctgcgccacggcgcgagtaacgtcacctgcgcttatcgtcgtgatgaagctaacatgccaggctcgaagaaagaggtgaagaacgcccgcgaagagggggccaacttcgaatttaacgtccagccggtggcgcttgagctgaatgagcaaggtcacgtttgcggaattcgtttcctgcgcacgcgtcttggcgagccggatgcccaggggcgtcggcgacctgtaccgattgagggcagtgaatttgtcatgccagccgatgcggtgattatggcgtttggcttcaatccacacgggatgccgtggctggagtcgcacggtgtaacggtagacaaatggggccgcatcatcgcggatgtggaaagccagtaccgttaccagaccaccaatccgaaaatcttcgccggtggcgacgccgtgcgtggtgcggatctggtggttaccgcaatggcagaaggacgtcatgcggcacaggggattattgactggctgggggtaaaatcagtcaaatctcactga

SEQ ID NO: 470940 - DNA, 576 bp, Shigella flexneri
atgacgcaacaaatcaccctcattaaagacaaaattctctccgataactatttcaccctgcacaacattacttacgatctcacgcgcaaagatggcgaagttatccgccataaacgtgaagtttacgatcgcggtaatggtgcgacgatcctcctgtacaacgcgaagaaaaagagcgtggttctgattcgtcagttccgtgtcgctacctgggttaatggcaatgaaagcgggcagctgattgaaacctgcgccgggctgctggataacgacgaaccggaagtgtgcattcgtaaagaagcgattgaagagacgggctatgaagtgggcgaagtgcgcaaattatttgaactgtatatgtcgcctggcggtgtgactgagctaatccacttttttatcgccgaatacagtgacaatcagcgcgctaacgccggtggcggtgttgaagatgaagatattgaagtgctcgagctgccgttcagccaggcgctggagatgatcaaaaccggcgagatacgtgacggtaagacggtgttattgcttaactatttgcaaatgtcacatttaatggactga

SEQ ID NO: 470941 - DNA, 1044 bp, Shigella flexneri
atgcgctatcgcattttccttctcttttttttcgctttgttgccgacgtctttggtgtgggcggcaccagcgcaacgggcgttttccgactggcaggtcacctgtaataatcaaaatttttgtgtggcgcgcaatacgggcgatcataatggactggtgatgaccctgagccgcagcgctggggcgcataccgatgccgttttacgtattgagcgcggtgggttgaagtcgccggatgcgtctgaaggggagatagcgccacggctgctattagatggtgagccgttggcattaagtggtgacaagtggcggatttcaccatggttattagtaaccgatgatacggcaaccatcaccgcgtttttgcagataattcaggaagggaaggcgatcaccttacgcgacggcaatcagaccatttctctgagcggcttaaaagcggcgttgttgtttattgatgctcagcaaaagcgcgttggcagtgaaaccgcgtggatcaagaaaggggacgaaccgcctctcagcgtaccgcccgcgcctgcgctgaaagaggtcgcggtggttaacccaacgccgacgccactctcactcgaagaacgtaacgatttgctggattatggaaactggcggatgaatggtctgcgctgctcgcttgatccgttacgtcgtgaggtgaatgtcactgcgctgaccgatgataaagcactgatgatgattagctgtgaggcaggggcctataacaccattgatttggcatggattgtgtcgcgtaaaaagccgctagcctcgcgcccggttcggttgcgtttgccgttcaacaacggccaggagacgaatgaactggaactgatgaacgcaacatttgatgagaaatcgcgtgaactggtgaccttagcgaaagggcgcggattaagcgattgtggcattcaggcgcgctggcgctttgacggtcagcgttttcgcctggtgcgttacgccgcagaacctacctgcgataactggcatgggccagacgccaggcccacgttgtggatcacccgttaa

SEQ ID NO: 470942 - DNA, 2004 bp, Shigella flexneri
atgtcccgaaaagaccttgccaatgcgattcgcgcactcagtatggatgcggtacaaaaagccaattctggtcatcccggcgcgccgatgggcatggctgatattgccgaagtgctgtggaacgattttcttaaacataatcctaccgacccaacctggtatgatcgcgaccgctttattctttccaacggtcacgcgtcgatgctgctctacagtttgctacatctgaccggttacgacctgccgctggaagaactgaagaacttccgtcagttgcattcgaaaaccccaggccacccggagattggctatacgccaggcgttgaaaccaccaccggcccgcttggacaaggtttggcgaacgccgtcgggctggcgatagcagagcgtacactggcggcgcagtttaaccagccagaccatgagatcgtcgatcacttcacctatgtgtttatgggcgacggctgcctgatggaaggtatttcccacgaagtctgttcgctggcaggcacgctgggactaggcaagctgattggtttttacgatcacaacggtatttccatcgacggtgaaacagaaggctggtttaccgacgatacggcaaaacgttttgaagcctatcactggcatgtgatccatgaaatcgacggtcacgatccgcaggcggtgaaggaagcgatccttgaagcgcaaagcgtgaaagataagccgtcgctgattatctgccgtacggtgattggctttggttcgccgaataaagcaggtaaggaagaggcgcacggcgcaccactgggggaagaagaagtggcgctggcacggcaaaaactgggctggcaccatccgccatttgagatccctaaagagatttatcacgcctgggatgcccgtgaaaaaggcgaaaaagcgcagcagagctggaatgagaagtttgccgcctataaaaaggctcatccgcaactggcagaagagtttccccgacggatgagcggtggtttaccgaaggactgggagaaaacgactcagaaatatatcaatgagttacaggcaaatccggcgaaaatcgctacccgtaaggcttcgcaaaatacgcttaacgcttacgggccgatgctgcctgagttgctcggcggttcggcggatctggctcccagcaacctgaccatctggaaaggttctgtttcgctgaaggaagatccggcgggcaactacattcactacggggtgcgtgaatttggcatgaccgctatcgccaacggcatcgcgcaccacggcggctttgtgccgtataccgcgacgttcctgatgtttgttgaatacgcccgtaacgccgcgcggatggcggcactgatgaaagcgcggcagattatggtttatacccacgactcaattggcctgggcgaagatggtccgacgcaccaggctgttgagcaactggccagcctgcgcttaacgccaaatttcagcacctggcgaccgtgcgatcagatggaagcggcggtgggctggaagctggcggttgagcgccacaacggaccgacggcactgatcctctcaaggcagaatctggcccaggtggaacgtacgccggatcaggttaaagagattgctcgtggcggttatgtgctgaaagacagcggcggtaagccagatattattctgattgccaccggttcagagatggaaattaccctgcaagcggcagagaaattagcaggagaaggtcgcaatgtacgcgtagtttccctgccctcgaccgatattttcgacgcccaggatgaggaatatcgggagtcggtgttgccttctaacgttgcggctcgcgtggcggtggaagcaggtattgccgattactggtacaagtatgttggtctgaaaggggcaattgtcgggatgacgggttacggggaatctgctccggcggataagctgttcccgttctttggctttaccgccgagaatattgtggcaaaagcgcataaggtgctgggagtgaaaggtgcctga

SEQ ID NO: 470943 - DNA, 951 bp, Shigella flexneri
atgaacgagttagacggcatcaaacagttcaccactgtcgtggcagacagctgcgatattgagtccattcgccattatcatccccaggatgccaccactaatccttcgctgttactcaaggctgccggattatcacaatatgagcatttaatagacgatgctatcgcctggggtaaaaaaaatggcaagacccaggaacaacaggtggtcgcagcgtgtgacaaactggcggtcaatttcggtgctgaaattctcaaaatcgtacccggttgcgtgtcaacagaagttgatgcacgcctctcttttgataaagaaaagagtattgagaaggcgcgccatctggtggacttgtatcagcaacaaggcgttgagaaatcacgcattttgatcaaactggcttcgacctgggaaggaattcgcgcggccgaagagctggaaaaagaaggtattaactgcaacctgacgctgctgttttcttttacccaggcgcgggcctgtgcggaagcaggcgtttttctgatttcgccgtttgtagggcgtatttatgactggtatcaggcacgcaagccgatggacccgtatgtggtggaagaagatccgggcgttaaatcggtgcgcaatatctacgactactataagcaacaccactatgaaaccattgtgatgggcgcgagcttccgtcgcaccgaacaaatcctcgccttaaccggctgcgatcgactgactatcgcaccgaatttgctgaaggagctgcaggaaaaagtttctccagtggtacgtaaattaatcccgccttctcagacgttcccacgcccagcacccatgagcgaagcggagttccgttgggagcacaatcaggatgcgatggcggtagaaaaactgtctgaaggcattcgtctgttcgctgttgatcaacgcaaactggaagatcttcttgccgccaaactataa

SEQ ID NO: 470944 - DNA, 2280 bp, Shigella flexneri
atggatgaccagttaaaacaaagtgcacttgatttccatgaatttccagttccagggaaaatccaggtttctccaaccaagcctctggcaacgcagcgcgatctggcgctggcctactcaccaggcgttgccgcaccttgtcttgaaatcgaaaaagacccgctaaaagcctacaaatataccgcgcgcggtaacctggttgcggtgatctctaacggtacggcggtgctggggttaggcaacattggcgcgctggcaggcaaaccggtgatggaaggcaagggcgttctatttaagaaattcgctgggattgatgtatttgacattgaagttgatgaactcgacccggacaaatttattgaagtcgtcgccgcgctcgaaccgaccttcggcggcatcaacctcgaagacattaaagcgccagaatgtttctatattgaacagaaactgcgcgagcggatgaatattccggtattccacgacgatcagcacggcacggcaatcatcagcactgccgccatcctcaacggcttgcgcgtggtggagaaaaacatctccgacgtgcggatggtggtttccggcgcgggtgccgcagcaatcgcctgtatgaacctgctggtagcgctggggctgcaaaaacataacatcgtggtttgcgattcaaaaggcgttatctatcagggccgtgagccaaatatggcggaaaccaaagccgcatatgcggtggtggatgacggcaaacgtaccctcgatgatgtgattgaaggtgcggatattttcctgggctgttccggcccgaaagtgctgacccaggaaatggtgaagaaaatggctcgggcaccaatgatcctggcgctggcgaacccggaaccggaaattctgccgccgctggcgaaagaagtgcgtccggatgccatcatctgtaccggccgttccgactacccgaaccaggtgaacaacgttctttgcttcccgttcatcttccgtggcgcgctggacgttggcgcaaccgccatcaacgaagagatgaaactggcggcggtacgcgcgattgcagaactggcccatgcagaacagagtgaagtggtggcttcagcgtatggcgttcaggatctgagctttggtccggaatacatcattccaaaaccgtttgatccgcgcttgatcgttaagatcgctcctgcggtcgcaaaagcggcgatggagtcgggcgtggcgacgcgtccgattgctgatttcgacgtctacatcgacaagctgactgagttcgtttacaaaaccaacctgtttatgaagccgattttctcccaggctcgcaaagcgccgaagcgcgtagttctgccggaaggggaagaggcgcgcgttctgcatgcgactcaggaactggtaacgctgggactggcgaaaccgatccttatcggtcgtccgaacgtgatcgaaatgcgcattcagaaactgggcttgcagatcaaagcgggcgttgattttgaaatcgtcaataacgaatccgatccgcgctttaaagagtactggaccgaatacttccagatcatgaagcgtcgcggtgtcactcaggaacaggcgcagcgtgcgctgatcagtaacccgacagtgatcggcgcgatcatggttcagcgtggggaagccgatgcaatgatctgcggtacggtgggcgattatcatgaacattttagcgtggtgaaaaatgtctttggttatcgcgatggcgttcacaccgcaggtgcaatgaacgcgctgctgctgccgagtggtaacacctttattgccgatacctacgtcaatgacgaaccagacgcagaagagctggcggagatcaccttgatggcggcagaaactgtccgtcgttttggtattgagccgcgcgttgctctgttgtcgcactccaactttggttcttctgactgcccgtcgtcgagcaaaatgcgtcaggcgctggaactggtcagggatcgtgcgccagatctgatgattgatggtgaaatgcacggcgatgcagcgctggtggaagcgattcgcaacgaccgtatgccggacagccctttgaaaggttctgccaatattctggtgatgccgaacatggaagctgcccgcattagttacaacttactgcgcgtttccagctcggaaggtgtgactgtcggtccggtgctgatgggcgtggcgaaaccggttcacgtgttaacgccgatcgcatcggtgcgtcgtatcgtcaatatggtggcgctggccgtggttgaagcgcaaacccaaccgctgtaa

SEQ ID NO: 470945 - DNA, 336 bp, Shigella flexneri
atggataaagaacgcatcattcaggaatttgtgcccggcaaacaggtcacactggcgcatctcatcgcgcatcccggtgaggaactggcgaagaaaatcggcgttccggatgcgggcgcaattggcattatgacgctaactcccggcgaaacggcgatgatcgccggtgatttagcgctgaaagccgctgatgtgcatatcggttttctcgaccgcttcagcggtgcattggtgatttatggctcggtgggcgcagtagaagaagcgttatcacaaaccgtcagcggtttaggtcgcttattaaattatacgctttgtgaaatgaccaaaagttaa

SEQ ID NO: 470946 - DNA, 480 bp, Shigella flexneri
atgaaacgaattgcgtttgtgggtagcgtcggggcaggaaaaacaacgttatttaatgcgttgcaggggaattataccctcgccagaaaaacactggccgtggaatttaatgataagggcgatattgatacgccgggtgaatattttagccatccccgctggtatcacgccttaattaccacgctacaggatgtagacatgctgatctatgtccatggcgcaaatgacccggaaagtcggttgcctgccgggttgctggatattggcgtcagcaaacggcaaatcgccgtcatcagtaaaacggacatgccagatgctgacgtcgccgcaacgcgaaagttattgcttgagacgggtttcgaagagccgattttcgagctaaacagccacgacccgcaaagcgtgcagcaactggtggattatctggcatctctcaccaaacaggaggaagcaggtgaaaaaactcatcacagcgaatga

SEQ ID NO: 470947 - DNA, 1374 bp, Shigella flexneri
gtgaaaaaactcatcacagcgaatgatattcgtgaagcacacgcgcgcggcgaacaggcaatgtccgtggttctgcgcgccagcattattaccccggaagcccgtgaagtggcggatctactgggttttaccatcaccgaatgtgatgaatcgatcccggtaacggcgtccgtgcccgccagcgtgccagccgacaaaaccgaaagccagcgcatccgcgaaaccatcattgcccagctgccggaaggccagtttaccgaaagcctggtcgcacagctgatggaaaaagtgatgaaggaaaaacagtcgctgggcgattttgtcgtcgccagcgccgggccgcacctcgaatccgtgatcgccggtcacggagccggggcgcaaaccctttctgaacaacggctgtgtcgggtactgaatatcgatatcggcggtggcaccgcgaactacgccctgttcgatgccggaaaaatcagcggcactgcctgtctcaacgtcggtggtcgcctgctggaaaccgacagccaggggcgcgtggtttacgctcataaaccggggcagatgattgtggatgagtgcttcggtgcaggcactgacgcccgttcgctgaccggcgcgcagctggtgcaggttacccggcggatggcggcgctgattgtcgaagtgattgacggaacgctttcgccgctcgcgcaggcattgatgcaaaccggtttgctgcccgcaggtgttacgcccgaaatcattacgctttctggaggcgtgggcgaatgttatcgccaccagcccgccaacccgttctgttttgccgatattggcccacttctggcaacggcgctgcatgaccatccgcgcctgcgtgagatgaatgtgcagtttccggcgcaaaccgtacgctccacggtgattggcgcgggtgcacataccctttcgctctctggcagcacaatctggctggagggcgtacaactgccgctgcgcaatttgccggtggcgatcccgattgatgaaacggatctggtgagtgcctggcaacaggcgctgcttcagctggatcttgatcccaaaactgacgtgtacgtgctggcgcttcccgcctcgctgcctgtgcgttacgccgcggttctgacggtcatcaacgcgctggtcgatttcgtcgcgcgttttccgaatccgcatcccctgctggtggtggccgggcaggactttggtaaagctctgggcatgttgttgcgcccacagctacaacaactcccgttggcagtcattgacgaagtgattgtccgcgcgggggactatatcgacattggtacgcctctttttggcggatcggttgtgccggtgacggtgaaatcactcgcatttccttcctga

SEQ ID NO: 470948 - DNA, 273 bp, Shigella flexneri
atgaccagcgttaatattcattgtccccgttgtcagtcagctcaggtttaccgccatggtcagaaccctaaaggccgtgacagacttcgctgccgtgactgccaccgtgtgtttcagttcacttatacttatcaagcacgtaagccgggtatgaaagagctgataactgaaatggcctttaatggtgccggggttcgcgataccgccaggacactgaaaattggtagtaacaccgtcatccggactttaaaaaactcgcgccaaagcgaataa

SEQ ID NO: 470949 - DNA, 396 bp, Shigella flexneri
gtggcgtttatctgcgagcttgatgagcaatggagctacgttggcagtaaagcccggcaacattggctcgggtacgcgtacaacaccaaaacaggcggtgtactggcctacacttttggtccccgaaccgatcaaacgtgccgggagctactggcactgcttacacccttcaacatcggcatgctgaccagcgatgactggggcagctatggccgggaggtgccgaagaataagcatctgaccggcaaaatattcacccaacgcattgagcgtaataatctgacgctacgcacccgcattaagcggttgggtcgtaaaacaatctgcttctcacgctcagttgagatccacgaaaaagtgatcggagcgtttatcgaaaaacacatgttctactaa

SEQ ID NO: 470950 - DNA, 810 bp, Shigella flexneri
atgtttagtgctgaatctccaattggtgtaatagactcaggtgtaggtggattgacatcggtaaaggaaataattaatttgcttcctggtgaagatattatctattgtggagataatatgaatgcaccttatggcaaccgttctgccgatgatatcatcagtttgactaaaaaaatgctgacttttttacagtcaaggaatgtcaaactagttgctgtcgcatgtaatactatatcctcaactttggaatccgaagaatacagcggatatgctaagagctttccgtttcctatcttatccatcattgaacctgcagtagaagatgtgattcgccagcaatataaaaatgttggtattatcgctaccgagtttactattaaaacggggtgtcacaaagagctaataaaaaaattgaattcaacaataaatgtatttggagaaccaagcaaaaatcttgcaatgttaattgaggaaggtaatcttaatgctcctgcaatcttgaatgacatcaaaaaacatgttaaccatttaatttccctccatccagtaaatgaaattattctcggctgtactcactatccaattgttcagaatttttttgaagcagttgcaccggatataaaatttattaatcctgcacatgatcaggctatctctattaaaaatcacttgggacagctaaatttattaaactcctcaaatataggaactttgcaaataaatactagtggaagtatggagatctacaaaacggtactaggggaattgagcattacgaaacctcatacattcagtatcaggcagttttaa

SEQ ID NO: 470951 - DNA, 1461 bp, Shigella flexneri
atgtctaatgctaatatcgcacccaaaagtaagaaaatgacagtggggacactcgctatcatgaatataactgctgtagtaagtctacgatttataccttctgaagcagaatacggcttaggtgccattttttactatacctttgctgcaattatgtttttagtacctgttgcctttgttgcggctgagctagctacaacatatccacaaaaagggggggcatttcgatggataggagaagcatttggggctcgctggggttttgtaggaatgcttatgacctggctacaagtcatcccctactttccaacagtactgacatttggtgcagtctcggttgcatttattgatgttgatatgggggtggcagaatcaattgccagtaataaatggtatattttatttttcgtactatttgtttactggggagctatttgtgttgcattacgtggcgttggtattttctcgcaggtatctaagtggtgcggtattatagggacaattattccagctattatccttgttattcttggtttctcctatctgtggttcagcggtaaaccagcggtgatcccattaggttggggtgatcttttccctaatatagctaacttccagaatattgttcttgccgccagcatatttcttgcttatgcagggatggaaatgaatgcggtccatgttaacgatttagataatccaactaaaaaatacccaattgcaattaccatcgcttctataggtactattgcaatattcctgctcagtactttaggggtcgcctttattattcctacagataaaattagtctaactcaaagtttgttggttgcctacgatatgctgttcgaatgggctggagtgccatggcttggctctgtgatggcatttatgctagcaattggcgtactgggtggggtggttacttggattgcagggcctaatacaggtgtattagcgatcgcgaaagctggttatttacctaagtttttccaaaaaaccaatcgtcatggaatggggcaccatctaatgtttgtacaaggtataattgtctcagttctttctgttacttttgtgataatgccttcagttcaagcagcttttcagattttatcacagttaacagttatgctctatttagttatgtatatgctcatgttcgctagtgctatctatctacgacattctcaacctgatacaaaacgcccatatcgagcccctgctttatttttctgggcaacacttggattcttagggtcttttctggcttttgtattaagctttattccgcccgagcaaatcccaactggtagtccaaccagctatgttctttatttgttagtattagttgccctatttttattaattccaatattaatttacgccttccgaaaatctgactggaaagatccaaactctgatttcgaaccattttcttgggaaaaaagaactagtaattaa

SEQ ID NO: 470952 - DNA, 267 bp, Shigella flexneri
atgaaaaataaatcaggtaattcttgttatagagaagcagtcgatattcatagctcacttgagctttcatttatattgcataaatatcatttgcgtgtagatgagaagaaatctcgaaatgtattcagcgccatacgtgatgagctcatccttgatggggattcacgacaaaacttagctactttctgtcaaacatggcttgatgatgaaatccgtgagttgcttaatttagctattgataaaaacataattgcagcaaaggtatag

SEQ ID NO: 470953 - DNA, 1563 bp, Shigella flexneri
ttgttgaccacttcagaattaacctcgtcgctgaaaggtaaacctgtttctgcgcagctaacggtaggcgtggtcgatgaaatgatctacgcgctgcaaccagaaatcgcgccgaatatcggcaaatttttctatccgctggggcgtaacaatgtgcgtaccagctccagtctgtcgtttatcagctatgaccaggcgctctccagcgagccggttgcgcctggcgcgactaaccgcagcgagcggcgagtaaaaatgcttgaacgtccacggcgtgaagaggtggataccgcggcatggatgccgtcactcacaaccgataaacaaggcaaagcgtatttcacgttcctgatgcctgattcgttaacccgctggcgtatcaccgcgcgtgggatgaacggcgacgggctggtcgggcaggggcgtgcttatctgcgttcggaaaaaaatctctacatgaagtggagtatgccaacggtgtatcgcgtgggcgacaaaccggcggcaggactgtttatcttcagtcagcaggataacgaaccggtggcgctggtgactaaatttgcaggcgctgagatgcgccagacgctgacgctgcacaaaggggcgaattatatttcgctgacgcagaatattcagcaatctggcttgttaagtgcagaactgcaacaaaatgggcaagtgcaggacagcattagcacaaaactgtcttttgtggacaacagctggcccgttgaacagcagaaaaatgtcatgctcggcggtggcgagaacgcgctgatgttgcccgagcaggcgagtaatatccggctacaaagtagtgaaacgccgcaggagattttccgcaacaatcttgatgcgttagtcgatgaaccgtggggtggggtgatcaacaccggtagccgtctgatcccgctcagtctcgcctggcgttcgcttgccgatcatcaaagtgccgccgctaacgacattcgtcagatgattcaggataaccgtctgcggctgatgcaactggcggggcccggagcgcgctttacctggtggggtgaagatggcaatggtgacgccttccttacggcatgggcatggtacgccgactggcaggccagccaggcgctcggcgtaacgcaacaaccggaatactggcagcatatgctcgacagttatgccgagcaggcggataacatgccgttattgcatcgggcgctggtgctggcgtgggcacaggagatgaatctgccgtgcaaaacgttgttgaaagggggggatgaagctatcgcccggcgcggaactaaagatgaagatttctctgaggaagacatccgcgatatcaatgacagcctgatcctcgatacaccggaatctccactggcagatgcggtggcaaacgtcttaaccatgacgttgctgaaaaaagcgcagttgaagtccacggtgatgccacaggttcagcaatatgcgtgggataaagcggcaaacagcaatcagccgctggcgcacacggttgtgctgctcaatagcggtggtgacgctacccagacggccgctattttaatggtttga

SEQ ID NO: 470954 - DNA, 516 bp, Shigella flexneri
gtgcaggtccgctggcgtgaaccggcaaaaacggctcaacaaagtaacattccggtgaccgttgaacgccagttgtatcggcttatccccggtgaagaagagatgagctttactctgcagccggtgaccagcaatgagattgacagcgatgcgctgtatctcgatgaaattacgcttaccagcgagcaggatgcagttctgcgctatggtcaggtggaagtaccgctcccgccgggagccgacgttgagcgcacaacatggggcatttcagtcaataaacccaacgccgcgaaacagcaggggcaattgctggaaaaagcgcgtaatgaaatgggcgaactggcctatatggtgccggtgaaagaactgacgggaacggtcactttccgccatttgctgcgcttctcgcaaaaagggcaattcgttctgcctcctgctcgttatgtgcgttcctatgcacctgcgcagcaaagtgtcgcggcagggagtgaatggaccgggatgcaggtgaaataa

SEQ ID NO: 470955 - DNA, 1650 bp, Shigella flexneri
gtgaactggcgcagaatcgtctggctattggcgttggttactctgccaacgcttgcggaggagacgccgttacaactggtgctgcgcggtgcgcagcacgatcaactgtatcagctgtcgtcatcaggcgtgaccaaagtctcagcattacctgactcgctcaccacgccgttagggagtttgtggaaactgtatgtttacgcctggctggaggatacccatcaaccggagcagccctaccagtgtcgcggaaactccccggaagaggtttattgttgtcaggctggggagagcataacgcgcgataccgcgctggtacgttcctgtgggctctattttgcgccgcagcggttgcatattggcgcagatgtgtgggggcaatactggcaacagcgtcaggcacctgcgtggttagcgtctcttacaacgctgaagccagaaacctcggtaacggttaaatcgctgcttgattcattagcgacgttacctgcgcaaaacaaagctcaggaagtcttactggatgtggtgctggacgaggcgaaaatcggtgtcgcatccatgctcggtagtcgggtacgggtgaaaacctggagctggtttgccgatgataaacaggaaatccgtcagggtggttttgctggctggttaaccgatggtacaccgctgtgggttactggcagtggcaccagcaaaacggtactaacccgttatgcgacggtgcttaatcgggttttgccagtgccgacgcaggttgccagtgggcaatgtgtagaggtggagctgtttgcccgctatccgctgaagaaaatcacagcggaaaagagtacgacggcagtaaaacccagcgtacttaatgggcgctatcgtgtgacgtttactaatggtaaccacattacgtttgtcagccacggtgagacgaccttactgagcgaaaagggcaaactgaaattgcagtcgcatctcgatcgtgaagagtacgttaccagagttctggatcgcgaggcgaaaagtacgccacctgaggcagcgaaagccatgactgtggcgatacgtacttttttacagcaaaacgccaatcgggaaggtgattgcctgaccatccccgacagcagcgccacgcagcgtgtttctgcttcgccagcgaccacgggggcgcgaacgatgaccgcctggacgcaggagctcatctatgcaggcgatccggttcattatcatggcagtcgcgctaccgaagggacactttcctggcggcaagccacggcccaggcggggcagggggagcgttacgaccagatactcgcgtttgcttatcccgacaacagccttagccgctggggagctccacgctcaacctgccagttattacccaaagcgaaagcctggctggcgaaaaaaatgccgcagtggcggcgtatattacaaggcgagacggggtacaacgaaccagacgtgtttgcggtctgtcgtttagtctcaggtttcccctataccgatcggcagcagaaacggctgtttattcgtaacttctttacgcttcaggatcggctggatttaacccatgagtatctgcacttggcctttgatggttatcccaccgggcttgatgagaactatatcgaaacgctgacccgacaattattaatggactaa

SEQ ID NO: 470956 - DNA, 777 bp, Shigella flexneri
atgcgaaagatttttcttccgttgttactggtggcactttcgcctgtcgctcacagtgaaggtgtgcaggaagtcgagattgacgcaccgctctctggctggcatccggcagagggcgaagatgccagtttttcacaatcgatcaattacccggcgtcgtccgtcaacatggcagatgatcaaaatatctcagcgcagatccgcggcaaaataaagaattatgctgcggcgggtaaagttcagcagggccggctggtggtcaacggtgccagtatgccgcagagaattgaatccgatggttcatttgcacgcccttatattttcactgaaggcagcaacagcgtgcaggtcatcagcccggatgggcaaagccggcaaaaaatgcagttttactcaacgccgggtacaggaactattcgtgcacgtttacggctggttctctcgtgggatacggacaataccgatctcgatctccatgttgtcacgcccgatggcgaacacgcctggtacggtaacaccgtgctgaaaaacagtggtgcactggatatggatgtcacgacggggtacggacccgagattttcgccatgccagcaccagttcacgggcgctatcaggtgtatatcaactactatggtgggcgcagcgaaacggaattgacgaccgcccaactgacgctgatcaccgatgaaggatcggtcaatgagaaacaggaaacatttattgtaccgatgcgtaatgctggcgagctgacgctggtgaaaagttttgactggtga

SEQ ID NO: 470957 - DNA, 2850 bp, Shigella flexneri
ttgaaataccttgcttcttttcgtacaaccctgaaagcctcgcgctacatgttcagagcattggcgttagtgctctggctgttgattgctttttcatccgttttttacatcgttaatgcgttacatcagcgagaatcggaaattcgtcaggaatttaatctgagttccgatcaggctcagcgctttattcaacgcacctctgatgtgatgaaagagcttaagtacatcgccgaaaatcgcttatcggcagaaaacggtgtgctttccccgcgtggacgagaaacgcaggcggatgtgcctgcgtttgaaccgctgtttgccgactccgattgttccgcaatgagtaacacctggcgaggttctctggagtcattggcgtggtttatgcgctactggcgcgataatttttctgcggcttacgatctcaaccgggtatttttaatcggcagtgataacctctgcatggccaatttcggtctgcgtgatatgccagtggaacgcgataccgcgttgaaagcgttgcatgaacgcatcaataaatatcgaaatgcaccacaagatgatagcggcagtaacctctactggatcagcgaaggtccgcgcccttgcgtcgggtatttttacgcgttgacgccagtttatctggcgaaccggttgcaggcgcttttgggtgtcgagcagaccatccggatggagaactttttcttaccgggtacgttgccgatgggggttaccattcttgatgaaaatggtcataccctgatttcgcttaccggaccagaaagtaaaattaagggcgatcctcgctggatgcaggaacgctcctggtttggctatacggaagggttccgggagctggtgctgaagaaaaatctgccaccctcatcgctaagcatcgtgtattcggtgccggttgataaggtgctggaacgcattcgcatgttgatccttaacgcaattttgctgaatgtgcttgccggagctgcattgtttactctcgcgcggatgtacgagcgacgtattttcattccggcggaaagcgacgccctgcgactggaagaacatgagcagttcaatcgcaagattgtcgcctccgcgccagtgggtatctgcattttgcgtaccgctgatggcgtcaatattttaagtaacgaactggcgcatacctatctcaatatgcttacgcatgaggaccgccaacgactgacgcaaattatctgtgggcagcaggtcaattttgttgatgtcctgaccagcaacaataccaatctgcaaatcagcttcgtccattcgcgctatcgtaatgaaaacgtggccatttgtgtgctggtggatgtttcttcgcgcgtgaagatggaagagtcgttgcaggagatggcacaagcagcggaacaggcgagccagtcaaaatcgatgttccttgccaccgtcagtcatgagctgcgaacgccgctgtatggcattatcggtaacctggatctgttgcaaaccaaagagttaccgaaaggcgtcgatcgtctggtgacggcaatgaacaactcttccagcctgttgttgaaaattatcagcgatattctcgatttctcgaagattgaatcggaacagttgaagatcgaaccgcgtgagttttcaccgcgtgaagtgatgaaccacatcaccgccaactatttaccgctggtggtacgcaagcagttaggcttgtactgctttattgaaccggatgtgccagtggccttaaatggcgacccgatgcgtttacagcaggtcatctccaacctgttgagtaacgccataaaattcaccgataccggctgtatagttttgcatgttcgcgctgatggcgattatctctctatccgtgttcgcgataccggcgtggggattccggcgaaagaagtggtgcgcttgtttgatcccttcttccaggttggaacgggcgtacagcgaaacttccaggggaccggtctgggtctggcgatttgtgaaaaactgatcagcatgatggacggcgatatctcggtagattcagaaccgggaatgggcagccagtttaccgtgcgtattccgttgtacggcgctcagtacccgcagaaaaaaggcgtggaagggttgagtggtaaacgctgctggctggcggtccgcaatgcgtcgctctgtcagttcctggaaaccagtttgcagcgcagcggcatcgtcgttacaacatacgaagggcaggaaccgactcccgaagatgtgttaatcactgacgaggtagtgagtaaaaaatggcagggcagagcggtagtgaccttctgtcgtcgccatattggtattccgctggagaaagcgccaggggagtgggtacacagtgtggctgctccgcatgagctaccggcattgttggcgcgtatttatttgatcgagatggagagcgacgatcctgctaacgctctgccgtcgacggacaaagcggtcagcgataacgacgatatgatgattctggtcgtggatgatcatccgattaaccgacgtctgctggcagatcagttgggatcgttgggctatcaatgtaaaaccgcgaatgatggcgtcgatgcgcttaatgtacttagtaagaatcatattgatatcgtgcttagcgacgtcaacatgccaaatatggatggttaccgcttgacgcaacgcattcgtcagttgggactgacgttgccggtaatcggagtaactgctaatgcgttggctgaagagaagcagcggtgtctggagtccggtatggacagctgcctctcgaagccggtaacgctgggtgtgataaaacagacgctgacggtatatgccgagagggtcaggaaatcgcgggattcgtag

SEQ ID NO: 470958 - DNA, 651 bp, Shigella flexneri
atgaacaatatgaacgtaattattgccgatgaccatccgatagtcttgttcggtattcgcaaatcacttgagcaaattgagtgggtgaatgttgtcggcgaatttgaagactctacagcactgatcaacaacctgccgaaactggatgcgcatgtgttgattaccgatctctccatgcctggcgataagtacggcgatggcattaccttaatcaagtacatcaagcgccatttcccaagcctgtcgatcattgttctgactatgaacaacaacccggcgattcttagtgcggtattggatctggatatcgaagggatcgtgctgaaacaaggtgcaccgaccgatctgccgaaagctctcgccgcgctgcagaaagggaagaaatttaccccggaaagcgtttctcgcctgttggaaaaaatcagtgctggtggttacggtgacaagcgtctctcgccaaaagagagtgaagttctgcgcctgtttgcggaaggcttcctagtgaccgagatcgctaaaaagctgaaccgcagtattaaaaccatcagtagccagaagaaatctgcgatgatgaagctgggcgtcgagaacgatatcgccctgctgaattatctctcttctgtgaccttaagtccggcagataaagactaa

SEQ ID NO: 470959 - DNA, 2673 bp, Shigella flexneri
atgcgtcagaaagagacaacggccacgacccgcttttcactcctaccggggagcattacccgcttctttttactgttgatcattgtgttactggtgacgatgggggtaatggtacaaagtgccgttaacgcttggctgaaagataaaagttaccagattgtcgacattacccacgcaatccaaaagcgcgtcgatacctggcgttacgtgaccaggcagatctacgacaacattgccgcgacgacctccccctcctccggcgaaggtttacaagagacgcgcctgaaacaggatgtctactatctggagaaaccacgccgcaaaacggaagcgttaatctttggctctcacgacaactcaacgcttgagatgactcagcggatgtccacttatctggatacattgtggggtgcagaaaatgtaccgtggtcgatgtattacctgaatggtcaggataacagtctggtgctgatctcaaccctaccccttaaagatctcacctccggatttaaagaatcgaccgtcagtgacattgttgattcacgtcgtgcagaaatgttacaacaggccaacgccctcgatgaacgcgaaagtttttctaacatgcgccgcctagcctggcagaacggtcattactttaccttgcgtaccacgttcaaccagccgggacatctggcaacggtcgtggcttttgatctgccgattaatgatttgatcccaccgggtatgccgctggacagtttccgccttgagccagacgcgacggcaacgggaaacaatgataatgagaaagaagggacggatagcgtcagtatccactttaacagtacgaagattgaaatctcctcggcactcaactctaccgatatgcgcctggtctggcaggttccttatggcaccttattgctggatacgttgcaaaacattctgctgccactgctgctgaacatcggtttgctggcgctggcgttatttggctataccacattccgccatttctccagccgcagtacagaaagcgtccccagcacggcggtcaataacgaattgcgcattttacgggcaatcaatgaagagatagtctcactgttgccgctcggcctgctggttcacgatcaggaatcgaaccgcactgtcataagtaacaaaattgccgatcatttgctgccgcatctgaatctgcaaaacatcaccaccatggcggaacagcatcaggggattattcaggcgacgatcaataacgagctgtatgagatccgcatgttccgcagccaggtcgcgccgcgcacacaaattttcattattcgcgatcaggatcgcgaagtgctggtaaacaagaaactcaagcaggcgcagcgtctgtatgagaaaaaccagcaggggcggatgacctttatgaaaaacattggcgatgcgctgaaagaacccgcacagtccctggcggagagtgcggctaaactcaacgccccggaaagcaaacaactggcgaatcaggcagatgtgctggtgcggctggtcgaagaaatacagttagcgaacatgcttgcggatgatagctggaaaagtgagacggtgctgttctccgtgcaggatttaattgatgaagttgtgccttcagtgttgcctgccatcaagcgtaaaggtctgcaactgctgattaacaatcatctgaaagcacacgatatgcgccgcggcgatcgcgatgccttacgacgtattttgctgctactgatgcaatatgccgtgacctcaacgcaattgggaaaaatcacccttgaggttgatcaggatgagtcctctgaagaccgcctgacattccgcattctggacacgggagaaggcgtaagtattcatgaaatggataatttgcacttcccgtttatcaaccagacccaaaacgatcgttatggaaaggcggacccgctggcattctggctgagcgatcaactggcacgtaaactgggcggtcatttaaacatcaaaacgcgggatgggcttggtacacgctactctgtgcatatcaaaatgctcgccgctgacccggaagttgaagaggaagaagagcgtttactggatgatgtctgcgtaatggtggatgttacttcggcagaaattcggaatattgtcactcgcctgttagaaaattggggtgcaacctgtatcacacccgatgaaagattaattagtcaagattatgatatctttttaacggataatccgtctaatcttactgcctctggcttgcttttaagcgatgatgagtctggcgtacgagaaattgggcctggtcaattgtgcgtcaacttcaatatgagcaacgctatgcaggaagcggtcttacaattaattgaagtgcaactggcacaggaagaggtgacagaatcgcctctgggcggagatgaaaatgcgcaactccatgccagcggctattatgcgctctttgtagacacagtaccggatgatgttaagaggctgtatactgaagcagcaaccagtgactttgctgcgttagcccaaacggctcatcgtcttaaaggcgtatttgccatgctaaatctggtacccggcaagcagttatgtgaaacgctggaacatctgattcgtgagaaggatgttccaggaatagaaaaatacatcagcgacattgacagttatgtcaagagcttgctgtag

SEQ ID NO: 470960 - DNA, 1122 bp, Shigella flexneri
atgaaagttaaagtactgtccctcctggtcccagctctgctggtagcaggcgcagcaaacgctgctgaagtttacaacaaagacggcaacaaattagatctgtacggtaaagtagacggcctgcactatttctctgacgacaagtctgtagatggcgaccagacctacatgcgtcttggcttcaaaggtgaaactcaggttactgaccagctgaccggttacggccagtgggaatatcagatccagggcaacagcgctgaaaacgaaaacaactcctggacccgtgtggcattcgcaggtctgaaattccaggatgtaggttctttcgactacggtcgtaactacggcgtagtttacgacgtaacttcctggaccgacgtactgccagaattcggtggtgacacttacggttctgacaacttcatgcagcagcgtggtaacggcttcgcaacctaccgtagcaccgacttctttggtctggttgacggtctgaacttcgctgttcagtatcagggcaaaaacggtagcccggaaggtgaaggcatgaccaacaacggtcgtgaagctctgcgtcagaacggtgacggcgttggcggttctattacttatgattacgaaggcttcggtatcggtgctgcagtttccagctccaaacgtactgatgaccagaacttcggtctgaaccgttatgatgagcgttacatcggtaatggcgaccgcgctgaaacctacaccggtggtctgaaatacgacgcgaacaacatctacctagctgctcagtacacccagacctacaacgcaactcgcgtaggcaacttgggttgggcgaacaaagcacagaacttcgaagctgttgctcagtaccagttcgacttcggtctgcgtccgtccctggcttacctgcagtctaaaggtaaaaacctgggtgtcatcaatggtcgtaactacgacgacgaagatatcctgaaatatgttgatgttggtgcgacctactacttcaacaaaaacatgtccacctacgttgactacaaaatcaacctgctggacgacaaccagttcactcgtgacgctggcatcaacactgataacatcgtagctctgggtctggtttaccagttctaa

SEQ ID NO: 470961 - DNA, 1056 bp, Shigella flexneri
atggaaataagctttacccgcgtggcactgctggttgccgcgctcttctttgttggttgcgatcaaaaaccacaacccgccaaaacccactctactgaagttaccgttcttgaaggcaaaaccatgggtaccttctggcgtgctagcatcccgggcattgatgccaaacgcagtgccgaacttaaagaaaagattcagacccagctggacgccgacgatcagctgctttcgacctataaaaaagattccgcgctgatgcgctttaacgactcgcaaagtttgtcgccgtggccggtaagtgaagcgatggccgatatcgtcaccacctcgctgcgcattggggcaaggaccgatggtgcgatggatattaccgtcgggccgctggtgaatctgtggggctttggcccggaacaacagccggttcaaattccgagccaggaacagatcgatgcgatgaaagccaaaaccggcttacagcacctgacggtcatcaatcagtcgcatcagcaatatctgcaaaaagacctgccggatttatatgtcgatctctccaccgtcggtgaaggttatgcggcggatcacctggcacgcttgatggagcaggaagggatttcccgctatctggtgtcggtgggcggcgcgctgaacagccgtggtatgaacggtgaaggccagccgtggcgggtagcgattcaaaaaccaaccgataaagaaaacgcggttcaggctgtggtggatatcaacggtcatgggattagcacctctggcagctaccgtaactattacgaactggacggcaaacgtctttcccatgttatcgatccgcaaaccgggcgtcccatcgaacacaatctggtatccgtgacggtgattgctccgacggcgctggaagccgatgcctgggatactggcttgatggtactcgggccggagaaagccaaagaggttgttcgccgggaagggctggcggtttatatgatcaccaaagaaggcgatagctttaaaacctggatgtcaccacagtttaaaagcttccttgtcagcgaaaaaaattaa

SEQ ID NO: 470962 - DNA, 1065 bp, Shigella flexneri
atgaaaaacgccacatgcttaactgacgatcaacgctggcaatctgtcttagcccgcgacccgaatgccgacggcgaattcgttttcgccgtgcgcaccacgggtatcttttgccgtccttcttgccgcgccagacatgccttgcgggaaaatgtctccttctacgcaaatgccagcgaggcactcgccgccggatttcgcccctgcaaacgttgtcagccagacaaagccaatccccggcaacatcggttggataaaatcacccacgcgtgtcgactgctggaacaggaaacgcctgtaacgctggaagccttagccgaccaggtggcgatgagtccatttcatctacatcggttgtttaaagctactaccggaatgacgcctaaagcctggcaacaggcctggcgcgctcgccgtttgcgcgaatcgctggcgaaaggggagagcgtgacgacgtctattcttaacgccggattccccgacagcagcagttactaccgcaaagccgatgaaacgctgggcatgacggctaaacaattccgtcacggtggcgaaaatctggcggtgcgttacgcgctggctgattgtgagctgggtcgttgcctggtggcagaaagcgagcgggggatttgcgcgatattgctgggcgatgatgacgcgacattaatcagcgagttgcagcagatgtttcccgctgccgacaacgcgcctgccgatctgacgtttcagcaacatgtgcgtgaagtgatcgccagcctcaatcaacgcgatacgccgctgacgttaccgctggatattcgcggcactgcttttcagcaacaagtctggcaggcactgcgcacgataccttgtggtgaaaccgtcagttatcagcaactggctaacgccatcggcaaaccgaaagcggtacgggccgttgccagcgcctgtgccgccaacaagctggctatcgtaataccctgtcatcgagtggtccgtggtgatggcacactttccggttaccgctggggcgtgtcgcgtaaagcgcaactgctgcgccgcgaagctgaaaatgaggagaggtaa

SEQ ID NO: 470963 - DNA, 651 bp, Shigella flexneri
atgttggatctgtttgccgatgctgaaccgtggcaagagccactggcggctggtgcggtaattttacggcgttttgcttttaatgctgcggagcaactaatccgcgatattaatgacgttgccagccagtcgccgtttcgccagatggtcgctccaggcggatataccatgtcggtggcgatgaccaactgtgggcatctgggctggacgacccatcggcaaggttatctctattcgcccattgatccgcaaacaaataaaccgtggcccgccatgccacaaagctttcatgatttatgtcaacgtgcggctacggcggcgggctatccagatttccagccagatgcttgtcttatcaaccgctacgctcctggcgcgaaactgtcgctgcatcaggataaagacgaaccggatctgcgcgcgccaattgtttctgtttctctgggcttacccgcgatttttcaatttggtggcctgaaacgtaatgatccgctcaaacgtttgttgttggaacatggcgatgtggtggtatggggcggtgaatcgcggctgttttatcacggtattcaaccgttgaaagcggggtttcatccactcaccaccgactgccgctacaacctgacattccgtcaggcaggtaaaaaagaataa

SEQ ID NO: 470964 - DNA, 1644 bp, Shigella flexneri
atggaacttcttgtacttgtctggcggcagtatcgctggccatttatcagtgtgatggcgctaagcctcgccagtgcggcattaggcattggcttaattgcttttatcaatcagcgccttatcgaaacggcggataccagtctgctggtgttaccggagtttctgggattattgctgctgttgatggcagtcactctcggatcgcaactggcgctcaccactttggggcatcacttcgtttaccgactgcgtagtgaatttatcaagcggattctggatacccacgtcgagcgcattgaacaactcggtagcgcctcgttgctggcgggattaaccagcgatgtgcgcaatatcaccattgcttttgtgcgtctgccggaactggggcaggggatcattctcactatcggttcatcggcgtatctgtggatgctgtcgggcaaaatgttgctggtaacggctatctggatggcgatcaccatctggggcggttttgtgctggtggcgcgggtgtacaaacatatggcgaccctacgtgaaaccgaagacaagctgtacacggattttcaaactgtacttgaagggcgcaaagagctgactctgaaccgggaacgcgccgagtatgtgtttaacaacctctacatccccgatgcgcaagagtatcgccatcatattattcgcgcagacaccttccatcttagtgccgtgaactggtcaaacatcatgatgctgggcgctatcggcctggtgttctggatggcgaacagtctcggttgggctgataccaacgttgctgcgacctattcgttgacgctgttattcctgcgtacgccgctgctttcggcggttggcgcattgccgacgctgctgacggcgcaggtggcgtttaacaagctgaacaaattcgcgctcgcgcctttcaaagctgagtttccgcgcccgcaggcgtttcccaactggcaaacgctggagctgcgtaacgtgacgtttgcttatcaggataacgcgttttccgttggtccgattaatctcaccatcaaacgtggcgagctgctgtttctgattggcggtaacggtagcggaaaatcgacgctggcgatgttgttgacgggcttgtatcagccacaaagcggcgaaatcttgctggatggcaaacctgtcagcggcgaacaaccggaagattatcgcaaactgttttcggcagtgtttaccgatgtctggctgtttgatcaactgctggggccggaggggcaacccgctaacccgcaactggttgagaagtggctggcgcagctgaaaatggctcataagcttgagttaagcaacgggcgtattgttaacctgaagttatcaaaagggcagaaaaaacgcgtggcgctgttgctggcgctggcagaagaacgcgatattatcctgctggatgaatgggcggtggatcaggatccacacttccgtcgtgagttttatcaggtgttgctgccgctgatgcaggagatgggtaaaactattttcgctatcagtcatgatgatcattactttatccacgccgaccgcctgctggaaatgcgcaatgggcaacttagcgagctgacgggcgaagagcgcgatgccgcttcgcgtgatgccgttgcccggacggcataa

SEQ ID NO: 470965 - DNA, 150 bp, Shigella flexneri
atgaaaaaagtgactgccatgctcttctcgatggccgtggggcttaatgccgtttcgatggcggcaaaagcgaaagcgtccgaggagcaggaaactgatgtactgttgattggcggcggcattatgagcgccacgttggggacctattga

SEQ ID NO: 470966 - DNA, 339 bp, Shigella flexneri
atggaactgaactacaccccgcaaaacgccgatggcagcatcagtattgaaaaagcagtcgccattaacgaagcatttcagatttcccgccagttctgggcgcaccaggtcgagcgcggcgtgctgcgtactccgcgttcatttatcaataccgttccgcatatgagctttgtctggggcgaggataacgttaatttcctgcgcgcccgttacgccgcgttgcaacaaagctcgctgtttcgcggtatgcgttactctgaagatcacgcgcagatcaaagagtgggcaccgttagtgatggaagggcgcgatccgcaacagaaattggcactgatgtga

SEQ ID NO: 470967 - DNA, 1032 bp, Shigella flexneri
gtgaactatggtgagatcacccgccagttaattgcttccttacagaagaaatctaacttctcgctgcaactcagcagcgaagtccgcgccctaaagcgtaatgacgataacacctggaccgttaccgttgccgatctgaaaaacggcactgcacagaacatccgcgccaaatttgtctttatcggcgcgggcggtgcggcgctgaagctgttacaggaatcggggattccggaagcgaaagactacgccggtttcccggtgggcggacagttccttgtttcggaaaatccagacgtggttaatcgccatctggcgaaagtttacggtaaagcatccgttggcgcaccaccgatgtcggttccgcatatcgatacccgtgttctggacggtaaacgcgtagtgctgtttgggccatttgccaccttctcaaccaaattcctcaaaaacggttcattgtgggatctgatgagttccaccaccacctctaacgtgatgccgatgatgcacgtcgggctggataatttcgatctggtgaaatatctggtgagtcaggtgatgttgagtgaagaggatcgttttgaagcgttgaaagagtactatccgcaagcgaaaaaagaggactggcgtttgtggcaagcggggcagcgtgtgcagattatcaagcgtgatgccgagaaaggtggcgtactgcgtctgggtaccgaagtggtcagtgaccagcaagggaccattgcggcgctgctgggggcatcgccaggggcgtcaaccgccgcgccgattatgttgaatctactggaaaaagtatttggcgatcgcgtttccagcccgcaatggcaggctacgttgaaagcgatcgttccgtcttatggacgcaagctgaacggtgatgtagcggcaacagaacgcgagttgcagtacaccagcgaagtgctggggctgaaatacgacaaaccgcaagcagcagatagtacgccgaaaccgcagttgaaaccgcaacccgttcaaaaagaagtggcggatattgcgttgtaa

SEQ ID NO: 470968 - DNA, 489 bp, Shigella flexneri
atgaagaccattctacctgaagtattgtttgccgctttcgctaccacttccgcctgggcggcagaaagcgtccagccactggaaaaaatcgcgccttatccacaagctgaaacaggcatgaagcgtcaggtgattcagttaaccccgcaagaagatgaatctaccctgaaagtagaactgttaatcggtcagacgctggaagtcgattgcaatttgcatcgtctcggcgggaagctggaaagcaaaacgctggaaggctggggctatgattattatgtctttgataaagttagctcgccggtttccacgatgatggcctgcccggatggcaagaaagagaagaaatttgtcaccgcgtatctgggcgatgctggaatgctgcgttacaacagcaagctgccgatcgtggtgtatacgccagacaatgtagatgtgaaataccgcgtctggaaggcggaagagaaaattgacaacgcggaagttcgctaa

SEQ ID NO: 470969 - DNA, 165 bp, Shigella flexneri
atgcataccccgatcggggtaaaacctgtagcaggatcaaaagagtggcgggaagcgtggcaaaaacgggcttttgctcacatttcaaatggttataaacatatttatatagcgattaattcaccagagatatttctgctggtttgctccctcatcagaatttaa

SEQ ID NO: 470970 - DNA, 495 bp, Shigella flexneri
gtgaagattgatgcatcccgtcggggcatactcactggttgctggcgcaaagccagtaacggtatccgtccgccctggtccggtgatgaatctcattttctgacccattgcacccgctgcgacgcctgtattaatgcttgtgaaaacaacattctgcaacgcggcacgggtggctatccgagcgttaatttcaaaaataacgagtgcagcttctgttacgcctgcgcgcaggcttgccccgaatcgctattttctccgcgccacaccagggcctgggatttgcagttcaccatcggggacgcgtgcctggcgtatcagtcagttgaatgccgccgctgtcaggatagctgtgagccaatggcaattatctttcgcccgacgctctccgggatctaccaggcgcaacttaatagccaactttgcaacggatgtggagcatgtgcagccagctgtccggtatcagccataactgcggagtatctccatgcacactaa

SEQ ID NO: 470971 - DNA, 264 bp, Shigella flexneri; identical to SEQ ID NO: 458649

SEQ ID NO: 470972 - DNA, 2487 bp, Shigella flexneri
atgaaactcagtcgtcgtagctttatgaaagctaacgccgttgcggccgctgcggcggctgccggtctcagcgtgccgggcgttgcccgcgccgttgttggtcagcaggaagccattaaatgggataaagcgccgtgccgtttctgcggtactggttgcggcgttctggtcggaacgcagcaggggcgtgtggtggcctgtcagggcgacccggacgcaccggttaaccgtggcctgaactgcattaagggctatttcctgcccaagatcatgtacggtaaagaccgtttgacgcagccgctgctgcgtatgaaaaacggtaaatatgacaaagaaggcgaatttaccccaatcacctgggatcaggccttcgatgtgatggaagagaaattcaaaaccgccctgaaagaaaaagggccggaatcgatcggtatgttcggttctggtcagtggactatctgggaaggttatgccgcgtccaagctgttcaaagcgggcttccgttcgaacaacatcgacccgaacgcacgtcactgtatggcgtcggcagtagttggctttatgcgtacctttggtatggatgagccgatgggctgctatgacgacatcgagcaggctgacgcgtttgtgctgtggggcgctaacatggcggagatgcacccgatcctctggtcacgcatcactaacagtcgtctctctaaccagaacgtcaccgtggcggtgctttctacctaccagcatcgtagcttcgagctggcggataacggcatcatctttacgccgcaatctgacctggtgatcctgaactacatcgccaactatatcattcaaaacaatgcgataaatcaggacttcttcagcaagcacgttaacctgcgcaaaggggcgacggacatcggctacggtttacgtccgacccatccgctggaaaaagcagcgaagaatccgggttctgacgcctccgaaccgatgagctttgaagattacaaagccttcgttgctgagtatacgctggaaaaaaccgctgaaatgaccggcgtgccgaaagaccagttagaacaactggcgcagctgtatgccgatccgaacaagaaagtcatctcctactggacgatgggcttcaaccagcatacccgtggtgtgtgggctaacaacctggtctacaacctgcacctgctgaccggcaaaatttcccagccgggttgcggtccgttctccctgaccgggcaaccttctgcgtgtggtactgcgcgtgaagtgggcacctttgctcaccgtctgcctgcggacatggtggtaactaacgagaaacatcgtgatatctgtgagaagaagtggaatatcccgagcggcaccattccggcgaaaatcggtcttcatgcggtggcacaagaccgtgcgctgaaagacggcaagctgaatgtttactggaccatgtgtaccaacaacatgcaggccgggccgaacatcaatgaagagcgtatgccgggctggcgcgatccgcgcaacttcatcatcgtctccgatccgtatccgacagtcagtgcgctggccgccgacttgatcctgccgaccgcaatgtgggtagagaaagagggcgcttacggtaacgccgaacgccgtactcagttctggcgtcagcaggtacaggcgccaggcgaagcgaaatcggatctctggcagttagtccagttctcccgccgcttcaaaactgaagaagtatggccggaagagctgctggcgaagaaaccggaactgcgtggcaaaacgctgtacgaagttctgtatgccacccccgaagtgagcaaattcccggtatccgaactggcggaagatcagctgaacgatgaatcccgcgagctgggcttctatctgcaaaaagggctgttcgaagagtacgcatggtttggtcgcggtcacggtcacgatctggcaccgttcgatgactaccacaaagcgcgcggtctgcgctggccggtggtgaatggtaaagaaacacagtggcgttacagcgaaggtaacgacccgtacgtgaaagcgggcgaaggctataagttctacggtaaaccggatggcaaagcggtgatcttcgcactgccgttcgaaccggcggcggaagcaccggatgaagagtacgacctgtggctctctaccggacgcgttctggagcactggcacaccggcagtatgactcgccgtgtgccggaactgcaccgcgccttcccggaagcggtcttgtttattcacccgctggatgcgaaagcgcgcgatctgcgccgtggcgacaaagtgaaagtggtttctcgccgtggcgaagtgatctcgattgttgaaacgcgcggtcgtaaccgtccgccacagggcctggtgtacatgccgttcttcgacgccgcacagctggttaacaaactgacgctggatgcgaccgatccgctctcgaaagagacggacttcaagaagtgcgcggtcaaactggagaaggtgtaa

SEQ ID NO: 470973 - DNA, 696 bp, Shigella flexneri
atgtcccggtcagcgaaacctcaaaatggtcgccgccgctttctgcgcgatgtcgttcgcacagcaggcgggctggctgccgtgggtgtggcgctggggttacaacagcaaaccgcacgtgcatctggcgtgcggttgcgcccgcccggagccataaacgagaacgcctttgccagtgcctgtgtgcgttgcggtcagtgtgttcaggcttgcccttacgacaccttaaaactggcgacgctggcctctggtctgtcggcgggcacgccatattttgtcgcacgggatattccttgcgaaatgtgtgaggacattccgtgcgccaaagtgtgcccaagcggtgcgctggatcgtgagattgaatcgatcgacgacgcgcggatggggctggcggtactggtggaccaggaaaactgtctcaactttcaggggctgcgctgcgatgtttgttatcgcgaatgcccgaaaattgatgaggccatcaccttggagctggagcgcaacacgcgtaccggtaagcacgcccgctttctgccgacggttcacagcgacgcctgtaccggttgcggtaagtgcgaaaaagtatgcgtgctggaacaaccggcaatcaaggtgttaccgctgtcactggcgaaaggggagttaggtcaccattaccgcttcggctggctggaggggaacaatggcaaatcgtaa

SEQ ID NO: 470974 - DNA, 864 bp, Shigella flexneri
atggcaaatcgtaaacgtgacgccgggcgcgaggcgctggagaaaaaaggctggtggcgcagtcaccgttggctggtgttacgtcgcctttgtcagttcttcgtgctggggatgtttttgagcggtccatggtttggtgtgtggatcttgcacggcaactacagcagtagcctgttattcgacaccgttccgctgaccgatccgctgatgacgctgcaaagtcttgccagtggtcatctgcctgccacggtggcgttgaccggtgcggtgattatcaccgtgctctacgccctggcgggaaagcgattattttgcagctgggtctgcccgctgaacccgattaccgacttagcgaactggttacgcaggcgctttgacctcaatcagtctgcgacgatccctcgccacattcgctacgtgctgttggtggtcattctggtgggatcagccttaactggcacgctcatttgggaatggatcaaccccgtttctctgatggggcgtagcctggtaatgggcttcggcagcggcgcgctgcttattctcgcgctgtttttatttgatctactggtcgttgaacacggctggtgcgggcacatttgtccggttggcgcgctgtatggcgtgctgggtagcaaaggtgtgattaccgttgcggccagcgatcggcagaaatgtaaccgctgtatggattgttttcatgtttgcccggaaccgcatgtgctacgtgccccggtgctggatgaacaaagcccggtgcaggtcaccagccgcgattgcatgacgtgcggtcgctgcgtggatgtctgttctgaggatgtatttacaataactacacgatggagttcgggagcgaaatcatga

SEQ ID NO: 470975 - DNA, 450 bp, Shigella flexneri
atgaaaagccatgacctgaagaaagcgctgtgtcaatggacggcgatgctggccctggtggtaagcggcgcggtttgggcggctaatggcgtcgattttagccagtcgccggaagtatccgggacgcaggaaggggccattcggatgccaaaagagcaggatcggatgccgctgaactatgtgaatcagccgccaatgatcccgcatagcgttgaaggttatcaggtaacgaccaataccaatcgctgcttgcagtgccacggtgtcgaaagctatcgcaccactggcgcgccgcgtatcagtcctactcactttatggacagcgacggcaaagtgggcgcggaagtggctccgcgtcgttatttctgtctgcaatgtcacgtaccgcaggccgataccgcgccaatcgtggggaatacctttaccccatcaaaaggttacgggaaataa

SEQ ID NO: 470976 - DNA, 603 bp, Shigella flexneri
atgggaaattctgaccgtaagcctggtctgattaagcgcctgtggaaatggtggcgtacccccagccatctggcgctggggacgctgctgttgatcggttttgttggcggcatcgtcttctgggggggctttaacaccgggatggaaaaagccaataccgaagagttctgcattagctgccacgaaatgcgcaacacggtgtatcaggaatacatggattccgtgcactacaacaaccgtagcggcgtccgtgcgacctgtccggattgtcacgttccgcacgagtttgtgccgaagatgatacgcaagctcaaagcaagtaaagagctgtatggtaaaatttttggcgttattgacacgccgcagaaatttgaagctcatcgtctgacgatggcacagaatgagtggcggcgcatgaaggacaataactcgcaggagtgccgtaactgtcacaacttcgagtatatggatacaaccgcccagaaatcggttgccgcgaagatgcatgaccaggcggtgaaagatgggcaaacctgtattgattgccataaagggatcgcgcacaagctgcccgatatgcgtgaagtcgagccaggtttttaa

SEQ ID NO: 470977 - DNA, 624 bp, Shigella flexneri
gtgggtatgcttgaagccagagagttactttgtgagcgggatgaacgaaccttatttagtggcttgtcatttacgctgaacgcaggagagtgggtacaaatcaccggtagcaacggcgcggggaagacaacgcttctccgtttgctgacggggttgtctcgccctgacgctggcgaggttctctggcaagggcagcccttgtatcaggtacgcgacagctaccatcaaaccctgttatggataggccatcagccggggatcaaaacccggctgacggcgttagaaaatctgcacttttatcatcgcgatggcgatgccgcacaatgtctggaagccttggcgcaggccgggcttgccggattcgaagatattccggtaaatcaactttctgccgggcaacaacgccgcgtcgctttagcgcgtctgtggttgacccgtgccacattatggatcctcgacgagccttttaccgcgattgacgttaacggcgtcgatcgtctgacccagcgtatggcgcagcatacggagcagggggggattgtgattctgactacccaccagccgctcaacgttgctgaaagtaaaattcgccgcatttcactgacgcaaacgagggccgcatga

SEQ ID NO: 470978 - DNA, 663 bp, Shigella flexneri
atgatgttctggcgtattttccgtcttgaactgcgcgtagcgtttcgccatagcgccgaaatcgccaacccgctgtggttcttcctgattgtaattaccctttttccgctcagtatcggtccggagccgcaactgctggcgcgtattgcaccgggcattatctgggttgctgcgctgctttcatccttgctggcgctggaacgactgttccgtgacgatttgcaggacggcagtcttgaacaattgatgttgttgccgttacccttgcccgccgttgtgctggcgaaggtgatggcgcactggatggtaaccggtctgccgttactcatcctttcgccactggtagcaatgctactgggaatggatgtttatggctggcaagtgatggcgctgacgctgctgctgggaacgcctacgcttggctttctcggtgcaccgggcgtggcgctgacagtgggacttaagcgcggtggtgtgctgctcagcatactggtgttaccgctgactatcccattactcatctttgccaccgccgcgatggacgcggcttctatgcatttgcccgttgatgggtatctggcaattttaggcgcgttgctggcaggcaccgcgacattaagtccttttgcgacggcggcagcgttacgaatcagcattcaataa

SEQ ID NO: 470979 - DNA, 762 bp, Shigella flexneri
ttgttcgagtctggtatcgaaactatgtggaaaacactgcatcaactggcgatcccaccacggctgtatcaaatctgtggctggtttataccgtggctggcaattgccagtgtggtcgtgcttaccgtcggctggatctggggattcggctttgctccggctgattatcagcagggaaatagctaccgcattatctacctgcatgtgcctgcggcgatctggtcgatgggcatttatgcatcaatggcggtggcggcgtttattggccttgtctggcagatgaaaatggccaacctggcggtggcggcgatggcccccattggtgccgtgtttacctttattgccctggttaccggctctgcatggggaaaaccgatgtggggcacctggtgggtatgggatgcacgtctgacttctgaactggtgctgctgtttttgtatgtgggtgtgattgccctgtggcacgccttcgacgaccgccgtctggcgggccgtgcggcaggtatcctggtgctgattggcgtggtgaatctgccgattattcattactccgtggagtggtggaacaccctgcatcagggatcaacgcggatgcagcaaagtatcgatccggcgatgcgttcgccgctgcgctggtcgatttttggcttcctgctcctgtctgccacgctgacgctgatgcggatgcgtaatttgattttgctgatggaaaaacgccgtccgtgggtgagtgaactgatactgaaaagaggccgtaaatga

SEQ ID NO: 470980 - DNA, 210 bp, Shigella flexneri
atgacccctgcatttgcttcctggaatgaatttttcgcaatgggcggttacgccttttttgtctggctggcggtggtgatgaccgttattccgctggtggttttggtcgtgcactcggtgatgcaacatcgcgcaattctgcgtggtgtggcgcaacagcgggcgcgtgaggcgcgtttacgtgctgcgcaacagcaggaggctgcatga

SEQ ID NO: 470981 - DNA, 480 bp, Shigella flexneri
atgaatattcgccgtaaaaaccgcttgtggattgcctgtgccgtgttggcagggctagcgctgactatcggtctggtgctatatgcgctgcgctcgaatatcgatctcttttatacgccgggggaaattctctacggcaagcgtgaaactcagcagatgccggaagtcggtcagcgtctgcgcgttggcgggatggtgatgccgggtagcgtgcagcgcgatcccaattcgctgaaagtgaccttcaccatttacgatgctgaaggctcagtggatgtctcttacgaaggcattttgccggatctgttccgtgaagggcagggcgttgtggtgcagggcgagctggaaaaaggcaatcatatcctcgcgaaagaagtgctggcgaaacacgacgaaaactacacgccgccagaagttgagaaagcgatggaagctaaccaccgtcgcccggcgagtgtttataaggacccagcatcatga

SEQ ID NO: 470982 - DNA, 1944 bp, Shigella flexneri
atgatgccggaaattggaaacgggctgctgtgcttggcgttagggattgcgctgctgctgtccgtgtatccgctatggggcgtggcgcgcggagatgcgcgcatgatggcgtcttcccgcttgtttgcctggctgctgtttatgtctgtggctggcgcatttctggtgctggtcaatgctttcgtggtcaacgactttaccgtcacctatgttgccagcaactccaatacccagcttccggtgtggtatcgcgtggcggctacttggggcgcgcatgaaggttcgcttctgctgtgggtgctgctgatgagcggctggacctttgcggtggcgatttttagtcagcgtattccgctggatattgtggcccgtgtactggcgataatggggatggtcagcgtcggctttttgctgttcattctctttacctctaacccgttctcacgcacgctgccgaacttcccgattgaagggcgcgatcttaacccgctgttacaggatccggggctgatcttccatccgcctctgctttatatggggtacgtgggtttctcggtggcgtttgcttttgccattgcttctttgctgagcgggcgtctggacagcacttatgcgcgttttactcgcccgtggacgctggcggcgtggattttcctgacgctcggcattgtgctcggttccgcatgggcctattacgaactcggctggggtggctggtggttctgggatccggtagaaaacgcctcgtttatgccgtggctggtggggactgcactgatgcactcactggcggtcactgaacaacgcgccagcttcaaagcgtggacattactgctggcaatcagtgccttctcgttgtgtctgttggggactttcctcgtgcgttccggcgtgctggtatcggtacacgcgtttgcgtctgatccggcgcgcggtatgtttatcctcgcctttatggtgctggtgattggcggttcgctgctgctgtttgccgcgcgtggacacaaagttcgctcacgcgtaaacaatgcgctgtggtcgcgggaatctttgctgttagcgaacaacgttttgctggtcgccgcgatgctggtggtgttgctggggacgctgctgccgctggtgcacaagcaacttggactgggcagtatttcgattggcgaaccgttcttcaacaccatgtttacctggctgatggtgccgtttgcgctactgcttggtgtcggtcctctggtgcgctgggggcgcgatcgcccacgtaaaatccgcaatttattgattatcgccttcatctctacgctggtgctgtctctgctgttgccgtggctgttcgaaagcaaagttgtggcgatgacggtgctcggcctggcaatggcctgctggattgcggtgctggcaactgcggaagctgcgctgcgtatttcacgcggcacgaaaaccaccttcagttattgggggatggtggcggctcacctggggctggcagtgacaattgttggcattgcctttagccagaattatagcgttgagcgtgatgtgcgcatgaagtccggcgatagcgtcgatattcatgaatatcgcttcaccttccgtgatgtcaaagaggtgactggcccgaactggcgcggcggtgtggcgactattggcgtaacgcgagagggtaaaccggaaacggtgctgtatgcggaaaaacgttattacaacactgccgggtcgatgatgaccgaagcggcaattgacggcggcatcacgcgtgacctgtacgccgcgctcggtgaagagctggaaaacggcgcgtgggccgtgcgtctttactacaaaccatttgttcgctggatttgggcgggcgggctgatgatggcgttgggcggactgctgtgtctgtttgatcctcgctatcgtaagcgcgtgagtccgcaaaaaactgcgccggaggccgtatga

SEQ ID NO: 470983 - DNA, 558 bp, Shigella flexneri
atgaagcgcaaagtattgttaattccgttgattatcttcctggcgattgccgcggcgctgctgtggcagctggcgcgtaatgccgaaggggatgatccgaccaatctggaatcggcgctcattggcaagcctgtgccgaagtttcgtctcgaatcactggacaatccggggcagttttatcaggcggatgtgctgactcagggcaaaccagtactgcttaacgtctgggcgacttggtgtccgacctgccgtgcggaacatcaatatctgaatcagctttcagcgcagggcattcgcgtggtcggcatgaactataaagacgatcgccagaaggcaatcagctggctgaaagagctgggcaatccttacgcgctaagcctgtttgatggcgacggcatgttagggctggatctcggtgtctatggcgcgccagaaaccttccttattgacggcaacggtatcattcgctatcgccatgcgggcgatctcaatcctcgcgtctgggaagaagagatcaagccgctgtgggagaaatacagtaaggaggccgcacaatga

SEQ ID NO: 470984 - DNA, 1053 bp, Shigella flexneri
atgaggtttttattgggcgtgctgatgctgatgatctccggctcagcgctggcgaccatcgacgtgttgcagtttaaagatgaagcacaggaacaacagttccgtcagctcactgaagaactgcgctgcccgaaatgccagaacaacagcattgccgattccaactcgatgattgccaccgacctgcgtcagaaagtgtatgaactgatgcaggaaggtaaaagtaaaaaagagattgtcgattatatggtggcgcgttacggcaacttcgtcacttacgatccgccgttaacgccgctgaccgtgctgctgtgggtgctgccagtagtggctattggcattggcggttgggtcatatacgcccgctcgcggcgtcgggtacgcgtggtgccggaagcgtttcctgaacaaagcgtgccggaaggtaagcgtgccggatatgttgtttatctgccgggtattgtggtggcgttaattgtggctggcgtcagctactaccagactggcaattatcagcaggtgaaaatctggcagcaggccacggcacaggctccggcgttgctggacagggcgctggacccgaaagccgatccgctcaacgaagaagagatgtcgcgccttgcgctggggatgcgtactcaactgcaaaaaaatccgggagatatagaaggctggattatgttgggccgcgttggcatggcgctgggtaacgccagtatcgccaccgatgcatacgctactgcgtatcgcctcgatccgaagaacagcgatgccgcactgggatacgctgaagcgttgactcgttcatctgatcccaacgacaaccgcctcggcggtgaactgctacgtcagctggtgagaacggaccatagcaatatccgtgtgctaagcatgtatgcgtttaatgcctttgagcagcagcgatttggcgaagccgttgccgcgtgggagatgatgttgaaactcttacctgccaacgatactcgccgtgcggtgattgaacgtagtatcgcgcaggcgatgcaacatttgtcgccgcaggagagtaaataa

SEQ ID NO: 470985 - DNA, 648 bp, Shigella flexneri
atgcctgaagcaacgccttttcaggtgatgattgtggatgatcatccacttatgcgacgcggtgttcgtcagttactggagcttgatcctggctttgaagtggtcgccgaagcgggcgaaggcgcgagcgcgatcgatctggcgaatagactggatatcgacgtgatcttgctggatctcaatatgaaaggtatgagtggcctggataccctcaatgccttgcgcagggatggcgttaccgcgcaaattattatcctgaccgtatccgatgcctccagcgatgtctttgcgctgatagacgcaggcgcagacggttatctgttgaaagacagcgacccggaagtattgctggaagcgattcgtaccggagcgaaaggcagcaaagtctttagcgaacgcgtcaatcagtacttacgtgaacgtgaaatgtttggcgcggaagaagatcccttcagcgtgctgacggagcgcgagctggatgttctgcacgagctggcacaggggctgtcaaataaacagattgcatcggtgttgaatatttccgagcagacagtaaaagtacatattcgcaatctgctgcgtaaactcaatgtccgctcacgcgtggcggccaccattctgttcctgcaacaacgcggggcacaataa

SEQ ID NO: 470986 - DNA, 2592 bp, Shigella flexneri
atgcatcaatctggttctgtttctctttgtcgttccgcaatatctgttctggtggctacagcgttatattcacccatagcattggcatcaacagttgagtatggtgagacagttgatggtgttatcctggaaaaagatatccagctggtttatgggaccgccaataatacgaaaatcaatcctggcggagaacagcatataaaagaatttggtgtaagtagtaatactgaaattaacggagggtatcaatacattgaaatgaatggtaccgcagaatactcagtattaaatgatggttatcaaattgttcaaatgggtggcgcggcaaaccagactaccctcaataatggtgtgctacaggtttatggcccagcgaatgataccacgattaaaggcgggcgcttaatcgttgaaaaagatggggggaccgtttttgccgctatcgaaaagggaggactactggaggttaaagaggggggatttgcgcttgcggtagatcagaaagcaggcggtgctattaaaacaaccacgcgggccatggaggtattcggaacaaaccgtctcggtcagttcgatatcaagaatggtattgctaataatatgttgttggaaaacggcggaagtttgcgagttgaagaaaatgacttcgcttataatactactgtggatagtggcggcttactggaggttatggatggcgggactgcaactggcgttgataaaaaagcaggcgggaaattaattgtctcaacgaatgcgctggaagtgagtggtacaaacagtaaaggccaatttagtataaaggatggtgtgtcaaaaaattatgaactggatgatggttccgggctcattgttatggaggacacgcaggccattgacactatccttgatgagcatgccactatgcaatcgctgggaaaggatactggtacgaaagtgcaggcaaatgcggtatatgatctcggtcgatcagaccagaatggaagtatcacgtattcctcaaaagccatctctgaaaatatggtaatcaacaatggccgcgctaatgtctgggctggcacaatggttaacgtgtcagtcagagggaatgatggcattcttgaggtcatgaagccgcaaataaattatgcacccgctatgttggtgggtaaggtagtggtttctgagggcgcttcttttagaacgcatggtgccgtggataccagcaaagcggacgtttcgctcgaaaatagcgcatggaccatcattgccgatatcactacgacgaaccaaaacactcgcctcaacttagccaaccttgcgatgtccggcgcaaatgtgattatgatggctgagccagtgactcgttcatctgtgacggcaagtgcggaaaatttcattacgttgaccaccaataccctgtcgggaaacggcaatttttatatgcgtaccgatatggccaatcatcagagcgatcagctcaacgtcaccggtcaggcaacaggtgatttcaaaatattcgtgacggacaccggtgccagcccggcagcaggagatagccttacactggtaacaacgggcggcggtgatgctgcatttacgttgggcaatgccggaggcgttgttgatatcggtacgtatgaatataccttgctggataatggcaaccatagctggagcctcgcagagaatcgcgcgcaaattaccccttcaaccactgatgtgctgaacatggcagccgcacaaccgctggtatttgatgcagaactggacaccgtgcgtgagcgtcttggtagcgtaaaaggcgttagttacgatacggtgatgtggagttcggcaattaacacccgcaacaacgtgaccactgatgcgggagctggttttgagcaaacattgacgggcctgacgctcggtatcgatagccgtttctcccgtgaagaaagcagtacaattcgcggcttgttctttggttactctcattctgatattggttttgatcgcggcggaaaaggtaatatcgatagctataccctgggggcttatgccggttgggagcatcagaacggtgcctatgttgatggggtggtgaaagttgaccgttttgccaacaccatccatggcaagatgagtaatggggcaacagcgtttggcgattacaatagtaacggcgcgggtgctcatgttgagagcgggttccgttgggttgacggattgtggagtgttagaccctatctggcctttaccggctttaccacagatggtcaggactacacgttatcaaacggcatgcgcgcggatgtgggaaatacccggatattacgcgctgaagcgggaacggcggtaagctatcacatggacctgcaaaacggtacgacgctggaaccctggctgaaagccgccgtgcgtcaggaatacgccgattctaaccaggtgaaagttaatgacgatggcaaatttaataatgatgtggctggaaccagtggcgtttatcaggctgggataaggtcatcgtttaccccgacgttaagcggtcatttgtcagtcagctatggcaatggcgcaggggtagaatcgccgtggaatactcaggcgggtgtggtctggacgttctga

SEQ ID NO: 470987 - DNA, 1761 bp, Shigella flexneri
atggtaactcatcgtcagcgctaccgtgaaaaagtctcccagatggtcagttgggggcactggtttgcactgttcaatattctgctttcgctcgtcattggcagccgttacctgtttatcgccgactggccgacaacgcttgctggtcgcatttattcctacgtaagcattatcggccatttcagcttcctagtgttcgccacctacttgctgatcctcttcccgctgacctttatcgtcggctcccagaggctgatgaggtttttgtccgtcattctggcgacggcgggaatgacgctattactgatcgatagcgaagtctttactcgtttccatctccatcttaatcccatcgtctggcagttggttatcaacccagacgaaaatgagatggcgcgcgactggcagctgatgttcatcagcgtgccggttattttattgcttgaactggtgtttgcgacgtggagctggcaaaagctgcgcagcctgacgcgtcgtcgacgcttcgcgcgcccgctggccgcattcttatttatcgcctttatcgcctcgcatgtggtgtatatctgggccgatgccaacttctatcgcccgatcaccatgcagcgcgctaacctgccgctttcgtacccgatgacggcgcgacgtttccttgagaagcatggcctgcttgatgcgcaggagtatcaacgccgtcttattgagcaaggtaatccagacgccgtttccgtacagtatccgttaagcgaactgcgctatcgcgatatgggcaccgggcagaatgtgctgttgattactgtcgatggcctgaactactcacgcttcgagaagcagatgcctgcgctggcaggttttgctgagcaaaatatttcgttcacgcgccatatgagctccggcaacactacagacaacggcatctttggcctgttctatggcatctcgccgagctatatggacggcattctgtcgacccgtacgcctgcggcattaattactgcgcttaatcagcaaggctatcagctggggttattctcatcagatggctttaccagcccgctgtatcgccaggcattgttgtcagatttctcgatgccgagcgtacgcacccaatctgacgatcagaccgccacgcagtggatcaactggctgggccgctacgcacaagaagataaccgctggttctcgtgggtttctttcaatggcactaacattgacgacagcaatcagcaggcatttgcacggaaatatagccgggcggcaggcaatgtcgatgaccagatcaaacgcgtgctcaatgcactgcgtgattctggcaaactggacaatacggtggtgattatcactgccggtcggggtattccactgagcgaagaggaagaaacctttgactggtcccacggtcatctgcaggtgccattagtgattcactggccaggcacgccggcgcagcgtattaatgctctgactgatcataccgatctgatgacgacgctgatgcaacgcctgctgcatgtcagcacacctgccagcgaatattcgcaaggtcaggatttgttcaaccctcaacgccgtcattactgggttactgctgcggataacgatacgctggcaattaccaccccgaaaaagacgctggtgctgaacaataacggtaaataccgcacttacaacttacgtggtgaaagagtgaaagatgaaaaaccacagttaagtttgttattgcaagtgctgacagacgagaagcgttttatcgctaactga

SEQ ID NO: 470988 - DNA, 228 bp, Shigella flexneri
atgccacaaatttcccgctacagtaatgaacaggttgaacaattgctcgcagagctgctcaacgtactggaaaaacataaggctccgaccgacctttccctgatggtgttaggcaacatggtcactaaccttatcaacaccagcattgccccggcccaacgccaggcaattgccaactcttttgccagcgccttacagtcctctatcaacgaagacaaagcgcactaa

SEQ ID NO: 470989 - DNA, 1008 bp, Shigella flexneri
atgagtctggatatcaaccagattgctctgcaccagcttatcaagcgtgatgagcagaaccttgagctggtgttgcgcgattcattgctggaaccgacagaaaccgtcgttgagatggtggcagaactgcatcgggtctatagcgccaaaaataaagcttacggcttgtttagcgaagagagtgaactggcgcagacgctgcgcttacagcgtcagggcgaagaggactttctggcatttagccgcgcggcaaccggtcgcctgcgtgacgaattagcgaaatatccttttgctgacggtggattcgtgctgttttgccactaccgttatctggcggtggagtatttgctggtggcagttctgagcaacctgagcagtatgcgcgttaacgaaaatctcgacatcaacccaacccattatcttgatatcaatcatgcggatattgttgcgcgtatcgatttaaccgaatgggaaaccaatccagagtccacccgctatctcactttcctgaaagggcgagtagggcgcaaagtggcggatttctttatggatttcctcggggccagcgaaggattgaacgcgaaagcgcaaaaccgtgggctgttgcaagcggttgatgatttcactgccgaagcacaactggataaagcagagcgacagaacgtgcgccagcaggtttatagctactgtaatgagcagctgcaggcaggcgaagagatcgaactggaatcgctgtcgaaagagctggcaggcgtaagcgaagtgagcttcacggagtttgcggctgaaaaaggctacgaactggaagagagcttcccggcagaccgtagcacactgcgtcagttgacgaagtttgccggtagcggcggtggcttgactattaactttgatgcgatgctgttaggtgaacgcatcttctgggatccagcaaccgataccttgaccattaaaggcacgccgccgaatttgcgcgaccaattgcagcgccggacgtctggcggcaattaa

SEQ ID NO: 470990 - DNA, 219 bp, Shigella flexneri
atgcggcgtgaacgccttatctggcctgcaaaaaatagcaataccgtaatcaggcataatctgcagatacaaaaaaccccgccggagcggggttttttacaacttattcagcaattaagcgcgaacgaagtcgatgtgctgcagcttcggtttgtacgggtgacgctgtacgtcctgagctttaactttgatttctttaccgtcaacaacgatggttag

SEQ ID NO: 470991 - DNA, 285 bp, Shigella flexneri
atgtttactatcaacgcagaagtacgtaaagagcagggtaagggtgcgagccgccgcctgcgtgccgctaacaagttcccggcaatcatctacggtggcaaagaagcaccgctggctatcgagctggatcacgacaaagtcatgaacatgcaagctaaagctgaattctacagcgaagttctaaccatcgttgttgacggtaaagaaatcaaagttaaagctcaggacgtacagcgtcacccgtacaaaccgaagctgcagcacatcgacttcgttcgcgcttaa

SEQ ID NO: 470992 - DNA, 1761 bp, Shigella flexneri
atgatttttacactccgcccatatcagcaagaagccgtggatgccacgctcaaccattttcgtcgtcataaaacccctgccgttatcgtgctgcccaccggcgcaggtaaaagcctggtgatagcggaactggcacggctggcgcgtggtcgcgtactggtgctggcacacgttaaagaactggtggcgcaaaaccatgcaaagtatcaggcgctggggctggaagccgatatttttgccgccgggctaaagcgcaaagagagccacggtaaagtggtatttggcagcgttcagtcggtcgcccgtaatcttgatgcctttcagggtgaattttcgctgttgattgtcgatgaatgccaccgtattggtgacgatgaagagagccagtatcagcaaatcctcactcacctgactaaagtgaatccccacttacgcctgctggggctgactgccacgccttttcgattgggcaaaggctggatctaccagttccattatcacggcatggtacgcggcgatgagaaagcccttttccgtgactgcatttatgagctgccgctgcgttatatgattaaacacggctatctgacgccgccagaacgactggatatgccagtagtgcaatacgatttcagccgcttgcaggcacagagtaacgggctgttcagcgaagctgatctcaaccgtgagctgaaaaaacagcaacgcattacgccacatatcatcagccagatcatggagttcgccgaaaagcgcaaaggggtaatgattttcgccgccaccgttgaacacgcaaaagagattgtgggattactgcctgccgaagatgctgcactgattactggcgacaaccccggcgctgagcgcgatgtgttaattgaagattttaaagcccagcgttttcgctatctggtcaacgtcgcagtactgaccaccggatttgacgccccgcacgtcgatcttatcgccattctgcgccctaccgaatcagtgagtctttaccaacaaattgtcgggcgcggtctgcgtctcgctccgggcaagactgattgtttaattcttgattatgcgggtaatcctcacgatctctacgcgccggaagttggtacaccgaaaggcaaaagtgacaacgttccggtacaggttttctgccctgcctgcggttttgccaacaccttttgggggaaaacgaccgccgacgggacattgattgaacactttggtcgccgctgtcagggatggtttgaagatgacgacggtcatcgcgaacagtgtgacttccgtttccgttttaaaaattgcccgcaatgtaacgcagaaaatgatattgccgctcgccgctgccacgaatgtgacacggtactggttgatccggatgatatgttaaaagcggcgctacgactgaaagatgcgctggtattacgctgtagcggcatgtctttgcagcatgggcacgacgagaaaggcgaatggttgaaaatcacctattacgatgaagacggcgcggatgtgagtgagcgtttccgtctgcaaacgcccgcccagcgtaccgccttcgagcagctttttatccgcccgcatacgcgcacaccgggcatccctctgcgctggatcaccgccgccgatatcctcgcccagcaagccttactgcgacatccggattttgtcgtcgcccgcatgaaaggtcagtactggcaagtgcgtgaaaaagtgttcgattacgaaggtcgttttcgtcgggcgcacgaattacgcggttaa

SEQ ID NO: 470993 - DNA, 696 bp, Shigella flexneri
atgcgacttgataaatttatcgcacagcaactcggcgttagccgtgctattgccgggcgtgaaatccgcggcaatcgtgtcaccgtcgatggcgaaatcgttcgtaatgcagcgttcaaactgctccctgaacatgatgtcgcttacgatggcaacccgctggcgcagcaacacggtccacgttacttcatgctcaataagcctcagggctatgtttgctccacggacgacccggatcacccgacggtgctctattttctggatgaaccggtagcgtggaaactgcacgccgcaggacgtctggatatcgataccaccggtctggtgctgatgactgatgatggtcagtggtcgcaccgcattacttctccgcgccatcattgcgagaagacctatctggtgacactggaatcacctgtagctgacgatacggcagagcaatttgctaaaggcgtgcagctgcataacgaaaaagatctcactaagccggcggtgcttgaagtgattaccccaacgcaggttcgtctgaccatcagcgaagggcgttatcatcaggtgaaacgcatgttcgccgccgtgggtaaccacgtggttgagctgcatcgtgaacgtattggcggtattacgctggatgctgatttagcccccggtgaatatcgtccgttaactgaagaagaaattgccagcgtcgtctaa

SEQ ID NO: 470994 - DNA, 1191 bp, Shigella flexneri
gtgaccacccgacagcattcgtcgtttgctattgtttttatccttggcctgctggccatgttgatgccgctgtcgattgatatgtatctgcccgcgctaccggtaatttcagcgcagtttggcgtatcggcgggcagtacgcagatgaccctcagtacttatattctgggctttgcgttggggcagttaatctacgggccgatggcagacagcttcgggcgtaagccggtggttcttggcgggacgctggtgtttgccgccgccgcggtggcgtgtgcgttggcacaaaccatcgatcagctgattgtgatgcgtttcttccacgggctggctgcggctgcggccagcgtggttatcaacgctttgatgcgtgatatttacccgaaagaagagttctcgcggatgatgtcgtttgtcatgctggtgacgaccattgcactgctgatggcaccgatagttggcggctgggtgctggtgtggctgagctggcattacatcttctggatcctggcattagcggcgattctggcttcggcaatgattttcttcctgattaaagaaaccttaccaccggagcgtcgtcagccatttcacattcgtaccactattggtaactttgcggcgctgttccgccataaacgtgtcctgagctacatgcttgccagtggtttcagctttgccgggatgttctcattcttaagcgccggaccgtttgtttatattgaaattaaccacgtcgcgccggaaaactttggttattactttgcgctaaacattgtttttctgttcgtgatgaccatctttaacagccgcttcgtccgccgcattggcgcgttaaatatgttccgctcggggttgtggatacaatttgttatggctgcgtggatggtcatcagtgcgccgctggggctgggattctggtcgctggtggttggcgttgcggcgtttgtgggctgcgtgtcgatggtgtcatccaatgcgatggcggtcattcttgatgagtttccccatatggcgggaacggcatcttcgctggcaggaaccttccgttttggcataggggcaattgttggcgcattgctttctcttgcgacctttaactctgcatggccgatgatttggtcaattgcattctgcgcaaccagctccattctcttctgtctgtacgccagtcggccgaaaaaacggtga

SEQ ID NO: 470995 - DNA, 345 bp, Shigella flexneri
gtgacttcattacaactctcaatcgtccatcgactgccgcagaactatcgctggtctgctggtttcgcaggttcgaaggttgaaccgattccgcaaaatggaccgtgcggtgacaacagcctggtggcgcttaaattgcttagcccggatggtgataatgcatggtcggtgatgtataaactaagccaggcgttaagcgacatcgaagttccatgttcggtgttggagtgtgaaggtgagccgtgcctgtttgtaaatcgccaggacgagtttgctgcaacatgccgattgaaaaattttggtgtggcaattgccgaacccttttcaaactacaatcctttttaa

SEQ ID NO: 470996 - DNA, 1590 bp, Shigella flexneri
atgacgcaaactctgttagcgattgaaaatttgtcggtgggttttcgccatcagcaaaccgtacgtacagtagtcaatgatgtttcactacagattgaggctggcgaaacgctggcgctggtgggtgagtcaggttcaggcaaaagcgttaccgcgctgtcaattttacgcctgctcccttccccgccggttgaatatctctccggcgatattcgttttcatggcgaatcgctgcttcatgccagcgatcaaacgttgcgcggtgtacgcggtaataagatcgccatgatttttcaggaaccgatggtgtcgttaaatccattgcataccctggaaaaacagctttatgaagtgctttcactccaccgcgggatgcgtcgggaagcggctcgtggcgaaattcttaactgccttgatcgcgtcggtatccgccaggcggcaaaacggctgacagattatccgcatcagctctccggcggcgaacgccagcgggtgatgattgcgatggcgctgttaacgcgaccggaattattaattgccgatgaaccgaccaccgcactggacgtctctgtccaggcgcagattttacagctgttgcgcgaactgcaaggcgagctgaatatgggcatgctgtttattactcataacctcagcattgtcagaaaactggcccaccgcgtggcggtaatgcaaaacggtcgctgtgtcgagcaaaataacgccgctacgctatttgcctcacccactcatccttacacacaaaagctactcaacagtgaaccgtcaggcgatccggtaccgttgccagaacctgcctcaacgttgctggatgttgaacagcttcaggttgccttccccattcgcaaagggattttgaagcgcattgtggatcataatgtggtggtgaaaaacatcagttttacgctacgggcgggtgaaacactgggtttagtgggcgagtctggttccgggaaaagcacgacgggactggcgctgctgcgactgattacctctcagggcagcatcgtctttgacggtcagccactgcaagatttaaatcgccgccagctgttacctactcgtcatcgtattcaggtggtatttcaggatccaaactcctcgctcaacccacgactcaacgttttgcagattattgaggaaggcttacgggttcaccagccgacgctttctgccgcacaacgcgaacaacaagtgatagccgtgatgcatgaagtgggattagatcctgaaacacgccaccgttatccggcggagttctctggtggtcagcgacaacgtattgcgattgccagggcattaattcttaagccctcgctgatcatacttgatgaaccgacatcatcactcgacaaaacggtacaggcgcaaatattgacgcttttgaaatcattgcaacaaaagcatcaactggcctatttgtttatcagccacgatttgcacattgtccgcgcgttatgtcatcaggttatcgtactgcgacaaggggaagtagtggaacaaggaccgtgcgcgcgcgtgtttgccacaccgcagcaggagtatacgcgtcagttactggcgttgagctga

SEQ ID NO: 470997 - DNA, 1026 bp, Shigella flexneri
atgtcgcgactcagccccgtcaatcaggcccgttgggcgcgttttcgtcataaccgtcgcggctactggtcgttatggattttcctcgttttgtttggtttgagtttgtgttctgaacttatcgctaacgataaaccgttgctggtgcgttatgacggcagttggtatttcccgttgttgaaaaactacagcgaaagcgattttggcggcccgctggcaagtcaggctgattatcaggacccgtggctgaaacaacggctggaaaataacggctgggtactgtgggcaccgattcgctttggtgctaccagtatcaactttgctaccgataagcccttcccttctccaccctcccggcaaaactggctgggaacggatgcaaacggcggcgatgtgctggcacgcattctctatggcacgcggatctcggttctgtttggcctgatgctgactctctgttccagcgtgatgggcgtgctggcgggggcgctacaaggctattacggcggtaaagtcgatctctgggggcaacgctttattgaagtatggtcggggatgccgacgctgtttttgattattttactttccagcgtcgtacagcctaacttctggtggctgctggcaattactgtcttgtttggctggatgagtctggtcggcgtggtgcgggcggagtttttacgtactcgtaatttcgactacattcgtgcggcacaggcgcttggcgtcagcgatcgcagtatcatcctgcgtcatatgttgcctaatgccatggtcgcgaccctcacctttttaccgtttattttatgtagttcgataaccaccctgacctcgctcgatttcctcggcttcggtctaccgctcggttcaccgtcactcggtgaactgctgttacaagggaaaaataaccttcaggccccgtggcttgggatcaccgccttcttgtcggtggcgatattattgtctttgctgatctttattggtgaagccgtccgcgacgcatttgatcctaataaggcggtgtag

SEQ ID NO: 470998 - DNA, 1095 bp, Shigella flexneri
atgggcgcttacctgattcgccgtctgttgctggtgatcccaacgttatgggctattatcactatcaactttttcatcgtgcaaattgcgcctggcggtccggtcgatcaggccatcgccgccattgagtttggtaatgccggagtattacccggcgcaggcggtgaaggtgttcgtgccagccatgcgcaaacgggtgtcggcaatatcagcgacagtaattaccgtggcggacgcggattagatccagaagtgatcgctgagatcactcatcgctacggtttcgataagccgatccacgaacgttacttcaaaatgctctgggactacatccgctttgattttggtgatagcctgtttcgcagcgcctcggtgctgacgctgattaaagacagtctgccggtttccatcaccctcggattgtggagcacgctgattatctatctggtgtcgattccgttaggcattcgcaaagctgtttataatgggagtcgctttgacgtctggagtagcgcatttatcatcatcggctacgccattccggcctttttgtttgccatcctgctgattgtcttcttcgcgggcggcagctatttcgacctgttccctctacgcggcctggtttccgctaactttgattcgctgccgtggtatcagaaaatcaccgattatctgtggcatatcacgctaccggtgctggcgacagtgattggtggctttgcggcgctgaccatgctgaccaaaaactcattccttgatgaagtgcgcaagcaatacgtggtgaccgcgcgtgcgaaaggggtaagtgagaaaaacattctctggaaacatatgttccgcaacgccatgctgctggtgattgccggttttccggcgacgtttatcagcatgttttttaccggctcgctgctgattgaggtgatgttttcactcaatggtcttggcttactgggctacgaagcgaccgtctcgcgcgattatcctgtaatgtttggtaccttgtatattttcaccctgattggcctgctgctgaatattgtcagtgatatcagctatacgctggttgatccgcgtatagattttgagggacgttaa

SEQ ID NO: 470999 - DNA, 1815 bp, Shigella flexneri
atgattgtgcgcatactgctgctgtttatcgctctgttcaccttcggtgcgcaggcgcaggctatcaaggaaagctatacctttgccgtgctgggcgaaccccggtacgcgtttaatttcaaccattttgattatgtgaaccccgccgcgccaaaaggtgggcatataacgttgtcagccctcggtaccttcgataatttcaaccgctatgcactgcgcggcaacccgggcgcacgcaccgagcagctgtacgacacgttatttacgacttccgatgacgaaccaggcagttattacccgctgattgctgaaagtgcacgctatgctgacgattattcctgggtggaggtcgctattaatccgcgcgcccgttttcatgatggttctcccattactgcccgcgatgtagagtttacttttcaaaaatttctgaccgaaggcgtgccgcaatttcgtctggtctacaaaggcaccaccgtcaaagccattgcgccgttaaccgtgcgcattgagttagctaaacccggcaaagaagatatgttgagtctgttttcgctgccggtatttccagaaaagtactggaaggatcacaaacttagcgacccgctcgccacgcctccgcttgccagtggtccgtaccacgttacgtcctggaaaatggggcaaaatattgtctattcccgcgtgaaagattactgggcagcaaacttaccggtaaaccgtggacgctggaatttcgacaccattcgctacgattattacctcgatgataatgtcgcctttgaagcgtttaaagcaggtgcctttgatttgcgtatggaaaacgacgctaaaaactgggccacgcgttataccggtaaaaatttcgataaaaaatacatcatcaaagatgagcaaaagaacgaatcagcccaggatacgcgctggctggcgtttaatatccaacgtgcggtattcagcgatcgccgggtgcgggaagcaatcactctcgcctttgactttgaatggatgaacaaggcgttgttttacaacgcctggagtcgcacgaacagttattttcaaaataccgaatacgcggccagaaattaccccgacgccgcggagctggtgcttctggcaccaatgaaaaaagatctaccgccagaagtcttcacacaaatctaccagccgccggtatctaaaggcgatggctacgatcgtgacaacctgttaaaagccgacaaacttctcaacgaagcgggctgggtgctgaagggtcagcaacgcgttaatgccacaacgggtcagccgctcagctttgaattattgcttcccgcaagcagcaatagtcagtgggtattgccgttccagcacatcctgcaacggctgggtatcaatatggacattcgcaaggtggataactcgcaaatcactaaccgcatgcgcaatcgcgactatgacatgatgccgcgcctatggcgggcgatgccgtggcccagttccgatttacagatttcctggtcatcggaatatatcaattccacttataatgcccccggcgtgcaaagcccggttatcgactcactgatcaaccaaattattgccgcgcagggaaataaagaaaaattactgccgttggggcgagcactggatcgcgtattaacgtggaattattacatgctgccaatgtggtacatggcggaagaccgtctcgcctggtgggataaattctcccaacccgctgtacgccctgtttacagcctgggtatcgatacctggtggtatgacgttaataaagcggccaaactgccgtcagccagacaacagggagagtag

SEQ ID NO: 471000 - DNA, 1494 bp, Shigella flexneri
atgattgcgatactggttagctgccttcagtttttagtggcctggcataagcacgaagtcaaatacgacacactgattatcgacgtacaaaagtatctcgatacctattttgccgacctgaaatccactactgaccggcttcagccgctgaccttagatacctgccagcaggctaaccccgaactgaccgctcgcgcggcgtttagcatgaatgtccgtacgtttgtgctggtgaaagataaaaaaacattctgttcatctgcgactggtgagatggacattccactcaatgaattgattccggcgctcgacattaataaaaacgtcgatatggcgatcttacccggcacgccgatggtgccgaacaaacccgcaatcgtcatctggtatcgcaaccctttgctgaaaaatagcggtgtgtttgccgctctgaatctcaacctgacgccttctctcttttatagttcacggcaggaagattacgatggcgtcgccctcattattggcaatactgcgctatctaccttttcttcacgtttgatgaacgttaatgaattaaccgacatgccggtccgtgaaactaaaattgcgggcattcctctgaccgttcggctttatgcggatgactggacatggaacgatgtgtggtacgcatttttactgggcggcatgagtggaactgtcgttggcctgctttgctattacctgatgagcgtacgtatgcgccccggcagagaaatcatgaccgccatcaagcgcgaacaattttacgtggcgtatcaaccggtggtggatacacaagctttgcgggtaacgggcctggaagtactgctacgctggcggcatcctgtagcgggagaaattcccccggatgccttcattaactttgccgaatcgcaaaagatgattgtgccgctgactcagcacctgtttgagttaattgcccgcgatgccgcagaattagaaaaagtactgccggtaggcgtcaaatttggcattaacattgcgccggaccatctgcacagcgaaagctttaaagcagatatccagaaactgctcacttccctgcccgcacaccatttccagattgtgctggaaattaccgagcgcgatatgctgaaagagcaagaagccacacaactcttcgcctggctgcactcggtcggcgtagaaattgctattgatgacttcggcaccgggcacagcgcgcttatctatcttgagcgttttacgctcgattatctgaaaattgaccgtggatttatcaacgccatcggtacggaaacgatcacttcacccgtacttgacgcggtgctgacgctggcgaaacgtctcaatatgctgacagttactgaaggggtcgaaacgccggaacaagcgcgatggctaagcgaacgcggcgttaatttcatgcaaggctactggattagtcacccgttaccgctggacgattttgttcgctggctgaagaaaccgtatacgccgcagtggtaa

SEQ ID NO: 471001 - DNA, 567 bp, Shigella flexneri
atggtcaaatctcaaccgattttgagatatatcttgcgcgggattcccgcgattgcagtagcggttctgctttctgcatgtagtgcaaataacaccgcaaagaatatgcatcctgagacacgtgcagtgggtagtgaaacatcatcactgcaagcttctcaggatgaatttgaaaacctggttcgtaatgtcgacgtaaaatcgcgaattatggatcagtatgctgactggaaaggcgtacgttatcgtctgggcggcagcactaaaaaaggtatcgattgttctggtttcgtacagcgtacattccgtgagcaatttggcttagaacttccgcgttcgacttacgaacagcaggaaatgggtaaatctgtttcccgcagtaatttgcgtacgggtgatttagttctgttccgtgccggttcaacgggacgccatgtcggtatttatatcggcaacaatcagtttgtccatgcttccaccagcagtggtgttattatttccagcatgaatgaaccgtactggaagaagcgttacaacgaagcacgccgggttctcagccgcagctaa

SEQ ID NO: 471002 - DNA, 714 bp, Shigella flexneri
atgattaaaaatttgccgcaaatagtgttgttgaatattgtcggccccgcgctgtttctttcctggtatattcccgttaatcatggattctggttgccgattgatgcggatattttttatttctttaatcagaaactggtcgaaagtaaggcctttttatggctggttgcattgactaacaatcgcgccttcgacggttgttcactgctggcgatgggtatgttgatgctgagtttctggctgaaagaaaacgcccctggcagacgacgtatcgtgattatgggtctggtcatgctattaactgcagtggtattaaaccagctgggtcaggcattaattcctgtaaaacgggccagcccaacattgacttttaccgatattaaccgcgtcagcgaactgctctctgttcccacgaaagatgcctcacgagatagctttcccggcgatcacggcatgatgctgcttattttttcggcattcatgtggcgttatttcggcaaagttgcaggccttatcgcccttattatttttgtggtttttgcatttcccagagtaatgattggcgcacactggtttactgacatcattgtcggttcgatgaccgtgatattgatcggtttgccctgggtgttgctgacgccattaagtgatcgattaatcaccttttttgacaaatcactaccaggaaaaaacaaacatttccaaaacaaataa

SEQ ID NO: 471003 - DNA, 987 bp, Shigella flexneri
gtgaccaggaccaacctcatcaccggttttctcggcagcgggaaaaccacgtcgattcttcatctgttagcccataaagatcccaacgaaaaatgggcggtactggttaatgaatttggggaagtcggaattgatggtgctttgctcgccgatagcggcgcattgctgaaagagatccccggcggctgcatgtgctgcgttaatggtttacccatgcaggtagggttgaataccttactgcgtcagggaaaaccagaccgcttgttgatagagccgaccgggctgggccatccgaaacagatcctcgatctgttaaccgcaccagtctatgaaccgtggatagatctgcgcgccaccttgtgcattctcgatccacgcctgctgctggacgaaaaaagcgccagcaatgaaaacttccgtgaccagctggctgccgcagacatcattgtcgccaataaatccgaccgtgcgacgcccgaaagtgagcaagcgctacagcgttggtggcagcaaaatggtggcgatcgacaattaattcacagtgagcatgggaaagttgacggtcatcttctggatttgccgcgtcgcaatttagccgagttgcccgccagcgccgcgcattctcatcagcatgtcgtgaaaaaagggttagcagcgttaagcctgccagagcatcaacgctggcgtcgcagtctgaacagcgggcaaggatatcaggcctgcggctggatattcgacgctgatacggtattcgacaccattggcattctggaatgggcgcgacttgcaccggtggaacgcgtcaaaggcgtgctgcgtattcccgaagggctggtacgaatcaaccgtcagggcgatgacctgcacattgaaacgcaaaacgttgcgccaccggacagccgtattgagctgatttccagcagcgaagctgactggaatgccttgcagagcgcgctgttgaagcttcgtttagcgactaccgcgtaa

SEQ ID NO: 471004 - DNA, 1467 bp, Shigella flexneri
atgaagacaattgcctccgttacgctcccgcatcatgtacacgctccacgctacgatcgccagcagttgcaatcacgtatcgttcattttggctttggcgcctttcaccgcgctcatcaggcgttactgaccgatcgtgtgctgaatgcccagggcggcgactgggggatctgtgaaatcagcttgttcagcggtgatcaactgatgagccagctccgcgcacagaaccatttatataccgtgctggagaaaggtgcggacggcaatcaggtgataattgtcggtgccgttcacgaatgccttaatgcaaaactggattccttagcggcaattattgagaaattttgcgagccacaggtggcaattgtttccctgacgattaccgaaaaaggctattgtattgacccggccaccggtgcactcgacaccagtaatccgcggattattcacgatctacaaacccctgaagaacctcactccgcaccgggtattctcgtcgaagcactgaaacgccgccgtgagcgcagccttacaccgtttaccgtgctctcctgcgacaatattcccgacaatggccatgtggtgaaaaacgcggtgctgagaatggcagaaaaacgttcgccagaactcgccgggtggataaaagaacacgtcagttttccgggaaccatggtcgaccgcattgttccggctgcaaccgacgaatcactggcagaaatcagccagcatctgggggtaaatgatccctgcgcgattagctgcgaaccgtttatccagtgggtggttgaagataacttcatcgctgggcgtcctgcctgggaagtcgcaggtgtacaaatggtgaatgatgtcctgccatgggaagagatgaaactgcgtatgcttaatggcagccactcttttctcgcttatctgggttacctctcaggattcgcctatatcagtgattgcatgcaggatcgcgtatttcgctatgctgccagaacattaatgctggatgagcaagcgccgacactgcaaattaaagatgtcgatttaacacaatatgcggataagttaattgcacgttttgctaatccgtcgctgaaacataagacctggcaaatcgcgatggatggcagccagaaattaccgcaacgtatgctggcaggtattcgcatacatctggggcgtgaaacggactggtcgttgctggcattaggcgttgctggctggatgcgttacgtcagcggcgttgatgatgccggaaatgccattgatgttcgcgatccgcttagcgataaaattcgcgaacttgttgcgggcagcagcagtgaacaacgcgtaaccgccctgctttccctgcgtgaagttttcggtgatgatctgccagataacccgcattttgtgcaggccatcgaacaagcctggcaacaaatcgtacaattcggcgcacatcaggcgctattaaacaccctcaaaatttaa

SEQ ID NO: 471005 - DNA, 573 bp, Shigella flexneri
atgccaagagcgaacgaaattaaaaaaggtatggtactgaattacaacggcaaactgctgctggctaaggatattgatattcagtcgcccactgcccgcggtgccgctacgctgtacaaaatgcgtttttctgatgtccgtaccgggctgaaagtagaagagcgtttcaaaggtgatgatatcgttgacaccgtgacgctgacccgccgttacgttgacttctcctatgtcgatggcaacgaatatgtctttatggataaagaagactataccccgtataccttcaccaaagatcagattgaagaagagttgctgtttatgccagagggcggcatgccggacatgcaggtgctgacctgggacggtcaactgctggcgcttgagctgccgcagaccgttgatctggaaatcgttgaaaccgcaccaggcatcaaaggggcatctgccagcgcccgtaacaaaccggcgacattgagcactggtctggtgattcaggtaccagaatacttaagcccgggcgaaaaaattcgtatccatatcgaagaacgccgttatatggggcgtgctgactaa

SEQ ID NO: 471006 - DNA, 255 bp, Shigella flexneri
atggaatgccgtccgggttgcggggcgtgttgcactgccccttcaatttccagccctattcccggtatgccagatggcaagcccgccaatacgccctgcattcagcttgatgaacagcaacgctgtaaaattttcacctcgccactgcgaccgaaagtctgtgcaggcttacaagccagcgctgaaatgtgcggtaactcgcgtcagcaggccatgacctggcttatcgatctggaaatgctgaccgcgccttaa

SEQ ID NO: 471007 - DNA, 1374 bp, Shigella flexneri
atggcactttggggcgggcgttttacccaggcagcagatcaacggttcaaacaattcaacgactcactgcgctttgattaccgtctggcggagcaggatattgttggctctgtggcctggtccaaagccttggtaacggtcggcgtgttaaccgcagaagagcaggcgcaactggaagaggcgctgaacgtgttgctggaagatgttcgcgccaggccacaacaaatccttgaaagcgacgccgaagatatccatagctgggtggaaggcaaactgatcgacaaagtgggccagttaggcaaaaagctgcataccgggcgtagccgtaatgatcaggtagcgactgacctgaaactgtggtgcaaagataccgttagcgagttactgacggctaaccggcagctgcaatcggcgctggtggaaaccgcacaaaacaatcaggacgcggtaatgccaggttacactcacctgcaacgcgcccagccggtgacgttcgcgcactggtgcctggcctatgttgagatgctggcgcgtgatgaaagccgtttgcaggatgcgcttaagcgtctggatgtcagcccattaggctgtggcgcgctggcgggaacggcctatgaaatcgaccgtgaacagttagcaggctggctgggctttgcttcggcgacccgtaacagtctggacagcgtttctgaccgtgaccatgtgttggaactgctttctgctgccgctatcggcatggtgcatctgtcgcgttttgctgaagatctgattttctttaacaccggcgaagcggggtttgtggagctttcggaccgcgtgacttccggttcatcattaatgccgcagaagaaaaacccggatgcgctggagctgattcgcggtaaatgcggccgggtgcagggggcgttaaccggcatgatgatgacgctgaaaggtttgccgctggcttacaacaaagatatgcaggaagacaaagaaggtctgttcgacgcgctcgatacctggctggactgcctgcatatggcggcgctggtactggacggcattcaggtgaaacgtccgcgttgtcaggaagcggcgcagcaggggtatgcgaacgccactgaactggcggattacctggtggcgaaaggcgtacctttccgcgaggcgcaccatattgtgggtgaagcggtggtggaagccattcgtcagggcaaaccgctggaagatctgccactcagtgagttgcagaaattcagtcaggtgattggcgaagatgtctatccgattctgtcgctacaatcgtgcctcgaaaagcgtgcggcaaaaggcggcgtctcaccgcagcaggtggcgcaggcgattgcttttgcgcaggctcggttagagtaa

SEQ ID NO: 471008 - DNA, 774 bp, Shigella flexneri
atgaatccattaattatcaaactgggcggcgtactgctggatagtgaagaggcgctggaacgtctgtttagcgcattggtgaattatcgtgagtcacatcagcgtccgctggtgattgtgcacggcggcggttgcgtggtggatgagctgatgaaagggctgaatctgccggtgaaaaagaaaaacggcctgcgggtgacgcctgctgatcagatagacattatcaccggagcactggcgggaacggcaaataaaaccctgttggcatgggcgaagaaacatcagattgcggccgtaggtttgtttctcggtgacggcgacagcgtcaaagtgacccagcttgatgaagagttaggtcatgttggactggcgcagccaggttcgcctaagcttatcaactccttgctggagaacggttatctgccggtggtcagctccattggcgtaacagacgaagggcaactgatgaacgtcaatgccgaccaggcggcaacggcgctggcggcaacgctgggcgcggatctgattttgctctccgacgtcagcggcattctcgacggcaaagggcaacgcattgccgaaatgaccgccgcgaaagcagaacaactgattgagcagggcattattactgacggcatgatagtgaaagtgaacgcggcgctggatgcggcccgcacgctgggccgtccggtagatatcgcttcttggcgttatgcggagcagcttccggcactgtttaacggtatgccgatgggtacgcggattttagcttaa

SEQ ID NO: 471009 - DNA, 1005 bp, Shigella flexneri
atgttgaatacgctgattgtgggtgccagcggctacgctggcgcagagctagtgacctatgtaaatcgccatccgcatatgaacataaccgctttgactgtttcagcgcaaagcaatgatgcgggaaagttaatctccgatttgcatccgcagctaaaaggcatcgttgagctgccgttgcagccgatgtcggatatcagcgagtttagcccaggggtggacgtagtgtttctcgccaccgcccatgaagttagccacgatttagcgccgcagtttcttgaagcgggctgcgtggtgttcgacctttccggcgcgtttcgtgttaacgacgccaccttctatgaaaaatattacggctttacccatcaatacccggaactgctggaacaggcagcctacggtctggcggagtggtgcggtaataaattaaaagaagcgaatttgattgcggtgccaggctgttatccgacggcggcacagctggcgctgaaaccgttgattgatgccgatcttcttgacctcaatcagtggccggtgatcaacgccaccagcggcgtgagcggtgcaggacgtaaggcagcgatttcaaatagtttttgtgaagttagcctgcaaccgtatggcgtctttactcatcgccatcaaccagagatcgccacacacctcggtgctgacgttatcttcaccccacatctgggcaatttcccgcgcggcattctcgaaaccattacctgccgcctgaaatcgggtgtgacccaggcgcaagtcgcgcaagcgttacagcaggcgtatgcccataaaccgctggtgcggctgtatgacaaaggcgttccggcgctgaaaaatgtcgttgggctgccattttgcgatatcgggtttgccgttcagggcgagcatctgattattgtggcgaccgaagacaacttactgaaaggcgcggcggcacaagcggtacagtgcgccaatattcgtttcggctatgcggaaacgcagtctcttatttaa

SEQ ID NO: 471010 - DNA, 1152 bp, Shigella flexneri
atgaaaaacaaattaccgccatttatcgagatttaccgcgctctgattgccacaccttcaataagcgctacggaagaggcactcgatcaaagcaatgcagatttaatcactctgctggcggactggtttaaagatttgggcttcaatgtggaagtgcagcctgttccaggaactcgcaacaaatttaatatgctggccagttacggacagggggctggcggcttgttgctggcggggcataccgatacggtgccatttgatgacggtcgctggacgcgcgatccgtttacactgacggagcatgacggcaagctttacggcttaggcaccgccgacatgaaaggcttttttgcgtttatccttgatgcgctacgcgatgtcgacgtcacgaaactgaaaaaaccgctctacattctggcgactgctgatgaagaaaccagtatggccggagcgcgttattttgccgaaactaccgccctgcgcccggattgcgccatcattggcgaaccgacgtcactacaaccggtacgcgcacataaaggtcatatctctaacgccatccgtattcagggccagtcggggcactccagcgatccagcacgcggaattaacgctatcgaactaatgcacgacgccatcgggcatattttgcaattgcgcgataacctgaaagaacgttatcactacgaagcatttaccgtgccataccctacgctcaacctcgggcatattcacggtggcgacgcttctaaccgtatttgcgcttgctgtgagttgcatatggatattcgtccgcagcctggcatgacactcaatgaacttaatggtttgctcaacgatgcattggctccggtgagcgaacgctggccgggtcgtctgacggtcgacgagctgcatccgccgatccctggctatgaatgcccaccgaatcatcaactggttgaagtggttgagaaattgctcggagcaaaaaccgaagtggtgaattactgtaccgaagcgccgtttattcaaacgttatgcccgacgctggtgctcggtccgggttccatcaatcaagctcatcagcctgatgaatatctggagacgcggtttattaaacccacccgtgagttgattatccaggtaattcaccatttttgctggcattaa

SEQ ID NO: 471011 - DNA, 2652 bp, Shigella flexneri
atgaacgaacaatattccgcattgcgtagtaatgtcagtatgctcggcaaagtgctgggagaaaccatcaaggatgcgttgggagaacacattcttgaacgcgtagaaactatccgtaagttgtcgaaatcttcacgcgctggcaatgatgctaaccgtcaggagttgctcaccaccttacaaaatttgtcgaacgacgagctgctgcccgttgcgcgtgcgtttagtcagttcctgaacctggccaacaccgccgagcaataccacagcatttcgccgaaaggcgaagctgccagcaacccggaagtgatcgcccgcaccctgcgtaaactgaaaaaccagccggaactgagcgaagacaccatcaaaaaagcagtggaatcgctgtcgctggaactggtcctcacggctcacccaaccgaaattacccgtcgtacactgatccacaaaatggtggaagtgaacgcctgtttaaaacagctcgataacaaagatatcgctgactacgaacgcaaccagctgatgcgtcgcctgcgccagttgatcgcccagtcatggcataccgatgaaatccgtaagctgcgtccaagcccggtagatgaagccaaatggggctttgccgtagtagaaaacagcctgtggcaaggcgtaccgaattacctgcgcgaactgaacgaacaactggaagagaatctcggctacaaactgcccgtcgaatttgttccggtacgttttacctcgtggatgggcggtgaccgcgacggcaacccgaacgtcactgccgatatcacccgccacgtcctgctgctcagccgctggaaagccaccgatctgttcctgaaagatattcaggttctggtttctgaactgtcgatggttgaagcgacccctgaactgctggcgctggttggcgaagaaggtgccgcagaaccgtatcgctatctgatgaaaaacctgcgttctcgcctgatggcgacacaggcatggctggaagcgcgcctgaaaggcgaagaactgccaaaaccagaagggctgctgacacaaaacgaagaactgtgggaaccgctctacgcttgctaccagtcacttcaggcgtgtggcatgggtattatcgccaacggcgatctgctcgacaccctgcgccgcgtgaaatgtttcggcgtaccgctggtccgtattgatatccgtcaggagagcacccgccataccgaagcgctgggcgagctgacccgctacctcggtatcggcgactacgaaagctggtcagaggccgacaaacaggcgttcctgatccgcgaactgaactccaaacgtccgcttctgccgcgcaactggcaaccaagcgccgaaacgcgcgaagtgctcgatacctgccaggtgattgccgaagcgccgcaaggctccattgccgcctacgtgatctcgatggcgaaaacgccgtccgacgtactggctgtccacctgctgctgaaagaagcgggtatcgggtttgcgatgccggttgctccgctgtttgaaaccctcgatgacctgaacaacgccaacgatgtcatgacccagctgctcaatatcgactggtatcgcggcctgattcagggcaaacagatggtgatgattggctattccgactcagcaaaagatgcgggcgtgatggcagcttcctgggcgcaatatcaggcacaggatgcattaatcaaaacctgcgaaaaagcgggtattgagctgacgttgttccacggtcgcggcggttccattggtcgcggcggcgcacctgcccatgcggcgctgctgtcacaaccgccaggaagcctgaaaggtggcctgcgcgtgactgaacagggcgagatgatccgctttaaatatggtctgccagaaatcaccgtcagcagcctgtcgctttacaccggggcgattctggaagccaacctgctgccaccacctgagccgaaagagagctggcgtcgcattatggatgaactgtcagtcatctcctgcgatctctaccgtggctacgtacgtgaaaacaaagattttgtgccttacttccgctccgctacgccggaacaagaattgggcaaactgccgttgggttcacgtccggcgaaacgtcgcccaaccggcggcgtcgagtcgctgcgcgccataccgtggatttttgcctggacgcaaaaccgcctgatgctccccgcctggctgggtgcaggtacggcgctgcaaaaagtggtcgaagatggcaaacagagcgagctggaagccatgtgccgcgattggccattcttctcgacgcgtctcggcatgctggagatggtcttcgccaaagcagacctgtggttggcggaatactatgatcaacgtctggtagacaaagcactgtggccgttaggtaaagagttacgcaacctgcaagaagaagacatcaaagtggtgctggcgattgccaacgattcccatctgatggccgatctgccgtggattgcagagtctattcagctacggaatatttacaccgacccgctgaacgtattgcaggccgagttgctgcaccgctcccgccaggcagaaaaagaaggccaggaaccggatcctcgcgtcgaacaagcgttaatggtcactattgccgggattgcggcaggtatgcgtaataccggctaa

SEQ ID NO: 471012 - DNA, 1734 bp, Shigella flexneri
atgcattccacagaagtccaggctaaacccctttctagctggaaagccctgggttgggcactgctctacttttggtttttctctactctgctacaggccattatttacatcagtggttatagtggcaccaacggcattcgcgactcgctgttattcagctcgctgtggttgatcccggtattcctctttccgaagcggattaaaattattgccgcagtgatcggcgtggtgctatggacggcctctctggcggcgctgtgctactacgtcatctacgggcaggagttctcgcagagcgttctgtttgtgatgttcgaaaccaacaccaacgaagccagcgagtatttaagccagtatttcagcctgaaaattgtgcttatcgcgctggcctatacggcggtggcagttctgctgtggacacgcctgcgcccggtctatattccaaagccgtggcgttatgttgtctcttttgccctgctttatggcttgattctgcatccgatcgccatgaatacgtttatcaaaaacaagccgtttgagaaaacgttggataacctagcctcgcgtatggagcctgccgcaccgtggcaattcctgaccggctattatcagtatcgtcagcaactaaactcgctaacaaagttactgaatgaaaataatgccttgccgccactggctaatttcaaagatgaatcgggtaacgaaccgcgcactttagtgctggtgattggcgagtcgacccagcgcggacgcatgagtctgtacggttatccgcgtgaaaccacgccggagctggatgcgctgcataaaaccgatccgaatctgaccgtgtttaataacgtagttacgtctcgtccgtacaccattgaaatcctgcaacaggcgctgacctttgccaatgaaaagaacccggatctgtatctgacgcagccgtcgctgatgaacatgatgaaacaggcgggttataaaaccttctggatcaccaaccagcagacgatgaccgcccgcaataccatgctgacggtattttcgcgccagaccgacaagcagtactacatgaaccagcaacgtacgcagagtgcgcgtgaatacgacaccaacgtgctgaagccgttccaggatgtgctgaatgaccctgcgccgaagaaactgatcatcgttcatctgctgggtacgcatatcaaatacaaataccgctacccggaaaatcagggcaagtttgatggcaataccgatcatgttccgccaggattaagcgcagaagagctggaatcatataacgattatgacaacgctaacctgtataacgatcatgtggttgccagcctgattaaagactttaaagcggcagacccgaacggattcctggtttacttctctgaccacggtgaagaggtttacgacacgccgccgcacaaaactcaggggcgtaacgaagacaacccgacgcgccacatgtacaccattccgttcctgctgtggacgtcggaaaaatggcaagcgactcatccccgtgatttctcacaggatgtcgatcgtaaatacagcctggcggaactgatccacacctggtcagatttggcgggcttatcttacgacggttacgatccaacccgttcagtggtgaatccgcagttcaaagaaactacccgctggattggtaacccgtacaagaaaaacgcgctgatcgattacgacactctgccgtatggcgatcaggtgggtaatcagtag

SEQ ID NO: 471013 - DNA, 852 bp, Shigella flexneri
atgtatcacgacgtcagctatctgctctcccgcctgatcaacggcccgctgtccctgcgccagatttactttgccagcagtaacggcccagtgcccgatcttgcgtatcaggtcgattttccacggctggaaattgtgctggaaggtgagtttgttgataccggcgctggagcaacgttagttcccggcgatgtgctgtacgttgccgctggtggctggaatttcccacaatggaaaacacccgctaccacctttagcgtgctgtttggcaaacagcaactcggcttcagcgtcgtgcaatgggatggcaaacaatatcaaaatctggcgaagcaacacgtcgcccgacgcggcccacgcataggttcttttctgctacaaacgctcaatgaaatgcaaatgcagccgcaggagcagcaaacggcaaggcttatcgtagccagcctgcttagccactgccgcgatttgctcggcagccaaatccagaccgcctcacgcagccaggcactatttgaagctattcgcgattatatcgacgaacgctatgcctccgcgcttacccgcgaatctgtcgcacaggcattctatatttcaccaaactatctctcgcacctgtttcaaaaaacgggggccattggttttaacgaatacctgaatcacacgcgactggagcacgctaagacgttattgaaaggctatgacctgaaggtaaaagaagtggcgcacgcctgcggctttgtcgacagcaactacttctgccgtctgtttcgtaaaaacaccgaacactcgccgtcggaatatcgccggcagtaccacagccaactgacagaaaaaccgactactccagaataa

SEQ ID NO: 471014 - DNA, 342 bp, Shigella flexneri; identical to SEQ ID NO: 457966

SEQ ID NO: 471015 - DNA, 879 bp, Shigella flexneri
atgacatcatccgccggacagcgcatcagctgtaacgttgtggaaacgcgccgcgatgatgtggcgcgcattttcaacattcagcgttattcactgaatgacggcgagggcattcgtacggtggtcttttttaaaggctgtccgcatctttgcccgtggtgtgctaatccggagtcgatctccggcaaaatccagacggtacgcagagaggcgaaatgtctgcactgtgcgaaatgtttgcgtgatgcggatgaatgcccctccggggcgtttgaacggattggtcgcgatatcagccttgacgctctggaacgggaagtgatgaaagatgacattttctttcgcacgtccggcggcggcgtcacgctttctggcggcgaagtgttaatgcaggcggagtttgctacccgttttttacagcgactgcggctgtggggtgtctcatgcgccattgaaactgccggagacgcgccagcaagcaagctgttaccgctggcgaaattgtgcgatgaagtgctgttcgatttaaaaattatggacgcgactcaggcgcgggatgtggtgaagatgaacctgccacgcgtgctggagaatctgcgtttgctggtgagtgagggtgtcaacgtgatcccgcgtttaccgttgatccctggtttcacgctcagccgggagaatatgcagcaggcgctggatgtactgatcccgctgaaaatcaggcagatccatctgttaccgtttcatcagtacggcgaaccgaaataccgcctgctggggaaaacatggtcgatgaaagaggtgcctgcgccgtcgtcagccgatgtgacaacgatgcgcgaaatggcagaacgggccggatttcaggttaccgtgggaggttaa

SEQ ID NO: 471016 - DNA, 2298 bp, Shigella flexneri
atgacgaatcgtatctctcgcctcaaaactgcactgtttgccaatacccgtgaaatctcgctggagcgggcgctgctttataccgccagccatcggcaaaccgaaggcgaaccggtgatattgcgccgggcgaaagcaacagcgtatatccttgaacatgttgaaatttcgattcgtgatgaagaactgattgccggtaaccgcaccgtaaaaccgcgcgccgggattatgtcgccggaaatggacccttactggctgctgaaagagctggatcaattcccgacgcgtccgcaggaccgctttgctatcagcgaagaagataaacgtatctaccgtgaagagttgttcccgtactgggaaaaacgttcgatgaaagatttcatcaacgggcagatgacagatgaagtaaaagccgcgaccaacacgcagattttcagcatcaaccagacggataaaggccaggggcacattattattgattacccacgcctgttgaatcacggtctgggtgagctggtggcacagatgcagcaacattgtcagcaacagccggagaatcacttttatcaggccgcgttgttactgctggaagcctcgcagaaacacattttgcgttacgccgaactggcggaaacgatggcggcaaactgcacagatgcccagcgtcgcgaagagctgctgactattgcggagatctcccgccataacgcgcaacataagccgcagacgttctggcaggcgtgccagttattctggtacatgaacatcattctgcaatacgaatccaacgccagttcgctgtctttagggcgcttcgaccagtatatgttgccgttctatcaggcatctttaacccagggcgaagatccggcgttcctgaaagaactgctcgaatctttatgggtgaaatgcaacgacatcgtgctgttgcgctccaccagtagcgcgcgttatttcgccggtttcccgaccggctataccgcactgctcggcgggttaaccgagaacggacgtagcgcggtgaacgtgctttcgttcctttgccttgacgcctatcaaagcgtgcaattaccgcaaccgaacctcggcgtgcgcactaacgccttgatcgacacgccgttcctgatgaaaaccgccgaaaccattcgcctcggcaccggtattccgcaaatctttaacgatgaagtggtggtgccagcgttcctcaaccgtggcgtttcgctggaagatgcgcgcgactattccgtagtgggctgtgtggaattatctattcccggcagaacctacggcttgcatgacatcgcgatgtttaatctgctgaaagtgatggaaatctgcctgcatgaaaatgaaggcaatgctgcgctgacttatgaaggtttactggagcagatccgcgccaagatcagccactacatcaccctgatggttgagggcagcaatatttgtgatatcggccatcgcgactgggcacctgtaccgctgctctcgtcttttatcagcgattgtctggaaaaaggtcgcgatattaccgatggcggcgcgcgttataacttctccggcgtacagggaattggtatcgccaacctgagcgattctctccatgcgttgaaagggatggtttttgagcaacagcgtttaagttttgacgaattgctgtcggtattaaaagccaactttgcaacgccagaaggcgaaaaagtccgcgctcgcttaattaaccgctttgagaaatacggtaacgatatcgacgaggtggataacattagcgccgaactgttgcgccactactgcaaagaagtggaaaaataccagaacccgcgcggcggttacttcacgccgggatcgtataccgtttctgctcacgttccgttgggatcggtggttggcgcgacgccagacggtcgttttgccggggaacaactggcagacggcggcttgtcacctatgctgggtcaggacgcacaagggccaacggcggtactgaagtcagtcagtaagctcgataatacgctgctgtctaacggtacgttgctgaacgtgaaattcactccggcgaccctggaaggtgaagcgggattacgcaaactggccgacttcttacgggtgtttacccagcttaagttgcagcatattcagtttaacgtggtgaacgccgacacgttgcgggaagcgcaacagcgcccacaagattatgccgggctggtggtgcgcgttgccggatacagcgccttctttgtcgaactgtcgaaggagatccaggatgacatcatccgccggacagcgcatcagctgtaa

SEQ ID NO: 471017 - DNA, 321 bp, Shigella flexneri
atgacgaaaattattgcagtaaccgcatgtccttcaggtgttgcccatacctatatggcagcagaggcgctggaaagtgccgcgaaagcgaaaggctgggaagtgaaagtagaaacccaggggtcaattggtctggaaaatgaactgactgcggaagacgtggcgagcgctgatatggtgattctgaccaaagatatcggcatcaagtttgaagagcgttttgctggcaagaccatcgtgcgcgtcaacatcagcgatgcagtaaaacgtgctgacgccattatgagcaaaattgaagctcacctggcgcaaaccgcttaa

SEQ ID NO: 471018 - DNA, 1080 bp, Shigella flexneri
atgaatgagttggtgcagatcctgaaaaatacccgtcagcatttaatgacgggcgtttcacacatgattcccttcgtggtatcgggcggtattttgctggcggtttccgtcatgttgtatggcaaaggcgcagtgccggatgccgtagccgatccgaatttgaaaaaactgtttgatatcggcgttgcaggtttgacgctgatggtgcctttcctcgccgcttacattggttactccattgcagagcgttctgcgctggctccgtgcgctatcggtgcctgggttggtaacagctttggtgcgggcttctttggtgcgctgatcgccgggattatcggcggcatcgtggtgcattacctgaagaaaattccggtgcataaagttctgcgctcggtgatgcccatcttcattattcctatcatcggcacactgattaccgcaggcatcatgatgtggggcttgggcgagcctgtaggggcgttgaccaacagcctgactcagtggcttcaggggatgcagcagggcagcattgttatgctggcggtgatcatggggctgatgctggcgttcgatatgggcggtccggttaacaaagtggcctatgccttcatgctgatttgcgttgctcagggtgtttataccgtggtggccattgctgccgtgggtatttgtatcccgccgctggggatggggctggcgacgctgattggtcgtaaaaatttctccgcagaagagcgcgaaaccggcaaagcggcactggtgatgggctgtgttggcgttactgaaggggcgattcctttcgccgctgccgatccgctgcgtgtcattccttccattatggtcggttcagtttgtggtgcagtaactgcggcgctggtcggtgcgcagtgctatgcaggctggggtggtctgattgtgctgccggtggttgaaggtaagttgggttatatcgcagcagtggctgtcggagcagtggtgacggctgtttgtgtgaacgtgctgaaaagtctggcgcgtaaaaatgggtcttcgactgatgaaaaagaagacgacctggatttggattttgaaattaattaa

SEQ ID NO: 471019 - DNA, 1104 bp, Shigella flexneri
atggccctgattgtggaatttatttgtgagctacctaacggcgtacatgcgcgtccggcaagccacgttgaaacgctgtgtaatactttttcatctcaaattgagtggcataacctgcgtactgaccgtaaaggcaacgccaaaagcgctctggcgctgattggcaccgatacgctggtgggtgataactgccagctactgatttccggggccgacgaacaggaagggcaccagcgtttaagccaatggctgcgcgatgaattcccccactgcgatgcgccgctggcggaagttaaatctgacgaactggaaccactgccggtttcactgaccaatctgaatccgcaaattatccgcgcccgcaccgtgtgcagcggtagtgcaggcggcattctgacgccgatctcttctttagatctcaatgcgctgagtaatcttcccgcagccaaagacgttgacgccgagcaatccgcactggaaaacggcctgacgctggtactgaaaaacattgagtttcgtctgctggatagcgacggtgctaccagcgcgattctggaagcgcaccgatccctggctggcgatacttccctgcacgaacatttactggcaggcgtcagcgccggattaagctgcgccgaagcgattgtcgccagtgcgaatcacttttgcgaagagtttgcccgttccagcagcagatacctgcaagaacgtgccctggacgtacgcgacgtctgcttccagttactccagcaaatctacggtgagcaacgcttcccggcaccgggcaaactgacgcagtccgccatttgtatggctgatgaactgacccccagccagttcctcgaactggataaaaatcacctcaaaggattgttactgaaaagcggcggcaccacctcacatacggtgatccttgcccgttcgttcaacattccgacgctggttggtgtggatattgatgccctcactccgtggcagcatcaaacgatttatatcgacggcaacgccggggcgattgtggttgagccaggagaagccgtagctcgttattatcagcaagaagcccgcgtacaggacgccctgcgtgagcaacagcgtgtctag

SEQ ID NO: 471020 - DNA, 1332 bp, Shigella flexneri
gtggaagcgcaggccgcattcggcaatggtgcggaaggcgttggtttgttccgcactgaaatgctctatatggatcgcaccagtgcaccgggcgaaagcgagctgtacaacattttttgtcaggcgctggagtctgccaacggacgcagcattattgtgcgcactatggacattggcggcgacaaacccgttgattatctaaacattcccgcagaggcaaacccgttcctcggttatcgcgccgtgcgtatttatgaagaatacgcgtcgttatttaccacacaactacgctcgatcctgcgcgcctccgctcacggcagcctgaaaatcatgatcccgatgatctcctcaatggaagagatcttatgggtgaaagaaaaactggcagaagccaaacagcaactacgtaacgaacacattccgtttgatgagaagatccagctcggcattatgctggaagtaccgtcggtgatgttcatcatcgatcaatgctgcgaagagattgatttctttagtattggtagtaatgacctgacgcaatatctgctggcagtggatcgcgataacgctaaggttactcgtcactacaacagcctgaatccggcattcttgcgggcgctcgattacgacgtgcaggcggtgcatcgccagggtaaatggattggtctgtgcggtgagctgggagcgaaaggttccgtgctgccgttgctggtcggcttagggctggatgaactcagcatgagcgcaccatcaattccggcggcgaaagcgcggatggcgcaacttgatagccgtgagtgccgcaagttgctcaaccaggcaatggcctgccgtacttcgctggaagtggaacacctgctggcgcaattccgcatgacccaacaggacgcaccgctggtcaccgccgagtgcatcacgctggaaagtgactggcgcagcaaagaagaagtgctcaaaggcatgaccgataacctgctgctggcgggccgctgccgctatccgcgtaaactggaagccgacttatgggcgcgcgaggccgttttctctaccggtctgggctttagttttgccattccacacagcaaatcagaacacattgagcaatccaccatcagcgtggcgcgtctgcaagcgccggtgcgctggggcgatgatgaagcgcaattcatcattatgttaaccctgaacaaacacgctgcgggcgatcagcacatgcgcattttctcgcgcctcgctcgccgcatcatgcacgaagaattccgtaacgcgctggttaacgccgcctctgccgacgctatcgccagcctgctgcaacatgaactggaactgtaa

SEQ ID NO: 471021 - DNA, 306 bp, Shigella flexneri
atggaactgtatctggacaccgctaacgtcgcagaagtcgaacgtctggcacgcatattcccgattgccggggtgacaactaacccgagcattatcgctgccagcaaggagtccatctgggaagtgctgccgcgtctgcaaaaagcgattggtgatgaaggcattctgtttgctcagaccatgagccgcgacgcgcaggggatggtggaagaagcgaagcgcctgcgcgacgctattccgggtattgtggtgaaaatcccggtgacttccgaaggtctggcagcaattaaaatactgaaaaaatag

SEQ ID NO: 471022 - DNA, 201 bp, Shigella flexneri
atgcacgcgccagaaagcatggtgctggcagccagctttaaaacgccgcgtcaggcgctggactgtttactggcaggatgtgaatccatcaccctgcccttagatgtagcgcaacaaatgctcaacacccctgcggtagagtcagctatagagaagttcgaacacgactggaatgccgcatttggcactactcatctctaa

SEQ ID NO: 471023 - DNA, 780 bp, Shigella flexneri
atggaccgcattattcaatcaccgggtaaatacatccagggcgctgatgtgattaatcgtctgggcgaatacctgaagccgctggcagaacgctggttagtggtgggtgacaaatttgttttaggttttgctcaatccactgtcgagaaaagctttaaagatgctggactggtagtagaaattacgccgtttggcggtgaatgttcgcaaaatgagatcgaccgtctgcgtggcatcgcggagactgcgcagtgtggcgcaattctcggtatcggtggcggaaaaaccctcgatactgccaaagcactggcacatttcatgggtgttccggtagcgatcgcaccgactatcgcctcgaccgatgcaccgtgcagcgcattgtctgttatctacaccgatgagggtgagtttgaccgctatctgctgttgccaaataacccgaatatggtcattgtcgacaccaaaatcgtcgcgggcgcacctgcacgtctgttagcagcgggtatcggcgatgcgctggcaacctggtttgaagcgcgtgcttgctctcgtagcggcgcgaccaccatggcgggcggcaagtgcacccaggcggcgctggcactggctgaactgtgctacaacaccctgctggaagaaggcgaaaaagcgatgcttgccgccgaacagcatgtagtaaccccggcgctggagcgcgtgattgaagcgaacacctatttgagcggcgttggttttgaaagcggcggctggcggcggctcacgcggtgcataacggcctga

SEQ ID NO: 471024 - DNA, 282 bp, Shigella flexneri
gtggcatttggtacgctgacgcagctggtactggaaaacgcgccggtggaggaaatcgaaaccgtagctgcacttagccatgcggtaggtttgccaataactctcgctcaactggttattaaagaagatgtcccggcgaaaatgcgcattgttgcaaaagcatcttgtgcagaaggtgaaaccatccacaacatgcctggcggcgcgacgccagatcaggtttacgccgcactgctggtagctgaccagtacggtcagcgtttcctgcaagagtgggaataa

SEQ ID NO: 471025 - DNA, 618 bp, Shigella flexneri
atgaaagcttcactggcgctgctcagcctgctaacggcatttaccagccactccttaaaatctcccgccgttccaccaaccgtggtacaaatccaggccaataccaaccttgccatcgcagacggtgccagacagcaaattggcagcacgctattttacgatccggcgtatatgcagcttacctatcctggcggtgatgttccgcaagaacgcggtgtatgttccgatgtggtgatccgcgcattgcgcagccagaaggtcgatttgcagaaactggttcacgaagatatggcgaagaattttgctgagtacccgcaaaaatggaagttaaagcgcccggacagcaacatcgatcaccgtcgggtgcctaatctggaaacctggtttagccgccacaacaaaacacgccccatcagtaaaaatgccggtgactatcaagcgggcgatattgtctcctggcgattagataacgggctggcgcatattggggtggcgtcagatggcttcgcccgcgacggtacgccgctggtgatacataacattggcgcaggcgcgcaggaagaagatgtgctgtttagctggcggatggtggggcattatcgttattttgttaaataa

SEQ ID NO: 471026 - DNA, 906 bp, Shigella flexneri
atgtctgccgcaggaaagagcaacccactggcaatcagtggcttggttgtgctcacacttatctggagttatagctggattttcatgaagcaagtcaccagttacatcggtgccttcgactttaccgccttacgctgcattttcggcgctctcgttttattcatcgtccttttattacgtggtcgcggaatgcgcccgacgccgtttaaatacaccttagccattgccctgttacaaacctgcgggatggttggtctggcgcagtgggcgttggtcagcggaggtgcggggaaggtggcgatcctgagctataccatgccgttctgggtggtgattttcgccgcgttgtttctcggtgaacgcctgcgacgtgggcaatatttcgcgattctgattgccgctttcggcttatttttggtgttgcagccgtggcaactcgatttctcttcgatgaaaagtgccatgctggcaatcctctccggtgttagttggggggcgagcgcgattgttgctaaacgcctatacgcccgtcatccgcgcgtggatttattatcgttaacatcctggcagatgctgtatgcggcgctggtgatgagtgtggtcgctttactggtgccgcaacgtgaaattgactggcagcccaccgtgttctgggcgctggcctacagtgcgattctggcgacggcgctagcgtggagcttatggctgtttgtgctgaaaaacttgcctgccagtattgccagcttaagcacactggccgttcccgtttgtggcgtactcttttcctggtggctgctcggtgagaatccgggggccgttgaaggtagcggtattgtgctgattgtgctggcactggcgctggtgagccgtaagaaaaaagaagctgtcagtgtaaaaagcatctga

SEQ ID NO: 471027 - DNA, 2181 bp, Shigella flexneri
atgagcacgtcagacgatatccataacaccacagccattggcaaatgcccgttccatcagggcggtcacgaccagagcgcgggggcgggcacaaccactcgcgactggtggccaaatcaactccgtgttgacctgttaaaccaacattctaatcgttctaacccgctgggtgaggactttgactaccgcaaagaattcagcaaattagattactacggcctgaaaaaagatctgaaagccctgctgacagaatctcagccgtggtggccagccgactggggcagctacgccggtctgtttattcgtatggcttggcacggcgcaggtacttaccgttcaatcgatggacgcggcggcgcgggtcgtggtcagcaacgttttgcaccgctgaactcctggccggataacgtaagcctcgataaagcgcgtcgcctgttgtggccaatcaaacagaaatatggtcagaaaatctcctgggccgacctgtttatcctcgcaggtaacgtggcgctggaaaactccggcttccgtaccttcggttttggtgccggtcgtgaagacgtctgggaaccggatctggatgttaactggggtgatgaaaaagcctggctgactcaccgtcatccggaagcgctggcgaaagcaccgctgggtgcaaccgagatgggcctgatttacgttaacccggaaggcccggatcacagcggcgaaccgctttctgcggcagcagctatccgcgcgaccttcggcaacatgggcatgaacgacgaagaaaccgtggcgctgattgcgggtggtcatacgctgggtaaaacccacggtgccggtccgacatcaaacgtaggtcctgatccagaagctgcaccgattgaagaacaaggtttaggctgggcgagcacttacggcagcggcgttggcgcagatgccattacctctggtctggaagtagtctggacccagacgccgacccagtggagcaactatttcttcgagaatctgttcaagtatgagtgggtacagacccgcagtccggctggagcaatccagttcgaagcggtagacgcaccggaaattatcccggatccgttcgatccgtcgaagaaacgtaaaccgacaatgctggtgaccgacctgacgctgcgttttgatcctgagttcgagaagatctctcgtcgtttcctcaacgatccgcaggcgttcaacgaagcctttgcccgtgcctggttcaaactgacgcacagggatatggggccgaaatctcgctacatcgggccggaagtgccgaaagaagatctgatctggcaagatccgctgccgcagccgatctacaacccgaccgagcaggacattatcgatctgaaattcgcgattgcggattctggtctgtctgttagtgagctggtatcggtggcctgggcatctgcttctaccttccgtggtggcgacaaacgcggtggtgccaacggtgcgcgtctggcattaatgccgcagcgcgactgggatgtgaacgccgcagccgttcgtgctctgcctgttctggagaaaatccagaaagagtctggtaaagcctcgctggcggatatcatcgtgctggctggtgtggttggtgttgagaaagccgcaagcgccgcaggtttgagcattcatgtaccgtttgcgccgggtcgcgttgatgcgcgtcaggatcagactgacattgagatgtttgagctgctggagccaattgctgacggtttccgtaactatcgcgctcgtctggacgtttccaccaccgagtcactgctgatcgacaaagcacagcaactgacgctgaccgcgccggaaatgactgcgctggtgggcgggatgcgtgtactgggtgccaacttcgatggcagcaaaaacggcgtcttcactgaccgcgttggcgtattgagcaatgacttcttcgtgaacttgctggatatgcgttacgagtggaaagcgactgacgaatcgaaagagctgttcgaaggacgtgaccgcgaaaccggcgaagtgaaatacacagccagccgtgcggatctggtatttggttctaactctgtcctgcgtgcagtagcggaagtttacgccagcagcgatgcccacgagaagtttgttaaagacttcgtagcggcatgggtgaaagtgatgaacctcgaccgtttcgacctgctgtaa

SEQ ID NO: 471028 - DNA, 891 bp, Shigella flexneri
atgagcttttttcacgccagccagcgggatgccctgaatcagagcctggcagaagtccaggggcagattaatgtttcgttcgagtttttcccgccgcgtaccagtgaaatggagcagaccctgtggaactccatcgatcgccttagcagcctgaaaccgaagtttgtatcggtgacctatggcgcgaactccggcgagcgcgaccgtacgcacagcattattaaaggcattaaagatcgcactggtctggaagcggcaccgcatcttacttgcattgatgcgacgcccgacgagctgcgcaccattgcacgcgactactggaataacggtattcgtcatatcgtggcactgcgtggcgatctgccgccgggaagtggtaagccagaaatgtatgcttctgacctggtgacgctgttaaaagaagtggcagatttcgatatatccgtggcggcgtatccggaagttcacccggaagcaaaaagcgctcaggcggatttgcttaatctgaaacgcaaagtggatgccggagccaaccgcgcgattactcagttcttcttcgatgtcgaaagctacctgcgttttcgtgaccgctgtgtatcggcgggcattgatgtggaaatcatcccgggcattttgccggtatctaactttaaacaggcgaagaaatttgccgacatgaccaacgtgcgtattccggcgtggatggcgcaaatgtttgacgggctggatgacgatgccgaaacccgcaaactggtgggcgcgaatattgccatggatatggtgaagattttaagccgtgaaggagtgaaagatttccacttctatacgcttaaccgcgctgaaatgagttacgcgatttgccatacgctgggtgttcgacctggtttataa

SEQ ID NO: 471029 - DNA, 2433 bp, Shigella flexneri
atgagtgtgattgcgcaggcaggggcgaaaggtcgtcagctgcataaatttggtggcagtagtctggctgatgtgaagtgttatttgcgtgtcgcgggcattatggcggagttctctcagcctgacgatatgatggtggtttccgccgccggtagcaccactaaccagttgattaactggttgaaactaagccagaccgatcgtctctctgcgcatcaggttcaacaaacgctgcgtcgctatcagtgcgatctgattagcggtctgctacccgctgaagaagccgatagcctcattagcgcttttgtcagcgatcttgagcgcctggcggcgttgctcgacagtggtattaacgatgcggtgtatgcggaagtggtgggccacggtgaagtgtggtcggcgcgcctgatgtctgcggtacttaatcaacaagggctgccagcggcctggcttgatgcccgtgagtttttacgcgctgaacgcgctgcgcaaccgcaggttgatgaagggctttcttacccgttgctgcaacagctactggtacaacatccgagcaaacgtctggtggtgaccgggtttatcagccgtaacaacgccggtgaaacggtgttgctggggcgtaacggttccgactattccgcgacacaaatcggtgcgctggcgggtgtttctcgtgtaaccatctggagcgacgtcgccggggtatacagtgccgacccgcgtaaagtgaaagatgcctgcctgctgccgttgctgcgtctggatgaggccagcgaactggcgcgtctggcggctcccgttcttcacgcccgtactttacagccagtttctggcagcgaaatcgacctgcagctgcgctgtagctacacgccggatcaaggttccacgcgcattgaacgcgtgctggcctccggtactggtgcgcgtattgtcaccagccacgatgatgtctgtttgattgagtttcaggtgcccgccagtcaggatttcaaactggcgcataaagagatcgaccagatcctgaaacgtgcccaggtgcgtccactggcggttggcgtgcataacgatcgccagttgttgcaattttgctacacctcagaagtggccgacagtgcgctgaaaatcctcgacgaagcgggattacctggagaactgcgcctgcgtcaggggctggcgctggtggcgatggtcggggcgggtgtcacccgtaacccgctgcattgccaccgcttctggcagcaactgaaaggccagccggtcgagtttacgtggcagtccgatgacggcatcagtctggtggcagtactgcgcaccggcccgaccgaaagcctgattcaggggctgcatcagtccgtcttccgcgcagaaaaacgcatcggcctggtattgttcggcaaaggcaatatcggctctcgctggctggaactgttcgcccgcgagcagagcacgctttcggcgcgtaccggctttgaatttgtgctggcaggcgtggtggacagccgccgcagtctgttgagttatgacgggctggacgccagccgcgcgttagccttcttcaacgatgaagcggtcgagcaggatgaagagtcgcttttcctgtggatgcgcgcccatccgtatgatgatttagtggtgttggacgttaccgccagccagcagcttgctgatcagtatctcgatttcgccagccacggtttccacgtcatcagtgccaacaaactggcgggagcaagcgacagcaataaatatcgccagatccacgacgccttcgaaaaaaccgggcgtcactggctatacaacgccaccgttggtgcgggcttgccgatcaaccataccgtgcgcgatctgatcgacagcggcgataccattttgtcgatcagtgggatcttctccggcacgctctcctggctgttcctgcaattcgacggtagcgtgccgtttaccgagctggtggatcaggcgtggcagcagggcttaaccgagcctgatccgcgtgacgacctctccggcaaagacgtaatgcgcaagctggtgattctggcgcgtgaagcgggttacaacattgaaccggaccaggtacgtgtggaatcgctggtgcctgctcattgcgaaggcggcagcatcgaccatttctttgaaaatggcgatgaacttaacgagcagatggtgcaacggctggaagcggcccgcgaaatggggctggtgctgcgctacgtggcgcgtttcgatgccaacggcaaagcgcgtgtgggcgtggaggcggtgcgtgaagactatccgctggcatcactgctgccatgcgataacgtctttgccatcgaaagccgctggtaccgcgataatccgctggtgatccgtgggcctggcgctgggcgcgacgtcaccgccggggcgattcagtcggatatcaaccggctggcacagttgttgtaa

SEQ ID NO: 471030 - DNA, 1161 bp, Shigella flexneri
atgacgcgtaaacaggccaccatcgcagtgcgtagcgggttaaatgacgacgaacagtatggttgcgttgtccctcccatccatctttccagcacctataactttaccggatttaatgaaccgcgcgcgcatgattactcgcgtcgcggcaacccaacgcgcgatgtggttcagcgtgcgctggcagaactggaaggcggtgctggcgcagtacttactaataccggcatgtccgcgattcacctggtaacgaccgtctttttgaaacctggcgatctgctggttgcgccgcacgactgctacggcggtagctatcgcctgttcgacagtctggcgaaacgcggttgctatcgcgtgttgtttgttgatcaaggcgatgaacaggcattacgggcagcgctggcagaaaaacccaaactggtactggtagaaagcccaagtaatccattgttacgcgtcgtggatattgcgaaaatctgccatctggcaagggaagtcggggcggtgagcgtggtggataacaccttcttaagcccggcattacaaaatccgctggcattgggtgccgatctggtgttgcattcatgtacgaaatatctgaacggtcactctgacgtggtggctggcgtggtgattgctaaagacccggacgttgtcactgaacttgcctggtgggcaaacaatattggcgtgacgggcggcgcgtttgacagctatctgctgctacgcgggttgcgaacgctggtgccgcgtatggagctggcgcagcgcaacgcgcaggcgattgtgaaatatctgcaaacccagccgttggtgaaaaaactgtatcacccgtcgctgccggaaaatcaggggcatgaaattgccgcgcgtcagcaaaaaggctttggcgcaatgttgagttttgaactggatggcgatgagcagacgctgtgtcgtttcctgggcgggctgtcgttgtttacgctggcggaatcattagggggagtggaaagtttaatctctcacgccgcaaccatgacacatgcaggcatggcaccagaagcgcgtgctgccgccgggatctccgagacgctgctgcgtatctccaccggtattgaagatggcgaagatttaattgccgacctggaaaatggcttccgggctgcaaacaaggggtaa

SEQ ID NO: 471031 - DNA, 318 bp, Shigella flexneri; identical to SEQ ID NO: 261467

SEQ ID NO: 471032 - DNA, 609 bp, Shigella flexneri
atgaaaaacaggctgctgatcctcagcctgctggtttctgtacctgcctttgcctggcagccgcaaactggcgacatcatctttcaaatctctcgctcatcgcaaagtaaagcgatccaactggcaacccattccgattacagccacaccggtatgctggtgatgcgtaacaaaaagccctacgtttttgaagcggtcggcccggtgaaatacaccccgctcaagcagtggattgcccatggtgaaaagggcaactacgttgttcgccgcgttgaaggcggactgagtgttgaacaacagcaaaaactgacgcaaacggcaaaacgttatctcggtaaaccgtatgatttcagcttctcatggagcgacgatcgccagtactgttcggaagtggtgtggaaggtttaccagaacgcgctgggaatgcgcgtgggcgaacagcagaagttgaaagagtttgatctcagcaacccgctggtccaggcgaagctcaaagaacgctacggtaaaaatattccgcttgaggaaacggtagtttcaccacaagccgttttcgacgcgccacaactcaccacggttgccaaagagtggccgctgttttcgtggtga

SEQ ID NO: 471033 - DNA, 213 bp, Shigella flexneri
atgaaaaaagatattcacccgaaatacgaagaaattactgctagctgctcttgcggtaacgtaataaaaatccgctccaccgttggtcatgacctgaacctcgacgtgtgcagcaagtgccacccgttcttcactggcaaacagcgtgatgttgctaccggtggccgtgttgaccgcttcaacaagcgtttcaacatcccgggcagcaaataa

SEQ ID NO: 471034 - DNA, 2199 bp, Shigella flexneri
atgcccgttgcccacgttgccttgcccgttccgcttcctcgtacctttgactatctgctgccagaaggcatgacggttaaagctgggtgtcgcgtgcgcgtgccgtttggcaaacagcaggagcgcatcgggattgtggtatcagttagcgatgccagcgaactgccgctcactgagctaaaagcggtagtcgaagtgctggatggtgagccggtgtttactcactccgtctggcgattgctgctatgggcggcagattactatcatcatccgattggcgatgtgctgtttcatgccttgccgattttactacgccaggggcggcctgcggcgaacgcgccgatgtggtactggtttgccactgaacaaggtcaggcggtggatctgaacagcctgaaacgctcacccaagcaacaacaggcgctggcagcgttacggcaaggcaaaatctggcgcgaccaggttgccacgctcgaatttaatgatgccgcgttgcaggcgctgcgcaaaaaaggtctgtgtgatttagcaagtgaaacaccagagtttagcgactggcgaacgaactatgccgtttctggtgagcggttgcgattgaataccgaacaggccaccgccgttggcgcaattcatagcgcggcagatactttttctgcctggctgctggcgggcgttaccggttccggtaaaacggaggtttatctcagtgtactggaaaacgtgctcgctcagggcaaacaggcgctggtgatggtgccggaaatcggcctgacaccgcaaactatcgcccgttttcgtgaacggtttaatgcgcccgtggaagttctgcattccggtctgaacgacagcgagcgtctttcggcgtggctgaaagcgaaaaatggcgaggcggcgattgtgatcggcacccgctccgcgctgtttacgccgtttaaaaatctcggcgtgattgtcattgacgaagagcacgacagttcctacaagcagcaggaaggctggcgctatcatgcccgcgacctggcggtgtatcgtgcgcatagcgagcaaatcccgattattcttggctccgcaacgcccgcgctggaaacgttgtgcaacgtccagcagaaaaaataccgcctgctgcgcctgacgcgccgggcggggaatgcgcgtccggcaattcaacacgtgctggatttaaaaggtcagaaggtgcaggcaggtctggctccggcgttaatcacccgtatgcgccagcatttacaggccaacaatcaggttatcctctttcttaaccgccgtggctttgcgcctgcgctactgtgccacgactgcggctggattgccgaatgcccacgttgcgatcactactacacgctgcatcaggcgcaacagcatttgcgctgtcaccactgtgacagtcagcgtccggtgccgcgccagtgcccttcctgcggttccacgcacctggtacccgtggggctgggcaccgaacagcttgaacagacgcttgcgccgctgttccctgatgtgcccatttctcgtatcgaccgcgataccaccagccgcaaaggggcgctggaacagcaactggcggaagtacatcgcggcggtgcgaggattttgatcggcacacaaatgctggcgaaaggtcaccactttccggatgtgacgctggtggcgttactggatgtggacggcgcgctgttttctgccgattttcgctcggcagagcgtttcgctcagctttacacccaggtcgctggtcgtgccgggcgtgcgggtaaacaaggcgaagtggtgctgcaaacgcaccatccggaacatcctctgttgcaaacgttgctctataaaggctacgacgcctttgccgaacaggcgctggctgagcgacggatgatgcaactgccgccatggaccagccatgtgattgtgcgtgcggaagatcataacaatcagcatgcgccgctgttcctgcaacaactgcgtaatctgatcctctccagcccgctggcagacgacaaactgtgggttctcggtccggttccggcactggcacctaaacgtggcggtcgctggcgctggcagatattgttgcagcacccttcccgcgtgcgcttgcaacacatcattagtggtacgctggcgctcatcaatacaataccggattcccgcaaggtgaaatgggtactggatgttgatccgattgagggttaa

SEQ ID NO: 471035 - DNA, 1026 bp, Shigella flexneri
gtgaaagcgaagaagcaggaaactgccgcgaccatgaaagacgttgccctcaaggcaaaagtctctacagcgactgtctcccgagcattaatgaatcccgataaagtctcccaggccacccgtaatcgggttgaaaaagcggcccgggaagtgggttatttaccgcagcctatggggcgcaacgtcaagcgtaatgaatcccgcaccattctggtgattgtcccggatatctgcgatcccttctttagcgaaattattcgcggtatcgaagttacggcggcaaatcacggatatctggtgctgattggcgactgtgcgcatcaaaatcagcaggaaaaaacctttatcgatttgatcatcaccaagcaaattgatggcatgttgctgctgggttcaaggctgccgtttgatgccagcattgaggaacagcgtaatctgccgccgatggtgatggcgaacgaatttgcaccggaactggagctgcctaccgttcatatcgacaatctgaccgccgcatttgatgcagtaaattatttatatgagcaagggcataaacggattggctgtatagccggtcccgaagagatgccactgtgtcactaccgcctgcaaggctatgttcaggcgctgcgtcgctgcggaattatggttgatccacaatacatcgcccgtggcgacttcaccttcgaagccggaagcaaagcaatgcaacagctgcttgatcttccacaaccgcctactgcagtcttctgccatagcgatgtgatggcgctcggcgcactttctcaggcaaaacgccaggggctgaaagtcccggaagacctttccataatcggttttgataacatcgacctgacgcaattttgtgatccgccgctgacaaccatcgcgcagccgcgttacgaaatcggtcgggaagctatgctgttattgcttgatcaaatgcaggggcaacacgttggcagtggctctcgtttaatggactgcgaacttatcatccggggatcaacacgcgcgttaccttaa

SEQ ID NO: 471036 - DNA, 855 bp, Shigella flexneri
atggtcgctattgctgccgccgttcttgtgacctttatcggtggtctgtacttcattacgcatcacaagaaagaagagtccgagacgctgcaaagccagaaagtgaccggaaacggactaccaccaaaaccagaagaacgctggcgctacattaaagagctggaaagtcgccagccgggtgtgcgtgcgcccacagaaccttctaccggtggtgaagtgaaaacgccggagcaactgacaccagaacaacgtcagcttcttgaacaaatgcaggctgatatgcgccagcagccaacgcagctggttgaggttccgtggaatgaacagacgccggaacagcgtcagcaaacgctacaacgccagcgtcaggcgcagcaattagcggagcagcaacgcctggctcagcagtcgcgtacgactgaacaaagctggcagcagcagacgcgtacgtcgcaagccgcgccggtacaggcgcaaccgcgccagtctaaaccagcttctactcagcagccgtaccaggatctgctgcaaacccctgcgcacacgaccgcgcagtcgaagccgcagcaagctgcgccggttgctcgtgccgctgacgcgccaaaaccgacggcggagaaaaaagacgaacgccgctggatggtgcagtgcggttcgttcagaggcgcggaacaggcagagacggtacgtgctcagctggcgttcgaaggatttgactcgaaaatcaccaccaacaatggctggaatcgtgtggtcattggcccggtgaaaggcaaagagaacgcagacagcaccctcaatcggttgaagatggcgggtcatacaaactgcattcggctcgccgccgggggttga

SEQ ID NO: 471037 - DNA, 531 bp, Shigella flexneri; identical to SEQ ID NO: 459791

SEQ ID NO: 471038 - DNA, 1332 bp, Shigella flexneri
atgtctgaaatgaccccacgcgaaatcgtcagcgaactggataagcacatcatcggccaggacaacgccaagcgttctgtggcgattgctctgcgtaaccgctggcgtcgcatgcagctcaacgaagagctgcgccatgaagtgaccccgaaaaatatcctgatgatcggcccgaccggtgtcggtaaaactgaaatcgcccgtcgtctggctaagctggcgaatgcgccgttcatcaaagttgaagcgaccaaatttaccgaagtgggctacgtcggtaaggaagttgattctattattcgcgatctgaccgatgccgccgtgaaaatggtacgcgtccaggctatcgagaaaaaccgttatcgcgctgaagaactggcagaagaacgtattctcgacgtgctgatcccacctgctaaaaacaactggggacagactgaacagcagcaggaaccttccgctgctcgtcaggcattccgcaaaaaactgcgtgaaggccagcttgatgacaaagaaatcgagatcgatcttgccgcagcaccgatgggcgttgaaattatggctcctccgggcatggaagagatgaccagccagctgcagtccatgttccagaacctgggcggccagaagcaaaaagcgcgtaagctgaaaatcaaagacgccatgaagctgctgattgaagaagaagcggcgaaactggtgaacccggaagagctgaagcaagacgctatcgacgctgttgagcagcacgggatcgtgtttatcgacgaaatcgacaaaatctgtaagcgcggcgagtcttccggtccggatgtttctcgtgaaggcgttcagcgtgacctgctgccgctggtagaaggttgcaccgtttccaccaaacacgggatggtcaaaactgaccacattctgtttatcgcttctggcgcgttccagattgcgaaaccgtctgacctgatcccggaactgcaaggtcggctgccaatccgcgttgaactgcaggcactgaccaccagcgacttcgagcgtattctgaccgagccgaatgcctctatcaccgtgcagtacaaagcactgatggcgactgaaggcgtaaatatcgagtttaccgactccggtattaaacgcatcgcggaagcggcatggcaggtgaacgaatctaccgaaaacatcggtgctcgtcgtttacacactgttctggagcgtttaatggaagagatttcctacgacgccagcgatttaagcggtcaaaatatcactattgacgcagattatgtgagcaaacatctggatgcgttggtggcagatgaagatctgagccgttttatcctataa

SEQ ID NO: 471039 - DNA, 927 bp, Shigella flexneri
atgactgaacaacaaattagccgaactcaggcgtggctggaaagtttacgacctaaaaccctccccctcgcctttgctgcaattatcgtcgggacggcgctggcatggtggcaaggtcacttcgatccgctggtcgccctgctggcactaattaccgccgggctattacagatcctttctaacctcgccaatgattacggcgatgcggtaaaaggcagcgataaacctgaccgcattgggccgctacgcggcatgcaaaaaggggtcattacccagcaaaagatgaaacgggcgctcattattaccgtcgtgctcatctgtctctccgggctggcactggttgcagtggcatgccatacgctggccgattttgtcggtttcctgattcttggcgggttgtcgatcattgccgctatcacctacaccgtgggcaatcgtccttatggttatatcggtctgggtgatatttccgtactggttttctttggctggttgagtgtcatggggagctggtatttacaggctcatacattgattccggcactgatccttccggcgaccgcatgcggcctgctggcaacggcagtactgaatattaataacctgcgtgatatcaatagcgaccgcgaaaatggcaaaaacacgctggtggtgcgcttaggtgaagtgaacgcgcgtcgttatcatgcctgcctgctgatgggctcgctggtgtgtctggcgctgtttaatctcttttcgctgcatagcctgtggggctggctgttcctgctggcggcaccattactggtgaagcaagcccgttatgtgatgcgggaaatggacccggtggcgatgcgaccaatgctggaacgtactgtcaagggagcgttactgactaacctgctgtttgttttagggatattcctaagccagtgggcagcataa

SEQ ID NO: 471040 - DNA, 486 bp, Shigella flexneri
atgaaatacgatacttccgagctttgtgacatctatcaagaagatgttaacgtcgtggaaccgctgttctccaactttggcggacgggcgtcgtttggcggacaaataatcacggtaaaatgtttcgaggacaacgggttgctgtacgatctgctcgaacagaatggccgtggtcgtgttcttgtcgtcgatggcggtggttctgttcgtcgcgcactggtcgatgctgaactggcgcgtctggcagtacaaaatgaatgggaaggtctggtcatttacggcgcggtgcgtcaggtagatgacctggaagagttggatatcggcatccaggcgatggcggcaattccggttggtgccgctggcgaaggcattggcgaaagcgatgtccgcgtcaattttggcggtgtcaccttcttctccggcgaccatctttatgccgacaataccgggattattctttcagaagatccgctggatattgaatga

SEQ ID NO: 471041 - DNA, 240 bp, Shigella flexneri; identical to SEQ ID NO: 3072

SEQ ID NO: 471042 - DNA, 645 bp, Shigella flexneri
atgagtcaaacatcaaccttgaaaggccagtgcattgctgaattcctcggtaccgggttgttgatttttttcggtgtgggttgcgttgcagcactaaaagtcgctggtgcgtcttttggtcagtgggaaatcagtgtcatttggggactgggggtggcaatggccatctacctgaccgcaggggtttccggcgcgcatcttaatcccgctgttaccattgcattgtggctgtttgcctgtttcgacaagcgcaaagttattccttttatcgtttcacaagttgccggcgctttctgcgctgcggctttagtttacgggctttactacaatttatttttcgacttcgagcagactcatcacattgttcgcggcagcgttgaaagtgttgatctggctggcactttctctacttaccctaatcctcatatcaattttgtgcaggctttcgcagttgagatggtgattaccgctattctgatggggctgatcctggcgttaacggacgatggcaacggtgtaccacgcggccctttggctcccttgctgattggtctactgattgcggtcattagcgcatctatgggcccattgacaggttttgccatgaacccagcgcgtgacttcggtccgaaagtctttgcctag

SEQ ID NO: 471043 - DNA, 1446 bp, Shigella flexneri
atggatcacgatgccaatatcattagcgtgtcgcagcgcgaatttgagcaaatctacccaaaaccaggttgggtagaacacgacccaatggaaatctgggccacccaaagctccacgctggtagaagtgctggcgaaagccgatatcagttccgatcaaattgcagctatcggtattacgaaccagcgtgaaaccactattgtctgggaaaaagaaaccggcaagcctatctataacgccattgtctggcagtgccgtcgtaccgcagaaatctgcgagcatttaaaacgtgacggtttagaagattatatccgcagcaataccggtctggtgattgacccgtacttttctggcaccaaagtgaagtggatcctcgaccatgtggaaggctctcgcgagcgtgcacgtcgtggtgaattgctgtttggtacggttgatacgtggcttatctggaaaatgactcagggccgtgtccatgtgaccgattacaccaacgcctctcgtaccatgttgttcaacatccataccctggactgggacgacaaaatgctggaagtgctggatattccgcgcgagatgctgccagaagtgcgtcgttcttccgaagtatacggtcagactaacattggcggcaaaggcggcacgcgtattccaatctccgggatcgccggtgaccagcaggccgcgctgtttggtcagttgtgcgtgaaagaagggatggcgaagaacacctatggcactggctgctttatgctgatgaacactggcgagaaagcggtgaaatcagaaaacggcctgctgaccaccatcgcctgcggcccgactggcgaagtgaactatgcgttggaaggtgcggtgtttatggcaggcgcatccattcagtggctgcgcgatgagatgaagttgattaacgacgcctacgattccgaatatttcgccaccaaagtgcaaaacaccaatggtgtgtatgtggttccggcatttaccgggctgggtgcgccgtactgggacccgtatgcgcgcggggcgattttcggtctgactcgtggggtgaacgctaaccacattatacgcgcgacgctggagtctattgcttatcagacgcgtgacgtgctggaagcgatgcaggccgactctggtatccgtctgcacgccctgcgcgtggatggtggcgcagtagcaaacaatttcctgatgcagttccagtccgatattctcggcacccgcgttgagcgcccggaagtgcgcgaagtcaccgcattgggtgcggcctatctcgcaggcctggcggttggcttctggcagaacctcgacgagctgcaagagaaagcggtgattgagcgcgagttccgtccaggcatcgaaaccactgagcgtaattaccgttacgcaggctggaaaaaagcggtcaaacgcgcgatggcgtgggaagaacacgacgagtaa

SEQ ID NO: 471044 - DNA, 1011 bp, Shigella flexneri
atgagacgagaacttgccatcgaattttcccgcgtcaccgaatctgcggcgctggctggctacaaatggttaggacgcggcgataaaaacaccgcggacggcgcggcggtaaacgccatgcgtattatgctcaaccaggtcaacattgacggcaccatcgtcattggtgaaggtgaaatcgacgaagcaccgatgctctacattggtgaaaaagtcggtactggtcgcggcgacgcggtagatattgctgttgatccgattgaaggcacgcgcatgacggcgatgggccaggctaacgcgctggcggtgctggcagtaggcgataaaggctgcttcctcaatgcgccggatatgtatatggagaagctgattgtcgggccgggagccaaaggcaccattgatctgaacctgccgctggcggataacctgcgcaatgtagcggcggcgctcggcaaaccgttgagcgaactgacggtaacgattctggctaaaccacgccacgatgccgttatcgctgaaatgcagcaactcggcgtacgcgtatttgctattccggacggcgacgttgcggcctcaattctcacctgtatgccagacagcgaagttgacgtgctgtacggtattggtggcgcgccggaaggcgtggtttctgcggcggtgatccgcgcattagatggcgacatgaacggtcgtctgctggcgcgtcatgacgtcaaaggcgacaacgaagagaatcgtcgcattggcgagcaggagctggcacgctgcaaagcgatgggcatcgaagccggtaaagtattgcgtctgggcgatatggcgcgcagcgataacgtcatcttctctgccaccggtattaccaaaggcgatctgctggaaggtattagccgcaaaggcaatatcgcgactaccgaaacgctgctgatccgcggcaagtcacgcaccattcgccgcattcagtccatccactatctggatcgcaaagacccggaaatgcaggtgcacattctctga

SEQ ID NO: 471045 - DNA, 747 bp, Shigella flexneri
atggctgattgggtaacaggcaaagtcactaaagtgcagaactggaccgacgccctgtttagtctcaccgttcacgcccccgtgcttccgtttaccgccgggcaatttaccaagcttggccttgaaatcgacggcgaacgcgtccagcgcgcctactcctatgttaactcgcccgataatcccgatctggagttttacctggtcaccgtccccgatggcaaattaagcccacgattggcggcactgaaaccgggcgatgaagtgcaggtggttagcgaagcagctggcttctttgttctggatgaagtaccggactgcgaaacgctatggatgctggcaaccggtacagcgattggcccttatttatcgattctgcaactaggcaaagatttagatcgcttcaaaaatctggtcctggttcacgccgcacgttatgccgccgacttaagctatttgccactgatgcaagaactggaaaaacgctacgaaggcaaactgcgcattcagacggtggtcagtcgggaaacggcagcggggtcgctcaccggacggataccggcattaattgaaagtggggaactggaaagcgcgattggcctgccgatgaataaagaaaccagccatgtgatgctgtgcggcaatccacagatggtgcgcgatacacaacagttgctgaaagagacccggcagatgacgaaacatttacgtcgccgaccgggccatatgacagcggagcattactggtaa

SEQ ID NO: 471046 - DNA, 429 bp, Shigella flexneri
atggcttataaacacattggcgtggcaatttccgggaatgaagaagatgccttactggtgaataaagccctggagctcgccagacataatgacgctcacctgacgttaattcatattgatgatggcttaagcgagttgtatccgggtatctacttccctgcaacagaagatattcttcaattgttgaagaataagtcggataacaagctgtataaactgacgaaaaatattcaatggccgaagacaaaactgcgtattgaacgcggagaaatgccggaaacactgctggaaattatgcaaaaagagcagtgcgacctccttgtctgtggtcatcatcactcatttatcaaccgtttgatgccggcatatcgcgggatgatcaataagatgagtgcggatttgctcatcgtgccgtttatcgataagtaa

SEQ ID NO: 471047 - DNA, 300 bp, Shigella flexneri
atgaaagatgtcgtagataaatgcagtactaaaggatgtgcgattgatatcggtacggtgattgataacgacaactgtaccagtaagttttcgcgcttttttgccacccgcgaagaagcagagtcttttatgaccaaactgaaagagcttgccgccgctgcatcctctgcagatgaaggggccagcgtggcctataagattaaggatctggaggggcaagttgagcttgatgcggccttcactttctcatgccaggccgagatgattatttttgagttatcactgcgttcgttagcttga

SEQ ID NO: 471048 - DNA, 270 bp, Shigella flexneri
atgaccatacagcaatggttattctcatttaaagggcgtattggacgccgtgatttctggatttggataggcctgtggttcgcaggcatgctggtgcttttctcactggcgggtaagaatctactcgatattcagaccgcggcgttttgccttgtgtgcttgctctggccaacagcggcagtaactgttaagcgcttgcatgatcgcgggcgttccggcgcatgggcatttctgatgattgtggcgtggatgctgctggcgggtaactga

SEQ ID NO: 471049 - DNA, 600 bp, Shigella flexneri
atgaagccagggtgtacgctgttttttctcttatgttctgcattaaccgttacaacaacggcgcatgcacaaacaccagatacggcaacgaccgcgccttatctgctggctggagcccctactttcgatctctccatcagccagtttcgagaagactttaacagccagaatcccagcctgccactgaacgaatttcgtgccatcgacagcagtcccgacaaagccaatctcactcgtgctgcaagtaaaattaacgagaacttgtatgcttctacagcgctggagcgcggtaccttaaaaatcaaaagcattcaaatgacctggctacccatccaggggccagagcaaaaagcagcgaaagcgaaagctcaggaatacatggcagcagtgatccgcacactcaccccattaatgaccaaaacacaaagccagaaaaaactgcagtcgctactaacggcggggaaaaacaaacgttattacaccgagacagaaggtgcactgcgttatgttgtcgcggacaacggcgaaaaggggctgaccttcgctgttgaaccgattaagctggcgctatctgaatcgcttgaaggtttgaataaatga

SEQ ID NO: 471050 - DNA, 768 bp, Shigella flexneri
atgcgacatcctttagtgatgggtaactggaaactgaacggcagccgccacatggttcacgagctggtttctaacctgcgtaaagagctggcaggtgttgctggctgtgcggttgcaatcgcaccaccggaaatgtacatcgatatggcgaagcgcgaagctgaaggcagccacatcatgctgggtgcgcaaaacgtggacctgaacctgtccggcgcattcaccggtgaaacttctgccgctatgctgaaagacatcggcgctcagtacatcatcatcggccactctgaacgtcgtacttaccacaaagagtctgacgaactgattgcgaaaaaattcgcggtgctgaaagagcagggtctgactccggttctgtgcatcggtgaaaccgaagctgaaaacgaagcgggaaaaactgaagaagtttgcgcacgtcagatcgacgcggtactgaaaactcagggtgctgcggcattcgaaggtgcggttatcgcttacgaacctgtatgggcaatcggtactggcaaatctgcaactccggctcaggcacaggctgttcacaaattcatccgtgaccacatcgctaaagttgacgctaacatcgctgaacaagtgatcattcagtacggcggctctgtaaacgcgtctaacgctgcagaactgtttgctcagccagacatcgacggcgcgctggttggcggtgcttctctgaaagctgacgctttcgcagtgatcgttaaagctgcagaagcggctaaacaggcttaa

SEQ ID NO: 471051 - DNA, 756 bp, Shigella flexneri
atgaaaaaagcgggtcttctttttttggtgatgatagttatcgccgttgtggctgccggtattggttactggaaattaaccggtgaagagtcggatacattacgtaagattgtccttgaggaatgtttgcccaatcagcagcaaaatcaaaatccttcgccatgtgcggaagtcaaacccaatgccggatacgtggttttaaaagatcttaatggtccactgcaatatctgttgatgccaacgtatcgtattaacggtactgaaagtcctttgttgaccgatccttcaacgccgaacttcttttggttggcctggcaggcgcgtgattttatgagcaaaaaatacggccagccggttcccgatcgcgcggtttctttggcgatcaactcccgcaccgggcgtacgcaaaaccattttcatattcatatctcttgtattcgtcctgatgtgcgcgaacaactggataaaaatctggcgaacatcagcagccgctggttgccactgccaggtggtttgcgcgggcatgaatacctggcgcgtcgggtaacggaaagcgaactggtacaacgcagcccatttatgatgcttgcagaagaagtgcctgaggcgcgggaacatatgggaagctacgggctggcgatggtacggcagagtgataattcgtttgtgttgctggcgacacaacgaaatctactgacgctgaaccgtgcttcagccgaggaaatccaggatcatgagtgtgagattttgcgttaa

SEQ ID NO: 471052 - DNA, 990 bp, Shigella flexneri
atgaacaagtggggcgtagggttaacatttttgctggcggcaaccagcgttatggcaaaggatattcagcttcttaacgtttcatatgatccaacgcgcgaattgtacgaacagtacaacaaggcattcagcgcccactggaaacagcaaactggtgataacgtggtgattcgtcagtcacacggtggttcaggtaaacaagcgacgtcggtaatcaacggtattgaagctgatgttgtcacgctggctctggcctatgacgtggacgcgattgcggaacgcgggcggattgataaagagtggatcaaacgtctgccggataactccgcaccgtacacttccaccattgttttcctggtgcgtaagggcaatccgaagcagatccatgactggaacgatctgattaaaccgggtgtttcggtgatcacgcctaatccgaaaagctctggtggcgcacgctggaactacctggctgcctggggctacgcgctgcatcacaacaacaacgatcaggcaaaagcacaggattttgttcgggcactgtataaaaacgtcgaagttctggattctggcgcgcgcggctccactaacacctttgtcgagcgcgggattggcgatgtactgatcgcctgggaaaacgaagctctgctggcagcgaatgaactggggaaagataaattcgaaatcgtcacgccgagtgagtctatcctcgcagagccaacggtgtcggtggtcgataaagtggtcgagaaaaaaggcaccaaagaggtggcggaagcctacctgaaatatctctactcgccagaaggtcaggaaattgccgcgaaaaactactaccgtccgcgcgacgctgaagtagcgaaaaagtacgaaaatgcgtttccaaagctgaagttattcaccattgatgaagagttcggcggctggacgaaagcgcaaaaagagcattttgctaacggcggtacgttcgatcagatcagcaaacgctga

SEQ ID NO: 471053 - DNA, 963 bp, Shigella flexneri
atgattaagaaaataggtgtgttgacaagcggcggtgatgcgccaggcatgaacgccgcaattcgcggggttgttcgttctgcgctgacagaaggtctggaagtaatgggtatttatgacggctatctgggtctgtatgaagaccgtatggtacagctagaccgttacagcgtgtctgacatgatcaaccgtggcggtacgttcctcggttctgcgcgtttcccggaattccgcgacgagaacatccgcgccgtggctatcgaaaacctgaaaaaacgtggtatcgacgcgctggtggttatcggcggtgacggttcctacatgggtgcaatgcgtctgaccgaaatgggcttcccgtgcatcggtctgccgggcactatcgacaacgacatcaaaggcactgactacactatcggtttcttcactgcgctgagcaccgttgtagaagcgatcgaccgtctgcgtgacacctcttcttctcaccagcgtatttccgtggtggaagtgatgggccgttattgtggcgatctgaccctggctgcggccattgccggtggctgtgaattcgttgtagttccggaagttgaattcagccgtgaagacctggtaaacgaaatcaaagcgggtatcgcgaaaggtaaaaaacacgcgatcgtggcgattaccgaacatatgtgtgatgttgacgaactggcgcatttcatcgagaaagaaaccggtcgtgaaacccgcgcaactgtgctgggccacatccagcgcggtggttctccggtgccttacgaccgtattctggcttcccgtatgggcgcttacgctatcgatctgctgctggcaggttacggcggtcgttgtgtaggtatccagaacgaacagctggttcaccacgacatcatcgacgctatcgaaaacatgaagcgtccgttcaaaggtgactggctggactgcgcgaaaaaactgtattaa

SEQ ID NO: 471054 - DNA, 903 bp, Shigella flexneri
atgaatcaatcttatggacggctggtcagtcgggcggcgattgctgcgacggcgatggcttcgttgctattgctgattaaaatttttgcatggtggtataccgggtcggtgagtattctcgccgcgctggtggattcgctggtggatatcggcgcgtcgttgacgaatttactggtggtgcgatattccctgcaacctgccgacgataatcactcgtttggtcacggtaaagctgagtccctcgcggcgctggcgcaaagtatgtttatctccggttcggcactattcctgtttttgacgggtattcaacatctggtatctccaacaccgatgacagatccaggcgtcggggttatcgtgacaattgtggcgctaatttgtacgattatccttgtctcgtttcagcggtgggtggtgcgccggacgcaaagccaggcggtgcgggctgatatgctacattaccagtctgatgttatgatgaacggcgcaattctgctggcgctggggttgtcttggtacggctggcatcgcgccgatgctctgtttgcattgggaatcggcatctatattttatatagcgcgttacgcatgggatatgaggcggtacagtcattactggatcgcgcattgcctgatgaagaacggcaagaaattattgatatcgtgacttcctggccgggtgttagcggcgctcacgatcttcgcacgcggcagtcagggccgacccgctttattcagattcatttggaaatggaagactctctgcctttggttcaggcacatatggtggcggatcaggtagagcaggctattttacggcgttttccgggatcggatgtgattatccatcaggacccctgttccgtcgtacccagggagggtaaacggtctatgctttcataa

SEQ ID NO: 471055 - DNA, 501 bp, Shigella flexneri
atgcgcatagttaccgctgccgtcatggcctcaacgctggcagtcagttcattaagccacgctgctgaagtcggttcaggcgataactggcatccgggtgaagaacttacgcagcgcagtacgcagagccatatgttcgacggcataagtttaaccgaacatcagcgtcagcagatgcgagatcttatgcaacaggcccggcacgaacagcctcctgttaatgttagcgaactggagacaatgcatcgccttgtcaccgcagaaaattttgatgaaaacgctgtgcgcgcacaggcagaaaaaatggcgaatgagcaaattgctcgtcaggttgagatggcaaaagtccgcaaccaaatgtatcgcctgttaacgccggagcagcaagcggttttaaacgagaaacatcaacaacgaatggagcagttgcgtgacgtgacgcaatggcaaaaaagttcatcgttgaagctattgagtagtagcaactcacgttcccagtag

SEQ ID NO: 471056 - DNA, 699 bp, Shigella flexneri
atgaataaaatcctgttagttgatgatgaccgagagctgacttccctattaaaggagctgctcgagatggaaggcttcaacgtgattgttgcccacgatggggaacaggcgcttgatcttctggacgacagcattgatttacttttgcttgacgtaatgatgccgaagaaaaatggtatcgacacattaaaagcacttcgccagacacaccagacgcctgtcattatgttgacggcgcgcggcagtgaacttgatcgcgttctcggccttgagctgggcgcagatgactatctcccgaaaccgtttaatgatcgtgagctggtggcacgtattcgcgcaatcctgcgccgttcgcactggagcgagcaacagcaaaacaacgacaacggttcaccgacactggaagttgatgccttagtgctgaatccaggccgtcaggaagccagcttcgacgggcaaacgctggagttaaccggtactgagtttaccctgctctatttgctggcacagcatctgggtcaggtggtttcccgtgaacatttaagccaggaagtgttgggcaaacgcctgacgcctttcgaccgcgctattgatatgcacatttccaacctgcgtcgtaaactgccggatcgtaaagatggtcacccgtggtttaaaaccttgcgtggtcgcggctatctgatggtttctgcttcatga

SEQ ID NO: 471057 - DNA, 1374 bp, Shigella flexneri
atgataggcagcttaaccgcgcgcatcttcgccatcttctggctgacgctggcgctggtgttgatgttggttttgatgttacccaagctcgattcacgccagatgaccgagcttctggatagcgaacagcgtcaggggctgatgattgagcagcatgtcgaagcggagctggcgaacgatccgcccaacgatttaatgtggtggcggcgtctgttccgggcgattgataagtgggcaccgccaggacagcgtttgttattggtgaccaccgaaggccgcgtgatcggcgctgaacgcagcgaaatgcagatcattcgtaactttattggtcaggccgataacgccgatcatccgcagaagaaaaagtatggccgcgtggaactggtcggtccgttctccgtgcgtgatggcgaagataattaccaactttatctgattcgtccggccagtagttctcaatccgatttcattaacttactgtttgaccgcccgctattactgctgattgtcaccatgttggtcagtacgccgctgctgttgtggttggcctggagtctggcaaaaccggcgcgtaagctgaaaaacgctgccgatgaagttgcccagggaaacttacgccagcacccggaactggaagcggggccacaggaattccttgccgcaggtgccagttttaaccagatggtcaccgcgctggagcgcatgatgacctctcagcagcgtctgctttctgatatctctcacgagctgcgcaccccgctgacgcgtctgcaactgggtacggcgttactgcgccgtcgtagcggtgaaagcaaggaactcgagcgtattgaaaccgaagcgcaacgtctggacagcatgatcaacgatctgttggtgatgtcacgtaatcagcaaaaaaacgcgctggttagcgaaaccatcaaagccaaccagttgtggagtgaagtgctggataacgcggcgttcgaagccgagcaaatgggcaagtcgttgacagttaacttcccgcctgggccgtggccgctgtacggcaatccgaacgccctggaaagtgcgctggaaaacattgttcgtaatgctctgcgttattcccatacgaagattgaagtgggctttgcggtagataaagacggtatcaccattacggtggacgacgatggtcctggcgttagcccggaagatcgcgaacagattttccgtccgttctatcggaccgatgaagcacgcgatcgtgaatctggcggtacaggattggggctggcgattgttgaaaccgccattcagcagcatcgtggctgggtgaaggcagaagacagcccgctgggcggtttacggctggtgatttggttgccgctgtataagcggagttaa

SEQ ID NO: 471058 - DNA, 675 bp, Shigella flexneri
atgcgatatccggttgatgtatacacaggcaagattcaggcttatcccgaaggcaaacccagcgcaattgccaaaatccaggttgatggtgagttgatgctgacggagctggggctggaaggtgacgagcaggcggagaaaaaggttcacggcgggccagacagagcgctgtgtcattatcctcgtgagcactatctctactgggtgcgggaatttccggaacaggcggagttgtttgttgcgcctgcgtttggcgaaaatctctcaaccgacggtctcacggaaagcaatgttcatatgggcgatattttccgctggggagaggcattaattcaggtcagccagccgcgctcgccttgctataaactcaattaccattttgatatcagcgatatagcgcagttgatgcaaaacacaggtaaggtggggtggttgtatagcgtgatagcgccagggaaagtgtctgcggacgcgccgctggagttggtttcccgtgtcagcgatgtgaccgtgcaggaggctgccgccatcgcatggcatatgccgtttgatgacgatcagtatcaccgtttactctccgccgccgggttatcgaaaagctggacgcggacgatgcaaaagcgccgactgagcggcaagatcgaagatttttcccgccggttgtggggaaaataa

SEQ ID NO: 471059 - DNA, 300 bp, Shigella flexneri
atgactgaactcgcgcaattacaggccagtaccgaacaggcagcggccttattgaaagcaatgagccaccctaaacggttgctgattctgtgcatgcttagcggttcccccggcaccagcgcgggagagctgacgcgcattaccggactgagcgcctctgcgacatcacagcatctcgctcgtatgcgggacgaagggcttatcaacagccaacgggatgcccaacgcattctatattccattaaaaatgaggcggtaaatgccattatcgccaccctgaaaaatgtctattgtccgtaa

SEQ ID NO: 471060 - DNA, 525 bp, Shigella flexneri
atggctttgacaaccatttcgccgcatgatgcacaagaattaatcgcacgcggcgcaaagttaatcgatattcgtgacgctgatgaatatcttcgtgaacatattcctgaagcagatctggctccattatccgtgctggaacagtcaggtcttccacctaaattacgtcgcgagcaaattatattccactgccaggcaggtaaacgcaccagtaataacgccgataaattagcagcgattgccgcccccgcagaaatatttttactcgaagatgggattgatggctggaaaagagctggattgccagtagcggtaaataaatctcaacccttgccgttaatgcgccaggtgcagatcgctgcgggtggtttaatattaatcggcgttgtactgggttataccgtaaatagcggtttcttcttattaagtggctttgttggtgccgggttactgtttgcaggaatcagcggtttttgtggaatggcaaggttgttagataagatgccgtggaaccaacgagcttga

SEQ ID NO: 471061 - DNA, 405 bp, Shigella flexneri
atgtccgtaatgttacaaagtttaaataacattcgcaccctccgtgcgatggctcgcgaattctccattgacgttcttgaagaaatgctcgaaaaattcagggttgtcactaaagaaagacgtgaagaagaagaacagcagcagcgtgaactggctgagcgtcaggaaaaaattagcacctggctggagctgatgaaagctgacggaattaacccggaagagttattgggtaatagctctgctgctgcaccacgtgctggtaaaaaacgccagccgcgtccggcgaaatataaattcactgatgttaacggtgaaactaaaacctggaccggtcagggccgtacaccgaagccaattgctcaggcgctggcagaaggtaaatctctcgacgatttcctgatctaa

SEQ ID NO: 471062 - DNA, 450 bp, Shigella flexneri; identical to SEQ ID NO: 460097

SEQ ID NO: 471063 - DNA, 345 bp, Shigella flexneri
atgtatttacgaccagacgaggtggcgcgcgtacttgaaaaagtcggttttactgtcgatgtggtaacccagaaagcgtatggttaccgccgtggggaaaattatgtctatgttaatcgcgaagcgcgaatgggacgtaccgctctggtaattcatccaacattaaaagaacgcagttcaacactggctgaacccgcttccgatattaaaacttgcgatcattaccagcaatttccgctctatttagcaggcgagcgacacgagcattacggtatcccgcatggctttagttcgcgtgttgcgcttgaacgttatttgaatggtttatttggcgaagccagttaa

SEQ ID NO: 471064 - DNA, 231 bp, Shigella flexneri
atgtttaaccgaccgaaccgcaacgacgttgatgatggcgtgcaggatatccagaatgatgtcaatcaattagctgacagcctcgaatctgtattgaagtcctggggcagcgacgccaaaggggaagctgaagccgcacgcagtaaagctcaggcgttgctgaaagaaaccagggcgcgaatgcatggtcgtactcgcgtccagcaagccgcgcgcgatgccgttggctga

SEQ ID NO: 471065 - DNA, 246 bp, Shigella flexneri
atgcgcataactatttatactcgtaacgattgcgttcagtgccacgccaccaaacgggcgatggaaaaccggggctttgattttgaaatgattaatgtcgatcgcgttcctgaagcagcggaagcgttgcgtgctcagggctttcgtcagttgccggtagtgattgctggcgatcttagctggtctggtttccgtccggacatgattaaccgtctgcatccagcgccacacgcggccagtgcatga

SEQ ID NO: 471066 - DNA, 411 bp, Shigella flexneri
atgagccagctcgtctacttctccagcagctccgaaaacacgcagcgttttatcgaacgtttaggtctgcccgcggtgcgcatcccgctcaatgagcgggaacggattcaggtagacgagccttacatcctgatcgtgccctcttacggcggcggcggtacggctggcgcggtgccacgacaggtaattcgctttttaaacgacgagcacaaccgggcgttgcttcgcggcgttattgcttctggtaatcgcaactttggtgaggcgtatggccgcgccggagatgtgattgcccggaaatgcggcgtgccgtggctgtaccgttttgaactcatgggtacgcaaagcgatatcgaaaacgttcgtaaaggagtaaccgaattttggcaacgacaaccgcagaatgcctga

SEQ ID NO: 471067 - DNA, 2145 bp, Shigella flexneri
ttggcaacgacaaccgcagaatgcctgacgcaggaaacgatggattaccacgcgctgaatgcgatgcttaatctttacgatagcgcaggtcgcattcagttcgataaagaccgccaggccgttgacgcctttattgcgacgcatgtgcgtccgaacagtgtgaccttcagtagccagcagcagcgcctgaactggctggtcaacgaaggttactatgatgaaagcgttcttaatcgctactctcgcgactttgtcattacgctgtttgcccacgcacacaccagcggttttcgtttccagacattcctcggggcatggaagttttacaccagctatacgttgaagacattcgacggtaaacgttatctggaagattttgccgatcgagtcacgatggtggcgctgacgctggcacaaggcgatgagacgctggcgttgcaactgaccgatgaaatgctgtcaggacgctttcagccagccacgccaacattcctcaactgcggtaagcagcagcgcggcgaactggtttcctgttttttgctgcgtattgaagacaatatggagtcgattggtcgggcggtaaattccgcactgcagctgtcgaaacgcggcggcggcgtagcatttttgctgtcgaatctgcgggaagcgggcgcgccaattaaacgtattgaaaatcaatcttctggcgtaattccggtgatgaaaatgttggaagacgcattttcctatgccaaccaactcggcgcgcgtcagggggcaggtgcagtctatttacatgctcatcatcccgatattctgcgttttctcgacacgaaacgggaaaatgccgacgaaaaaatccgcattaaaacactgtcgctgggcgtggtgatcccggatatcactttccatctggcaaaagagaatgcgcagatggcgctgttttcgccctatgacgttgagcgagtttatggcaagccgtttgccgatatcgccattagcgaacactatgacgaactggttgccgatgaacgcatccgcaaaaaatacctcaacgcccgtgatttcttccagcgactggcagaaatccagtttgagtccggctatccctacatcatgtatgaagacacagtaaaccgtgctaaccctatcgccgggcgcataaatatgagtaatctctgctcagaaattttgcaggttaacagcgcctcagagtatgacgagaatcttgactatgcccgcacaggccatgatatttcctgcaatttaggttcgttgaatattgcgcacaccatggattcccccgatttttcccgcacggtagagactgccgtgcgcggtttaacggcggtgtcagatatgagtcatatccgcagcgtgccgtccatcgaagccggaaatgccgcctcgcacgccatcggactggggcagatgaatttacatggttatctggcgagggaaggcatcgcttatggttcgccggaagccctggatttcaccaatctctatttctataccatcacctggcacgcactgcgtacctcgatgttgctggcgcgcgaacgcggtgaaaccttcgccgggttcaaacagtcacgctatgccagtggtgaatatttcagccaatatctgcaaggtaactggcagccgaaaacggcgaaagttggcgaactgtttgcccgcagctgtattacgttacctacccgtgagatgtgggcgcaactgcgcgacgacgtgatgcgctacggcatatacaaccagaatctccaggcggtgccgccaaccgggtctatctcttatatcaaccatgctacgtcgagtattcatccgattgtggcgaaagtagagatacgcaaagagggcaaaacaggacgcgtttactaccctgccccgtttatgactaacgaaaatctggcgctgtatcaggacgcttacgaaattggcgcagaaaagatcatcgacacctacgcggaagcgactcgccatgtcgatcaggggctgtcgctgacgctgtttttccccgataccgccaccactcgcgatatcaacaaagcgcagatttacgcctggcgcaaaggtatcaaaacgctctattacatccgcctgcgtcagatggcgctggaaggcactgaaattgaaggctgcgtctcctgtgcactttaa

SEQ ID NO: 471068 - DNA, 960 bp, Shigella flexneri
atgaaactctcacgtatcagcgccatcaactggaacaagatatctgacgataaagatctggaggtgtggaatcgcctgaccagcaatttctggctaccagaaaaggtgccgctgtcgaacgatattcccgcctggcagacattaactgtcgtagaacaacaactgacgatgcgcgtttttactggcctgacgctgctcgacacgctgcaaaatgttatcggcgcgccttcgctgatgcccgatgcgctcacgcctcatgaagaggcggtattatcgaatatcagctttatggaagcggttcatgcccgctcttacagttcgattttctcgacgctgtgccagaccaaagatgtcgatgccgcctacgcctggagtgaagaaaacgcaccgttgcagcgaaaagctcagattattcagcaacattatcgcggtgatgatccgctgaaaaagaaaatcgccagtgtgtttcttgaatcttttttgttctattccggtttctggctgccgatgtatttttccagccgcggaaagctgaccaataccgcggacctgatccgtctgattatccgcgatgaagcagtccacggttactacataggctataaatatcagaaaaacatggaaaagatatctctgggacaacgtgaagagttgaagagtttcgccttcgatttgttgctggaactctacgacaacgagttgcaatacaccgatgagctgtacgccgaaaccccgtgggctgacgatgtgaaagcgtttctctgttacaacaccaataaggctttgatgaatctgggctacgaaccgttatttcccgcagaaatggcggaagtgaatccggcaatcctcgccgcgctttcgccgaatgccgatgaaaatcacgatttcttttccggttcaggctcctcttatgtgatggggaaagcggttgaaacagaagatgaagactggaatttctga

SEQ ID NO: 471069 - DNA, 1203 bp, Shigella flexneri
atggccattaaattaaaaattaaaaatctttataaaatatttggtgagcatccacagcgagcgttcaaatatatcgaacaaggactttcaaaagaacaaattctggaaaaaactgggctatcgcttggcgtaaaagacgccagtctggccattgaagaaggcgagatatttgtcatcatgggattatccggctcgggtaaatccacaatggtacgccttctcaatcgcctgattgaacccacccgcgggcaagtgctgattgatggtgtggatattgccaaaatatccgacgccgaactccgtgaggtgcgcagaaaaaagattgcgatggtcttccagtcctttgccttaatgccgcatatgaccgtgctggacaatactgcgttcggtatggaattggccggaattaatgccgaagaacgccgggaaaaagcccttgatgcactgcgtcaggtcgggctggaaaattatgcccacagctacccggatgaactctctggcgggatgcgtcaacgtgtgggattagcccgcgcgttagcgattaatccggatatattattaatggacgaagccttctcggcgctcgatccattaattcgcaccgagatgcaggatgagctggtaaaattacaggcgaaacatcagcgcaccattgtctttatttcccacgatcttgatgaagccatgcgtattggcgaccgaattgccattatgcaaaatggtgaagtggtacaggtcggcacaccggatgaaattctcaataatccggcgaatgattatgtccgtaccttcttccgtggcgttgatattagtcaggtgttcagtgcgaaagatattgcccgccggacaccgaatggcttaattcgtaaaactcctggcttcggcccacgttcggcactgaaattattgcaggatgaagatcgcgaatatggctacgttatcgaacgcggtaataagtttgtcggcgcagtctccatcgattcgcttaaaaccgcgttaacgcagcagcaaggtcttgatgcggcgctgattgatgcgccgttagcagtcgatgcacaaacgcctcttagcgagttgctctctcatgtcggacaggcaccctgtgcggtgcccgtggtcgacgaggaccaacagtatgtcggcatcatttcgaaaggaatgctgctgcgcgctttagatcgtgagggggtaaataatggctga

SEQ ID NO: 471070 - DNA, 1065 bp, Shigella flexneri
atggctgatcaaaataatccgtgggataccacgccagcggcggacagtgccgcgcaatccgcagacgcctggggtacaccgacgactgcaccggctgacggcggtggtgctgactggctgaccagtacgcctgcgccaaacgtcgagcattttaatattctcgatccgttccataaaacgctgatcccgctcgacagttgggtcactgaagggatcgactgggttgttacccatttccgtcccgtcttccagggcgtgcgcgttccggttgattatatcctcaacggtttccagcaattgctgctgggtatgccagcgccagtggcgattatcgttttcgctctcatcacctggcagatttccggggtcggaatgggcgtggcgacgctggtctcgctgattgccatcggcgcaatcggtgcctggtcgcaggcaatggtgactctggcgctggtgttaactgccctgctgttctgtatcgtcatcggtttgccgttggggatatggctggcgagaagtccgcgagcggcgaaaattattcgtccactgcttgatgccatgcagaccacgccagcgtttgtttatctggtgccaatcgtcatgctatttggtatcggtaacgtgccgggcgtggtggtgacgatcatctttgcgctgccgccgattatccgtctgaccattctggggattaaccaggttccggcggatctgattgaagcctcgcgctcattcggtgccagcccgcgccagatgctgttcaaagttcagttaccgctggcgatgccgaccattatggcgggcgttaaccagacgctgatgctggccctttctatggtggtcattgcctcgatgattgccgtcggcgggctgggtcagatggtacttcgcggtatcggtcgtctggatatggggcttgccaccgttggcggcgtcgggattgtgatcctcgccattatcctcgatcgcctgacgcaggccgttgggcgcgactcacgcagtcgcggcaaccgtcgctggtacaccactggccctgttggtctgctgacccgcccattcattaagtaa

SEQ ID NO: 471071 - DNA, 993 bp, Shigella flexneri
atgcgacatagcgtactttttgcgacagcgtttgccacgcttatctctacacaaacttttgctgccgatctgccgggcaaaggcattactgttaatccagttcagagcaccatcactgaagaaaccttccagacgctgctggtcagtcgtgcgctggagaaattaggttataccgtcaacaaacccagcgaagtggattacaacgttggctacacctcgcttgcttccggcgatgcaaccttcaccgccgtgaactggacgccactccatgacaacatgtacgaagctgccggtggcgataagaaattttatcgtgaaggggtatttgttaacggcgcagcacagggttacctgatcgataagaaaaccgccgaccaatacaaaatcaccaacatcgcacaactgaaagatccgaagatcgccaaactgttcgataccaacggcgacggtaaagcggatttaaccggttgtaaccctggctggggctgcgaaggtgcgatcaaccaccagcttgccgcgtatgaactgaccaacaccgtgacgcataatcaggggaactacgcagcgatgatggccgacaccatcagtcgctacaaagagggcaaaccggtgttttattacacctggacgccgtactgggtgagtaatgagctgaagccagggaaagatgtggtctggttgcaggtgccgttctccgcactgccgggcgataaaaatgccgataccaaactgccgaatggcgcgaattacggcttcccggtcagcaccatgcatatcgttgccaacaaagcctggaccgagaaaaatccggcggcagccaaactgtttgccattatgcagttgccagtggccgatattaacgcccagaacgccattatgcatgacggcaaagcctcagaaggcgatattcagggccacgttgatggctggatcaaagcccaccagcagcagttcgatggctgggtgaatgaggcgctggcagcgcagaagtaa

SEQ ID NO: 471072 - DNA, 960 bp, Shigella flexneri
atgactaaacctaatcatgagcttagcccggcgctgatcgtgctgatgtctatcgccaccggtctggcggtagccagtaactattacgcccagccattgctcgacaccatcgcgcgtaacttttccctttccgccagttcggcaggctttattgttaccgccgcgcagttgggctatgccgcaggtctactgtttcttgttcccctcggtgatatgtttgaacgccgccgcctgattgtctcgatgaccttactggcagcgggcggtatgttaatcactgccagcagtcagtcactggcgatgatgatcctcggtacggcattaaccggtttattctcagtcgtggcacaaattctggttccgctggcagcgacgctggcttcaccggataaacgcggcaaagtggttggcaccattatgagcggtctgctgttggggatattgctggcacgaaccgttgccgggttactggcaaacctcggcggctggcgcaccgtcttttgggttgcttcggtgttaatggcactgatggcgctggcattatggcgtggtctgccacaaatgaaatcagaaacccacctcaactacccacagttgttgggttccgttttcagcatgttcatcagcgataagatcctgcgcacccgcgcgttgctgggctgcatgacctttgccaacttcagcattctctggacctcaatggcctttttgcttgccgctccaccttttaactacagcgatggtgacattggtctgtttgggcttgcgggagctgccggagcgttgggcgctcgtccggcgggcggttttgccgacaagggcaaatcgcaccacaactttcggtctgcttctgctgttactttcatggctggcaatctggtttggtcacacttccgtactggcgttgattatcggcattctggtgctggacctcaccgtacagggcgtgcatatcactaa

SEQ ID NO: 471073 - DNA, 738 bp, Shigella flexneri
atggaaagccctactccacagcctgctcctggttcggcgaccttcatggaaggatgcaaagacagtttaccgattgttattagttatattccggtggcctttgcgttcggtctgaatgcgacccgtctgggattctctcctctcgaaagcgtttttttctcctgcatcatttatgcaggcgcgagccagttcgtcattaccgcgatgctggcagccgggagtagtttgtgggttgctgcactgagcgtcatggcaatggatgttcgccatgttttgtatggcccgtcactgcgtagccgtattattcagcgtctgcaaaaatcgaaaaccgccctatgggcgtttggcctgacggatgaggtttttgccgccgccaccgcaaaactggtacgcaataatcgccgctggagcgagaactggatgatcggcattgccttcagttcatggtcatcgtgggtatttggtacggtaataggggcattctccggcagcggcttgctgcaaggttatcccgccgttgaagctgcattaggttttatgcttccggcactctttatgagtttcctgctcgcctctttccagcgcaaacaatctctttgcgttaccgcagctttagttggtgcccttgcaggcgtaacgctattttctattcccgtcgccattctggcaggcattgtctgtggctgcctcactgcgttaatccaggcattctggcaaggagcgcccgatgagctatga

SEQ ID NO: 471074 - DNA, 336 bp, Shigella flexneri
atgagctatgaggttctgctgcttgggttactggttggcgcggcgaattattgcttccgctatttgccgctgcgcctgcgtgtgggtaatgcccgcccaaccaaacgtggcgcggtaggtattttgctcgacaccattggcatcgcctcgatatgcgctctgctggttgtctctaccgcaccagaagtgatgcacgatacacgccgtttcgtgcccacgctggtcggcttcgcggtactgggtgccagtttctataaaacacgcagcattatcatcccaacactgcttagtgcgctggcctatgggctcgcctggaaagtgatggcgattatataa

SEQ ID NO: 471075 - DNA, 531 bp, Shigella flexneri
atggatagttcgtttacgcccattgaacaaatgctaaaatttcgcgccagccgccacgaagattttccttatcaggagatccttctgactcgtctttgcatgcacatgcaaagcaagctgctggagaaccgcaataaaatgctgaaggctcaggggattaacgagacgttgtttatggcgttgattacgctggagtctcaggaaaaccacagtattcagccttctgaattaagttgtgctcttggatcatcccgtaccaacgcgacgcgtattgccgatgaactggaaaaacgcggttggatcgaacgtcgtaaaagcgataacgatcgccgctgcctgcatctgcaattaacggaaaaaggtcacgagtttttgcgcgaggttttaccaccgcagcataactgcctgcatcaactctggtccgcgctcagcacaacagaaaaagatcagctcgagcaaatcacccgcaaattgctctcccgtctcgaccagatggaacaagacggtgtggttctcgaagcgatgagctaa

SEQ ID NO: 471076 - DNA, 630 bp, Shigella flexneri
atgagcgcaaatgcggagactcaaaccccgcagcaaccggtaaagaagagcggcaaacgtaagcgtctgctcctccttctcaccttgctctttataattattgccgtagcgatagggatttattggtttttggtactgcgtcatttcgaagaaaccgatgacgcatacgtggcagggaatcagattcaaattatgtctcaggtgtctggcagcgtgacgaaagtctgggccgataacaccgattttgtaaaagaaggcgatgttctggtcactctcgacccgacagatgctcgccaggcgtttgaaaaagccaaaactgcactggcttccagcgttcgccaaacccaccagctgatgattaacagcaaacagttgcaggcgaatattgaggtgcaaaaaatcgccctcgcgaaagcacaaagcgactacaaccgccgtgtgccgctgggcaatgccaacctgattggtcgcgaagagctgcaacacgcccgcgacgccgtcaccagtgcccaggcgcaactggacgtcgctattcaacaatacaatgccaatcaggcgatgattctggggactaaactggaagatcagcctgccgtgcaacaggctgccaccgaagtacgtaacgcctag

SEQ ID NO: 471077 - DNA, 510 bp, Shigella flexneri
atgaccggttatgtttcccgtcgtgccgtgcaaccgggtgcgcaaattagcccaacgacgccgctgatggcggtcgttccagccaccaatatgtgggtggatgccaactttaaagagacgcagattgccaatatgcgcatcggtcagccggtcaccatcaccaccgatatttacggcgatgatgtgaaatacaccggtaaagtggttggtctggatatgggcacaggtagcgcgttctcactgcttccggcgcaaaatgcgaccggtaactggatcaaagtcgttcagcgtctacctgtgcgtatcgaactggaccagaaacagctggagcaatacccgctgcgcattggtttgtccacgctggtgagcgtcaataccactaaccgtgacggtcaggtactggcaaataaagtacgttcaacaccggtcgcggtaagtaccgcgcgtgaaatcagcctggcacctgtcaataaactgatcgacgatatcgtaaaagctaacgctggctaa

SEQ ID NO: 471078 - DNA, 1539 bp, Shigella flexneri
atgcaacagcaaaaaccgctggaaggcgcgcaactggtcattatgacgattgcgctgtcactggcgacattcatgcaggtgctgaactccaccattgctaacgtggcgatccccactatcgccgggaatctgggctcatcgctcagccaaggaacgtgggtaatcacttctttcggggtggcgaatgccatctcgatcccgcttaccggctggctggcaaagcgcgtcggggaagtgaaactgttcctttggtccaccatcgcctttgctattgcgtcttgggcgtgtggtgtctccagcagcctgaatatgctgatcttcttccgcgtgattcaggggattgtcgccgggccgttgatcccgctttcgcaaagtctattgctgaataactacccgccagccaaacgctcgatcgcgctggcgttgtggtcgatgacggtgattgtcgcgccaatttgcggcccgatcctcggcggttatatcagcgataattaccactggggctggatattcttcatcaacgtgccgattggcgtggcggtggtgttgatgacactgcaaaccctgcgcggacgtgaaacccgcaccgaacggcggcggattgatgccgtggggctggcactgctggttattggtatcggcagcctgcagattatgctcgaccgcggtaaagagctggactgtttttcatcacaggaaattatcattcttaccgtggtggcggtggtggctatctgcttcctgattgtctgggagctgaccgacgataacccgatagtcgatctgtcgttgtttaagtcgcgcaacttcaccatcggctgcttgtgtatcagcctcgcgtatatgctctacttcggcgctattgttctgctgccgcagttgttgcaggaggtctacggttacacggcgacctgggcaggtttggcctctgcgccggtagggattattccggtgattctgtcgccgattatcggccgcttcgcgcataaactggatatgcggcggctggtaaccttcagctttattatgtatgccgtctgcttctactggcgtgcctatacctttgaaccaggtatggatttttgcgcgtcggcctggccgcagtttatccaggggtttgcggtggtctgcttctttatgccgctgaccaccattacgctgtctggtttgccaccggaacgactggcggcggcatcgagcctctctaactttacgcgaacgctggcggggtctatcggcacgtcgataaccacgaccatgtggaccaaccgcgagtcgatgcaccatgcgcagttgactgagtcggtaaacccgttcaacccgaatgcccaggcgatgtacagtcaactggaagggcttgggatgacgcaacagcaggcatcaggctggattgcccagcagatcaccaatcaggggctgattatttccgccaatgagatcttctggatgtcagccgggatattcctcgtactgctggggctggtgtggtttgctaaaccgccatttggcgcaggtggcggcggaggcggtgcgcactaa

SEQ ID NO: 471079 - DNA, 516 bp, Shigella flexneri
atgccgttgttagatagcttcacagtcgatcatacccggatggaagcgcctgcagttcgggtggcgaaaacaatgaacaccccgcatggcgacgcaatcaccgtgttcgatctgcgcttctgcgtgccgaacaaagaagtgatgccagaaagagggatccataccctggagcacctgtttgctggttttatgcgtaaccatcttaacggtaatggtgtagagattatcgatatctcgccaatgggctgccgcaccggtttttatatgagtctgattggtacgccagatgagcagcgtgttgctgatgcctggaaagcggcaatggaagacgtgctgaaagtgcaggatcagaatcagatcccggaactgaacgtctaccagtgtggcacttaccagatgcactcgttgcaggaagcgcaggatattgcgcgtagcattctggaacgtgaggtacgcatcaacagcaacgaagaactggcactgccgaaagagaagttgcaggaactgcacatctag

SEQ ID NO: 471080 - DNA, 1557 bp, Shigella flexneri
ttgatcccggacgtatcacaggcgctggcctggctggaaaaacatcctcaggcgttaaaggggatacagcgtgggctggagcgcgaaactttgcgtgttaatgctgatggcacactggcaacaacaggtcatcctgaagcattaggttccgcactgacgcacaaatggattactaccgattttgcggaagcattgctggaattcattacaccagtggatggtgatattgaacatatgctgacctttatgcgcgatctgcatcgttatacggcgcgcaatatgggcgatgagcggatgtggccgttaagtatgccatgctacatcgcagaaggtcaggacatcgaactggcacagtacggcacttctaacaccggacgctttaaaacgctgtatcgtgaagggctgaaaaatcgctacggcgcgctgatgcaaaccatttccggcgtgcactacaatttctctttgccaatggcattctggcaagcgaagtgcggtgatatctcgggcgctgatgccaaagagaaaatttctgcgggctatttccgcgttatccgcaattactatcgtttcggttgggtcattccttatctgtttggtgcatctccggcgatttgttcttctttcctgcaaggaaaaccaacgtcgctgccgtttgagaaaaccgagtgcggtatgtattacctgccgtatgcgacctctcttcgtttgagcgatctcggctataccaataaatcgcaaagcaatcttggtattaccttcaacgatctttacgagtacgtagcgggccttaaacaggcaatcaagacgccatcggaagagtacgcgaagattggtattgagaaagacggtaagaggctgcaaatcaatagcaacgtgctgcagattgaaaacgaactgtatgcgccgattcgtccaaaacgcgttacccgcagcggcgagtcaccttctgatgcgctgttacgtggcggcattgaatatattgaagtgcgttcgctggacatcaacccgttctcgccgattggtgtagatgaacagcaggtgcgattcctcgacctgtttatggtctggtgtgcgctggctgatgcaccggaaatgagcagtagcgaacttgcctgtacgcgcgttaactggaaccgggtgatccttgaaggtcgcaaaccgggcctgacgctgggtatcggctgcgaaaccgcgcagttcccgttactgcaggtgggtaaagatctgttccgcgatctgaaacgcgtcgcgcaaacgctggatagcattaacggcggcgaagcgtatcagaaagtgtgtgatgaactggttgcctgcttcgataatcccgatctgactttctctgcccgtatcttaaggtctatgattgatactggtattggcggaacaggcaaagcgtttgcagaagcctaccgtaatctgctgcgtgaagagccgctggaaattctgcgcgaagaggattttgtagccgagcgcgaggcatctgaacgccgtcagcaggaaatggaaaccgctgataccgaaccgtttgcggtgtggctggaaaaacacgcctga

SEQ ID NO: 471081 - DNA, 429 bp, Shigella flexneri
gtgagtgaagcgttatcgcttttctcgttgtttgccagtagttttctcagcgctacactattacccggcaactccgaagtcgtgctggtggcaatgttgctttccgggatcagtcatccctgggttttagttttaacagcaacaatgggtaatagccttggagggttaactaacgttatccttgggcgtttctttccattgcgtaaaacatcgcgctggcaagagaaagctaccggctggctgaaacgctatggtgcagtcacgctattattaagctggatgcccgtggttggcgatttactgtgtctgttagcgggatggatgcgcatctcctgggggccagtaatcttttttttgtgccttggtaaagcgttacgctatgttgcagttgcagcagcgaccgttcagggcatgatgtggtggcactaa

SEQ ID NO: 471082 - DNA, 567 bp, Shigella flexneri
atgtacgagcgttatgcaggtttaatttttgatatggatggcacaatcctggatacggagcctacgcaccgtaaagcgtggcgcgaagtattagggcactacggtcttcagtacgatattcaggcgatgattgcgcttaatggatcgcccacctggcgtattgctcaggcaattattgagctgaatcaggccgatctcgacccgcatgcgttagcgcgtgaaaaaacagaagcagtaagaagtatgctgctggatagtgtcgagccgcttcctcttgttgaagtggtgaaaagttggcatggtcgtcgcccaatggctgtaggaacggggagtgaaagcgccatcgctgaggcattgctggcgcacctgggattacgccgttattttgacgccgtcgtcgctgctgatcacgtcaaacaccataaacccgcgccagacacatttttgttgtgcgcgcagcgtatgggcgtgcaaccgacgcagtgtgtggtctttgaagatgccgatttcggtattcaggcggcccgtgcagcaggcatggacgctgtggatgttcgcttgctgtga

SEQ ID NO: 471083 - DNA, 186 bp, Shigella flexneri; identical to SEQ ID NO: 3124

SEQ ID NO: 471084 - DNA, 2631 bp, Shigella flexneri
atgagcaagagcaccgctgagatccgtcaggcgtttctcgactttttccatagtaagggacatcaggtagttgccagcagctccctggtaccccataacgacccaactttgttgtttaccaacgccgggatgaaccagttcaaggatgtgttccttgggctcgacaagcgtaattattcccgcgctaccacttcccaacgctgcgtgcgtgcgggtggtaaacacaacgacctggaaaacgtcggttacaccgcgcgtcaccataccttcttcgaaatgctgggcaacttcagcttcggcgactatttcaaacacgatgccattcagtttgcatgggaactgctgaccagcgaaaaatggtttgccctgccgaaagagcgtctgtgggttaccgtctatgaaagcgacgacgaagcctacgaaatctgggaaaaagaagtcgggatcccgcgcgaacgtattattcgcatcggcgataacaaaggtgcgccatacgcatctgacaacttctggcagatgggtgacactggtccgtgcggcccgtgcaccgaaatcttctacgatcacggcgaccacatttggggtggccctccgggaagtccggaagaagacggcgaccgctacattgagatctggaacatcgtcttcatgcagttcaaccgccaggcagatggcacgatggaaccgctgccgaagccgtctgtagataccggtatgggtctggagcgtattgctgcggtgctgcaacacgttaactctaactatgacatcgacctgttccgcacgttgatccaggcggtagcgaaagtcactggcgcgaccgatctgagcaataaatcgctgcgcgtaatcgctgaccacattcgttcttgtgcgttcctgatcgcggatggcgtaatgccgtccaatgaaaaccgtggttatgtactgcgtcgtatcattcgtcgcgcagtgcgtcacggcaatatgctcggcgcgaaagaaaccttcttctacaaactggttggtccgctgatcgacgttatgggctctgcgggtgaagacctgaaacgccagcaggcgcaggttgagcaggtgctgaagactgaagaagagcagtttgcccgtactctggagcgcggtctggcgttgctggatgaagagctggcaaaactttctggtgatacgctggatggtgaaacggctttccgtctgtacgacacctatggcttcccggttgacctgacggctgatgtttgtcgtgagcgcaacatcaaagttgacgaagctggttttgaagcagcaatggaagagcagcgtcgtcgcgcgcgcgaagccagcggctttggtgccgattacaacgcaatgatccgtgttgatagtgcatctgaatttaaaggctatgaccatctggaactgaacggcaaagtgaccgcgctgtttgttgatggtaaagcggttgatgccatcaatgcaggccaggaagctgtggtcgtgctggatcaaacgccattctatgcggaatccggcggtcaggttggtgataaaggcgaactgaaaggcgctaacttctccttcgcggtggaagatacgcagaaatacggccaggcgattggtcacatcggtaaacttgctgcgggttctctgaaagtgggcgacgctgtgcaggctgatattgatgaggctcgtcgcgcccgtattcgtctgaatcactccgcaacgcacctgatgcacgctgcgctgcgccaggttctggggactcatgtatcgcagaaaggttcactggttaacgacaaggtgctgcgcttcgacttctcacacaacgaagcgatgaaaccggaagagattcgtgcggtcgaagacctggtgaacgcacagattcgtcgcaatttgccgatcgaaaccaacatcatgaatctcgaagcggcgaaagcgaaaggtgcgatggcgctgttcggcgagaagtatgatgagcgtgtacgcgtgctgagcatgggcgatttctccaccgagctgtgtggcggtactcacgccagccgcactggtgatattggtctgttccgcatcatctctgaatcgggtactgctgcaggcgttcgtcgtatcgaagcggtaaccggagaaggcgctatcaccaccgttcatgcagacagcgatcgcttaagcgaagtcgcgcatctgctgaaaggcgatagcaataatctggcggataaagtgcgctcagtactggaacgtacgcgtcagttagaaaaagaactacaacagcttaaagaacaagctgccgcacaggagagcgcaaatctttccagtaaggcaattgatgttaatggtgttaagctgttggttagcgagcttagcggtgttgagccgaaaatgttgcgtaccatggttgacgatttaaaaaatcagctggggtcgacaattatcgtgctggcaacggtagccgaaggtaaggtttctctgattgcaggcgtatctaaggacgtcacagatcgtgtgaaagcaggggaactgattggtatggtcgctcagcaggtgggcggcaagggtggtggacgtcctgacatggcgcaagccggtggtacggatgctgcggccttacctgcagcgttagccagtgtgaaaggctgggtcagcgcgaaattgcaataa

SEQ ID NO: 471085 - DNA, 501 bp, Shigella flexneri
atgacagaatcaacatcccgtcgcccggcatatgctcgcctgttggatcgtgcggtacgcattctggcggtgcgcgatcacagtgagcaagaactgcgacgtaaactcgcggcaccgattatgggcaaaaatggcccagaagagattgatgctacggcagaagattacgagcgcgttattgcctggtgccatgaacatggctatctcgatgacagccgatttgttgcgcgctttatcgccagccgtagccgcaaagggtatggacctgcacgtattcgtcaggaactgaatcagaaaggtatttcccgcgaagcgacagaaaaagcgatgcgtgaatgtgacatcgactggtgcgcactggcgcgcgatcaggcgacgcgaaaatatggtgaacctttgccaactgtcttttcagaaaaagttaagatccagcgttttctgctctatcgtggctatctgatggaagatatccaggatatttggcgaaattttgccgactga

SEQ ID NO: 471086 - DNA, 1062 bp, Shigella flexneri
atggctatcgacgaaaacaaacagaaagcgttggcggcagcactgggccagattgagaaacaatttggtaaaggctccatcatgcgcctgggtgaagaccgttccatggatgtggaaaccatctctaccggttcgctttcactggatatcgcgcttggggcaggtggtctgccgatgggccgtatcgtcgaaatctacggaccggaatcttccggtaaaaccacgctgacgctgcaggtgatcgccgcagcgcagcgtgaaggtaaaacctgtgcgtttatcgatgctgaacacgcgctggacccaatctacgcacgtaaactgggcgtcgatatcgataacctgctgtgctcccagccggataccggcgagcaggcactggaaatctgtgacgccctggcgcgttctggcgcagtagacgttatcgtcgttgactccgtggcggcactgacgccgaaagcggaaatcgaaggcgaaatcggcgactctcacatgggccttgcggcacgtatgatgagccaggcgatgcgtaagctggcgggtaacctgaagcagtccaacacgctgctgatcttcatcaaccagatccgtatgaaaattggtgtgatgttcggtaacccggaaaccactaccggtggtaacgcgctgaaattctacgcctctgttcgtctcgacatccgtcgtatcggcgcggtgaaagagggcgaaaacgtggtgggtagcgaaacccgcgtgaaagtggtgaagaacaaaatcgctgcaccgtttaaacaggctgaatttcagatcctctacggcgaaggtatcaacttctacggcgaactggttgacctgggcgtaaaagagaagctgatcgagaaagcaggcgcgtggtacagctacaaaggtgagaagatcggtcagggtaaagcgaatgcaactgcctggctgaaagataacccggaaaccgcgaaagagatcgagaagaaagtacgtgagttgctgctgagcaacccgaactcaacgccggatttctctgtagatgacagcgaaggagtagcagaaactaacgaagatttttaa

SEQ ID NO: 471087 - DNA, 498 bp, Shigella flexneri
atgactgacagtgaactgatgcagttaagcgaacaggttgggcaggcgctgaaagcccgtggcgcaaccgtaacaactgccgagtcttgtaccggtggttgggtagcgaaagtgattaccgatattgccggtagctccgcctggtttgaacgcggatttgtcacctacagtaacgaagccaaagcgcagatgatcggcgtacgcgaagagacgctggcgcagcatggcgcggtgagtgaacccgtcgtggtggaaatggcgataggtgcactgaaagcggctcgtgctgattatgccgtgtctattagtggtatcgccgggccggatggcggcagtgaagagaagcctgtcggcaccgtctggtttgcttttgccactgcccgcggtgaaggcattacccggcgggaatgcttcagcggcgaccgtgatgcggtgcgtcgtcaggctactgcgtatgcattgcagaccttgtggcaacaatttctacaaaacacttga

SEQ ID NO: 471088 - DNA, 1191 bp, Shigella flexneri
ttgagttatgtaaagtccgtatcgggcagtgactaccgcttccttgtgcggggtgtgatgctttaccatacttgcccctggttgaatctgttaaatggacccctcatgttcaagcgtcgttatgtaacattgcttcccctttttgtgttgcttgccgcctgtagcagcaagccaaaacctactgagactgaaacgaccaccggaacgccgtctggcggcttcctgcttgagccgcagcacaatgtgatgcagatgggcggcgatttcgctaataacccgaatgcccagcagttcatcgacaaaatggtgaacaaacacggtttcgatcgtcagcagttgcaggaaattctctcccaggcgaagcgtctggattcggtactgcggctgatggataaccaggcaccaaccacatcggtgaaaccgccatcaggtccgaacggcgcatggctgcgttatcgcaaaaaatttattacgccggacaacgtgcagaacggtgtggttttctggaatcagtatgaagatgcgttgaatcgcgcgtggcaggtgtatggcgtaccgccggaaattatcgtcgggattatcggcgttgaaacccgctgggggcgcgtgatggggaaaactcgcatcctcgatgcgctggcaacgctgtcatttaactacccacgccgcgcggagtatttctctggcgagctggaaaccttcctgctgatggcgcgcgacgagcaggacgatccgctcaatctgaaaggttcctttgccggggcgatgggctacggacagtttatgccgtcgtcttacaaacaatatgcggtagatttcagcggcgacgggcatatcaacctgtgggatccggttgatgcgatcggtagcgtggcgaactatttcaaagcgcacggctgggtgaaaggcgatcaggtcgcgataatggcaaacggtcaggctccaggcttgccaaatggtttcaaaactaagtacagcatttcgcagcttgccgccgcaggtttaacgccacagcagccgctgggcaaccatcaacaagccagcctgctgcgtctggatgttggcaccggctaccagtactggtacggtctgccgaacttctacaccatcacccgttacaaccacagcacccattacgcaatggcggtctggcagttaggacaagccgtggcgctggcgcgagtacagtag

SEQ ID NO: 471089 - DNA, 396 bp, Shigella flexneri
atgatagaaaccattactcatggtgcagagtggtttatcgggctgttccaaaagggcggagaggtgtttaccgggatggtgaccggcattcttccgctgttgattagcctgcaggttatcatgaacgcactgattaattttatcggtcagcatcgtattgaacgttttgctcaacgttgcgccggtaaccctgtttcccgttacctactgttaccgtgcattggcacgtttgtcttttgcaatccgatgaccttaagcctgggtcgctttatgccggaaaagtacaaacccagctactacgcggcggcctcttatagctgccactcaatgaatggcctcttcccccatatcaaccctgcgaactgtttgtttatcttggcattgccagcggtctga

SEQ ID NO: 471090 - DNA, 930 bp, Shigella flexneri
gtggctggggcggcccgcttgagctggaagccacgccgggcaaaaaaaatcgtctatatcaccgccggtacccggcctgcgattgttgacaaactggcacaacttactggctggcaggctattgacggatttaaagaaggtgaacccgcggaggcggaaattggtgtcgcggtaatcgactgtggcggcacattacgctgcggcatctatccgaaacgacgtattcccaccattaatatccactcgacgggcaagtccggtccgctggcgcagtacattgtggaagatatttatgtctctggcgtaaaagaagaaaacatcactgtagtgggtgatgcgacaccacaaccctcttccgtgggccgtgactatgacaccagtaagaaaatcaccgaacaaagcgatggtttactggcgaaggtgggaatgggcatggggtccgccgttgccgtgttgtttcagtctggtcgtgacaccatcgacactgtattaaaaaccattctgccgtttatggcattcgtctcggcgctcattggcatcattatggcttctggccttggtgactggattgcccacggtcttgctccgctagcgagccatccactgggtctggtcatgctggcgctcatctgctccttcccactgctttcacctttcctcggcccaggcgcagttatcgcacaggttatcggcgtattgattggcttgcagattggtctcggcaatattccgccgcatctggctttaccggcactgtttgccatcaacgcgcaggcggcttgcgacttcatcccggtcggtttgtcgctggcggaagcccgtcaggacacggttcgcgtcggtgtcccttctgtactggtgagccgctttttaaccggcgcgccgactgtactgatcgcctggtttgtctccggttttatctatcaatag

SEQ ID NO: 471091 - DNA, 372 bp, Shigella flexneri
atgaccgttatttatcagaccaccatcacccgtatcggcgcgagtgccactgacgccctcagcgaccagatgctcatcacctttcgtgaaggcgcgccagcggacctcgaagagtattgcttcattcattgccacggcgagttgaaaggtgcactccatcccggtttgcaattttcactcgggcagcatcgctatccggtgaccgctgttggcagcgtggcggaagacaaccttcgcgaactgggtcatgtcaccctgcgcttcgatggtttaaacgaagcggaatttccgggcactgtccatgtggcaggccctgtacccgacgatatcgcgccgggatcggttttgaagtttgaatctgttaaggagtaa

SEQ ID NO: 471092 - DNA, 780 bp, Shigella flexneri
atgaatcaggttgccgttgtcatcggtggtgggcaaaccttaggcgcgttcctgtgccacggtctggctgccgaggggtatcgcgtcgcggttgtcgatattcagagcgacaaagccgcaaatgtggcacaagaaattaacgccgaatatggtgaaggtatggcgtacggttttggtgctgacgccactagcgagcaaagcgttctggcgctctctcgtggggtagatgaaatctttggtcgcgtggatttgctggtctatagcgccggaatagcaaaagcagcctttatcagcgacttccagctcggcgattttgaccgttcgctacaagtgaatctggtgggttatttcctgtgtgcccgtgaattttcgcgtttgatgatccgcgacgggattcagggtcgcattattcagatcaactcgaaatccggcaaagtgggcagcaaacacaactctggctacagcgcagcgaaatttggtggcgtcgggctgactcaatcactggcgctggatctggcggagtacggcattacggtgcattcactgatgctcggtaacctgctgaaatcgcggatgttccagtcactgttgccacaatacgcgaccaagctgggtatcaaaccggatcaagtcgagcagtattacatcgacaaagtaccgctcaaacgcggctgcgattatcaagatgtgctgaatatgctgctgttctacgccagtcctaaggcgtcgtactgcaccggacagtcgatcaatgtcaccggcggtcaggtgatgttctga

SEQ ID NO: 471093 - DNA, 237 bp, Shigella flexneri
gtgggccgttccagcgggcgctttaaaccgcgggtcgtggtcgccatcgcgctggacgatcagcagtgcatcgtcgacaccttgtttatgaaaggactgactgtcttcgcccgaccgcaaaaaattcccgcaattaccggcatgcatgcgggtgatttacagcccgatgtgatctttccccatgatccactatcacagaatgctctatcattggcgcttaaactgaaacgtggataa

SEQ ID NO: 471094 - DNA, 774 bp, Shigella flexneri
atgaaacctcgtcagcgtcaggccgccattctggagtatctgcaaaagcagggtaaatgctcggttgaagaattggcgcaatactttgacaccacaggcacaaccattcgcaaagatctggtcattctggaacatgccggaaccgtcattcgtacttatggcggagtggtgttgaataaagaggaatccgatccgcctatcgatcataaaacgctcatcaacacccacaagaaagagctgattgcagaagctgccgttagttttatccatgatggcgattcgatcattcttgatgctggcagtaccgttttgcagatggttcccctgctctcgcgctttaataacatcacggtgatgaccaacagcctgcatatcgtcaatgcgctatccgaactggataacgaacaaactatcctgatgccaggcggaacatttcgcaaaaaatcggcctcatttcacgggcaactggcagagaatgccttcgagcatttcaccttcgataaattgtttatgggcaccgacggcatcgatctcaatgcgggcgtaaccacgttcaacgaggtttataccgtcagtaaggcaatgtgcaatgccgcgcgcgaagtgattttgatggcggactcatcaaagtttggccgtaaaagccccaacgtagtttgcagtcttgaaagcgtcgataagctaattaccgacgcaggtatcgatccggcgtttcgtcaggcgctggaagagaaagggatcgatgtgatcataaccggagagagcaatgagtga

SEQ ID NO: 471095 - DNA, 966 bp, Shigella flexneri
atgagtgaagcactactgaacacgggacgtcagacgttaatgctggagttgcaggaagcaagccgtttaccggaacgtctgggcgatgattttgttcgcgccgccaatatcatcctgcactgcgaaggcaaagtggtggtttcgggaattggcaaatcgggccacattggtaagaaaatcgccgcaacacttgccagtaccggcacaccggctttttttgtccatccggcagaagcactgcacggcgatctggggatgattgaaagccgcgatgtgatgctgtttatctcttactccggtggcgcgaaggaactggatctgattattccgcgtctggaagataaatctatcgcgctgctggcgatgaccggcaaaccgacgtcaccgctgggcctggcggcgaaagcggtgctggatatctccgtagaacgcgaagcctgcccgatgcaccttgcgccgacctccagcaccgtcaataccctgatgatgggtgacgcgctggcgatggcggtcatgcaggcgcgcggttttaatgaagaagattttgcccgctcccacccagctggggcactgggcgctcgcttgctgaataaagtgcatcatctgatgcgtcgtgatgacgctatcccacaggtagcgttaaccgccagcgtgatggatgcgatgctggaactcagccgcaccggtctggggctggtggcggtatgtgacgctcaacaacaggtacaaggcgtctttaccgacggcgatttacgtcgctggctggtaggcggcggcgcactcaccacgccagttaatgaagcgatgacgacaggcggcaccacattacaggcacaaagtcgcgccatcgacgccaaagaagttctgatgaaacgcaaaatcactgccgcaccagtggtagatgaaaacggcaaactcaccggcgcaattaacctgcaggatttctatcaggccgggattatttaa

SEQ ID NO: 471096 - DNA, 1515 bp, Shigella flexneri
atgagtttttccgttgatgtgctggcgaatatcgccatcgaattgcagcgtgggattggtcatcaggatcgttttcagcgcctgatcaccacgctacgtcaggtgctggagtgcgatgcgtctgcgttgctacgttacgattcgcggcagtttattccgcttgccatcgacggtctggcaaaggatgtactcggtagacgctttgcgctggaagggcatccacggctggaagcgattgcccgcgccggggatgtggtgcgctttcccgcagacagcgaattgcccgatccctatgacggtttgattcctgggcaggagagtctgaaggttcacgcctgcgttggtctgccattgtttgtcggacaaaacctgatcggcgcactgacgctcgacgggatgcagcccgatcagttcgatgttttcagcgacgaagagttacggctgattgccgcgctggcggcgggagcgttaagcaatgcgttgctgattgaacaactggaaagccagaatatgctgccaggcgatgccacgccgtttgaagcggtgaaacagacgcagatgattggcttgtcccctggcatgacgcaactgaaaaaagagattgagattgtggcggcgtccgatctcaacgttctgatcagcggtgagacgggaaccggtaaggagctggtggcgaaagcgattcatgaagcctcgccacgggcggtgaatccgctggtctatctcaactgtgccgcactgccggaaagtgtggcggaaagtgagttgttcgggcatgtgaaaggagcgtttactggcgctatcagtaaccgcagcgggaagtttgaaatggcggataacggtactctgtttctcgatgagatcggcgagttgtcgttggcattgcaggccaagctgctgagggtgttgcagtatggcgatattcagcgcgttggcgatgaccgtagtttgcgggtcgatgtgcgcgtgctggcggcgactaaccgcgacttacgcgaagaggtgctggcagggcgattccgcgccgatttgtttcatcgcctgagcgtgtttccactttcggtgccgccgctgcgtgagcggggcgatgatgtcattctgctggcggggtatttctgcgagcagtgtcgtttgcggcaggggctctcccgcgtggtattaagtgccggggcgcgaaatttactgcaacactacagttttccgggaaacgtgcgcgaactggaacatgctattcatcgggcggtagtgctggcgagagccacccgcaacggcgatgaagtgattcttgaggcgcaacattttgcttttcctgaggtgacgttgccgccgccagaagcggcggcggtgctcgttgttaagcaaaacctgcgtgaagcgacagaagcgttccagcgtgaaactattcgccaggcactggcacaaaatcatcacaactgggcagcctgtgcgcgaatgctggaaactgacgtcgccaacctgcatcggctggcgaaacgtctgggattgaaggattaa

SEQ ID NO: 471097 - DNA, 1440 bp, Shigella flexneri
atgtctattgtggtgaaaaataacattcattgggtgggtcaacgtgactgggaagtgcgtgattttcacggcacggaatataaaacgctgcgcggcagcagctacaacagctacctcatccgcgaagaaaaaaacgtgctgatcgacaccgtcgaccataaattcagccgcgaatttgtgcagaacctgcgtaatgaaatcgatctggcggatatcgattacatcgtgattaaccatgcagaagaggaccacgccggggcgctgaccgaactgatggcgcaaattcccgatacgccgatctactgtactgccaacgctatcgactcgataaatggtcatcaccatcatccggagtggaattttaatgtggtgaaaactggcgacacgctggatatcggcaacggcaaacagctcatttttgtcgaaacaccaatgctgcactggccggacagcatgatgacttacctgacaggcgacgcggtgctgttcagtaacgatgctttcggtcagcactactgcgacgagcatctgttcaacgatgaagtggatcagacggagcttttcgagcagtgccagcgttactacgccaatatcctgacgccgttcagccgcctggtaacgccgaaaattaccgagatcctgggctttaacttaccagtcgatatgatagcgacctcccacggcgtggtctggcgcgataacccgacgcaaattgtcgagctgtacctgaagtgggccgctgattatcaggaagacagaatcaccattttctacgacaccatgtcgaataacacccgcatgatggctgacgctatcgcccagggaattgcggaaaccgacccacgcgtggcggtgaaaattttcaacgtcgcccgaagcgataaaaacgaaatcctgaccaatgtcttccgctcaaaaggcgtgctggtcggcacttcgacgatgaataacgtgatgatgccgaaaatcgccgggctggtggaggagatgaccggattacgcttccgtaacaaacgcgccagtgctttcggatctcacggctggagcggcggtgcgatggatcgcctttccacgcgcctgcaggatgcgggtttcgaaatgtcgctcagcctgaaagccaaatggcgaccagaccaggacgctctggagttatgccgtgaacacggtcgcgaaatcgcccgtcagtgggcgctcgcgccgctgccgcagagcacggtgaatacggtagttaaagaagaaacctctgccacgacgacggctgacctcggcccacgaatgcagtgcagcgtctgccagtggatttacgatccggcaaaaggcgagccaatgcaggacgttgcgccaggaacgccgtggagtgaagtcccggataacttcctctgcccggaatgctccctcggcaaagacgtctttgacgaactggcatcggaggcaaaatga

SEQ ID NO: 471098 - DNA, 1134 bp, Shigella flexneri
atgagcaacggcattgtgatcatcggttcgggcttcgccgcccgccaactggtgaaaaatattcgcaaacaggacgccactattccattaaccctgattgccgccgacagcatagatgagtacaacaaacccgacctcagccatgttatcagtcaggggcaacgtgccgacgaccttacccgccagacggcgggtgaatttgccgggcagtttaatctgcgcctgtttccgcacacctgggtgacggatatcgatgccgaagcccatgtggtgaaaagccagaataatcagtggcaatacgacaagttagtgctggcaaccggtgccagcgcctttgtcccgcctgtgcctgggcgtgagttaatgctgacgttaaatagtcagcaagagtatcgcgcctgtgaaacgcaactgcgggatgcccgacgcgtgttgattgtcggcggtggtttgattggtagcgaactggcgatggatttttgtcgtgcaggcaaagcggtcacgctaatcgacaacgctgccagtattctggcgtcattaatgccaccagaagtaagcagccgcttgcagcatcggttgacggagatgggcgttcatctgctgttgaaatctcagttgcaggggctggaaaaaacggattctggcattctggcaacgctggaccaccagcgtagtatcgaagtggatgcggtaattgccgccaccggactgcgcccggaaacagccctggcacgacgcgccgggctgacgattaatcgcggcgtttgcgtcgatagttatctgcaaaccagtaatgccgatatttacgcgctgggcgattgcgcggaaattaacggtcaggtattgccgttcctgcagccgattcaacttagcgggatggtgctggcaaaaaatcttctcggcaataacacgccgctgaaactaccggcgatgctggtgaaaatcaaaacgccggaattaccgctgcatctggcaggcgaaacccagcgtcaggatttacgctggcagattaataccgaacgccagggaatggtggcgcgcggcgttgacgatgctgaccagcttcgcgcctttgtggtcagtgaggatcggatgaaagaggcatttgtattgttgaaaacgttgccggtgtag

SEQ ID NO: 471099 - DNA, 2253 bp, Shigella flexneri
atggcaaaaaacacatcttgcggtgtccaactgcgtattcgtggcaaagtgcagggcgtcggttttcgtccgtttgtctggcagctggcacagcaattaaatcttcacggcgatgtatgtaatgacggcgatggcgtagaagtccggctgctggaagacccggaaacgtttcttgttcaattgcatcagcactgtccgccactggcgcgtattgatagcgtcgagcgtgagccgtttatctggtcacaactgcccaccgagttcaccatccgccagagcaccggcggcaccatgaatacgcaaattgtcccggatgccgccacttgccctgcttgccttgccgaaatgaataccccaggcgagcggcgttatcgttatccgtttatcaactgtacccactgcggcccgcgtttcaccattattcgcgcgatgccttacgaccgcccgtttaccgtgatggcggcgtttccgctatgtccggcctgtgacaaagagtaccgcgacccgctcgatcgtcgcttccacgcccagccggtggcctgcccggagtgtggcccgcatcttgaatgggtaagtcatggtgaacatgcagaacaagaggcggcattacaggcagctatcgcacagttaaaaatgggcaacattgtcgccatcaaagggattggcggatttcatcttgcctgcgatgcacgtaacagtaacgcggtggcgacactgcgggagcgcaaacatcgcccggcgaaaccgctggcagtcatgttgccagtggcagaaagtttaccagacgctgcgcgccagttgcttaccacgcccgctgcgccgattgtgctggtggataaaaaatacgtacctgagctttgtgatgatatcgcccctggccttaacgaagtcggggtgatgttgcctgcgaacccgctccagcatttgctgttacaggaactgcaatgcccgctggtgatgacctccggcaacctgagcggtaaaccaccagctatcagcaacgaacaggcgctggcggatttgcagggcattgccgacggattcttgctacataaccgcgacatcgtgcagcggatggatgattcagtggtgcgcgaaagcggcgaaatgctgcgccgttcgcgggggtatgtgccggatgcgctggttttgcctccgggctttaaaaatgttccgcctgtgctgtgtcttggcgcggatctgaaaaataccttctgcctggtgcgcggtgaacaagcggtgttgagtcagcatctgggcgatttaagtgacgatggcatccagatgcagtggcgcgaagcgttacgcctgatgcaaaacatctacgatttcactccgcaatacattgtgcatgatgtgcatccgggctatgtctccagccagtgggcgagcgaaatgaatctgccgacgcaaacggtactgcatcatcatgcccatgcagcggcgtgtctggcagagcatcagtggccgctggatggcggtgatgtcattgctttgacgctcgacggtatcggtatgggggagaatggcgctttgtggggcggcgagtgcctgcgggtgaactatcgcgaatgtgagcacctgggcggcttgcctgcagtggcgcttccgggtggcgatttggcggcgaagcagccgtggcgaaacctgctggcgcagtgcctgcgctttgtgccggagtggcagaattaccctgaaacggcaagtgtgcaacagcaaaactggagcgtactggcgcgggccattgagcgtggaattaacgcgccgctggcatcatcgtgtgggcggttgttcgatgcagtggcggcggcactgggctgtgcgccagccacgttaagttatgaaggtgaagcggcttgtgctctggaggcgctcgcagcctcatgcgacggagtgacgcatccggtgacgatgccgcgggtggacaatcaactggatctcgccactttctggcagcagtggctgaactggcaggcactggttaatcaacgcgcgtgggcgtttcatgatgcgctggcgcagggttttgccgcgttgatgcgtgagcaggccacgatgcgtggtatcactacgctggtatttagcggcggggttattcataaccgtttgctgcgtgcacgtctggcgcattatctcgctgatttcacattgctctttccacagagtttaccggcgggtgatggcggtttgtctctggggcagggggttattgctgcggcgcgttggttagcgggtgaagtccagaacggataa

SEQ ID NO: 471100 - DNA, 528 bp, Shigella flexneri
atgaaccgtttcatcattgctgacgcgagtaaatgtattggttgccgtacctgtgaagtggcgtgcgtggtttctcatcaggaaaatcaggactgtgcatcgctgaccccggaaacatttttaccgcgtatccatgtcattaaaggtgtgaacatttccacggcgacagtttgccgtcagtgtgaagatgcaccgtgcgctaacgtctgcccgaatggtgctatcagccgtgataaagggtttgttcctgtgatgcaggaacgttgcattggttgcaaaacctgcgtggtggcttgcccgtatggcgcgatggaagtggtggtacgtcctgtgattcgcaacagcggcgcgggtctgaatgtacgggctgacaaagccgaagccaataaatgcgacctgtgcaaccatcgtgaagacggcccggcgtgtatggcggcttgcccgacccatgcgctgatttgtgtcgatcgtaataaacttgaacaactgagcgcagaaaaacgccgccgtacggcgctgatgttctaa

SEQ ID NO: 471101 - DNA, 1014 bp, Shigella flexneri
atgatgacgacgatgctggaagtggcgaagcgcgccggggtttcaaaagcgaccgtttcccgcgtgctttcaggtaatggctacgtcagccaggagactaaagatcgcgtgtttcaggcggtagaagagagcagttaccgcccaaatttgctggcccgcaatctgtcggcgaagagtactcagacgctggggctggtagtgaccaacacgctttatcacggcatttattttagtgaattactgtttcatgccgcgcgaatggcggaagagaaagggcgacagttgctattggcagatggtaaacacagcgccgaagaagagcgccaggcgattcagtatctgctggatttgcgctgcgacgccattatgatttacccgcgttttttaagcgtggatgagattgatgacatcattgacgcgcacagtcagccgataatggtgcttaatcgccgcctgcgcaataatagcagccatagcgtctggtgcgatcataaacagaccagctttaacgccgtggcagagttgataaacgccgggcatcaggagattgctttccttaccggctcgatggattcccccaccagcattgaacgtcttgctgggtataaagacgcgctgtcgcagcatggtattgcgctcaatgaaaaacttatcgctaacggtaaatggacgcccgccagcggggccgaaggggtagaaacgttgctcgaacgaggggctaaatttagcgcgttagttgccagtaacgacgatatggcgataggtgcgatcaaagcgttgcacgagcgcggcgtagcggtgccagagcaggtgtcagttatcggattcgatgatatcgcaattgccccctatatcgttccggcgctctccagcgtaaaaattccggtgactgagatgattcaggaaattattggacggctgatttttatgctcgatggcggggatttctcaccgccgaaaacctttagcggaaaactgatccgccgcgactcactcattgccctttcgcgataa

SEQ ID NO: 471102 - DNA, 1710 bp, Shigella flexneri
atgtctgaagaaaaattaggtcaacattatctcgccgcgctgaatgaggcatttctaggcgtcgtgctggaccacgcctggcagaccaaagatcagctgactgtcaccgtaaaggtgaactatctgccggaagtggtggagtttctctactacaagcagggtggctggctgtcggtgctgtttggtaacgacgaacgcaaactgaatggtcattacgccgtttattacgtgctgtcgatggagaagggcaccaagtgttgggtaacggttcgcgtcgaagttgacgccaacaaaccggagtatccgtccgtgacgccgcgcgttccggcggcggtgtggggcgagcgcgaagtgcgcgatatgtacggtttgattccggttggtctgccggatgaacgtcgtctggtgctgccggatgactggccggatgaactttatccgctgcgtaaagacagcatggattatcgtcagcgtccggcaccgactaccgatgctgaaacctacgagttcatcaacgaactgggcgacaagaaaaacaacgtcgtgccgattggtccgctgcacgtcacttctgacgaaccgggtcacttccgtctgttcgtcgatggcgaaaacattatcgacgccgactaccgtctgttctacgtccatcgcggtatggaaaaactggcggaaacccgcatgggttataacgaagtgaccttcctctctgaccgtgtgtgcgggatctgcggctttgcccacagcaccgcctacaccacgtcggtggaaaacgcgatgggtattcaggtgccagaacgcgcgcagatgatccgcgccattctgctggaggtggaacgcctgcacccgcatctgctcaacctcggcctcgcctgtcactttaccggcttcgactccggctttatgcagttcttccgcgtgcgtgaaacctccatgaaaatggcagagatccttaccggtgcgcgtaaaacctacggcctgaacctgatcggcgggattcgtcgcgatctgctgaaagatgacatgatccagacccgccagctggcgcaacaaatgcgtcgtgaagtgcaggagctggtggatgtgctgctgagtacgccgaacatggaacaacgcaccgtcggcattggtcgtctggacccggaaatcgcccgcgatttcagtaacgttggcccgatggttcgcgccagcggtctcgcccgcgatactcgcgccgatcacccgtttgtcggttatggcctgctgccaatggaagtccacagcgagcagggctgcgacgttatttcccgtctgaaagtgcgaatcaacgaggtctataccgcgctgaatatgatcgactacggtctggataacctgccgggcggtccgctgatggtggaaggctttacctacattccgcaccgtttcgcgctgggctttgccgaagcgccgcgcggcgacgatatccactggagcatgaccggcgacaaccagaagctgtaccgctggcgctgccgtgccgcgacctacgcgaactggccgaccctgcgctacatgctgcgtggcaataccgtttccgatgcgccgctgattatcggtagcctggacccttgctactcctgtaccgaccgcatgaccgtagtcgatgtgcgtaagaagaagagcaaagtggtgccgtacaaagaactcgagcgttacagcattgagcgtaaaaactcgccgctgaaataa

SEQ ID NO: 471103 - DNA, 924 bp, Shigella flexneri
atgagtgttttatatccgttaattcaggcgctggtgttatttgccgttgcgccgctgctctccggtattacccgcgtggcgcgcgcccgtctgcataaccgtcgcgggccgggcgtgttgcaggagtatcgcgacattatcaaactgctgggccgccagagcgttggcccggatgcctctggctggatgttccgcctgacgccgtatgtgatggtgggcgtcatgctgactatcgctactgcgctgccggtggtgaccgtcggttctccgctgccgcaactgggcgatttgatcaccttactgtatctcttcgccatcgcgcgtttcttctttgccatttccggtctggataccggtagcccgtttaccgctatcggtgcgagccgtgaagcgatgcttggcgtgctggtcgaaccgatgttgctgcttggtctgtgggttgccgcacaggttgccggttccaccaacatcagcaacattaccgacaccgtttatcactggccgctgagccaaagcatcccgctggtgctggcgctctgcgcctgtgcgttcgccacttttatcgaaatgggcaaactgccgttcgacctggcggaagccgagcaggagttgcaggaaggtccgctctccgaatacagcggtagcggctttggcgtcatgaaatggggtatcagcctgaaacagctggtggtgttgcagatgttcgtcggggtgtttattccgtggggacaaatggaaaccttcaccgtcggtggactgctgctggcgctggtgattgccatcgtcaaactggtggtcggcgtcctggttatcgcgctgttcgaaaacagcatggcccgtctgcgtcttgatattactccgcgcattacctgggctgggtttggctttgcatttttagcgttcgtctccttgctggcggcgtga

SEQ ID NO: 471104 - DNA, 1800 bp, Shigella flexneri
ttgtcgccgccgctgttctggcatttctcttttcaaaaagcgctaagtggctggatagccggaattggcggcgcggttggtagtctgtatacggcagccgcgggcttcactgtactgactggcgcggttggcgtgagcggtgcgctgtcgctggtaagctacgatgtgcaaatctccccgcttaacgcgatttggctgattaccctcggcctttgcggtctgtttgtcagcctctataacattgactggcatcgccacgcgcaggtgaagtgcaacggcttgcagatcaatatgttgatggctgccgccgtctgcgccgtcatcgccagcaacctcggcatgttcgtggtaatggccgaagtcatggccttgtgtgcggtgttcctcaccagcaacagcaaagagggcaaactgtggtttgcgctggggcgtcttggcactctgctgctggtgattgcttgctggctgctgtggcagcgttatggcacgctggatctgcgcctgctggatatgcgtatgcaacagctgccgctcggttccgatatctggctgctcggtgtgattggctttggcctgctggctgggattattccgctgcacggctgggtgccgcaggcacatgctaacgcctctgcgccagctgccgcgttgttttctacggtagtcatgaaaattggcctgctgggcatgttaaccctgtcactgctgggcggtaatgcaccgctgtggtgggggatcgcgctgctggtgctcggcatgatcaccgcgttcgtcggtggtctgtatgcgttgatggaacacaacatccagcgcctgctggcttaccacaccctggaaaatatcggcattatcctgctggggctggggctggggctggggctgggcgctggcgtaacgggtatcgcgctcgaacaaccggcgctgattgctcttggcctggtcggtggtctgtaccatctgcttaaccatagcctgttcaaaagcgtactgttcctcggggcggggagcgtctggttccgtaccggtcatcgcgatatcgaaaaactcggtggtattggcaagaaaatgccggttatctccatcgccatgttagtcgggttgatggcaatggctgcgctgccgccactgaacgggtttgccggggaatgggttatctatcaatccttcttcaaactgagcaatagcggcgcgtttgttgcccgtctgctggggccgctgctcgctgtgggtctggcaattaccggtgcgctggcggtgatgtgtatggcgaaagtctatggcgtcacgttcctcggcgcgccgcgtaccaaagaagccgaaaatgccacctgtgcgccgctcctgatgagcgtaagcgtagtggcactggcgatttgctgcgtaattggcggtgttgctgcgccgtggctgctgccgatgctctctgctgctgtacctctgcctctggagcctgctaacaccaccgtttctcaaccaatgatcacattgctgctgattgcctgcccgctgctgccattcatcattatggcgatttgcaaaggcgaccgcctgccgtcacgttcccgcggtgcggcctgggtgtgcggctacgaccatgaaaaatcaatggtgattaccgctcacggttttgccatgccggttaaacaggcgtttgcgccagtgctgaaactgcgcaaatggctgaatccggtgtcgctagtgccgggctggcagtgcgaaggtagtgcgttgctgttccgccggatggcgctggttgaactggcggtactggtggtgattattgtttcacgaggagcctga

SEQ ID NO: 471105 - DNA, 612 bp, Shigella flexneri
gtgaatcgttttgtaattgccgactccacgctctgtatcggctgccacacctgtgaggccgcctgttcagagacgcatcgccagcacggcctgcaatcaatgccgcgcctgagagtgatgctcaatgaaaaagaatctgcgccgcagctctgtcaccactgtgaagatgcaccctgcgcggtggtctgcccggttaacgccatcacccgcgttgatggggccgtgcagttgaatgaaagtctgtgcgtaagctgcaaactgtgcggcatcgcctgcccgtttggcgcaattgaattttccggcagccgtccgctggatattccggcaaacgccaataccccgaaagcgccaccggcaccgcctgctccggcgcgtgtcagcacattgcttgactgggtgccaggtattcgcgcgatcgccgtcaaatgtgacctttgtagctttgatgaacaaggtccggcctgtgtgcggatgtgcccgactaaagccctgcatctggtggataacaccgatatcgcccgcgtcagcaaacgtaagcgtgagctgacctttaacacggactttggcgatctcaccttgtttcagcaggctcaaagtggagaggctaaatga

SEQ ID NO: 471106 - DNA, 462 bp, Shigella flexneri
atgactatttgggaaataagcgagaaagccgattacatcgcacagcggcatcgtcgcctacaggaccagtggcacatctactgcaattcgctggttcaggggatcacgttatcgaaagcgcgcctgcatcacgccatgagctgcgcgccggacaaagaactctgtttcgtcctttttgaacattttcgtatttacgtcaccctggcggatggctttaacagccacaccatcgagtattacgtcgaaacaaaagatggcgaagacaaacagcggattgcgcaggcgcaactgagcattgacggcatgattgatggcaaggtcaacatccgcgatcgcgaacaggttctggaacactatctcgaaaaaatcgctggcgtttacgacagcttatacaccgccattgaaaacaatgtgccggtgaatttaagccaactggtaaagggacaaagcccggcagcatga

SEQ ID NO: 471107 - DNA, 351 bp, Shigella flexneri; identical to SEQ ID NO: 260605

SEQ ID NO: 471108 - DNA, 873 bp, Shigella flexneri
atgtgtacaacatgcggttgcggtgaaggcaacctgtatatcgagggtgatgaacataaccctcattccgcgtttcgtagcgcgccatttgccccggcggcacgcccgcagatgaaaatcaccggcattaaagcgcctgaatttacccccagccagactgaagaaggcgacctgcattacggtcatggcgaagcgggcactcacacaccgggcatgagccagcgtcggatgctggaagtcgaaattgacgtgctggacaaaaacaaccgtctggctgaacgcaaccgcgcgcgctttgctgcccgcaagcaactggtgctcaacctggtttccagccctggttccggtaaaaccaccctgctgacggaaaccttaatgcgcctgaaagacagcgttccgtgcgcggttattgaaggcgaccagcaaaccgtgaacgatgccgcacgcattcgcgctaccggtacaccagcgattcaggtgaacaccggtaaaggctgccatcttgacgcacagatgattgccgacgccgcaccgcgtctgccactggacgataacggtattctgtttatcgaaaacgttggcaacctcgtatgcccggccagcttcgatctcggtgaaaaacacaaagtagcggtgctttccgttaccgaaggtgaagacaaaccgctgaaatatccgcatatgtttgccgccgcctcgctgatgctgctcaacaaagttgacctgttgccgtatctcaactttgacgttgagaagtgcatcgcctgcgcccgcgaagtcaatccagaaattgaaatcatccttatttccgccaccagcggcgaagggatggaccagtggctgaactggctggagacacagcgatgtgcatag

SEQ ID NO: 471109 - DNA, 273 bp, Shigella flexneri
atgtgcataggcgttcccggccagatccgcaccattgacggcaaccaggcgaaagtcgacgtctgcggcattcagcgcgatgtcgatttaacgttagtcggcagctgcgatgaaaacggtcagccgcgcgtgggccagtgggtactggttcacgttggctttgccatgagcgtaattaatgaagccgaagcacgcgacactctcgacgccttacaaaacatgtttgacgttgagccggatgtcggcgcgctgttgtatggcgaggaaaaataa

SEQ ID NO: 471110 - DNA, 1122 bp, Shigella flexneri
atgcgttttgttgatgaatatcgcgcgccggaacaggtgatgcagttaattgagcatctgcgcgaacgtgcttcacatctctcttacaccgccgaacgccctctgcggattatggaagtgtgtggcggtcatacccacgccatttttaaattcggcctcgaccagttactgcctgaaaacgttgagtttatccacggtccgggttgcccggtgtgcgtactgccgatgggtagaatcgacacctgcgtggagattgccagccatccggaagtcatcttctgtacctttggcgacgccatgcgcgtaccagggaaacagggatcgctgttgcaggcaaaagcacgcggtgccgatgtgcgcatcgtttactcgccgatggatgcgttgaaactggcgcaggagaatccaacccgcaaagtggtgttcttcggcttaggttttgaaaccaccatgccgaccaccgccatcactctgcaacaggcgaaagcgcgtgatgtgcagaatttttacttcttctgccagcacattacgcttatcccgacgctgcgcagtttgctggaacagccggataacggtatcgacgcgttcctcgcgccgggccacgttagtatggttatcggcactgatgcctataattttatcgccagcgattttcatcgtccgctggtggtcgctggtttcgaaccccttgatctactgcaaggcgtggtcatgctggtggagcagaaaatagcggcccacagcaaggtagagaatcagtatcgtcgggtggtaccggatgccggtaacctgctggcgcaacaggcgattgccgatgtgttctgtgtcaacggcgacagcgaatggcgcggcttaggcgtgattgaatcttctggcgtgcacctgacgccggattatcaacgattcgatgccgaagcacatttccgcccggcaccgcagcaggtctgcgatgacccgcgcgcgcgttgtggtgaggtattaacgggcaaatgtaagccgcatcaatgcccgctgtttggtaacacctgtaatcctcaaaccgcatttggtgcactgatggtctcctccgaaggagcgtgcgccgcgtggtatcagtatcgtcagcaggagagtgaagcgtga

SEQ ID NO: 471111 - DNA, 1011 bp, Shigella flexneri
gtgaataatatccaactcgcccacggcagcggcggccaggcgatgcagcaattaatcaacagcctgtttatggaagcctttgccaacccgtggctggcagagcaggaagatcaggcacgtcttgatctggcgcagctggtagcggaaggcgaccgtctggcgttctccaccgacagttacgtcattgacccgctgttctttcctggcggtaatatcggcaagctggcgatttgcggcaccgcgaatgacgttgcgggcagtggcgctattccgcgctatctctcctgtggctttatcctcgaagaaggattgccgatggagacactgaaagccgtagtgaccagcatggcagaaaccgcccgcacggcaggcattgccatcgttactggcgatactaaagtggtgcagcgcggcgcggcagataaactgtttatcaacaccgctggcatgggcgcaattccggcgaatattcactggggcgcacagacgctaaccgcaggcgatgtattgctggttagcggtacactcggcgaccacggggcgactatccttaacctgcgtgagcagctggggctggatggcgaactggtcagcgactgcgcggtgctgacgccgcttattcagacgctgcgtgacattcccggcgtgaaagcgctgcgtgatgccacccgtggtggtgtaaacgcggtggttcatgagttcgcggcagcctgcggttgtggtattgaaatttctgaatcagcgctgccggttaaacctgccgtgcgcggcgtttgcgaattgctgggactggacgccctgaactttgccaacgaaggcaaactggtgatcgccgttgaacgcaacgcggcagagcaagtgctggcagcgttacattcccatccactggggaaagacgcggcgctgattggtgaagtggtggaacgtaaaggtgttcgtcttgccggtctgtatggcgtgaaacgaaccctcgatttaccacacgccgaaccgcttccgcgtatatgctaa

SEQ ID NO: 471112 - DNA, 2079 bp, Shigella flexneri
atgtcatatacaccgatgagtgatctcggacagcaagggttgttcgacatcactcggacactattgcagcagcccgatctggcctcgctgtgtgaggctctttcgcaactggtaaagcgttctgcgctcgccgacaacgcggctattgtgttgtggcaagcgcagactcaacgtgcgtcttattacgcgtcgcgtgaaaaagacacccccattaaatatgaagacgaaactgttctggcacacggtccggtacgcagcattttgtcgcgccctgatacgctgcattgcagttacgaagaattttgtgaaacctggccgcagctggccgcaggtgggctataccccaaatttggtcactattgcctgatgccactggcggcgggagggcatatttttggtggctgtgaatttattcgttatgacgagcgtccctggagcgaaaaagagttcaatcgtctgcaaacatttacgcagatcgtttctgtcgtcaccgaacaaatccagagccgcgtcgtcaacaatgtcgactatgagttgttatgccgggagcgcgataacttccgcatcctggttgccattaccaacgcggtgctttcccgcctggatatggacgaactggtcagcgaagtcgccaaagaaatccattactatttcgacattgacgatatcagcattgtcttacgcagccaccgtaaaaacaaactcaacatctactccactcactatcttgataaacaacatcccgcccacgaacagagcgaagtcgatgaagccggaaccctcaccgaacgcgtgttcaaaagtaaagagatgctgctgatcaatctctacgagcgggacgatttagccccctatgaacgcatgttgttcgacacctggggcaaccagattcaaaccttgtgcctgttaccgctgatgtctggcgacaccatgctgggcgtgctgaaactggcgcaatgcgaagagaaagtgtttaccactaccaatctgaatttgctgcgccagattgccgaacgtgtggcaatcgctgtcgataacgccctcgcctatcaggaaatccatcgtctgaaagaacggctggttgatgaaaacctcgccctgaccgagcagctcaacaatgttgatagtgaatttggcgagattattggccgcagcgaagccatgtacagcgtgcttaaacaagttgaaatggtggcgcaaagtgacagtaccgtgctgatcctcggtgaaactggctcgggtaaagagctgattgcccgtgcgatccataatctcagtgggcgtaataatcgccgcatggtcaaaatgaactgcgcggcgatgcctgccggattgctggaaagcgatctgtttggtcatgagcgtggggcttttaccggtgccagcgcccagcgcattggtcgttttgaactggcggataaaagctctctgttcctcgacgaagtgggcgatatgccactggagttacagccgaagttgctgcgtgtattgcaggaacaggagtttgaacgtctcggcagcaacaaaatcattcagacggacgtacgtttaattgccgcgactaaccgcgatctgaaaaaaatggtcgccgaccgagagttccgtagcgatctctattaccgcctgaacgtattcccgattcacctgccgccactacgcgagcgtccggaagatattccgctgctggcgaaagcctttaccttcaaaattgcccgtcgtctggggcgcaatatcgacagcattcctgccgagacgctgcgcaccttgagcaacatggagtggccgggtaacgtacgcgaactggaaaacgtcattgagcgcgcagtattgctaacacgcggcaacgtgctgcagctgtcattgccagatattgctttaccggagcctgaaacgccgcctgccgcaacggttgtcgcccaggagggcgaagatgaatatcagttgattgtgcgcgtgctgaaagaaaccaacagcgtggttgccgggcctaaaggcgctgcgcaacgtctggggctgaaacgcacgaccctgctgtcacggatgaagcggctgggaattgataaatcggcattgatttaa

SEQ ID NO: 471113 - DNA, 354 bp, Shigella flexneri
atgtccggcaagcgtatctctcgtgaaaaactgacgattaaaaaaatgatcgatctttatcaagcgaaatgcccgcaggcgtcagcggagccggagcattacgaggcgttgtttgtttacgcgcaaaagcggctggataaatgtgtgttcggcgaagagaaaccagcctgtaaacagtgtccggtgcactgttaccagcctgcaaagcgtgaagagatgaaacagattatgcgttgggccgggccgagaatgctgtggcgtcatccgatcttaaccgtgcgtcatctcatcgatgacaagcgtccggtgccagaactgccggaaaaatatcgtccgaaaaaacctcgtgaatag

SEQ ID NO: 471114 - DNA, 873 bp, Shigella flexneri
gtggcggccctgaaccagacctcattcactgaaagcacataccgtcaggtaaagaacccgaatccggtgttcacaccccgtgaagatgccggaacgctgaagttctgcgaaaaactgatggaaaaggccgtgggcttcacctcccgttttgattttgccgcgcatgtggcgtatgcccgttcgcgcggcctgcgccggcgtatgccgccggtgctgcgccgccgggcgattgatgcgctgctgcaggggctgtgtttccactatgacccgctggccaaccgcgtgcagtgctccatcaccacgctggccattgagtgcggactggcgacggagtctgaggccgggaaactctccatcacccgtgccacccgtgccctgaagttcctgtctgagctggggctgataacctaccagacggaatacgacccgacaattggctgtaacatcccgaccgacatcacgttcacgccggcactgtttgactcactcgatatctcagaagaggcagtggcttccgcacgccgcagccgcgtggaatgggaaaacaggctgcgcaaaaagcaggggatggatgcgctgggtatggatgaactgatagcgagggcctggcgttttgtgcgcgagcgtttccgcagttatcaggcagagcttaagtcccacggcatgaaacgtgcccgtgcgcgccgcgatgcaggcaggacccgtcaggacattgtcaccctggtgaaacggcagctgacacgtgaaatcgcggaagggcgtttccgcggaagcctggaggccgtgaagcgcgaaatcgaccgtcgcgtgaaggaacgaatgataatgtcgcggaacaacaactacacacggctggccactgcctcaccctga

SEQ ID NO: 471115 - DNA, 642 bp, Shigella flexneri
atgtgcctgtcagaactgcaggccaggctgaacgtgggtcagccgctgtttccgacacatgctttatgtattcgccgttcacaacaacatcgaagcccccctgcggggatcgattttcgcggagcgttccggattttgaatatcagtgaattacatcaacgcaactggtatctggcacagtacatccctgccggcaaaaaccgcgaacatctcttttcctggctttccgaacaacacgtccttccctggacacccctgatactgaaaaaggtccgccgcacggataaagtctgtggttaccgtcgacatatacacgccgtgtttcccggttactttttcctgaaagcagaccccgaaagccacagcttcactcaccttcgccgtcacagtgcctttctggacttcgtgaaaatggccggtgaaatcaaaaccgtcagggaggatatcgttcagtctttgatgaaagtgtacccggatcctgcgctcaatccggcagccagggaggagctggatgctgcctccaccctctggctgacaaaagcgcgttaccagtacctcctccggcttgatgcccagcctctgccggagtcgaggatcgccctgctcctgcacctggtatctgatgacggagcgttgacatga

SEQ ID NO: 471116 - DNA, 663 bp, Shigella flexneri; identical to SEQ ID NO: 236364

SEQ ID NO: 471117 - DNA, 621 bp, Shigella flexneri; identical to SEQ ID NO: 8216

SEQ ID NO: 471118 - DNA, 1695 bp, Shigella flexneri
atgtttaatcttccgggatggttgtttaccgttatagcgctggtcctcaccctgttcgttatcgggctgatatttgcccgcctgtaccgccgggcatcggcagagcaggcctttgtccgcacaggtctgggaggccaaaaagtggtaatgagtggcggtgcaattgttatgcccatttttcacgaaacaattcccgtcaacatgaacaccctgaagctggaagtcagtcgtgcagcggctgaaagtctcataacccgcgaccgcatgcgtgttgatgttgccgttgccttttttcttcgggtaaaaccatcagccgaaggaatatccactgcagcccagacgctgggacaacgcacgctcacacctgaagatctgcgtagtctggtcgaggataaatttgttgatgccctacgggccacggcggccagaatgagcatgcaggatttacaggatgcccgcgagaactttgttcagggtgtccagaacaccgttgcggaagacttatccaaaaacggtctggagcttgaaagtgtgtcgctgacaagtttcaaccagactgcacgggtacattttaatcctgacaatgcctttgatgctgaaggcctgacccttctgacccaggaaacagaacgtcgtcgccgcgaacgcaacgaagttgagcaggatgttgaagtggccatcagggaaaaaaaccgggatgcactctcccgacgtctggagattgaacagcaggaagccttcatgactctggagcaacaacaacgggtaaaaacccgtacggcagagcagagtgccagtattgctgctattgaagctgaacgacgtcgtgaagcagaatccgcgcgaattctggctgaacgtaagatagaggaagccgaaatcgaacgacagcagatagtgcgtacccgccaggtcgaagccgaacgggaagtggccatacgggaaattgagcaacagcaggcaaccgaaatcgccagccaggccagagccattgccgtggcggcaaaatcggaagagcagtcacaggcagaagcccgggcaagtaaagcactggctgaggccgtacaggcccagcaggatgtggaaaccacccgccagactgcggaggccgaccgtaccaaacaggttgccctgattgctgctgctcaggaagctgaaacgaaagcggttgaactgacggttcgcgcacaggctgaaaaagaagcagccgaactccaggcagcagcaattattgaactggcggaggccacccgtcagaaaggtctggcagaagcagaagcacagcgcgcactgaacgatgccattaacgtgctttcggatgagcagaccagcctccgcttccgtcttgccctgctggatgcattacctgccgtcatagagaagtccacagaaccaatgaaatccattgacggtattaaaatcattcaggtggatggtctgaatggcggtgttacccgcggtaaaacagcaacaaccgacataagtggcggaaatctcgctgaacaggcagtaaccgccgctctggcttaccgtacacaggctccgctcatcgactccctgctgaaagaggtgggtttatccggtgaaggacttacagccctgacacgtccactggtcatgcctgccccggaaaaggttccggatgtcagcgaaccggtaaccgctccggataactcagaaccacaacaggtttaa

SEQ ID NO: 471119 - DNA, 243 bp, Shigella flexneri; identical to SEQ ID NO: 8218

SEQ ID NO: 471120 - DNA, 321 bp, Shigella flexneri; identical to SEQ ID NO: 9361

SEQ ID NO: 471121 - DNA, 1071 bp, Shigella flexneri; identical to SEQ ID NO: 465090

SEQ ID NO: 471122 - DNA, 438 bp, Shigella flexneri
atgggatgggttacgggtttcattatggtcattatggccattggtaatttctggttccacagtcacctcagccgtactgtgcaccatcagcagaccgctgaaatcacacagcaggctgcagactttattcgttatatgaatgccatcaacgattacctgtatcagcaccctgaacgacgtgctgccggtggtcagctcacgtcagcacagctcggtctgcccgccacgaaaaacgtcagccacctcatcagtcagcagcgcgtttttgtctgggcaaaagaaaaacccggccttatgggtgccctcctggaacaaagtggtgattcggccctgcttgccagagtagaaaaaggtcgcctcctggacacccgtgggcggcgtatttccatcacgctccctgctgtgatccccgatcaggtcatcatctggatgaattag

SEQ ID NO: 471123 - DNA, 1620 bp, Shigella flexneri
atgaacaaaaaacttcttgctattatgattgcagccactctgctgcagggctgtaccagtttccgacaggcagagaacatcagaaaagacgccgttgctgaacaacaacgggcccgggaaatgatcgctgagctgcgaaaccggacaccggttgtaaaggaatccccacgtcagtggatcaatccccgtccggtcacggataaaaaccccggtaatgcggtgcccggctgtccgattatcattaacacccggcagagcatcacccttcagcaggtggcccagcggatctcgcaaaactgtcatattcctgtaaggatcacccctgatgtacaggcgtatctgagcgtgaccacctccggcagtacgcagcaaatccagggcacagtaccaccgccggataccggcggtatggttccactggccgccataggcagttctgacacgacacttccccgcctgcagggaaatacggcgtcacttcctgaactgaaggcttcaggactgacatcactgctgaatgcggtcgcttcccgtctcgggatttcctggcgttatgatggttcacatatcacgttctattatcttgatacccggaccttcccggtgacctatatggacagccaggttgcctataatgccaccgtggtcagcggtaccatgtcatcaaatggctcatcaggtggaacagcatcggatgccatttccggtgatgccagtaatacccagaccaccaccgtggatatgaaatctgcgctgtatcaggatgtgaaaaatgctgtctcatcaatgctgacgccgggtattggtcgcatgttcatgtcgacgggctttatcaccgtcacggacaccccacaggtactggaaacggtccggacgttcattgaaaaacgcaatgaagaaatgaagcgccaggtggtgctgaatgtggaaattctgagtatccggaaaacccgtaatgagcaggcaggtatcgactggaacgcagtcttcagcgacagaacgctgggactgagcctcggcagcacattcaccagtgcagccagcgataccgtcactggtggtgtttccattgtgaacgggaaactcaccggttcaaaagccttcctgaaagcactctcttcccagggagatgtcagtgtggtaacccggaattccgccgtgaccaaaaacctgaccccggtaccgatgcagattgccaatcagcagagctacattgagagtgtgacgacggataccaccgccaatgtcggctcatccacctccctgaatgcggccaccatcaccaccggttttaatatgacccttctgccgttcattctcccggactcacagacactgcagctgctctattccatgagtctctccgacaaaccggttattgagaattacgagagtggtggaagcaaagcccagctgccgaatgtggatctgaaaaccatcaaccagacagtggacctgaaatccgggcagacagtcattatcagtggcttccagcagtcagggcgtcgcagtggaaaacagggtgtcggcacaccgggattcttcggtcttggcggtgggatcaacagtgaaaacgacgacaccattctcgtggtgctgatcacgcccaatatcatctga

SEQ ID NO: 471124 - DNA, 1296 bp, Shigella flexneri
gtgacagatatttcaccgacagagcgacaggtgtttccgctgacggcaggacggaatgtatttcttgccggaatggactggaaaacactgcccgcaagccataaaaacccccggacgtttgcccgcagtctgggggcagtacgctatatttcctgtgagtatctcagtacggaagataccgatcgtcacatcatggttgcagccgtcagccagaatacactccccaaaggcagccgcaggtatttctctctcgccatgcttatcctgcccctgctcgagccaggaggatacgctatcgttgaactgtcacaggcaaacgatacagaactttatggttttgtttctgctgttgacggcatcctggtcagtgacctggtgggaacccgggaggaaatcagggaggcccgggaaatattcctcaccattaacagcgcgcctgaacacggctggacatgttatgaaccgccctcgtttaacgggcctgacggcagaggtcccctgccactggaaaccctgacaggtgcagggaaatatccggcagaagcacgccttcaccccgtatcccgtgggccacagcttattccggtattactcatactcacccttctgggtactgcatggtatggctggcagtactatgaacgcctgaaggcagaaaaagcagcacttgctgaagcggcacaaaaagccgcagaggaacggatcacaccaccgtggctgagtatgccggaaaccggagattttatccggggatgcagtgacgtatggtcacgcctgccggtgtcggtcgccggctggcgatattcactcgccgagtgtgctgccaccgggaacagcggcaatctgcgtgcatcatatacaaacatcgccgggacgacagtgaccgcattcagccagcgggtcagggaaattttcagcatccggccatttatggttatgccggacgggaatagcggtggttttgccctgccggtcaccttcagtatgcctgaaactcccgttgccgttgaggcattaccggaaaacaccctcctgcaggaacggctgaccacactcgcccggtcgatgcagctgaaaatggactggcaggaagtcagcaacagcttcaccgatgaagacggaaataccatccagcccccctggaaggagtatgacctgcagatactgacgacacttccggcgcaccaggtggcagagcatttcagtgaaccctccgtccgttttatctccgtaacaaggcaactggaagagggtcgtttccgttatcaattcacaggtaaatattatgtccagtaa

SEQ ID NO: 471125 - DNA, 459 bp, Shigella flexneri
atgtccagtaaaacaaaagctcttctgctttccgtcctgatcctgccgacaacggtcgcggccagcaccatcagcaacatgcaacagaataaccggcaactccaggtggaacagattcaggaagaaactgcactgtatgaagccatgctggcaagagaaaaggtgcgacatgaactcagaaccctggagcagggagaaccagctgagcctgtgcattcacaggaaagcagttcagccgtcacgacagatacccctgcccccattaccggtattccccggctgacagagatatccggagttcacccccagataaccgccaggatacaactgccgggtggacaaactgctgatgtaaaagaagggcaacacattcccggcaccacattccgcgtggaaaagatcaccactgacagtgttgtccttgaacaaaatggtatcagaacaacactacaaccctga

SEQ ID NO: 471126 - DNA, 1509 bp, Shigella flexneri; identical to SEQ ID NO: 8224

SEQ ID NO: 471127 - DNA, 1095 bp, Shigella flexneri; identical to SEQ ID NO: 8225

SEQ ID NO: 471128 - DNA, 537 bp, Shigella flexneri
atgagcgtcataacctcttcgtattcagaacataatattcgtcaccttcagaacgatgataaaggcatgaccctgctggaagttctcggtgttctggtcgtcgctgccattgttattggtgccgtgatgggactgatgtccgataccctgtcctcttcagacaaccagaaggaactcaaaaacctgcagacaatcgccaccaaaatgaaagcccaaaaattccaggggcagtatacaggtactgactacgtcaaaatcctgaccgaaagtggtggcctgcctgccgatatgatcgccggtggtaataaggcgaaaaatgcctggggtggtgcggtaaccatcaaagtcagttcagataaatactcctacgttattgaatccagcaatgtgccgaagaaaaactgtattgatctggtcaccagcctgcgcagttcatccatgtttacaaaaatcaacggcaatgtgacgaataaagttgacccgtctacagtatgtaacgcagataaaactactatcaaactggaaaccaacagttaa

SEQ ID NO: 471129 - DNA, 486 bp, Shigella flexneri; identical to SEQ ID NO: 8227

SEQ ID NO: 471130 - DNA, 627 bp, Shigella flexneri; identical to SEQ ID NO: 236377

SEQ ID NO: 471131 - DNA, 1362 bp, Shigella flexneri
atgcaaaaagacaacgataaaggttttacacttcttgaaattctgggaggactggttgtcatcagcctgctcatgccgctgttctggtcttacattgaagactacctgaatgaaatgcgcaaccagagcgccgcatttcatgcagatgcctacaatactgcagccaggacctacatcgccgataacaatgcccgcctgcatagcggaacgcttcctgccaccttcacggcggatgagttaatccggaaaggatatctgaagggtcttaaccgctcgccctttgggcagagttataccaccggcatccgtcgtaacacgagtaccggtcgtctggaggccctgacctgctccaccggaggggagaatatcaaagacgatgccctgcgcagtatcgccagcctgctccccggtctgggcggatttataggaaaaaatggcacagcaaccggtgtttttggtggatggacagataaacccggcgactatggactcagctgcaatggcgggcacatcgccatcgtaatgatgggtgatgacctgcaggaaagcgatcgcctgtatcgctttcaggtaccgggacgaccggagctgaaccagatgaacacggccatcaatatgggagggaacaacctgaacaatgcaggaaacgtcaatggacaaagtgcaacactgaaaggtgatgttacaagcgaaaacggctggttaatcaccaaaaatgataaaggctggaagaacatcacctatggtggcggttttacgatgacagacagccagtggatacgcgcagtcggtggtaaaggaattataaccacaggggaaatcaaaggaggaaaagtcagtggggggacagtccggtctgacggtcgcctttccacaggtgagtatttacagctggataaaacagccgtagcaaatacaaagtgttcaccagatggacttgtaggccgcgacagcaaaggggcaatactttcgtgccaatccggtgtgtgggttggctttgaatcctaccctgtgggaagccctatcccgtggccatctgccactcctccacaaggctatctgttgatgaacggccagtcgttttcctgttcccggtatcctcagcttgcccgtgcttatcctagctgtaagttacccgatctgcgcggtgtttttatccgtggctgggataacgggaagggacttgatggtgatcggaacagacagctcctgagttatcaggccgatcaatcaggcgtctatcacgaacgtggcggatggctgaaagggcatcatagtggtatgccatactgggcacaggggagtaccacagaaatgcgtcccaaaaacattgcattcaactacattgttaaagccagctag

SEQ ID NO: 471132 - DNA, 822 bp, Shigella flexneri; identical to SEQ ID NO: 236379

SEQ ID NO: 471133 - DNA, 1203 bp, Shigella flexneri
atgatgatgaaaaagcatattacccgtactctcatcgcgtctgccgttttattttcctttaattcgactgcagcaacgtcatattttgaagcccgcaatgatgcgatgggaggaacgggggttgcctcctctcactatggtgtggccccactggcaaacccggcactgctgacaaaatccggtgaaaaagatgacttcagtcttctgcttccgtccgtgggtgcgcagctgtccgatccgggtaatatcgccgacaacgccgacaaaatcagcgatgactggaaagccttcgaccgtgccgtcgacagccactccggggtaccgcagacagcggcccgcctgaaagagagactgcaggacttccggaacacccatgccagcgcacaggccggggtatctgctgtggcggcccttcccggtgataccctcgctgctgcactgatgctgaaaacgctcgggactgtcagcgtcgacggtaaagtcagcgatgccgacctgaactatctggaaagcattgcagacagtggcagccaggatgtggataaaaacagactgacctcacaggcttttgcccgtgccgcactgatcaccgatgtgggcgttgcgctggccactgaattggaaacggccggacaaaaatggtcactgggcttcacaccaaaattccagcgtgttgacctgtttaactacaatacgctgatcaaaaactatgacagcagcgcattcaaaggtgaccgttaccacaacacccaaaacggtattaacgctgatatcggtgccagcatggacctggatgacaactggacgctgggtctggtcgcacagaacctgatcccacgcagcattgagaccaaagaggtacatggtgtcactgaaaccttcaggatccgtccgcaggtaacaaccggcgtatcatggcacaacgacatgttcaccacggcactggatgtggatctgaccccggccagcggcttcacatcagacagcaaacgtcagtttgccgccgtaggtgctgagtttaatgcctggaaatgggcacagttacgtaccggttaccgccagaatctggccagcaacaacggcagtgcattcactgccgggattgggctctcaccgtttgatgtgattcacattgatgtcgccggcctcgtgggcaccgacaacaactacggtgccattgctcagttacagttcaccttctga

SEQ ID NO: 471134 - DNA, 459 bp, Shigella flexneri
atgcaaaaaaaacgtatcacccttgcagggggagttgccatgctctgtctgagcggctgtcatcttcccccggataataccgcaccggccaggaagtacggtgcagcttctgaagtcgctgtcacacgacatgcacagtatcagttgtgggagcagggcacgtattctgcagccctgccttcccgccagcccggaggcagcctgcaggctcacagcgggcgggtttcctttgactgggaaggcgatgctctggagctcctgagcgagctggcccgtctgcgcggacaacagttcagttacagcggcgtgcgtcttcccctgcccgtctcactccatgtacgcgatatgaccttcgctgatgcccttcgtctcacagaggcccagactgcctggcgggcagtcctctcacagtcagccgggcgtttacatctttcctatatgccaacggagaaaaaatga

SEQ ID NO: 471135 - DNA, 837 bp, Shigella flexneri; identical to SEQ ID NO: 399281

SEQ ID NO: 471136 - DNA, 1149 bp, Shigella flexneri; identical to SEQ ID NO: 8234

SEQ ID NO: 471137 - DNA, 291 bp, Shigella flexneri; identical to SEQ ID NO: 236384

SEQ ID NO: 471138 - DNA, 4062 bp, Shigella flexneri
atgaagtccagatatcgaacctggcttgctgtcccgcctgaggagacagaagccgtaaaaaatgcagttcccccgttaaatggccgcaaagctgtcgcatgggatccagaaaaaaagctctggtatgcccgggcgggtaccgaactttcactgctggagcgctggttaccccggccacaggaactgtcgatggatgccggcgatccggtcactgaatttgctcaggtcctggaaaacgccgggctggttattcagggattgccacagatggacggagccatacacagagtggccacccgggatgacaaaaaaggggccaaaagtggcgcatacagggcctatcttgatggtcgtcccgccggctggtaccgcgactaccggagcgccgatgacagtcccacaaactgggtattttccggcggagaacaacacgatcctctggccagactgcatctgcgggcattcgctcagcaacagcgcgatgataacgctcgtaaactgcagcaacagtataacaaacaggccggctatgcccgctcctatattaacaggttgccacaggcaacagcacatgaatacctgacgcgcaagggcatccgggccgcgcctggcgtgcggctgaacaataaaaatgagctggttattcccttcagcaacggccggggagaaatacgttcgtaccagcgtattccggtcaccggcgggaaggatgcccgcattctgaaagactccgagaaaaccggcaactggttcaccttcggaaccccggaaaatggccgccccctgttatttgcggaaggttacgctactgccgcctccctgcacgaagcaaccggccttccggttctgatgacagttgatgccagcaatatgattgccgtggcagaaaatgcccgccaaatctggactgacagcccctttgtcttctgtgccgacaacgatcatcaacgggaaattaacaaaggggtttttagtgcaacaaaggccgcagaagtcacgaatggcgaagtcattattccggcctttacggaggcggaaaaagcacagggactgaccgatttcaatgacctggacgccagccggggacgggacaactttcagaatgccatgaatgcacagttaaaacatatcggtatccccacacccaacagtgacactgccgaccatcgtgaggctgtcgtgatcgacaacctgatattcacaccggtaaaagatgagaagccacaaatgtcccctgaaaacagacagagcacagccccggaaacggagctggcgacacaggatacgccttatgacacccactccgacgatacagaaaaccaggcatatgaagatgactatgccgcctatgcatccctgcaatcagtaactgcggagacgttatccccggataaaccactggagaatattgcgtctgccgctgataccggcacagagaatacctctgtgcctaccgctggcgaccaggaagacctcaatacagacgccacaggtacagacaccgctcacaacagcgacacagcagaaacaggaacgcttcctgaacctgccgggatgcagtccgtgcagcaggcaaccactgaaccgaccgcagaagataaaccacacgagaacgttgtttccgctgccgataccagagaagaaaatgcctctgtggctaccgctgataccggtgaagaaaatgcctctgccaccaccgctgacaaccagagcacgcaggcagaagaacatccccggagtgaagacacaccggaaacctccctctccgacgcggccgggacacagcacaccaccacaacgcagtctgaagaacaagtgcaggtttccatggccagcgctgacgactggagcgcatttgcggaagatctcaacgctgacactccgggggcccccactgttcacaacaccgacaacgcggagacaaacacagtttctgaaccggccgggatgcggccagttcagcaggtgaccactgaactgacggcagaagataaagcacaggaaaagagcgttgcgtctgccgctgagaccggcgcagagcactcctctgacatcaccgatgacaacaggaacgcacccgctgaggagctcaatgccgatgccacggttgctgttcacaacaccggcacagcagaaacagcctcaccttctgaacctgcagaaactcagccagtccggcaggccaccgctgaaccgacggctgaagataaactgcaggaagagcgtcttgtgtccgccactgagaccagcacagcgaatgaagcagcccgccctgaaacgccatcgcttttcagccgtctgcgccgttttctgaccggtgtgaaatcacgcacctcagaaccttccgttattcaggagaaaaagcccacggaggctgaaacagcaacagaggaggtcgcaccaccatcaccaccggaaaccagcccggaagacacatcgtcagcggaaccggacacgattatctttgcaccccgccgtcccgacagtccgcagcggcacaacctggacgagatccttaaaaatcttacacacaaagagtttcccgacaggactgcgctctacagcgttgacggtgaacccgccttcctggacagactctactgtctcgaaatggtggatggcgccagcgcggatgacaaaaaggtcctggctgcccttgctgtggccaccaacttctatggcggcgttatcgagctgaccggcagtgatgcctttaagcaaaaagccatgcagctgattgtcgaatacgacatcaaggttcgcatgaaactcccggcccagcgggcagcactggaaaaactccgcaaggaaaaagagatggcgcatgatgccattgtcacccacagacccacgccggaactcaaccgccagtcaccggaagagacaacaatggcccaaccggctccccctgtgtcaccgaaggcagaggctgaacaaacagcaggcagtacggctgaaacaccgcatccggaagcgccggtcacggcaaaagctgaagccccccgggccgacagaccggaacaccccgccgccccgtcgtctgcgccagaaaaagcccctgtcagtgcacagccgcagcaacccgacacaccggtggaagagccgcccggcaagctcagccccggtgaaagtgtgactgccgtcctgacaaactacggagaaaaagagtatgcgcccggaaaagggcgctgcttttttgtggagctcaccaaccgcagtggcaaacgggaatactggggaaacggcctggaagaactggtcaaaaaccatcagaagggtgaccccgtcacactgacactgcaggcgagagaaacattccggctgtccggtgaaacgcgggatcgtatccgtaatatctgggccataaccccggtcagtaacggcattaccgttaataatgaccaacctcatgcgggtcagcataccctggagtttccgatggcaacattcagccaggtgatgttacagatgcaacaacactggccacagataatgcaggaagttcgctcccccaaaaatcctcccaataatctgtacattggtgaagacaggcaacctgcatcagcacctcaggatcaatcaatgcgactccccctcgctggtaatgcccccaatgaactgataccagccatcgcctctgccgataaggacaatcgtcagttgaatcttctgctggtccacagcgcagatgatcatctgcagggcgtggtccgcctgaacggcaccctttacccggcactggccaccccgtcagctgacaaccgtcagctggttatcaatgccctgacggataacggtctgcagtttgccggttacggtgaagctgttaaccatgatgagaataatcatcagcgtccgtccccacaaataatgcagtttcacctgaagcaacaggactccccgttgtttgccgccatccacaaaccggaagagcaaccggacaagcttttccgctctctgggttttgagcagacctggaaagagtggtctgacagccaaaaggcggaggacaggcaggaaaaaactctgcaacaggcacaatcccacagccccggccgatga

SEQ ID NO: 471139 - DNA, 351 bp, Shigella flexneri
atgaacatgaaaaaaacgctgctggtcatactgaccggcatcaccctggcatcaccggtggcaggtgccgccacctgccgggcgggggccgctgccgaagccggcagcagagccgcctgggagcgggcgcgcacagccagccaggcatggtcacagcgggagaatgacgtcgcctcctccctgcagtcctgcctgtcccgcatcaaggacatcagtatcactcttccgcagttccccagcctggacaagctcctccgcgacctggaaaaccaagtctgtgatgccgtcgtggatcgggtgaatgaccatcttccggggaatatcgacccctggaaagactacaacctctga

SEQ ID NO: 471140 - DNA, 696 bp, Shigella flexneri; identical to SEQ ID NO: 8238

SEQ ID NO: 471141 - DNA, 975 bp, Shigella flexneri; identical to SEQ ID NO: 236388

SEQ ID NO: 471142 - DNA, 1338 bp, Shigella flexneri; identical to SEQ ID NO: 399288

SEQ ID NO: 471143 - DNA, 714 bp, Shigella flexneri
atgaaaaacgaacatgaagatcccggcagctttggcgaaacgacggcaccggcatccggcaaatccttcctgaaacgccagtatatgggatacagcctgccggtctgggccggctgtgccctcatcatcctggtcgccatctggtacaagtttctgcggacaccctcagagccccctgcagatgcaggctttgctgtcacaccgcccgctgctgagagctgggcagagcccatgaccatgacggagtccgggagcggaaacaacatgcccgcaccgccggttaccccacaggcagacatgcagcaacttgcccgtgatctgaaagcagagctggacagacgggatgaggaaatccggcgcaccctgaccatgctgaaggacagtatcaccaccctcagtaacgccattcagaaggatgaggcctgggcacaggaaacccgtcagttgcttgaggagacccgtaagcaggtgcataccctgcagatgcagggagcactgccagccccgaccgggaataacagacagcctgcgaaaaccctgccttcacctctgcagggcatgaaaatcatgtcggtggagaaaggcatggcctggatccgctggcagggcagtgcctgggcagtacgggaaggcgacagtctgggaaacatcaccatcacccggattgacccgtccagccgggcagtcatcacctctgccggtacattacgatga

SEQ ID NO: 471144 - DNA, 531 bp, Shigella flexneri; identical to SEQ ID NO: 236391

SEQ ID NO: 471145 - DNA, 399 bp, Shigella flexneri; identical to SEQ ID NO: 236392

SEQ ID NO: 471146 - DNA, 252 bp, Shigella flexneri; identical to SEQ ID NO: 8244

SEQ ID NO: 471147 - DNA, 627 bp, Shigella flexneri
atggctgacacctgccaggatacgatcgtcctgctggaaaaaaacctcacccgggtgatgcgcctgaaaaaacgtccggtaccggaaaacgctgacgaaaaaaagaaacacacccgaaccctgcaggatgcggagcggtccctggcacaggcccgcctgtcggccagacgactggccctgcgtcatgtggaaaagtcgcaaatcgtcacaacggatgcactcagcgaaaatgaaagtgacctgctgcagccggaaggcccgccctttcatctctgtgccttctgccacgcctggcactgtctgaacggctacgctgccgcacagggagtgatggtctggctccccgatttgcatccggcctcggtggttgccctcaatgcgcgggcactgcaggagattttcagcgataaccgtcagcgggtcaggcagggacgggcagtcctgaatgccctggtacagaaccgtctggccgttgaggagaaattccgcacctggcgtccggcggattttgctgatgccctgcgccgctggccgccggaacagcgtaaaacgttgagggagaaaatggacggggtggcgctcattctgctgccggattcgtttcctgacaaaaagtacgtcatgtga

SEQ ID NO: 471148 - DNA, 3045 bp, Shigella flexneri
atgaatatcaaccgcattatttttgccattgaagactgtatcagtaccctgtcacggtattccgtttccgcattcttccccgattactgtgatctgcacaccgtcatcggtctggaccagcaggaccgcgaacgccgcccctggctgaaagccccctacattgccaccacaaaacaggggtattacctttccgtctttgaaatcagcggtgccctgaaagaaatggatgaaaacccggaccagacggcccccgggacactggagtcactgattgcagcactggctgagcgaatgaacacggcctggaaaaattccggccacaaaatcagttttgttttcgaacgcgatccggagcgtggaagggatgaaatcgaagccatgctcttaccccagcgaaaatccatcgcacgcacggggatcctgcttcaggacgtcctggatgaaaaagtcaccacactcaccccctggcttgtccgggagcgctgctggctgaccgtctggagctctgaagaactgctgagccggaccgatcgcaaggaccatcagacccgtgtcaggaaactcgctgaacacgctccgccagcccgttttgcgcaggatccctggcgctggacactttccgccctcaaaatacggcatgacgccttactggacacgctggagcaggccctgacacatgattctgatggcctgctgattcgcctgatggatatccatgaagtgggacgggaaatccgccgccagctggagcgcaacagtacaccggcagtatggcagcctcatctgcctgaagatgcccgtcctgccggctggcgacagggcggggatacctctgtattccacgcaccgtcgctgaatctgcagttattcaccacacagcctgaaacacacggcagcctgattcaggccggtgagctctggcacggtatggtcgccattaccctgccccctcagaatctgcggacattcaaccagctggtcagggatgtgccccgtgcaatcccctggcgtatccggatggatctgatgcccgacggcatgaaggcgctgggggtcaagaaaaccctgctgacctacagcagctttattcctcctctccggcccatgtatgactcggtaatgatgctgaatgacatcaacaagcatgatccggtctgtatcatgaccattgttgccaccacatggggaaacagccgggaagtctgtacccgtaaccaggctctcctgaaatctgcgctggaaggctggggggtatgcggcaccaccaccaccttcggtgatccgagacgtgcctgggtgaacacggttctggcagcctcccacagctccggcccgatccccctttacccgcccctttcacacgccctttccctgtttcccctgaacagggcaggctctgtctggcggggacagggaaatctgatgatgcacaccgaagacggctctgcatgggaggtggcgctggcgtcatcacaacagaacaagcacacggagctgacacccggcgcacccggtctgggcaaatcggtactcatcaacgcactgtcggagatccagatagcctcagcccagaagaatctccctttcattgcctatatcgacaagggattcagtgcacagggactggtacagcttatccgtgacagcctgcctgagcagagaaaggacgaagccgtggggatcattctgagtaatgacccggaccacacccgcaacctgtttgatgtgatgtacggggccagaaaacccgtcacaccggaaaagaacttcatggtctccgtcctctgtgcattgtgtgtggataccggcaccggtcagccctgtaatcccggcgacacccggcaaatcatcagcagcctggtggacctggccttccgggaatatggcgagaataaccccagactttaccgcgcaggtacggaacccctggtggatctcgccctggaagagagcggcatcgctgaacaacatgatgccggatggtggaatgccgccacctggtttgaaatcagggacatgctgcatattgcagggaatatccccgccgcccagcgggcacactaccaggccatgcccctgctggctgaaatgtccgccctgctgggacagccgtccatccgggatgtgttcggcaccgttcagcgtgataactcggaagagcggttgctggactacatccgccgtgccctcgatcagggacacagtgactacccgatgatgtccggctgtacccggtttatgctcagccccgacacccgcgtggtcgccgttgatctgaacaatgttgccggggacaagacacctgccggacgtctgcgcaccggtatcatgtatctgctggccgggcagatcgccggcggggattttgtcctgccgcagtatcaggaggaaatacggaaaaatctcgacccacgctaccatgaggtgattttccgccgcattgaacagcttgatcaggaggtcaagaccaaagtctatgacgaactgcacaatgcaaaagggatcaacttcatctgggaagccctggacacccaggagctggagcagcgtaagttcgggatacgcacggtgctgagcacccagctgctgcagcattatcctccggccgtgctcaaatccgccaacaccctgtggctgctgcgttaccgccctgacgaaattccgttcctgcgggataactttggcgtcccggaagtcacactgcggcgcttcctgaaaatgccggaaggggccgcaccggacggcagcggtgtcccggtactggctgtgttccgtgtaaaaaacggcacgctggcccggatcctgaaattcaccctcggtccactggagctgtgggcactgaactcctctcctaaagacagcgccctgcgacgtgcgctgacgcaggaggtggggtcactgcgggcacgccagatcctggccgaacactttccccggggttcagccacctcactgatagaacaccgcgcccgcacacatgacagtgaaaacgtcatccatgagctggcagcagaactcatccgtaagcagggatataacctctga

SEQ ID NO: 471149 - DNA, 621 bp, Shigella flexneri; identical to SEQ ID NO: 8308

SEQ ID NO: 471150 - DNA, 1206 bp, Shigella flexneri
atgcaaagacaatctgcaaccacactgcttgcactccttgtaggctgtgcggttatccctgccacccatgcctactctgtgaatgttgtgtccagtcagccggtcacccgacagatcatgccggagctggccaccatacagggcatcatggaggaaatggtccgtatgcagacggccaccggcacagccatcacccagaactcagaaaaactggccaccgtcattgcccaggacgggcaggccacccgtcagcagatgatattcagtaatgaaacacaccgcctcgaggaggccaggaaaagcttcagcgtgccggactccatctgcagtgaatccgcgtccggcattgcagcagaaagccgccgggcagcagcgtctgcagcggcacgtctgagtcaggggggaggggtcagcagtaaacccatccgggaacgtctctcccgggctgcggactccccggtccgcgaggcgtatgacagtgccggcatccacgccggttactgcacggaagcggagtatgcccgctttggcggaactgatgtctgccctgccgtgggcgatctgccgggcggagacagccaggtacgatcgctctatcagggcgcaggcacagcagataccccggccgctctcacctgggatcagaaacagattgatgccgcgacggcttatatgaaaaacaccgccagaccgtcagcgggtcgtgccccggggaaaggagaagtgggcacacagaccgggcgcacgtatgtgggcctgcagaatgaatacaacggcatcatcgatgccgcctctcatccgcagctgtcactgattgctgacagtacccctaatgaagccacccgtggggcactgactgaagccctgcagtcaccgtcagctgcggcatattttgaccggaccgcatcatcagaagcccgcacccgtggccacatgagccagcgggagtttgaggcctttgaagccggcagacggtatgccaacaccgactggcagcaggatctgcagggcatggaaggcgataaccttctccgtgagctgctgcgcaccaccgccctgctgaactggcagatgaacgatctgaaagagcagattcgtcagggtaacgttatcgccgggcagcaacttgcgctggccgcacggcagtattacggacagcgccttggcgaactgtcacaggccatgagccaggggagcgtaagatga

SEQ ID NO: 471151 - DNA, 570 bp, Shigella flexneri; identical to SEQ ID NO: 8306

SEQ ID NO: 471152 - DNA, 2166 bp, Shigella flexneri
gtgaaaatcatacccagagcactgagtgcaggtctggcgctggctgccgtacctgcacaggctttcgtcacctatcaggacattgtgagtgccgccaccaatccggatgacctgtcgcgccaggcactggtcaccatttttggtgatgtggtcacaaatcccctgacagccagcagcaacaccatcattggcaacctgttcatggtgtttaacgcaattatcgccacgatggggatagtctggtttctgtttattggtatccgtcatgctgtccgcacgggacaccagggcagtgtctttaacaacggacgggacgtcgtcggcatactcagtgtcgtgagtggatttttgatgattgtgcccaccgcttccggctggagtctggcgcaactggtcatgctgtggggcgcatccatcatgggcatcggttccgccaatatcatggttcagacagcggcagaaaacattgctgaaggctattcaatgaccgtacagccagtacatgtctccacccgcacggcagcacggggaattctggagatggaactgtgcaaacacgccatgaatacgggcctcgatgactttaaccgtaccgcacgttcatcaacgccgcccatgagcgaatcctcacggacagagaatggcagatataccgtcaccgtctcaaatggcagcgccacctgcgggagtgtgagtctctccgtgaaaggaaacggcagtaacaagcagtccgcgctggcccattttttcaatcccttcattgaaacggaatatcagggggttctgacggcacaacgctccgccatggataccatgctccgtgacctggacagcgcggcgcaggaatttgtgtcggcataccggacccggcgcgacacgggtaacggcaacttgccggatattgaaagccgtattcagaaggcagccaaccggtatgaagaaacggtgcagaaggcgttgccggcagataacgcagaaactgagcgcagggagcagctgaaatcctacctgaccacctacggctgggttgccctgggtgcctggtaccagacctttgccaccgccaaccagcgactggaagacctggccaaccgcgctcctactgtgagtggcgtctcgtcactgggcgaagccggggatacggaattcctgaaggaagtcaagggggcttaccaggcacagctacagaactcagcgtatactcctgcactgggaacagccacctctgccagtgaataccacgcatctaaaactcaagaccctcaatcagcaatcttaaaattgattgggtttaacctaacaagaatgactaactggacagccacttatctgagcggtacaggtaccacaactaatcaactaaatccgttgataaaaatgaaaaacattggcgattacaccatggttacgaccgaaaccatctgggcgggttataccaccgtcagggtactttccacggccggcagcaactccgtttttggtcgactggtcaatgccgtcagcggattatctgacgccgcaaaggcttttctggaagcatccgcaccaccactctacttcctgctgtttttgctgttttgtgccggtttttcgttatccatttacctgccgtttatcccgtttatcttctggatgaccggcatcggcaactggatagtcagcgtactgattggatgtgctgctggccccctgtgggccgccacccatctgggaacaagtcaggaccggggaagccgggccgcttacggttacatctaccttatagacagcatgatcagaccgctgctgatggtgttcgggttcttttttgcatcagtcgccatcgtggccggcggcacaatcctgaatgcgctgtatgctgctgcactgatgaatgtccagataaactctgtgacgggcgtgttcagcatggcgggatttttgatgatttatgcccgcgcctgtaccacactggttgcagccgtttttgcgcttcaggcttatctgcctgaccatgtaattaattttctgggcggacgtgacggtgttaatatgctggggaatatggtttcttcagtcaaagatattattgccggaggtaataccaatatgcgcagaacacctggcgttcgtgaagaaaaactgaaaaatattaatagagatgataaagacggaataaaacaataa

SEQ ID NO: 471153 - DNA, 654 bp, Shigella flexneri
atgaacacaacaaaaagcagatatccttcctggtgggcatattattaccttatccgcactgcttattttatatttggtgttccttttttattactatgttctctaggatttaccggtatgatgcttacagaaccatatatagaaacagatattcaagcatatctatatacttatggcagttggctcctattaatactcccatcactctggctatatatgaaaaccagagcgaagaaaaagaaagtccagcaggttgttcagcagataaaagaaagcagtccctttgcgccgaccagcgattatgagcaactgtcattctcgaagagttgttatttcgggatcgacattaaaaacggcaccatgctgtatgtgcgcatttatccgaacaatgtgatggatgtgattggtctggatattcacaactttacccgcacggttgctgaagacggcaagctggaaatccacactacatatgtgagtctgccgatgatcccactggaaatctccggcatctcatcaaggacgctggccaacaccatgcacaccatggctgcacgtggatatgagtacaaggaacgtttcccacagatgatccggtatcgggttaaagagtgggaaaaagttgccggtgttcctgttgcagaagtattttga

SEQ ID NO: 471154 - DNA, 1587 bp, Shigella flexneri
atgtctgaatcccgcagcaattttccagcacgacatggtactccatggaatactgaagagttacagcgtcttctcgtatccatagcggagggcgtctcgctaaaaaaacttactcaaacacatcaacgatcgtccgggggaatacgtggagcaatcaaacgcctgcttccttctgagtttcttgagttcaacgatataaacacggtgaatgacctcagcaattacttcaacaagattcctcgccaagaacacaatagtatcatcaataatttaatatcattgagcactgcaaaaacaattgctcatgataaagttgaaatacaaaagaatagttttaaacaaaataccccactccccctctgccaacccaatacagattttaaagattatatagccgatgaacatgatgtcattatgctaattcattctgctatcgaaagtttatctaataaacgacatcaatatattcttctaatgcgactcggcacagatgattcacctcattctctggcagatattgccgtcaaattaggaatttcccgtgaaagggtaagacaacttcaggaacgagcccttggcttactagctgctaaatctcgctatgaagggacacctggagcttgccttaaagcccttattaactcaataggtaattcaccatatgatatagcagtatggatttatcgtattgttcatcgggatttcgttacatcctctgagttagccgccaaattcatcatttttgccgcaggcattcctaaagcaagacgagatgaaataaaaaattcgctctcattaatatcacaattacaaaagcagaagttacgtgaacgaagagcagaattagcacacgctcacgctcaggaaagagcccgaatcaagaaagaaagagttgagttcatattcagtaaatggctagacaatacacattggccaaaatatatcgcacctcctccccccgtagaacagctatgttcacagagagcggttaatgatactgacatatctggattcttttactctcaaaaattaggtcgtacagtccagtacgaatcagggcttgagtttaaaataatgaatctattagaatgttgcgatcaggttcttttctatcaagaacaaccattttctattccatattgttttaaaaacaaatcaaaaaaatactatccagatttactcattgcgacagttgatggtcggtgcctacttatggaagtgaagccaacagaccgaatgaccttgagtctcacgagaataaaaagtaatgcaggtcgcaaatgggcacatactcgaggatggggatggttggtcattagtgataggttctcgttacgtcagctggaagaacatgccatctcaacaaacacatggaaacttatagaggctgaactgaaaacatcaaggattttagcatggcgtgaaatgatggagttacgtacacaatacgagattcatcgtttagatcttattgcatatatcattcagtctggtgctgaagtggataacttttatcgaattaccccgaaaatatctaataatacatctaaccagagacaaccaaatgagagcgactgtcataattga

SEQ ID NO: 471155 - DNA, 153 bp, Shigella flexneri; identical to SEQ ID NO: 8302

SEQ ID NO: 471156 - DNA, 243 bp, Shigella flexneri; identical to SEQ ID NO: 236403

SEQ ID NO: 471157 - DNA, 369 bp, Shigella flexneri; identical to SEQ ID NO: 236404

SEQ ID NO: 471158 - DNA, 216 bp, Shigella flexneri; identical to SEQ ID NO: 8252

SEQ ID NO: 471159 - DNA, 252 bp, Shigella flexneri; identical to SEQ ID NO: 8253

SEQ ID NO: 471160 - DNA, 681 bp, Shigella flexneri
atgaattccagtacgctgatatccgtgatgatacggcaacagatatccggtgacggtatgcaggaacatattgattatcagattgagaaatatcagttcagggccaggaatgagtcaccgcgactgatgcgccagtgggaagatgtcatgcgtgaatgccgtgataccggagcaggagccagggagcggctgcggattgccttacttaatgttgattatgtgaccagttttgaactgccgtttcgtctgctgttaacccggacaccgcagatgattgacagcgtgcggcgggaatggcagctcagccagaaaaaagtcgtattcaatgagcggcagcggggatgtgtatacagtctgcagaatgacttatccggcgtgccggatagcttcagttacagtcttgcgacgcgaatacggcgggtggacagctatggcatgacgacgcgttgtttcactgatatagccgggcaggttaaagccccgacagcacggctgaaactggcgctggaaagcgggttaattgtcaccgcgctggatggtctgttctggcttggtattcaacgtattgccgcagatgtgcagcggctgcgtcagtccggaatgacaatcatcacccgggatgttgaggtctcagactcgctgaccggaaccacacgggttgtttccgggtacagcctttga

SEQ ID NO: 471161 - DNA, 468 bp, Shigella flexneri; identical to SEQ ID NO: 8255

SEQ ID NO: 471162 - DNA, 177 bp, Shigella flexneri; identical to SEQ ID NO: 8256

SEQ ID NO: 471163 - DNA, 252 bp, Shigella flexneri; identical to SEQ ID NO: 465046

SEQ ID NO: 471164 - DNA, 1290 bp, Shigella flexneri
gtgtcttaccaacagacgtctgccgccgaagatccaatggctatatggtatatcgtcggtgccatatgcctgctctttgcgattatcatctggcgctttttacctgaaatcgtcttcgcctcctgcctgatcctgcacacactgtggggcatgattgactgggggccctttcacaactttgccgccccccgttacaacctgctggccatcactgctaacaacgcggcaaccatcactttcggccagtggctggatgttatgtcccggacagtggggatcctctggttgattctgcttcccatgacattcggctttctgtggatgtggtttcaccatccggcccagccccgttttacccgcaggccactgaatatccacacactgccccatattttttcagctctgtcaccggcgatcgcccccgttctggctgatggagacaacaacagactcttccacggacaaaaacgtcccgagcgccgtgtcgcactaacccccgaagtctttgtggagcagaacaaccttatccgcaacatgcagctcgatgttgcgtccacacgccagtgcttcatggcgcaactggggcaaccactgaccagctggaaagacatggccccacatgaaaaagcgctctttgccatctttggcctgcagttcttcctcggtgaccggaaagcagcggtagccctgatgaacaacctcaatctctcctgcaggctcaaaagtaaacgggaccaggggcgtttcagcacgccggtgtattcactggccagaaacgcctttatccgggtcatcaaaacagaaggcgcacaacagtggctcaggcagcaccgttacgttcgcagcggtctggtctggctttacgcacatgatttgcgcctgacgcctccgaactggctgtggctcaagggcgttgaccggacgctcttctatgcccttcaccgggcaaacaccacaaaaggcttcatcgaaggggccggcgtggtggccgttgcccgggcagaaaatgaagccagccgtctcggcctcccctgcccggaaccctgtgtggaagaggccattgaagggcttcgacgggacatgctggggctgggcctgatatgggacgaacctcagccagatcgcgatcgtaaacgtcagatcaggacccgctggtcactcacggatgacatgataccccgccgccatgataacgacgaagacactgacactggtgaaaccaccgaaaccaccgaaaccaccgaaaccaccgaaaaacagcatcccgccgacaaggaaaaagaacaatga

SEQ ID NO: 471165 - DNA, 1125 bp, Shigella flexneri; identical to SEQ ID NO: 236411

SEQ ID NO: 471166 - DNA, 2304 bp, Shigella flexneri; identical to SEQ ID NO: 236412

SEQ ID NO: 471167 - DNA, 294 bp, Shigella flexneri; identical to SEQ ID NO: 403737

SEQ ID NO: 471168 - DNA, 282 bp, Shigella flexneri
atgttacgtttctctgctaatttatcgatgttatttggtgaatatgattttctcgcccgttttgagaaagctgcgcagtgtggttttcgcggcgttgaatttatgtttccttatgactacgacattgaagaattaaaacaggtactggcgagtaataaactcgaacatacgctgcacaatttaccggcaggtgactgggcggcgggcgagcgcggtattgcctgtattcctggccgtgaagaagagtttcgggatggcgtagcagcagcgattcgttggtaa

SEQ ID NO: 471169 - DNA, 1782 bp, Shigella flexneri
atggcaaaaatgagagccgttgacgcggcaatgtatgtgctggagaaagaaggtatcaccaccgccttcggcgttccgggagctgcaattaatccgttctactcagcgatgcgtaagcacggcggtattcgtcacattctggcgcgtcatgtggaaggtgtttcgcacatggcggaaggttatacccgcgcaacggcagggaatatcggcgtatgtctggggacttccggtcctgcgggcacggacatgatcaccgcgctctattccgcttctgctgattccattcctattctgtgcattaccggccaggcaccgcgcgcccgtctgcataaagaagattttcaggccgtagatattgaagcaattgctaaaccggtcagcaaaatggcggttacagttcgtgaagcggcgctggtgcctcgcgtgctgcaacaggcatttcacctgatgcgttctggtcgtccgggtccggtactggtggatttaccgttcgacgttcaggttgcggaaatcgagtttgatcctgacatgtacgaaccgctgccggtctacaaacctgctgccagccgtatgcagatcgaaaaagctgtagaaatgttaatccaggccgaacgtccggtgattgttgccgggggcggggtaatcaatgctgacgcagctgcactgttacaacagtttgctgaactgaccagcgttccggtgatcccaacgctgatgggctggggctgtatcccggacgatcatgaactgatggccgggatggtcggtctgcaaaccgcgcatcgttacggtaacgcaacgttgctggcgtccgacatggtgtttggtatcggtaaccgttttgctaaccgtcataccggttcggtagagaaatacaccgaagggcgcaaaatcgttcatattgatattgagccgacgcaaattggtcgcgtgctgtgtccggatctcggcattgtctctgatgctaaagcggcgctgacactgctggttgaagtggcgcaggagatgcaaaaagcgggtcgtctgccgtgtcgtaaagaatgggtcgccgactgccagcagcgtaaacgcactttgctgcgcaaaacccacttcgacaacgtgccggtgaaaccgcagcgcgtgtatgaagagatgaacaaagcctttggtcgcgatgtttgttatgtcaccactattggtctgtcacaaatcgctgcggcacaaatgctgcatgtctttaaagaccgccactggatcaactgtggtcaggctggtccgttaggctggacgattccggcggcgctgggggtttgtgccgctgatccgaaacgcaatgtggtggcgatttctggcgactttgacttccagttcctgattgaagagttagccgttggcgcgcagttcaacattccgtacatccatgtgctggtgaataacgcctatctcggcctgattcgtcagtcacaacgcgcttttgacatggactactgcgtgcaactcgctttcgagaatatcaactccagtgaagtgaatggctacggtgttgaccacgtaaaagtagcggaaggtttaggttgtaaagctattcgggtcttcaaaccggaagatattgcgccagcctttgaacaggcgaaagccttaatggcgcaatatcgggtaccggtagtcgtggaagttattctcgagcgtgtgaccaatatttcgatgggcagcgaactggataacgtcatggaatttgaagatatcgccgataacgcagcggatgcaccgactgaaacctgcttcatgcactatgaataa

SEQ ID NO: 471170 - DNA, 816 bp, Shigella flexneri
atgacggaagttagacggcgcggcaggccaggacaggcggagcctgtggcacagaagggcgcacaggcgttagagcggggaattgcgattctgcaatatctggaaaaaagtgggggaagttcgtcggttagcgatatttctctcaatctggatttgccgctctccacgacctttcgcttgctgaaggttttacaagcagcggattttgtctatcaggacagtcaattaggctggtggcatataggattaggtgtctttaacgtcggtgcggcgtacatccataaccgcgatgtcctctccgtcgccgggccgtttatgcgccgcctgatgttactttccggcgaaacggtcaatgtcgcgatccgtaacggcaatgaagcggtattaattggtcagttagagtgtaaatcgatggtcaggatgtgtgcgccactgggcagtcgtctgccgctgcatgcttccggtgcgggcaaagcgctgctttatccgctggcggaagaggagttgatgagcatcattctgcaaaccggtttgcagcagtttacgccaactacgcttgtggatatgcccaccttgctgaaggacctggaacaagcgcgtgaactgggctataccgtagataaagaagagcatgttgtaggtctgaattgcatagcttcagcaatttacgatgatgtcggtagagttgttgccgctatctccatctccgggccttcatcaagactgacagaagatcgttttgtcagtcagggtgagctggtcagagacaccgcccgcgatatcagcacggcgttgggactgaaagcacatccatag

SEQ ID NO: 471171 - DNA, 483 bp, Shigella flexneri
atgaaacttcaggtattaccgttaagtcaggaagcctttagtgcttatggcgacgtaatcgaaacgcagcaacgggattttttccatattaacaatggcctggtggagcgttaccacgatttggcgctggttgagattcttgagcaagaccgtacgcttatcagcattaaccgcgcgcaaccggcgaatctgccgctgaccattcacgaactcgaacgtcatccgctgggcactcaggcctttatcccaatgaaaggtgaagtgtttgtggtggtcgtggcgttaggcgacgacaaaccagacctgtcaacgctgcgggcgtttatcaccaacggtgaacagggggtgaattaccatcgtaacgtctggcatcacccacttttcgcctggcagcgcgtcaccgattttctgaccatcgatcgcggcggcagtgacaactgtgatgttgaaagtattcctgaacaggaactctgttttgcgtga

SEQ ID NO: 471172 - DNA, 927 bp, Shigella flexneri
atgttcgatccagaaaccttgcggactttcattgcggttgctgaaacaggaagtttttcaaaagcggcagaacgattatgtaaaaccacggcgacgatcagttatcgcattaaacttctggaagagaataccggagtagcgctgtttttccgtacgactcgtagcgtaacgttgacagcggctggcgagcatctactttcccaggccagagactggctgagctggctggaaagtatgcccagcgagctgcaacaggtgaatgatggcgtggaacgccaggtgaatattgtcatcaacaacctgctctataacccccaggccgtcgcccagttgctggcgtggctgaatgagcgttacccctttacccagtttcacatctcccgacaaatctatatgggcgtctgggactcgctattgtacgaaggtttttcgctggctatcggggtcacgggaactgaggcgctggcaaatacctttagtcttgatcccttaggatcggtgcaatggcgatttgtcatggcggcggatcatccgctggcgaacgttgaagagccgctaacagaagcgcagttgcgtcgctttccggcggtcaatattgaagacagcgccggcaccttaaccaaacgcgtcgcctggcgattgccggggcaaaaagagattattgttcccgatatggaaacgaaaatcgccgcccatctggcgggtgttggcattggttttttgccaaaatcactttgccagtcaatgatcgataatcaacaactggtcagccgggtaatcccaacgatgcgccctccttcgccattgagtctggcatggcgcaaatttggcagctgcaaagcggtagaagatattgtgaccttgtttacccaacacaggccggaaatcagcggatttttagaaattttcggcaccccacgcagttaa

SEQ ID NO: 471173 - DNA, 1095 bp, Shigella flexneri
atgcaagagagacacacggaacaggactatcgtgccctgctgattgctgatacgcccattattgatgttcgcgcccctatcgagtttgagcaaggcgcaatgcccgccgctatcaatctgccgttaatggataacgatgaacgcgcctccgttggcacctgctataaacagcaaggctcagacgcagcgctggcgctggggcataaactggtggcgggtgaaattcgtcagcagcgtatgtacgcctggcgggcagcgtgcctgcaaaatccgcaaggtattctctgctgcgcccgtggcggtcaacgttcacatattgtgcaacgctggctgcatgaagcggggattgattatccgctggtggaaggcggttataaggcactgcgccagaccgcgattcaggcgaccattgaactggcacaaaaaccgatagtgctgattggcggttgtaccggcagcggtaaaacgctattagtgcaacaacagccaaacggtgttgatctggaagggctggcgcgtcatcgcggttcggcgtttggtcgcacgttacaaccacaacttagccaggcgagttttgaaaacctgctggctgccgaaatgctaaaaaccgacgcccgtcaggatttgcgcctgtgggtgctggaagatgaaagccggatgatcggttcgaatcacctgccggaatgtctgcgcgagcgaatgactcaggcggcgattgcggtggtagaagatccgtttgagatccgtcttgaacgcctgaatgaagagtatttcttgcgtatgcatcatgattttacccacgcttatggcgacgaacagggctggcaggaatattgcgaatacctgcatcacggactttcggcgattaagcgtcggctggggttacagcgctataacgaactcgctgcccagctggatacggcgctgacaacgcaactcaccaccggcagcaccgacggtcatctggcctggctggtgccgttacttaaagaatattacgacccaatgtatcgctatcagcttgagaaaaaagcggaaaaagttgtctttcgcggtgagtgggcggaagtggcggtatgggttaaggcgcagtga

SEQ ID NO: 471174 - DNA, 2274 bp, Shigella flexneri
atgattgcacgttggttctggcgcgaatggcgttcgccgtcgctattaattgtctggctggcgctaagcctggcggtggcctgcgtgctggcgctgggcaatatcagcgatcgcatggagaagggcttaagccagcaaagccgtgagtttatggcgggcgatcgggcgttgcgcagttcacgcgaagtgccgcaagcgtggctggaggaagcgcaaaagcgcggcctgaaagtcggcaagcagctgactttcgccacaatgacctttgcaggcgacacaccgcagctggcgaacgtcaaagcggtggatgatatctacccgatgtatggcgatctgcaaactaatccccctagcctgaaaccgcaggcgggcagcgtattgctggccccacgcctgatggcactgcttaacctgaaaacgggcgacaccattgacgtgggcgatgccaccttgcggattgccggagaagtgattcaggaaccggattccggttttaaccccttccagatggctccgcgtctgatgatgaatctggcggatgtcgataaaaccggagccgtgcagccggggagtcgggtcacctggcgttataaattcggcggcaacgagaaccagctcgacggctatgagaaatggttgttacctcagcttaaacccgaacaacgctggtacggtctggaacaggacgaaggcgcgctggggcgatcgatggaacgctcgcaacagttcctgctgctttcggcgcttctgaccttgctgctggcagtggcagcggtagcgatgaatcattactgtcgcagtcgctacgatctggtggcgatcctcaaaacgctgggggcagggcgagcgcaactgcgtaagctaatcgtcggtcagtggttgatggtgctgacgctttcagccgttaccggtggggccataggcctgttgttcgaaaacgtgttgatggtgctgctcaagcccgttctgcctgctgcactaccgccagccagcctctggccgtggctgtgggcgcttggcaccatgacggtcatctcgctgctggtggggctacgaccataccgcttgttgctggcaacgcagcctttacgcgtattacgtaatgatgtggtcgcgaacgtctggccgctgaagttttatctgccgattgtcagtgtggtggttgtgctgctgctcgccggattaatgggtggcagcatgctgctttgggcggtgctggcgggcgcggtagtactggctttgctgtgcggtgtgctgggctggatgctgctgaatgtacttcgccgcatgacgctgaaatcgctgcctctgcgcctggcggttagccgcctgttacgtcagccgtggtcaacgttaagccagctttcggcattttcgctctcctttatgctgctggcactgctgctggtgctgcgtggcgatctgctcgaccgctggcagcagcagctaccgccagaaagcccgaactactttttaattaacatcgccacagaacaggtagcaccgctaaaagcgttcctcgcggaacatcatatagtcccggaatcattttatccggtagtgcgggcgcggctgacggcgattaatgataagccgacagaaggtaatgaagatgaggcgcttaatcgcgaactcaatcttacctggcaaaatacgcggcccgatcataatccgattgtcgccggtaactggccgccaaaagccgatgaagtgtcgatggaagaggggctggcgaaacgcttaaacgttgccctcggtgataccgtgacttttatgggcgatacccaggagttccgcgctaaagtgaccagcctgcgcaaagtggactgggaaagtctgcggcctaatttctattttattttccctgaaggggcattagacgggcaaccgcagagctggcttaccagtttccgctgggagaatggcaacggcatgttgacgcaactcaaccgccagttcccgaccattagcctgttagacattggcgcgattttaaaacaggtcggtcaggtgctggagcaggtaagtcgggcgctggaggtgatggtggtgctggtcaccgcctgcggtatgttgctgttgctggcacaggtgcaggtgggaatgcgccagcgtcatcaggagctggtggtatggcgcacactcggtgcggggaaaaaactgctgcgcacgacattgtggtgtgatgttcgccatgcttgggtttgtttccggcctggtggccgcaattggtgcggaaacggcactggcagtgttgcaggcgaaagtgtttga

SEQ ID NO: 471175 - DNA, 687 bp, Shigella flexneri; identical to SEQ ID NO: 11195

SEQ ID NO: 471176 - DNA, 324 bp, Shigella flexneri
ttgcgtggttttcagccacagcaaaccgagcaaacgctgcgccagattttgcaggatgtcaaagccgccaacgctgaaccattgttaatgcaaatacgtctgcctgcaaactatggtcgccgttataatgaagcctttagcgccatttaccccaaactcgccaaagagtttgatgttccgctgctgcccttttttatggaagaggtctacctcaagccacaatggatgcaggatgacggtattcatcccaaccgcgacgcccagccgtttattgccgactggatggcgaagcagttgcagcctttagtaaatcatgactcataa

SEQ ID NO: 471177 - DNA, 810 bp, Shigella flexneri
atgactcataaagcaacggagatcctgacaggtaaagttatgcaaaaatcggtcttaattaccggatgttccagtggaattggcctggaaagcgcgctcgaattaaaacgccagggttttcatgtgctggcaggttgccgaaaaccgaatgatgttgagcgtatgaacaacatgggatttaccggcgtgttgatcgatctggattcaccagaaagtgttaatcgcgcagcagacgaggtgatcgccctgaccgataattgtctgtatgggatctttaacaatgccggattcggcatgtatggccccctttccaccatcagccgtgcgcagatggaacagcagttttccgccaactttttcggcgcacaccagctcaccatgcgcctgttacccgcgatgttaccgcacggtgaagggcgtattgtgatgacatcatcggtgatgggattaatctccacgccgggtcgtggcgcttacgcggccagtaaatatgcgctggaggcgtggtcagacgcgctgcgcatggagctacgccacagcggaattaaagtcagcctgatcgaacccggtcccattcgtactcgcttcaccgacaacgtcaaccagacgcaaagtgataaaccagtcgaaaatcccggcatcgccgcccgctttacgttgggaccggaagcggtggtcgacaaagtgcgccatgcttttattagcgagaagccgaagatgcgctatccggtaacgctggtgacctgggcagtaatggtgctcgagcgcctgctgcctgggcgcgtgatggacaaaatattgcaggggtga

SEQ ID NO: 471178 - DNA, 855 bp, Shigella flexneri
atgtccgtagaaaatattgtcaacattaacgaatctaacctgcaacaggttcttgaacagtcgatgaccactccggtgctgttctatttttggtctgaacgtagccagcactgtttgcagttaaccccgatcctggaaagcctcgcggcgcagtacaacgggcaatttattctggcgaagctggactgcgacgcggagcagatgattgccgcccagtttggtctgcgcgcgattccgaccgtgtatctgttccagaacgggcaaccggtagatggcttccaggggccgcaaccggaagaggcgatccgcgccctgctggataaagtgctgccgcgcgaagaagagctgaaagcgcagcaggcgatgcaactgatgcaggaaggcaattacaccgatgccctgccattgctgaaagacgcctggcagttgtcgaatcagaacggggagatcggcctgctgctggcagaaacgctgattgcgctgaaccgttctgaagatgcggaagcggtgctgaaaaccattccgttgcaggatcaggacacccgctaccaggggctggtagcgcaaatcgaactgctgaagcaggcggctgataagccggaaattcaacagttgcaacagcaggtggcggagaatccagaagatgccgcactggcgacgcaactggcgctgcaactgcatcaggttgggcgcaatgaagaggcgctggagttgctgttcgggcatctgcgtaaagatctcaccgccgcagacggtcagacgcgtaaaacgttccaggagatcctcgctgcgctgggtacgggtgatgcactggcgtcgaagtatcgccgccagctgtatgcattgttgtattga

SEQ ID NO: 471179 - DNA, 780 bp, Shigella flexneri
atgaactcgcataatattactaacgaatcattagcactggcattaatgctggtggtggtggcaatcttaattagccataaagaaaaactggcgctggagaaagatattctctggagcgtcgggcgagcgataattcagctgattattgtcggctatgtgctgaagtatattttcagcgtggatgatgccagcctgacattattgatggtgttatttatctgctttaatgcggcgtggaacgcgcaaaaacgcagtaaatatattgctaaagcttttatctcatcgtttattgccattacggtcggggcgggaattaccctggcggtgctgattctctcaggggcgattgaatttatcccgatgcaggtgatccctgtcgccgggatgattgccggtaacgccatggtagcggtggggttgtgttacaacaatttagggcaacgggtcattagcgaacagcaacagattcaggagaaactgagtcttggcgcgacgccgaagcaggcttcagcgatattgattcgcgacagtattcgcgcggctttaattccgacggtcgattcagcaaaaacggttggcttagtgagtttaccaggaatgatgtccgggctgatatttgccgggattgatccggtgaaggcgattaaatatcagattatggtgacctttatgctgctctcaaccgccagcttgtcgaccattattgcctgctatttaacctatcgtaagttttataattcgcgccaccagttggtggtgactcaattgaagaagaaatga

SEQ ID NO: 471180 - DNA, 678 bp, Shigella flexneri
atgcaggaaaatagtcctttgcttcagctacaaaacgtaggatatctggcgggtgatacgaagattcttaataacatcaatttttcgctgcgtgctggcgaatttaagttaattaccggtccttctggttgtggcaaaagtacgctgctaaaaatagttgcttcattgatcagcccaaccagcggaacgttactgtttgaaggtgaggatgtcagcacactaaaaccagaaatctaccgccagcaagtctcttactgcgcccagacgccgacgctgtttggcgatacggtatacgataatctgatctttccctggcagatccgtgaccagcagcctgacccggccatttttctcgattttctcgaacgcttcgctttgccggacagcattttgacgaagaatatcgccgagctatctggtggtgaaaaacaacgcatctcattgattcgtaacctgcaatttatgccgaaggttttattgctggatgaaataaccagtgcgctggatgaaagtaataaacataacgtcaatgagatgatccatcgttatgtgcgcgagcaaaatattgccgtgctgtgggtgacacacgataaagacgaaattaatcatgcggataaagtgattacactgcaaccgcatgccggagaaatgcaggaagcacgctatgaactcgcataa

SEQ ID NO: 471181 - DNA, 918 bp, Shigella flexneri
atgcttatctttatcccgattctcatttttgtcgcgctggtcattgtcggcgcgggcgtcaaaatcgtgccgcagggctatcaatggacggtagaacgttttggtcgctataccaaaacgttacagccggggctcagtctggtggtgccgtttatggatcgcattggtcgcaagatcaatatgatggagcaagtgctcgatatcccttcccaggaagttatctcgaaagataacgccaacgttaccatcgacgcagtctgttttattcaggtgattgacgcgccacgcgctgcctatgaagtcagcaatctggagctggcgatcatcaacctgaccatgactaacatccgtaccgtgttgggttcaatggaacttgacgaaatgctctctcagcgcgacagcatcaactcacgcctgctgcgtattgtcgatgaagccaccaacccgtgggggattaaagtcacccgtattgaaattcgcgacgtgcgcccaccggcagagcttatctcttcaatgaacgcgcagatgaaagcggaacgtaccaaacgcgcttacattcttgaagcggaagggatccgtcaggcggaaatcctcaaagccgaaggtgaaaaacagtcgcaaatcctgaaagcggaaggcgaacgtcagtcggcgtttttacaggctgaagcgcgtgaacgttccgccgaagcagaagcccgcgccaccaaaatggtgtctgaagctatcgcctccggtgatattcaggcggtgaactacttcgtagcgcaaaaatacaccgaagcgttacagcagatcggttcctccagtaacagcaaagtagtgatgatgccattagaggccagcagcctgatggggtcgattgccgggattgccgagctggtgaaagacagcgccaacaaacggactcagccatga

SEQ ID NO: 471182 - DNA, 459 bp, Shigella flexneri
atgatggagttaatggtcgttcatccacatattttctggctcagtctcggcgggttgctgctggcagccgagatgctgggcggaaatggttatttgttgtggagcggcgtggcagcggtgattaccggcctggtggtctggctggtgccgctgggttgggagtggcaaggggtaatgtttgccatcctgacgctgctcgccgcctggctgtggtggaaatggttgtcgcggcgggtgcgcgaacaaaagcacagcgatagtcatttaaaccagcgcgggcagcagctgattggccgacgttttgtgctggaatctccgctggtcaacgggcgcggtcatatgcgcgtcggtgacagttcatggcctgtcagcgccagcgaggatctcggtgcaggtacgcatgttgaagtcattgcgatagaagggataaccctacatatccgagccgtctcgtcttaa

SEQ ID NO: 471183 - DNA, 408 bp, Shigella flexneri
atgaacatcagcgatgtagcaaaaattaccggcctgaccagcaaagccattcgcttctatgaagagaaggggctggtgacgccgccgatgcgcagcgaaaacggttatcgcacctacacgcagcagcatctcaacgaactgaccttactgcgccaggcacggcaggtgggctttaacctggaagagagcggcgagctggtgaatctgtttaacgacccgcagcggcacagcgccgacgtcaaacggcgcacgctggagaaggtggcggagatcgaacgacacattgaggagctgcaatccatgcgcgaccagctgctggcactggcgaatgcctgccctggcgatgacagcgccgactgcccgattatcgaaaatctctccggctgctgtcatcatcgggcagggtga

SEQ ID NO: 471184 - DNA, 1293 bp, Shigella flexneri
atgatgaacacggaaggtaataacggtaacaaacccctcggtctatggaacgtcgtttccatcggtattggggcaatggtgggggcggggatcttcgcgctgctggggcaggctgcgttgctaatggaagcctcgacctggggcgcctttgcttttggcggtattgtggctatgttttccggttatgcctatgcgcgtctgggggcgagctatcccagcaatggcggtattatcgacttttttcgtcgcggattaggcaacggcgtcttttcgctagcgctctcgttgctatacctgttgacgctggcggtgagcatcgccatggttgcccgtgcttttggcgcttatgccgtgcagtttttgcatgaaggcagccaggaggagcaccttattttgctctacgcgttggggatcattgcggtgatgacgcttttcaactccttaagcaaccatgcggtagggcggctggaagtgatcctcgtcggcattaaaatgatgatcctgttattgctgattattgccggtgtctggtcgctgcaaccggcgcatatttccgtctctgcgccccccagctccggtgcgttcttctcctgtattgggataaccttccttgcctatgcgggctttggcatgatggcgaacgcggcggataaagtgaaagatccgcaggtcattatgccacgggcgtttctggtggcgattggcgttaccacgttgctttatatctcgctggcgctgggtttgcttagcgatgtatcggcattagagttagaaaaatatgctgataccgccgtagcgcaggctgcttctccgctgctcgggcatgtgggttatgtgatcgtcgtcatcggcgctttactggcgacggcttcaggcattaacgcgaacctgttcgccgtgtttaacatcatggacaacatgggcagcgaacgcgaactgccgaagctaatgaataaatccctgtggcggcagagtacctggggcaatatcatcgtcgtggtgttgataatgctgatgacggcggcgctaaatttagactcactcgccagcgttgccagcgccacctttttgatctgctatctggcggtgtttgtggtggcgatccgcctgcgtcatgatattcacgcctcgttgccgattcttatcgttggtacgttggtgatgttgttggtgatcgttggctttatctacagcctgtggtcccagggcagccgtgcgttgatatggattattggtgcaatcttactcagccttattgtggcaatggtcatgaagcgtaataaaaccgtataa

SEQ ID NO: 471185 - DNA, 933 bp, Shigella flexneri
atgttagatgcaaacaaattacagcaggcagtggatcaggcttacacccaatttcactcacttaacggcggacaaaatgccgattacattccctttctggcgaatgtaccaggtcaactggcggcagtggctatcgtgacctgcgatggcaacgtctatagtgcgggtgacagtgattaccgctttgcactggaatccatctctaaagtctgtacgttagcccttgcgttagaagatgtcggcccgcaggcggtacaggacaaaattggcgctgacccgaccggattgccctttaactcagttatcgccttagagttgcatggcggcaaaccgctttcgccactggtaaatgctggcgctattgccaccaccagcctgattaacgctgaaaacgccgaacaacgctggcagcgaattttacatatccaacagcaactggctggtgagcaggtagcgctctctgacgaagtcaaccagtcggaacaaacaaccaacttccataatcgggccattgcctggctgctgtactccgccggatatctctattgtgatgcaatggaagcctgtgacgtgtacacccgtcagtgctctacgctcatcaatactgttgaactggcaacgcttggcgcgacgctggcggcgggtggtgtgaatccgttgacgcataaacgcgttcttcaggccgacaacgtgccgtacattctggccgaaatgatgatggaagggctgtatggtcgctccggtgactgggcgtatcgcgttggtttaccgggcaaaagcggtgtaggtggcggtattctggcggtcgtccctggcgtgatgggaattgccgcgttctcaccaccgctggacgaagaaggcaatagtgttcgcggtcaaaaaatggtggcatcggtcgctaagcaactcggctataacgtgtttaagggctga

SEQ ID NO: 471186 - DNA, 2505 bp, Shigella flexneri
atgtcacaaactatcgacctgaacctggacggcctgtcctgcggtcactgcgttaaacgcgtgaaagaaagtcttgaacagcgcccggatgtggaacaagcggatgtgtctatcactgaagcgcacgttaccgggactgccagtgcagaacagctgatcgaaaccatcaaacaagcgggttatgacgcatctgtaagccacccaaaggctaaaccgctggcggagtcatcaatcccgtcggaagcactgacagcggtttctgaggcgcttccggcagcgaccgccgatgacgatgacagccagcagttgctgctgagcggcatgagctgcgccagctgtgtcacccgcgtacaaaatgcgctgcaaagcgtaccgggcgtcactcaggcacgggtaaacctggcggagcgtactgcgctggtgatgggcagtgcctccccacaagatttagtgcaggcggtggaaaaagcgggctacggcgcggaagcgattgaagatgacgcgaaacgccgcgaacgccagcaagaaaccgccgtcgctacgatgaagcgcttccgctggcaggcaattgtcgcactggcggtgggtatcccggtgatggtctgggggatgatcggcgataacatgatggtcaccgccgacaaccgcagcctgtggttggttatcggcctgataaccctggcggtgatggttttcgccagcggccatttttaccgcagtgcatggaaaagcctgctgaacggtgcagcgacgatggatacgctggtggcgctgggaacgggcgtggcgtggctctattcgatgagcgtcaacctgtggccgcagtggttcccgatggaagcgcgacatctttactatgaagccagtgcgatgattatcggtctgatcaatctcggccatatgctggaagcacgcgcacgtcagcgttcttctaaggcactggagaaattactcgatttaaccccaccgacggcgcgcctggttactgacgaaggtgaaaaaagcgtgcctctggcagaagtgcagccaggtatgttgctgcgcctgacgaccggcgatcgcgtgccggtagatggcgagattacccagggcgaagcatggctggatgaagcgatgctgacgggcgaaccaatcccgcagcaaaaaggcgaaggcgatagcgtccatgccgggacagtggtacaggacggcagtgtgctgtttcgtgccagtgcggttggcagccataccacgctatcaaggatcattcgcatggtgcgccaggcccagagcagcaagccagaaatcggtcagctggcggataaaatctcagccgtatttgtgccggtagtagtggttattgcgcttgtcagtgcggcaatctggtatttctttggtccggcaccgcagattgtctataccctggtgattgccactacggtgctgattatcgcctgcccgtgtgcgctgggactggcgacgccgatgtcgattatttccggcgtcgggcgggcggctgagtttggcgtgctggtgcgggacgccgacgcgctgcaacgcgccagtacactcgataccgtcgtgttcgataaaaccgggacgctgaccgaagggaagccgcaggttgtcgcagtgaaaacatttgctgatgttgacgaagcgcaggcgctgcgtctggcggcggcgctggagcaaggttccagccatccattggcacgagcgatccttgataaagcaggcgatatgcagctaccgcaggtcaacggtttccgcacattgcgcgggctgggcgtgagcggtgaagcagaaggtcatgcgttattgctgggtaatcaggcgttgttaaatgatcagcaagtcgatactaaagcgattgaagccgatatttcagctcaggcatcgcaaggagcaacgcctgtgctgctggcgattgacgggaaagcagtagccctgctggctgtacgcgatccgttgcgtagtgatagcgtggcggcgctgcaacgcctgcataaagcgggatatcgtctggtgatgttgaccggggataacccaaccaccgccaatgcgatcgccaaagaagctggaattgatgaagtgattgccggagtgctgccggacggtaaagccgaagcgatcaaacgtctgcaaagtgaaggacgtcaggtggcaatggtgggcgacggcattaacgacgcgccagcgctggcccaggcggatgtcggcattgcgatgggtggcggcagtgatgttgccattgaaaccgcggcgattaccctgatgcgccatagcctgatgggcgttgcggatgcgctcgcgatttcccgcgcaacgctgcgcaacatgaagcagaacctgctcggtgcctttatctacaacagcatcggtattccggtcgccgccggtattttgtggccgtttactggaacactgcttaacccggtagttgccggagcggcaatggcgctctcgtcaattaccgtagtaagtaacgccaaccggttgctgcggtttaaaccgaaggaataa

SEQ ID NO: 471187 - DNA, 396 bp, Shigella flexneri
atgattcagtatgttcttgcatcgctattcacagggaagcaacagttaaaaaccatgaaacaggcaacaagaaaaccgacgacacccggagatattcttctctatgaatatctggaaccgctcgatttgaaaatcaatgagttagcagagttgctgcatgttcatcgtaatcgcgtcagtgcactgatcaataacaatcgtaaactcaccactgagatggcattccgtctggcgaaagtttttgataccacagtcgattttaggctaaacctccaggcggcagttgatctttgggaagttgaaaacaacatgcgcacccaggaagaattgggacggattgaaacagtggctgaatatttggcacgccgtgaagagcgtgcaaaaaaggtcgcgtaa

SEQ ID NO: 471188 - DNA, 795 bp, Shigella flexneri
atggatctgttgtaccgggtaaaaacgctttgggccgcgctgcgcggtaatcattacacctggcctgccatcgatatcaccctccccggcaatcgccattttcatctgattggcagtattcatatgggtagccacgatatggctcccctgcccacccgtttgctcaaaaagctcaaaaacgccgatgcgctgatcgtcgaggcggatgtttccaccagcgatacgccttttgctaatttgcctgcctgcgaggcgctggaagagcgcattagcgaggagcaactccaaaacctgcagcacattagccaggagatgggcatttctccctcactcttttctacccaaccgctgtggcaaatcgcgatggttcttcaggcgacgcaggcacaaaaactggggctgcgggcagaatacggtatcgattaccagctattgcaggcggcgaagcaacaacataaacccgtgattgaactggaaggggctgaaaaccagattgccatgttgctccagctccctgacaaaggactggcgctgctggacgatacgctgacccactggcataccaacgcacggttgctgcaacaaatgatgagctggtggctgaatgcaccgccgcaaaataatgatataacgctgcccaatacgttcagtcagtcgctgtacgatgtgctgatgcatcagcgaaatctcgcctggcgggataaattacgcgccatgccgccggggcgatatgtggtcgcggtcggtgcactacacctgtatggagaagggaatttgccgcaaatgttgcgctaa

SEQ ID NO: 471189 - DNA, 480 bp, Shigella flexneri
atgacacccgcagttaaattactcgaaaaaaacaagatttcgtttcaaatccatacctacgagcacgatccggctgaaaccaattttggcgatgaagtcgtcaaaaaattaggtttgaatccggatcaggtctacaaaacgctgctggtggcagtgaacggtgatatgaaacaccttgccgtggccgttacgccggtcgcaggtcaactggatcttaaaaaagtagcaaaagcgctgggtgccaagaaagttgagatggccgatccgatggtcgcgcagcgttcgacgggatacctggttggggggattagcccactggggcagaaaaaacgtctgccaacgattatcgacgcccccgcacaagaatttgccactatttatgtttccggcggcaagcgcggactggatatcgaactggcggcaggcgatctggcaaagatcctcgatgccaaatttgctgatatcgcccgccgcgattaa

SEQ ID NO: 471190 - DNA, 1653 bp, Shigella flexneri
atgaaattattgcagcggggcgtggcgttagcgctgttaaccacatttacactggcgagtgaaactgctctggcgtatgagcaggataaaacctacaaaattacagttctgcataccaatgatcatcatgggcatttttggcgcaatgaatatggcgaatatggtctggcggcgcaaaaaacgctggtggatggtatccgcaaagaggttgcggctgaaggcggtagcgtgctgctactttccggtggcgacattaacactggcgtgcccgagtctgacttacaggatgccgaacctgattttcgcggtatgaatctggtgggctatgacgcgatggcgatcggtaatcatgaatttgataatccgctcaccgtattacgccagcaggaaaagtgggccaagttcccgttgctttccgcgaatatctaccagaaaagtactggcgagcgcctgtttaaaccgtgggcgctgtttaagcgtcaggatctgaaaattgccgttattgggctgacaaccgatgacacagcaaaaattggtaacctggaatacttcactgatatcgaatttcgtaagcccgccgatgaagcgaagctggtgattcaggagctgcaacagacagaaaagccagacattattatcgcggcgacccatatggggcattacgataatggtgagcacggctctaacgcaccgggcgatgtggagatggcacgcgcgctgcctgccggatcgctggcgatgatcgtcggtggtcactcgcaagatccggtctgcatggcggcagaaaacaaaaaacaggtcgattacgtgccgggtacgccatgcaaaccagatcaacaaaacggcatctggattgtgcaggcgcatgagtggggcaaatacgtgggacgggctgattttgagtttcgtaatggcgaaatgaaaatggttaactaccagctgattccggtgaacctgaagaagaaagtgacctgggaagacgggaaaagcgagcgcgtgctttacactcctgaaatcgctgaaaaccagcaaatgatctcgctgttatcaccgttccagaacaaaggcaaagcgcagctggaagtgaaaataggcaaaaccaatggtcgtctggaaggcgatcgtgacaaagtgcgttttgtacagaccaatatggggcggttgattctggcagcccaaatggatcgcactggtgccgactttgcggtgatgagcggaggcggaattcgtgattctatcgaagcaggcgatatcagctataaaaacgtgctgaaagtgcagccattcggcaatgtggtggtgtatgccgacatgaccggtaaagaggtgattgattacctgaccgccgtcgcgcagatgaagccagattcaggtgcctacccgcaatttgccaacgttagctttgtggcgaaagacggcaaactgaacgaccttaaaatcaaaggcgaaccggtcgatccggcgaaaacttaccgtatggcgacattaaacttcaatgccaccggcggtgatggatatccgcgccttgataacaaaccgggctatgtgaataccggctttattgatgccgaagtgctgaaagcgtatatccagaaaagctcgccgctggatgtgagtgtttatgaaccgaaaggtgaggtgagctggcagtaa

SEQ ID NO: 471191 - DNA, 1221 bp, Shigella flexneri
atggcaatgagtgaacaaacccagcctgtggcgggcgcggctgcgtcaacgaccaaggcccgaacatcgtttggtattttaggtgctatcagcctctcacatctgctgaacgacatgatccaatcgctgattctggcgatttatccgctgcttcagtcagaattttctctgacatttatgcagattggcatgataaccctcaccttccagctcgcctcttcgctactgcaaccagtggtcggctactggaccgataaatatccgatgccgtggtcgttgccaattggcatgtgctttaccttaagtggtctggtgctgcttgcgctggcgggcagttttggcgcagttctgctggcagcggcgctggtcggtaccggttcatcggtctttcatccggaatcttctcgcgtagcccgtatggcttccggcgggcggcatggcctggcgcaatctatctttcaggtcggcggcaactttggcagttccctgggacccttgctggcggcggtgattatcgcgccttatggcaaaggcaacgttgcctggtttgtgcttgcggcactgctggcgatcgtggtgttggcgcaaattagccgttggtactcggcacagcaccgaatgaataaaggaaaacccaaagcgacgataatcaatccactgccgcgcaacaaagtggtactggcagtcagcattctgttaatcctcattttctcgaaatatttctatatggcgagcatcagcagctattacaccttttatctgatgcaaaaattcggattatctatccagaatgcccagcttcatctgtttgccttcctgtttgccgttgcggcaggtacggtgatcggcgggcctgtaggggataaaattggacggaaatatgtgatttggggctctatcctcggcgttgcgccgtttacgctgattttaccctacgcccgcctgcactggacgggggttttaacggtgattattggatttatcctcgcttcggcattctctgccattctggtctacgctcaggagctacttccgggacgtatcggtatggtttctggactctttttcggttttgctttcggcatgggaggtctgggagcggcagttctggggcttatcgccgatcacaccagcatcgagttagtctataaaatctgtgctttcctgccactattagggatgttgaccatattcctgcctgataaccggcataaagactga

SEQ ID NO: 471192 - DNA, 1677 bp, Shigella flexneri
atgcatcacgccaccccgcttatcaccaccattgttggcggccttgtgctcgcctttatcctcggcatgctggccaataaactacgtatttctcctctggtgggatatctgttagcgggtgtgctggcaggaccattcactccgggctttgttgccgataccaagcttgcgccggaactggctgaactgggcgttattttgctgatgttcggcgtcggtttgcatttttcgctcaaggatttgatggcggtaaagtccatcgccattcccggcgcgatcgcccagatagccgtggcgacgctgctgggtatggcgctctccgccgtgctgggctggtcgttaatgaccggtatcgtgttcggcttatgtctttccaccgccagtaccgtggtgttactgcgcgcacttgaagaacggcaattaatagacagtcagcgtgggcaaatcgccatcggttggttgattgtggaagacctggtgatggttctgacgctggtgttgctgcccgcagtggcaggaatgatggaacagggcgatgtgggctttgccactcttgcagtcgatatggggatcaccatcggcaaggtgatcgcatttatcgccattatgatgctggtaggtcgccgtctggtgccgtggattatggcacgcagcgcggcaaccggttctcgcgagctgtttaccctgtcagtgctggcgctggcgttagggattgcctttggtgcggtagagctgtttgatgtctcctttgcactcggtgcgttctttgccgggatggtactgaacgagtctgaattgagtcaccgtgccgcccacgatacgttgccattgcgcgacgcgtttgcggtgctgttttttgtctcagtcgggatgttgtttgatccgttaattctgattcagcaaccgctggcagtgctggcgacgctggcaattattctgtttggtaaatcggtcgcggccctgttccttgtccgtctgtttggtcactcccaacgtacggcattaaccatcgccgccagcctggcgcagattggtgagttcgcgtttatcctggcgggactgggaatggcattgaatttactgccgcaggccggacaaaacctggtactggcaggggcgatcctgtcgattatgctcaacccggtactgttcgcactactggagaaatatctggcgaagaccgaaacgctggaagagcagacgctggaagaggcaatcgaagaagagaaacagatcccagtggatatttgcaaccatgcgctattggtgggttacggtcgtgtaggcagcctgctgggggagaaattgctcgcctctgatattccgctggtggtgattgagacgtcacgaacccgtgttgatgagctgcgagagcgtggggtccgcgctgtattgggcaatgcagcgaacgaagaaattatgcaactggcacatctggaatgtgcaaaatggctgatcctgacgatccccaacggttatgaagcgggtgagattgtggcgtctgcccgcgcgaaaaacccggatattgagattatcgcccgcgcccattatgacgatgaagtgacgtatatcaccgaacgtggcgcgaatcaggtagtgatgggtgaacgtgaaattgcccgtactatgctggaactgctggaaacgccaccggcgggtgaagtggtgacggggtaa

SEQ ID NO: 471193 - DNA, 1305 bp, Shigella flexneri
atgaaatttcccggtaaacgtaaatccaaacattacttccctgtaaatgcacgcgatccgctgcttcagcaattccagccagaaaacgaaaccagcgccgcctgggtcgtaggtattgaccagacgctggtcgatattgaagcgaaagtggatgatgaattcattgagcgttatggattaagcgccgggcattcactggtgattgaggatgacgtagccgaagtgctttatcaggagctaaaacagaaaaacctgattacccatcagtttgcgggtggcaccattggtaacaccatgcacaactactcggtgctcgcggacgaccgttcggtgctgctgggcgtcatgtgcagcaatattgaaattggcagttatgcctatcgttacctgtgtaacacttccagccgtaccgatcttaactatctacaaggcgtggatggtccgattggtcgttgctttacgctgattggcgagtccggggaacgtacctttgctatcagtccaggccacatgaaccagctgcgggctgaaagcattccggaagatgtgattgccggagcctcggcactggttctcacctcatatctggtgcgttgcaagccgggtgaacccatgccggaagcaaccatgaaagccattgagtacgcgaagaaatataacgtaccggtggtgctgacgctgggcaccaagtttgtcattgccgagaatccgcagtggtggcagcaattcctcaaagaccacgtttctatccttgcgatgaacgaagatgaagccgaagcgttgaccggagaaagcgatccgttgttggcatctgacaaggcgctggactgggtagagctggtgctgtgcaccgccgggccaatcggcttgtatatggcgggctttaccgaagacgaagcgaaacgtaaaacccagcatccgctgctgccgggcgctatagcggaattcaaccagtatgagtttagccgcgccatgcgccacaaggattgccagaatccgctgcgtgtctattcgcacattgcgccgtacatgggcgggccggaaaaaatcatgaacactaatggagcgggggatggcgcattggcagcgttgctgcatgacattaccgccaacagctaccatcgtagcaacgtaccaaactccagcaaacataaattcacctggttaacttattcatcgttagcgcaggtgtgtaaatatgctaaccgtgtgagctatcaggtactgaaccagcattcacctcgtttaacgcgcggcttgccggagcgtgaagacagccaggaagagtcttactgggatcgttaa

SEQ ID NO: 471194 - DNA, 960 bp, Shigella flexneri
atgaagccggaaaacaaactacctgttctggaccttatttctgctgaaatgaagaccgttgtgaatactcttcagccggatttaccgtcctggcccgcaacgggaacgattgctgagcaacgacagtattacacgcttgagcgccgattctggaatgcgggcgctccagaaatggcaaccagagcttacatggttccaacaaaatatgggcaggtggaaacacgtctcttttgtccgcagccagatagcccggcgacgctattttatttgcatggaggcggttttattctcggcaatctcgatacccacgatcgcatcatgcgcctgctggcaagctacagccaatgtacggtgattggtattaattacaccctttcacctgaagcgcgttttccacaagcgatagaggaaattgtggctgcttgttgttatttccaccagcaggcggaggattatcaaatcaatatgtcccgcattggctttgccggtgattccgcaggtgccatgctggcgctcgccagtgcgttgtggttgcgtgataaacagatcgattgcggtaaaattgcgggtgttttgctgtggtatgggctttacggattacgggattccgtgactcgtcgtctgttgggcggtgtctgggatggcttaacgcaacaggatttgcagatgtatgaagaggcgtatttaagcaacgacgcggaccgcgagtcaccgtattactgtctgtttaataatgatctcactcgcgaagttccgccctgttttattgccggggcggagttcgatccgctgctggatgacagccgtctgctttaccagacgttagcggcgcatcagcagccctgtgagttcaaactctacccaggtacgctgcatgcctttttgcattattcacggatgatgaaaaccgccgacgaggctcttcgcgacggcgctcagttctttaccgctcagctttag

SEQ ID NO: 471195 - DNA, 963 bp, Shigella flexneri
atgcgtcagactaaaaccggtatcctgctggcaaacctgggtacgcccgatgcccccacacctgaagcggtaaaacgctatctgaaacaatttttaagcgacagacgcgtggttgatacctcacggttgttatggtggccgttgctgcgcggcgtgattttgccgctgcgctcgccgcgtgtggcgaagctgtacgcctctgtctggatggaagacggctcgccgctgatggtttacagccgccagcaacagcaggcgttggcacaacgtttaccggatacgccagtggcgctgggcatgagctacggctcgccatcactggaaagctccgtcgatgaactcctggcagagcatgtagatcatattgtggtgctgccgctttatccgcaattctcctgttctacggtcggtgcggtatgggatgaactggcacgcattctggcgcgcaaacgtagcattccggggatatcgtttattcgtgattacgccgataaccacgattacattaatgcactggcgaacagcgtacgcgcttcttttgccaaacatggcgaaccggatctgctgctgctctcttatcatggcattccccagcgttatgcagatgaaggcgatgattacccgcaacgttgccgcacaacgactcgcgaactggcttccgcactggggatggtaccggaaaaagtgatgatgacctttcagtcgcgctttggccgggaaccctggctgatgccttataccgacgaaacgctgaaaatgctcggagaaaaaggcgtaggtcatatacaggtgatgtgcccgggctttgctgcggattgtctggagacgctggaagagattgccgagcaaaaccgtgaggtcttcctcggtgcgggcgggaaaaaatatgaatatattccagcgcttaatgccacgccggaacatatcgaaatgatggctaatcttgttgccgcgtatcgctaa

SEQ ID NO: 471196 - DNA, 645 bp, Shigella flexneri
atgcgtatcattctgcttggcgctccgggcgcggggaaagggactcaggctcagttcatcatggagaaatatggtattccgcaaatctccactggcgatatgctgcgtgctgcggtcaaatctggctccgagctgggtaaacaagcaaaagacattatggatgctggcaaactggtcaccgacgaactggtgatcgcgctggttaaagagcgcattgctcaggaagactgccgtaatggtttcctgttggacggcttcccgcgtaccattccgcaggcagacgcgatgaaagaagcgggcatcaatgttgattacgttctggaattcgacgtaccggacgaactgattgttgatcgtatcgtaggccgccgcgttcatgcgccgtctggtcgtgtttatcacgttaaattcaatccgccgaaagtagaaggcaaagacgacgttaccggtgaagaactgactacccgtaaagacgatcaggaagaaaccgtgcgtaaacgtctggttgaataccatcagatgactgcaccgctgatcggctactactccaaagaagcggaagcgggtaacaccaaatacgcgaaagttgacggtaccaagcaggttgctgaagttcgcgctgatctggaaaaaatcctcggctaa

SEQ ID NO: 471197 - DNA, 1875 bp, Shigella flexneri
atgaaaggacaagaaactcgtggttttcagtcagaagtgaaacagcttctgcacctgatgatccattctctctattccaataaagaaatcttcctgcgtgagcttatctctaacgcctccgatgcggcggacaagctgcgtttccgtgcgctatctaacccggacctgtacgaaggtgatggcgaactgcgcgttcgtgtctctttcgataaagacaagcgcacgctgaccatctccgataacggcgtggggatgacccgcgacgaagtgattgaccatctggggactatcgctaaatccggtaccaaatcattcctcgaatccctgggttctgaccaagcgaaagacagccagctgatcggtcagtttggtgttggtttctactctgcgtttatcgtggccgacaaagtgaccgtgcgtactcgcgcggcaggcgaaaaaccagaaaacggcgtcttctgggaatcggctggcgaaggtgaatataccgttgccgatatcaccaaagaagatcgtggtactgaaatcaccctgcatctgcgtgaaggcgaagacgagttcctcgatgactggcgcgtgcgttccatcatcagcaaatactccgaccatatcgcgctgccggtagagatcgaaaaacgcgaagagaaagatggcgaaaccgttatctcctgggcaaaaatcaacaaagcgcaggcgctgtggactcgtaacaagtcggaaatcaccgatgaagagtataaagagttctacaaacacatcgcccacgactttaacgatccgctgacctggagccacaaccgcgttgaaggtaagcaggagtacaccagcctgctgtacatcccgtcccaggctccgtgggatatgtggaaccgtgatcataaacacggcctgaaactgtacgttcaacgcgtgtttatcatggacgacgctgaacagttcatgccgaactatctgcgcttcgtgcgtggtctgattgactccagcgatctgccgctgaacgtttcccgtgaaatcctccaggacagcacggtaacgcgtaacctgcgcaatgcgctgaccaagcgtgtgctgcaaatgctggaaaaactggcgaaagacgacgcggaaaaataccagaccttctggcaacagtttggcctggtactgaaagaaggtccggcggaagatttcgctaaccaggaagcgatcgccaaactgctgcgttttgcttctacttataccgattcttctgcgcagaccgtgtctctggaagactacgtttcccgcatgaaagaagggcaggagaaaatctactacatcactgcagacagctatgcggcagcgaagagcagcccgcacctggaactgctgcgtaagaaaggcatcgaagttctgctgctttccgaccgcatcgatgagtggatgatgaactatctgactgagttcgacggtaaaccgttccagtcggtgtctaaagttgacgagtcgctggaaaaactggctgacgaagttgatgagagcgcgaaagaagcggagaaagcactgactccgttcatcgaccgcgtgaaagctctgctcggcgagcgcgtgaaagatgtccgtctgactcaccgtctgaccgatacgccagcgatcgtttcgaccgacgcggacgaaatgagcactcagatggcgaaactgttcgctgcggcgggccagaaagtgccagaagtgaaatacatcttcgaactgaacccggatcacgtactggtgaaacgtgcggcagatactgaagatgaagccaagttcagcgagtgggtagaactgctgctggatcaggcgctgctggcagaacgcggcacgctggaagatccgaacctgtttattcgtcgtatgaatcagctgctggtttcctga

SEQ ID NO: 471198 - DNA, 606 bp, Shigella flexneri
atgcaaaccagcccgctgttaacacagcttatggaagcactgcgctgtctgccgggcgttggcccgaagtcggcgcagcgtatggcgttcacgctgcttcagcgcgatcgtagcggcgggatgcgtctggcgcaggcgctcacccgggcgatgtcggaaatcggccactgcgccgattgccgcactttcaccgaacaggaagtctgtaacatctgttcgaatccgcgtcgtcaggaaaacggtcaaatctgtgtggtggagagtccggcggacatctacgccattgagcagacggggcagttttctggtcgttattttgtgttgatggggcatctgtcaccgctggacggcatcggtccggatgatatcgggcttgatcgtctggaacagcgtctggcagaggaaaaaatcactgaagtgatcctcgccaccaatcccacggttgaaggtgaagctaccgctaactacattgccgagctttgcgcgcaatatgacgtggaagccagccgaatcgctcatggcgtaccggttggcggcgaactggaaatggtcgatggcaccacgctgtcacactccctcgccgggcgtcataagattcgtttttaa

SEQ ID NO: 471199 - DNA, 330 bp, Shigella flexneri
atgtttggtaaaggcggtctgggtaacctgatgaagcaagcccagcagatgcaagaaaaaatgcagaaaatgcaggaagagatcgcgcagctggaagttaccggcgaatctggcgcaggtctggtaaaagtgaccatcaacggtgcacacaactgccgtcgcgtagagatcgacccgagcctgctggaagacgacaaagagatgctggaagacctggtggctgcagcattcaacgacgcagcacgtcgtattgaagaaacgcagaaagaaaaaatggcctctgtatcctccggaatgcagctgccgcctggctttaagatgccgttctga

SEQ ID NO: 471200 - DNA, 1926 bp, Shigella flexneri
atgagttatcaggttttagcccgaaaatggcgcccacaaacctttgctgacgtcgtcggccaggaacatgtgctgaccgcactggcgaacggcttgtcgttagggcgtattcatcatgcttatcttttttccggcacccgtggcgtcggaaaaacctctatcgcccgactgctggcgaaggggctaaactgcgaaaccggcattaccgcgacgccgtgcggcgtgtgcgataactgtcgtgaaatcgagcaggggcgctttgtcgatctgattgaaatcgacgccgcctcgcgcaccaaagttgaagatacccgcgacctgctggataacgtccagtacgctccggcgcgtggtcgtttcaaagtttatctgatcgacgaagtgcatatgctgtcgcgccacagctttaacgcactgttaaaaacccttgaagagccgccggagcacgttaagtttctgctggcgacgaccgatccacagaaattgccggtgacgattttgtcacgctgtctgcaatttcatctcaaggcgctggatgtcgagcaaattcgccatcagcttgagcacatcctcaatgaagaacatatcgctcacgagccgcgggcgctgcaattgttggcgcgcgccgctgaaggcagcctgcgagatgccttaagtctgaccgaccaggcgattgccagcggtgacggccaggtttcaacccaggcggtcagtgcgatgctgggtacgcttgacgacgatcaggcgctgtcgctggttgaagcgatggtcgagggcaacggcgagcgcgtaatggcactgattaatgaagccgctgcccgtggtatcgagtgggaagcgttgctggtggaaatgctcggcttgttgcatcgtattgcgatggtacaactttcgcctgctgcacttggcaacgacatggccgccatcgagctgcggatgcgtgaactggcgcgcaccataccgccgacggatattcagctttactatcagacgctgttgattggtcgcaaagaattaccgtatgcgccggaccgccgcatgggcgttgagatgacgctgctgcgcgcgctggcgttccatccgcgtatgccgctgcctgagccagaagtgccacgccagtcctttgcacccgtcgcgccaacggcagtaatgacgccaaccctggtgccgccgcaatcagcgccgcagcaggcaccgactgtaccgctcccggaaaccaccagccaggtgctggcggcgcgccagcagttgcagcgcgtgcagggagcaaccaaagcaaaaaagagtgaaccggcagccgctacccgcgcgcggccggtgaataacgctgcgctggaaagactggcttcggtcaccgatcgcgttcaggcgcgtccggtgccatcggcgctggaaaaagcgccagccaaaaaagaagcgtatcgctggaaggcgaccactccggtgatgcagcaaaaagaagtggtcgccacgccgaaggcgctgaaaaaagcgctggaacatgaaaaaacgccggaactggcggtgaagctagcggcagaagccattgagcgcgacccgtgggcggcacaggtgagccaactttcgctaccaaaactggtcgaacaggtggcgttaaatgcctggaaagaggagagcgacaacgcagtatgtctgcatttgcgctcctctcagcggcatttgaacaaccgcggtgcacagcaaaaactggctgaagcgttgagcatgttaaaaggttcaacggttgaactgactatcgttgaagatgataatcccgcggtgcgtacgccgctggagtggcgtcaggcgatatacgaagaaaaacttgcgcaggcgcgcgagtccattattgcggataataatattcagaccctgcgtcggtttttcgatgcggagctggatgaagaaagtatccgccccatttga

SEQ ID NO: 471201 - DNA, 552 bp, Shigella flexneri
atgaccgcgactgcacagcagcttgagtatctcaaaaatagcatcaaaagcattcaggactacccaaaacccggcattcttttccgcgatgtcaccagcttactggaagacccgaaagcttacgctctcagcatcgacttgctggttgagcgttacaaaaatgcgggcattaccaaagttgtcggcaccgaagcgcgtggcttcttgtttggcgctccggtagctctgggtctgggcgttggctttgtaccggtccgtaaaccgggcaaactgccgcgtgaaaccatcagtgaaaattacgacctggaatacggcaccgatcagctggaaatccacgttgatgccatcaaaccgggcgacaaagttctggtggtggacgatctgctggcaaccggcggcactatcgaagcgaccgttaaactgatccgtcgtctgggtggtgaagtggctgacgctgcgttcattatcaacctgtttgatctcggcggcgaacagcgtctcgaaaaacagggcattaccagctacagccttgtcccgttcccgggccattaa

SEQ ID NO: 471202 - DNA, 378 bp, Shigella flexneri; identical to SEQ ID NO: 462229

SEQ ID NO: 471203 - DNA, 528 bp, Shigella flexneri
gtgaaaaccgccctgctgctggaaaaactggaaggacagctcgctacgctgcgtcagcgttgtgccccggtgtcacagttcgccacgctaagtgctcgtttcgacaggcatctttttcagactcgtgcgacaacactacagtcttgtctcgacgaggcgggcgataatctggctgcgcttcgtcatgcagttgagcagcaacagctgccgcaagtggcctggctggcggaacatctggcggcacaactggaagccatcgcgcgtgaagcctccgcctggtcattgcgcgagtgggacagtgcgccaccgaaaatttcccgctggcagcgtaaacgtattcagcatcaggattttgagcggcggctacgtgagatggttgccgaacgcagagcccgcctggcgcgggtgaccgatctcgtggaacagcaaacgctgcatcgtgaagtggaagcctatgaagcgcgcctggcacgctgccgccatgcgctggaaaaaatcgaaaacaggctagcgcgcttaacccgctag

SEQ ID NO: 471204 - DNA, 162 bp, Shigella flexneri
atgtcacttgaaaatgcccctgacgatgtcaaactggctgtcgatttgattgtgctgctggaggaaaatcagatccctgccagtaccgtgctgcgcgcgctggatattgtaaagcgtgattatgaaaagaaattaacgcacgatgatgaggcggaaaagtga

SEQ ID NO: 471205 - DNA, 3363 bp, Shigella flexneri
atgactatgttccagtattacaaacgatcacggcattttgttttttcagcatttattgcttttgtttttgtcttgttatgccagaacacggcgtttgcgcgggcgtcatcgaatggtgatctgccgacaaaagcggacctgcaggcgcaacttgactcactaaataaacaaaaagatctttctgctcaggacaaactggtgcagcaggatctgacagatacattagccaccctcgataaaatcgatcgcataaaagaagagacagttcagctacggcaaaaagtcgctgaagcgccggaaaaaatgcgccaggcgaccgcggcgttaacagcacttagcgatgtcgataacgacgaagaaacgcgcaaaattctgagtacgctttcgttgcgccagctggaaactcgcgttgcccaggcgctggacgatttgcaaaacgcacaaaacgatctggcgtcttataacagccagctggtttcgttacagacgcagcccgaacgcgtgcaaaatgcgatgtataacgcttcgcagcagctgcaacaaattcgcagtcgtctggatgggactgatgtcggcgagactgccttacgtcccagccagaaagtgttaatgcaggctcagcaggcgttgctgaatgcggagattgaccagcagcgtaaaagcctggaagggaacaccgtcttgcaggataccttgcaaaagcaacgtgattacgtgacggcgaacagcgcccgtctggagcaccagttgcagctgttgcaagaagcggtaaacagcaagcgcctgactttaactgaaaaaacggcgcaggaagccgtctccccggatgaagccgcgcgtattcaggctaatccgctggtgaaacaggaactggaaattaaccagcagttaagtcagcgtctgattaccgcgactgaaaacggtaatcagttgatgcagcaaaacattaaagtcaaaaactggctggagcgggcgctgcaatcggaacgcaatattaaagagcagattgccgtcctgaagggcagcctgctgttgtctcgtatcctttaccagcaacaacaaacgctgccctcggcggatgaactggaaaacatgaccaaccgcatcgcggatttgcgtctcgaacagtttgaagttaaccagcagcgtgatgcactcttccagagcgatgcgttcgtcaacaaactggaagaaggtcacaccaacgaagtcaacagcgaagttcacgatgcgttattgcaagtggttgatatgcgtcgcgaattgctggatcaactcaacaaacagttgggtaaccagctgatgatggccattaacctgcaaatcaaccagcagcagttaatgagcgtatcgaaaaacctgaaatccatcctgactcagcaaatcttttgggtgaacagtaaccgtccaatggactgggactggatcaaagcgttcccgcaaagcctgaaagatgaatttaagtcgatgaaaatcacggtgaactgggaaaaagcctggcctgccgtttttatcgctttcctcgccggtttgccgctgctgttgattgccgggctgatccactggcgtctgggctggctgaaagcgtatcaacagaaactggcttccgctgtgggttccctgcgtaacgatagccagctcaacacaccaaaagcgatccttatcgacctgatccgcgcgctgccggtgtgcctgattattctcgcggttggcctgattctgttgaccatgcagctcaacatcagcgaactgctatggtcgttcagtaaaaaactggcgattttctggctggtgtttggcctgtgctggaaggtactggagaaaaatggcgttgccgtgcgtcacttcggcatgccggagcagcagaccagccactggcgtcggcaaattgtccgcatcagtctcgcgttgctgcctatccatttctggtctgtggtggcagaactttccccgctgcatctgatggatgatgtgctggggcaggcgatgattttcttcaacctgctgctgattgccttcctggtatggccaatgtgccgcgaaagctggcgtgataaagagtcgcacaccatgcgactagtcaccattaccgtgctgtcgattatcccgattgcattgatggtgctgactgccacgggttatttctacaccacgctgcgcctctccgggcgttggattgaaaccgtttatctggtgatcatctggaacttgctctaccagacggtattgcgcggcttaagcgtagcggcgcggcgtatcgcctggcgtcgtgcgctggcgcgtcggcagaatctggtgaaagagggcgcagaaggtgccgaaccgccggaagaacccaccattgcactggagcaagttaaccagcagacgctgcgtattaccatgttgctgatgtttgcgctgttcggtgtcatgttctgggcaatttggtccgatttgatcaccgtgttcagctatctcgacagcatcacgctctggcattacaacggcactgaagctggcgctgcggtggtgaaaaacgtcaccatgggcagtctgttgtttgcgattatcgcctcaatggtggcctgggcgttgattcgcaacctgcctggtttactggaagtgctggtgctctcgcgactgaatatgcgccagggcgcgtcgtatgccattactaccatccttaactacatcattattgccgttggtgcgatgacggtgttcggatcgctgggcgtctcttgggataaactccagtggctggccgcagcattatccgtaggtcttggttttggtttacaagaaattttcggtaacttcgtctccggtttgatcattctgttcgaacgtccggtgcgtattggcgatacggtaaccattggtagcttctcggggacggtaagtaagatccgtattcgtgcgacaacgattaccgatttcgatcgcaaagaagtgatcatcccgaacaaagcgtttgttaccgagcgtctgatcaactggtcgttgactgacactactacgcgtctggtgatccgtctcggcgtggcctatggctccgatctggaaaaagtgcgtaaagtgttactgaaggcggcgactgagcacccaagggtgatgcacgaaccaatgccggaagtcttctttacggcatttggtgccagcacgttggatcatgagctgcgtctgtatgtgcgtgaactgcgtgaccgtagccgtactgtcgatgagctgaaccgtactatcgatcagctgtgccgtgaaaacgacatcaacattgcctttaaccagcttgaagtgcatctgcacaacgagaagggcgatgaggtgacggaagtaaaacgcgactacaaaggcgacgatccgacaccagcggttgggtaa

SEQ ID NO: 471206 - DNA, 648 bp, Shigella flexneri
atggcacgaaaaaccaaacaagaagcgcaagaaacgcgccaacacatcctcgatgtggctctacgtcttttctcacagcagggggtatcatccacctcgctgggcgagattgcaaaagcagctggcgttacgcgcggtgcaatctactggcattttaaagacaagtcggatttgttcagtgagatctgggaactgtcagaatccaatattggtgaactagagcttgagtatcaggcaaaattccctggcgatccactctcagtattaagagagatattaattcatgttcttgaatccacggtgacagaagaacgacgtcgattattgatggagattatattccacaaatgcgaatttgtcggagaaatggctgttgtgcaacaggcacaacgtaatctctgtctggaaagttatgaccgtatagaacaaacgttaaaacattgtattgaagcgaaaatgttgcctgcggatttaatgacgcgtcgggcagcaattattatgcgcggctatatttccggcctgatggaaaactggctctttgccccgcaatcttttgatcttaaaaaagaagcccgcgattacgtcgccatcttactggagatgtatctcctgtgccccacgcttcgtaatcctgccactaacgaataa

SEQ ID NO: 471207 - DNA, 1194 bp, Shigella flexneri
atgaacaaaaacagagggtttacgcctctggcggtcgttctgatgctctcaggcagcttagccctaacaggatgtgacgacaaacaggcccaacaaggtggccagcagatgcccgccgttggcgtagtaacagtcaaaactgaacctctgcagatcacaaccgagcttccgggtcgcaccagtgcctaccggatcgcagaagttcgtcctcaagttagcgggattatcctgaagcgtaatttcaaagaaggtagcgacatcgaagctggtgtctctctctatcagattgatcctgcgacctatcaggcgacatacgacagtgcgaaaggtgatctggcgaaagcccaggctgcagccaatatcgcgcaattgacggtgaatcgttatcagaaactgctcggtactcagtacatcagtaagcaagggtacgatcaggctctggctgatgcgcaacaggcgaatgctgcggtaactgcggcgaaagctgccgttgaaactgcgcggatcaatctggcttacaccaaagtcacctctccgattagcggtcgcattggtaagtcgaacgtgacggaaggcgcattggtacagaacggtcaggcgactgcgctggcaaccgtgcagcaacttgatccgatctacgttgatgtgacccagtccagcaacgacttccttcgcctgaaacaggaactggcgaatggcacgctgaaacaagagaacggcaaagccaaagtgtcgctgatcaccagtgacggcattaagttcccgcaggacggtacgctggaattctctgacgttaccgttgatcagaccactgggtctatcaccctacgcgctatcttcccgaacccggatcacactctgctgccgggtatgttcgtgcgcgcacgtctggaagaagggcttaatccaaacgctattttagtcccgcaacagggcgtaacccgtacgccgcgtggtgatgccaccgtactggtagttggcgcggatgacaaagtggaaacccgtccgatcgttgcaagccaggctattggcgataagtggctggtgacagaaggtctgaaagcaggcgatcgcgtagtaataagtgggctgcagaaagtgcgtcctggtgtccaggtaaaagcacaagaagttaccgctgataataaccagcaagccgcaagcggtgctcagcctgaacagtccaagtcttaa

SEQ ID NO: 471208 - DNA, 3150 bp, Shigella flexneri
atgcctaatttctttatcgatcgcccgatttttgcgtgggtgatcgccattatcatcatgttggcaggggggctggcgatcctcaaactgccggtggcgcaatatcctacgattgcaccgccggcagtaacgatctccgcctcctaccccggcgctgatgcgaaaacagtgcaggacacggtgacacaggttatcgaacagaatatgaacggtatcgataacctgatgtacatgtcctctaacagtgactccacgggtaccgtgcagatcaccctgacctttgagtctggtactgatgcggatatcgcgcaggttcaggtgcagaacaaactgcagctggcgatgccgttgctgccgcaagaagttcagcagcaaggggtgagcgttgagaaatcatccagcagcttcctgatggttgtcggcgttatcaacaccgatggcaccatgacgcaggaggatatctctgactacgtagcggcgaatatgaaagatgccatcagccgtacgtcgggcgtgggtgatgttcagttgttcggttcacagtacgcgatgcgtatctggatgaacccgaatgagctgaacaaattccagctaacgccggttgatgtcattaccgccatcaaagcgcagaacgcccaggttgcggcgggtcagctcggtggtacgccgccggtgaaaggccaacagcttaacgcctctattattgctcagacgcgtctgacctctactgaagagttcggcaaaatcctgctgaaagtgaatcaggatggttcccgcgtactgctgcgtgatgtggcgaagattgagctgggtggtgagaactacgacatcatcgcagagtttaacggccaacctgcttccggtctggggatcaagctggcgaccggtgcaaacgcgctggataccgctgcggcaatccgtgctgaactggcgaagatggaaccgttcttcccgtcgggtctgaaaattgtttacccgtacgacaccacgccgttcgtgaaaatctctattcacgaagtggttaaaacgctggtcgaagcgatcatcctcgtgttcctggttatgtatctgttcctgcagaacttccgcgcgacgttgattccgaccattgccgtaccggtggtattgctcgggacctttgccgtccttgccgcctttggcttctcgataaacacgctaacaatgttcgggatggtgctcgccatcggcttgttggtggatgacgctatcgttgtggtagaaaacgtggagcgtgttatggcggaagaaggtttgccgccaaaagaagctacccgtaagtcgatggggcagattcagggcgctctggtcggtatcgcgatggtactgtcggcggtattcgtaccgatggccttctttggcggttctactggtgctatctatcgtcagttctctattaccattgtttcagcaatggcgctgtcggtactggtagcgttgatcctgactccggctctttgtgccaccatgctgaaaccgattgccaaaggcgatcacggggaaggtaaaaaaggcttcttcggctggttgaaccgcatgttcgagaagagcacgcaccactacaccgacagcgtaggcggtattctgcgcagtacggggcgttacctagtgctgtatctgatcatcgtggtcggcatggcctatctgttcgtgcgtctgccaagctccttcttgccagatgaggaccagggcgtatttatgaccatggttcagctgccagcaggtgcaacgcaggaacgtacgcagaaagtgctcaatgaggtaacgcattactatctgaccaaagaaaagaacaacgttgagtcggtgttcgccgttaacggcttcggctttgcgggacgtggtcagaataccggtattgcgttcgtttccttgaaggactgggccgatcgtccgggcgaagaaaacaaagttgaagcgattaccatgcgtgcaacacgcgctttctcgcaaatcaaagatgcgatggttttcgcctttaacctgcccgcaatcgtggaactgggtactgcaaccggctttgactttgagctgattgaccaggctggccttggtcacgaaaaactgactcaggcgcgtaaccagctgcttgcagaagcagcgaagcaccctgatatgctgaccagcgtacgtccaaacggtctggaagataccccgcagtttaagattgatatcgaccaggaaaaagcgcaggcgctgggtgtttctatcaacgacattaacaccactctgggcgctgcatggggcggtagctatgtgaacgactttatcgaccgcggtcgtgtgaagaaagtttacgtcatgtcagaagcgaaataccgtatgctgccggatgatatcggcgactggtatgttcgtgctgctgatggtcagatggtgccattctcggcgttctcctcttctcgttgggagtacggttcgccgcgtctggaacgttacaacggcctgccatccatggaaatcttaggccaggcggcaccgggtaaaagtaccggtgaagcaatggagctgatggaacaactggcgagcaaactgcctaccggtgttggctatgactggacggggatgtcctatcaggaacgtctctccggcaaccaggcaccttcactgtacgcgatttcgttgattgtcgtattcctgtgtctggcggcgctgtacgagagctggtcgactccgttctccgttatgctggtcgttccgctgggggttatcggtgcgttgctggctgccaccttccgtggcctgaccaatgacgtttacttccaagtaggactgctcacaaccattgggttgtcggcgaagaacgcgatacttatcgtcgaattcgccaaagacttgatggataaagaaggtaaaggtctgattgaagcgacgcttgatgcggtgcggatgcgtttacgtccgatcctgatgacctcgctggcgtttatcctcggcgttatgccgctggttatcagtactggtgctggttccggcgcgcagaacgcagtaggtaccggtgtaatgggcgggatggtgaccgcaacggtactggcaatcttcttcgttccggtattctttgtggtggttcgccgccgctttagccgcaagaatgaagatatcgagcacagccatactgtcgatcatcattga

SEQ ID NO: 471209 - DNA, 375 bp, Shigella flexneri
atggatgaatactcacccaaaagacatgatatcgcacagcttaagtttctctgtgaaaccctgtatcatgactgtcttgcaaaccttgaagaaagcaatcatggttgggttaacgacccaacctcggcgatcaacctccagttgaatgaactgattgagcatattgcgaccttcgcacttaattacaaaattaagtataatgaagacaataagctcattgagcagatcgacgaatatctggatgacacctttatgttgttcagcagttatggtattaatatgcaggctcttcagaaatggcggaagtcaggtaatcgactattccgttgttttgtcaacgcgacgaaagagaatcctgcgagtttatcttgttag

SEQ ID NO: 471210 - DNA, 219 bp, Shigella flexneri
atgtccgaaaaacctttaacaaaaaccgattatttaatgcgtttacgtcgttgccagacaattgacacgctggagcgtgttatcgagaaaaataaatacgaattatcagataatgaactggcggtattttactcagccgcagatcaccgcctcgccgaattgaccatgaataaactgtacgacaagatcccttcctcagtatggaaatttattcgctaa

SEQ ID NO: 471211 - DNA, 552 bp, Shigella flexneri
atgagcacagaaaaagaaaagatgattgctggtgagttgtatcgctcggcagatgagacgttatctcgcgatcgcctgcgcgctcgtcagcttattcaccgatacaatcattccctggcggaagagcacacattacgccagcaaattctcgctaatttattcggtcaggtgacagaggcttatattgagccaacgtttcgctgtgattatggctataacatttttctcggcaataattttttcgccaacttcgattgcgtgatgcttgatgtctgccctattcgcatcggtgataactgtatgttggcaccaggcgttcatatctacacggcaacacatcccatcgaccctgtagcacgtaatagcggtgctgaactggggaaacccgtcaccatcggtaataacgtctggattggcggacgcgcggtcattaaccctggtgtgaccattggtgataacgtcgtggtagcttcaggtgcagttgtcacaaaaggtgtcccggacaacgttgtcgtgggcggtaatccagccagaataattaaaaaattgtaa

SEQ ID NO: 471212 - DNA, 471 bp, Shigella flexneri; identical to SEQ ID NO: 458773

SEQ ID NO: 471213 - DNA, 1551 bp, Shigella flexneri
gtgagaacacgacatctggtcggccttatttcgggagtactgattctttcagtattgctgcctgtcggcttaagcatctggctggcccatcagcaggtagaaacatcgtttattgaagagctggatacctattcctcccacgtcgctattcgagccaataaggtggcgacacaagggaaagatgcgctgcaggagctggaaagatggcaaggcgctgcctgtagcgaagcccatctcatggaaatgcgtcgggtatcttacagttatcgctatattcaggaagtggtttatatcgataacaacgttccccagtgttcgtctctggagcatgaaagtccgcccgatacctttcccgagctaggtaaaatttcgaaagatggttatcgtgtctggttaacatcgcataacgatttaggcattatccgttacatggtcgccatgggaacggcacattatgtcgtcatgatcgaccccgcttcctttattgatgtcattccctatagctcatggcaaattgatgccgccattattggcaatgcccataacgttgtcataaccagcagcgatgaaattgctcagggaattattaccaggctacaaaaaacacccggtgagcatatcgaaaataatgggatcatttacgatatactgcccttcctggagatgaatatttcgatcatcacctgggcttcaacgaaaatgttgcagaaaggctggcatcggcaagtctttatttggttaccgctcgggttggtgattggcctgctggcagcgatgtttgtgctgcgtattttgcgccgtatccaatcaccgcatcatcggctgcaggatgctatcgaaaatcgtgatatttgcgtgcactatcagccgattgtctccttagccaatggcaaaattgtcggtgctgaggcactggcgcgctggccgcagacagacggtagttggttgtcaccagatagttttattccgctggcacagcaaacgggcctttctgagccattgacgctactgattataagaagcgtctttgaagatatgggcgactgcttgcgtcagcatccacagcagcatatttcgatcaatcttgaatccaccgtgctcacctcggaaaaaatcccgcaattgctgcgtgaaatgatcaatcactatcaggttaatcccagacagatcgcgcttgaactcactgaacgcgagtttgccgatccgaaaaccagcgccccgataatttctcgctaccgggaggcgggccatgaaatttatcttgatgattttggtacggggtattcaagtttaagttatttacaggatctggatgtcgacattctgaagatcgataaatctttcgttgatgcgctggaatataaaaatgtcacgccgcatatcatcgaaatggcaaaaacactgaaactgaaaatggtagcggagggaatcgaaaccagtaaacaagaagagtggctacgccagcatggcgtgcactacggtcagggctggctctacagcaaggcattaccgaaagaagatttcttacgctgggccgagcaacatttgtga

SEQ ID NO: 471214 - DNA, 354 bp, Shigella flexneri; identical to SEQ ID NO: 41057

SEQ ID NO: 471215 - DNA, 312 bp, Shigella flexneri
atggaaaaagaagattcatttccccaacgcgtctggcaaatcgtcgccgctattcccgaaggctatgtcaccacttacggtgatgtggcgaaactggcgggatcgccccgcgccgcgcgccaggtgggcggtgtgttaaagcgtctccctgaaggcagcaccttaccctggcaccgggtggttaatcgccatggcacaatttcgctaaccgggccggatttacagcgtcagcgacaggcattactggcagaaggtgtgatggtatcgggaagcgggcaaatcgacttgcagcgttatcgctggaactactaa

SEQ ID NO: 471216 - DNA, 900 bp, Shigella flexneri
atgtctcatatcaattacaaccacttgtattacttctggcatgtctataaagaaggttccgtggttggcgcagcggaggcgctttatttaactccacaaaccattaccggacagattcgagcgctggaagagcgcctgcaaggcaaattatttaaacgcaagggacgtggtctcgaacccagcgagctgggagaactggtctatcgctatgccgataaaatgttcaccttaagccaggaaatgctggatattgtgaactatcgcaaagaatccaatttattgtttgacgttggcgtgactgatgcactttccaaacgcctggtcagtagcgtacttaacgccgcagtggtagaaggcgagcccattcatcttcgctgcttcgaatccacccacgaaatgctgctggagcaattaagtcagcataaactggatatgatcatttctgactgtccgatagactctacgcagcaggaaggcctgttctccgtgagaattggcgaatgtggcgtgagtttctggtgtacaaatccaccaccagaaaaaccgttcccggcttgtctggaagaacggcgacttttgattcctgggcgacgttcaatgttagggcgcaaattgcttaactggtttaactcccagggattaaacgtagaaatcctcggcgagtttgatgatgccgctttgatgaaagcttttggtgcgatgcacaatgcaatcttcgttgccccaacgctttatgcatatgacttttatgccgataaaactgtcgtagaaattggtcgcgtcgagaatgtgatggaagagtaccatgctatttttgctgagcggatgattcagcacccggcggtacagcgaatctgcaatacggattattctgcgctttttagtccagcggtgcgttaa

SEQ ID NO: 471217 - DNA, 1167 bp, Shigella flexneri
gtgaaacatctgcatcgattctttagcagtgatgcctcgggaggcattattcttatcattgccgctatcctggcgatgattatggccaacagcggcgcaaccagtggatggtatcacgactttctggagacgccggttcagctccgggttggttcactcgaaatcaacaaaaacatgctgttatggataaatgacgcgctgatggcggtatttttcctgttagtcggtctggaagttaaacgtgaactgatgcaaggatcgctagccagcttacgccaggccgcatttccagttatcgccgctattggtgggatgattgtgccggcattactctatctggcttttaactatgccgatccgattacccgcgaagggtgggcgatcccggcggctactgacattgcttttgcacttggtgtactggcgctgttgggaagtcgtgttccgttagtgctgaagatctttttgatggctctggctattatcgacgatcttggggccatcattatcatcgcattgttctacactaatgacttatcgatggcctctcttggcgtcgcggctgtagcaattgcggtactcgcggtattgaatctgtgtggtgtacgccgcacgggcgtctatattcttgttggcgtggtgttgtggactgcggtgttgaaatcgggggttcacgcaactctggcgggggtaattgtcggcttctttattcctttgaaagagaagcatgggcgttctccagcgaagcgactggagcatgtgttgcacccgtgggtggcgtatctgattttgccgctgtttgcatttgctaatgctggcgtttcactgcaaggcgtcacgctggatggcttgacctccattctgccattggggatcatcgctggcttgctgattggcaaaccgctggggattagtctgttctgctggttggcgctgcgtttgaaactggcgcatctgcctgagggaacgacttatcagcaaattatggtggtggggatcctgtgcggtatcggttttactatgtctatctttattgccagcctggcctttggtagcgtagatccagaactgattaactgggcgaaactcggtatcctggtcggttctatctcttcggcggtaattggatacagctggttacgcgttcgtttgcgtccatcagtttga

SEQ ID NO: 471218 - DNA, 210 bp, Shigella flexneri; identical to SEQ ID NO: 263769

SEQ ID NO: 471219 - DNA, 1131 bp, Shigella flexneri
atggctaagcaagattattacgagattttaggcgtttccaaaacagcggaagagcgtgaaatcagaaaggcctacaaacgcctggccatgaaataccacccggaccgtaaccagggtgacaaagaggccgaggcgaaatttaaagagatcaaggaagcttatgaagttctgaccgactcgcaaaaacgtgcggcatacgatcagtatggtcatgctgcgtttgagcaaggaggcatgggcggcggtggttttggcggcggcgcagacttcagcgatatttttggtgacgttttcggcgatatttttggcggcggacgtggtcgtcaacgtgcggcgcgcggtgctgatttacgctataacatggagctcaccctcgaagaagctgtacgtggcgtgaccaaagagatccgcattccgactctggaagagtgtgacgtttgccacggtagcggtgcaaaaccaggtacacagccgcagacctgtccgacctgtcatggttctggtcaggtgcagatgcgccagggattcttcgctgtacagcagacctgtccacactgtcagggccgcggtacgctgatcaaagatccgtgcaacaaatgtcatggtcatggtcgtgttgagcgcagcaaaacgctgtccgttaaaatcccggcaggggtggacactggagaccgcatccgtcttgcgggcgaaggtgaagcgggcgagcatggcgcaccggcaggcgatctgtacgttcaggttcaggttaaacagcacccgattttcgagcgtgaaggcaacaacctgtattgcgaagtcccgatcaacttcgctatggcggcgctgggtggcgaaatcgaagtaccgacccttgatggtcgcgtcaaactgaaagtgcctggcgaaacccagaccggtaagctattccgtatgcgcggtaaaggcgtcaagtctgtccgcggtggcgcacagggtgatttgctgtgccgcgttgtcgtcgaaacaccggtaggcctgaacgaaaagcagaaacagctgctgcaagagctgcaagaaagcttcggtggcccaaccggcgagcacaacagcccgcgctcaaagagcttctttgatggtgtgaagaagttttttgacgacctgacccgctaa

SEQ ID NO: 471220 - DNA, 1917 bp, Shigella flexneri
atgggtaaaataattggtatcgacctgggtactaccaactcttgtgtagcgattatggatggcaccattcctcgcgtgctggagaacgccgaaggcgatcgcaccacgccttctatcattgcctatacccaggatggtgaaactctggttggtcagccggctaaacgtcaggcagtgacgaacccgcaaaacaccctgtttgcgattaaacgcctgattggccgccgcttccaggacgaagaagtacagcgtgatgtttccatcatgccgttcaaaattattgctgctgataacggcgacgcatgggtcgaagttaaaggccagaaaatggcaccgccgcagatttctgctgaagtgctgaaaaaaatgaagaaaaccgctgaagattacctgggtgaaccggtaactgaagctgttatcaccgtaccggcatactttaacgatgctcagcgtcaggcaaccaaagacgcaggccgtatcgctggtctggaagtaaaacgtatcatcaacgaaccgaccgcagctgcgctggcttacggtctggacaaaggcactggcaaccgtactatcgcggtttatgacctggggggtggtactttcgatatttctattatcgaaatcgacgaagttgacggcgaaaaaaccttcgaagttctggcaaccaacggtgatacccacctgggtggtgaagacttcgacagccgtctgatcaactatctggttgaagaattcaagaaagatcagggcattgacctgcgcaacgatccgctggcaatgcagcgcctgaaagaagcggcagaaaaagcgaaaatcgaactgtcttccgctcagcagaccgacgttaacctgccatacatcactgcagacgcgaccggtccgaaacacatgaacatcaaagtgactcgtgcgaaactggaaagcctggttgaagatctggtaaaccgttccattgagccgctgaaagttgcactgcaggatgctggcctgtccgtatctgatatcgacgacgttatcctcgttggtggtcagactcgtatgccaatggttcagaagaaagttgctgagttctttggtaaagagccgcgtaaagacgttaacccggacgaagctgtagcaatcggtgctgctgttcagggtggtgttctgactggcgacgtaaaagacgtactgctgctggacgttaccccgctgtctctgggtatcgaaaccatgggcggtgtgatgacgacgctgatcgcgaaaaacaccactatcccgaccaagcacagccaggtgttctctaccgctgaagacaaccagtctgcggtaaccatccatgtgctgcagggtgaacgtaaacgtgcggctgataacaaatctctgggtcagttcaacctagatggtatcaacccggcaccgcgcggcatgccgcagatcgaagttaccttcgatatcgatgctgacggtatcctgcacgtttccgcgaaagataaaaacagcggtaaagagcagaagatcaccatcaaggcttcttctggtctgaacgaagatgaaatccagaaaatggtacgcgacgcagaagctaacgccgaagctgaccgtaagtttgaagagctggtacagactcgcaaccagggcgaccatctgctgcacagcacccgtaagcaggttgaagaagcaggcgacaaactgccggctgacgacaaaactgctatcgagtctgcgctgactgcactggaaactgctctgaaaggtgaagacaaagccgctatcgaagcgaaaatgcaggaactggcacaggtttcccagaaactgatggaaatcgcccagcagcaacatgcccagcagcagactgccggtgctgatgcttctgcaaacaacgcgaaagatgacgatgttgtcgacgctgaatttgaagaagtcaaagacaaaaaataa

SEQ ID NO: 471221 - DNA, 405 bp, Shigella flexneri
atgaaatccgtttttacgatttccgccagcctggcgattagcctgatgctgtgctgcacggcgcaggcaaacgaccataaactcctcggcgtcattgcaatgccgcgtaacgaaaccaacgatctggcgctgaaacttcctgtttgtcgcattgtgaaacgcatacaactctctgccgaccatggcgatttacagttaagtggtgcatcggtttatttcaaagccgcccgtagcgccagtcagagcctgaatattccttcagaaataaaagaagggcaaaccactgactggatcaacattaacagcgataacgacaataaacgctgcgtctcaaaaatcaccttttccggtcatacggtgaactcatcggatatggccacgctgaaaattatcggcgacgactaa

SEQ ID NO: 471222 - DNA, 714 bp, Shigella flexneri
atgaatgttaattacctgaatgattcagatctggattttcttcagcattgtagtgaggaacagttggcaaatttcgcccgattgctcacccataatgaaaaaggcaaaactcgcctctccagcatactgatgcgcaacgaactgtttaaatcgatggaagggcatcccgagcaacatcgccgcaactggcagctgattgccggagaattacagcattttggtggcgatagtatcgccaacaaactgcgcggacacggtaaattgtatcgggccattttgctcgatgtttcaaagcgattgaagctgaaagccgacaaagagatgtctacgtttgaaattgagcaacagttactggaacaatttctgcgtaatacctggaagaaaatggacgaggaacataagcaggagtttctgcacgcggtcgatgccagggtgaatgagctggaagagctgctgccgctgctgatgaaagacaaattattggcaaaaggtgtgtcgcatttgctttccagccaactgacccgcattttacgcacccacgcagcaatgagcgtacttgggcatggtttgctgcgcggcgcggggctgggaggccctgtgggcgcagcattaaatggggttaaagcggtcagcggcagcacctatcgcgtgacgattccagccgtactgcaaatcgcctgcctgcgccggatggttagcgccactcaggtctga

SEQ ID NO: 471223 - DNA, 567 bp, Shigella flexneri
atgggcaacactaagttggctaatccggcaccgctgggcctgatgggcttcggcatgaccaccattctgcttaacctgcacaacgtgggttatttcgctctggacggtattattcttgccatgggcattttctacggcggcatcgcgcaaatttttgctggtctgctggagtacaaaaaaggcaacactttcggtttaaccgcattcacctcttacggttctttctggctgacgctggttgcgattctgctgatgccgaaactgggtctgaccgatgcgccaaatgcacagttccttggtgtctacctgggtctgtggggcgtatttacgctgtttatgttcttcggcactctgaaaggcgcgcgcgtcctgcaattcgttttctttagcctgaccgtgctgtttgccctgctggcgatcggtaacattgccggtaatgccgcgatcatccactttgccggctggattggtctgatctgcggtgccagcgcaatctatctggcgatgggtgaagtgctgaacgagcagtttggtcgcaccgttctgccgattggtgaatcccactaa

SEQ ID NO: 471224 - DNA, 588 bp, Shigella flexneri
atgaatactttacgtattggcttagtttccatctctgatcgcgcatccagcggcgtttatcaggataaaggcattccagcgctggaagaatggctgacatcggcgctaaccacgccgtttgaactggaaacccgcttaatccccgatgagcaggcgatcatcgagcaaacgttgtgtgagctggtggatgaaatgagttgccatctggtgctcaccacgggcggaactggcccggcgcgtcgtgacgtaacgcccgatgcgacgctggcagtagcggaccgcgagatgcctggctttggtgaacagatgcgccagatcagcctgcattttgtaccaactgcgatcctttcgcgtcaggtgggcgtgattcgcaaacaggcgctgatccttaacttacccggtcagccgaagtctattaaagagacgctggaaggtgtgaaggacgctgagggtaacgttgtggtgcatggtatttttgccagcgtaccgtactgcattcagttgctggaagggccatacgttgaaacggcaccagaagtggttgctgcattcagaccgaagagtgcaagacgcgacgttagcgaataa

SEQ ID NO: 471225 - DNA, 954 bp, Shigella flexneri
atgacggacaaattgacctcccttcgtcagtacaccaccgtagtggccgacactggggacatcgcggcaatgaagctgtatcaaccgcaggatgccacaaccaacccttctctcattcttaacgcagcgcagattccggaataccgtaagttgattgatgatgctgtcgcctgggcgaaacagcagagcaacgatcgcgcgcagcagatcgtggacgcgaccgacaaactggcagtaaatattggtctggaaatcctgaaactggttccgggccgtatctcaactgaagttgatgcgcgtctttcctatgacaccgaagcgtcaattgcgaaagcaaaacgcctgatcaaactctacaacgatgcaggtattagcaacgatcgtattctgatcaaactggcttctacctggcagggtatccgtgctgcagaacagctggaaaaagaaggtatcaactgtaacctgaccctgctgttctccttcgctcaggctcgtgcttgtgcggaggcgggcgtgttcctgatctcgccgtttgttggccgtattcttgactggtacaaagcgaataccgataagaaagagtacgctccggcagaagatccgggcgtggtttctgtatctgaaatctaccagtactacaaagagcacggttatgaaaccgtggttatgggcgcaagcttccgtaacatcggcgaaattctggaactggcaggctgtgaccgtctgaccatcgcaccggcactgctgaaagagctggcggagagcgaaggggctatcgaacgtaaactgtcttacaccggcgaagtgaaagcgcgtccggcgcgtatcactgagtccgagttcctgtggcagcacaaccaggatccaatggcagtagataaactggcggaaggtatccgtaagtttgctattgaccaggaaaaactggaaaaaatgatcggcgatctgctgtaa

SEQ ID NO: 471226 - DNA, 1041 bp, Shigella flexneri
atgccagattttttctcctttattaacagcgtcctttggggatcggtaatgatttacctgctcttcggcgcaggttgttggttcacttttcgcaccggatttgtgcagtttcgctacatccgccagtttggcaaaagtcttaaaaatagcattcatccacagccaggcggtttaacctcatttcagtcattgtgtaccagtcttgcggcgcgcgtgggtagcggcaacctggccggcgttgcgctggcaattaccgccggtggaccaggtgccgtcttttggatgtgggttgctgcgtttatcggcatggcgacctcgtttgccgaatgttccctagcacaactttataaagaacgtgacgtcaatgggcagtttcgtggcggaccggcatggtatatggcgcgcgggctggggatgcgctggatgggcgttctgttcgccgtctttttgctcatcgcctacggcataattttcagcggagttcaggcgaacgccgttgcccgagccctgagtttttcttttgattttcctccgctggtgacgggcattattctcgctgtctttgctctgctggcaatcactcgcggtcttcatggcgtcgcccggctcatgcaggggtttgtcccgttgatggcgataatctgggtactgaccagcctggtgatttgcgtaataaatatcgggcaacttccccacgtcatttggtctatttttgagagtgcttttggctggcaggaagcggcaggcggcgcggcgggatataccttaagccaggcgattactaacggttttcagcgcagtatgttttccaatgaggtgggaatgggatcgacgccaaacgcggcagcggcagctgcatcctggcctccgcatccggcagcacaagggattgtccagatgattggcatttttatcgacaccctggtcatctgtacggcaagcgccatgctgatattactggcgggtaacggcacaacctacatgccgctggaaggtattcagcttatccagaaggcgatgcgggtgctaatgggttcctag

SEQ ID NO: 471227 - DNA, 369 bp, Shigella flexneri
gtggttattctgtttgccttcagctccatcgttgccaactacatttatgccgaaaacaatctcttctttttacgcctgaacaaccctaaagcgatctggtgtttgcggatctgcaccttcgcaacggtcatcggcggcaccttgctaagccttccgctgatgtggcaactggcagatatcataatggcctgcatggctattaccaatttgaccgccattttactgctctcgcctgtggttcataccattgccagtgattatctacgccagcgtaaactcggcgtgcgcccggtgtttgatccgttgcgttatccggatatcggtcgccagctttctccggacgcgtgggatgatgtttcgcaggagtaa

SEQ ID NO: 471228 - DNA, 777 bp, Shigella flexneri
atgctgattcttatttcacctgcgaaaacgcttgattaccaaagcccgttgaccaccacgcgctatacgctgccggagctgttagacaattcccagcagttgatccatgaagcgcggaaactgacgcctccgcagattagcacgctgatgcgcatcagcgacaaactggcgggtatcaacgccgctcgctttcatgactggcagccagatttcacgccggcgaatgcccgccaggcgattctggcgtttaaaggtgatgtctacaccggcttgcaggccgaaaccttcagcgaagacgatttcgattttgcccaacagcatttgcgaatgctttccggcttgtatggcgtactgcgcccgctcgatttaatgcagccttatcgtctggaaatggggatccgtcttgagaatgcccgagggaaagatctgtatcaattctggggagatatcatcaccaacaagctgaacgaggcgctcgcagcacaaggcgataatgtggtgattaatctggcgtcagatgagtattttaaatcggtgaagccgaagaaattgaatgccgagattatcaagccggtgttcctcgatgagaagaacggcaaatttaagatcatcagcttctacgctaagaaagcacgcggtctgatgagtcgtttcattattgaaaatcggctgaccaaaccagagcaactgactggttttaatagcgaaggttacttctttgatgaagattcctccagcaatggcgaactggtgtttaaacgctacgagcagcgttaa

SEQ ID NO: 471229 - DNA, 297 bp, Shigella flexneri
gtgaaaaagatgcaatctatcgtactcgcactttccctggttctggtcgctcccatggcagcacaggctgcggaaattacgttagtcccgtcagtaaaattacagataggcgatcgtgataatcgtggctattactgggatggaggtcactggcgcgaccacggctggtggaaacaacattatgaatggcgaggcaatcgctggcacccacacggaccgccgccaccgccgcgccaccataagaaagctcctcatgatcatcacggcggtcatggtccaggcaaacatcaccgctaa

SEQ ID NO: 471230 - DNA, 1287 bp, Shigella flexneri
atgaaactctacaatctgaaagatcacaacgagcaggtcagctttgcgcaagccgtaacccaggggttgggcaaaaatcaggggctgttttttccgcacgacctgccggaattcagcctgactgaaattgatgagatgctgaagctggattttgtcacccgcagtgcgaagatcctctcggcgtttattggtgatgaaatcccacaggaaatcctggaagagcgcgtgcgcgcggcgtttgccttcccggctccggtcgccaatgttgaaagcgatgtcggttgtctggaattgttccacgggccaacgctggcatttaaagatttcggcggtcgctttatggcacaaatgctgacccatattgcggatgataagccagtgaccattctgaccgcgacctccggtgataccggagctgcagtggctcatgctttctacggtttgccgaatgtgaaagtggttatcctctatccacgaggcaaaatcagtccactgcaagaaaaactgttctgtacgttgggcggcaatatcgaaactgttgccatcgacggcgatttcgatgcctgtcaggcgctggtgaagcaggcgtttgatgatgaagaactgaaagtggcgctggggttaaactcggctaactcgattaacatcagccgtttgctggcgcagatttgctactactttgaagctgttgcgcagctgccgcaggaggcgcgcaaccagctggttgtctcggtgccaagcggaaacttcggcgatttgacggcgggtctgctggcgaagtcattcggtctgccggtgaaacgttttattgctgcgaccaacgtgaacgataccgtgccacgtttcctgcacgacggtcagtggtcacccaaagcgactcaggcgacgttatccaacgcgatggacgtgagtcagccgaacaactggccgcgtgtggaagagttgttccgccgcaaaatctggcaactgaaagagctgggttatgcagccgtggatgatgaaaccacgcaacagacaatgcgtgagttaaaagaactgggctacacctcggagccgcacgctgccgtagcgtatcgtgcgctgcgtgaccagttgaatccaggcgaatatggcttgttcctcggcaccgcgcatccggcgaaatttaaagagagcgtggaagcgattctcggtgaaacgttggatctgccaaaagagctggcagaacgtgctgatttacccttgctttcacataatctgcccgccgatttttctgcgttgcgtaaattgatgatgaatcatcagtaa

SEQ ID NO: 471231 - DNA, 933 bp, Shigella flexneri
atggttaaagtttatgccccggcttccagtgccaatatgagcgtcgggtttgatgtgctcggggcggcggtggcacccgttgatggtgcattgctcggagatgtagtcacggttgaggcggcagagacattcagtctcaacaacctcggacgctttgccgataagctgccgtcagaaccacgggaaaatatcgtttatcagtgctgggagcgtttttgccaggagcttggcaagcaaattccagtggcgatgactctggaaaagaatatgccgatcggttcgggcttaggctccagcgcctgttcggtggtcgcggcgctgatggcgatgaatgaacactgcggcaagccgcttaatgacactcgtttgctggctttgatgggcgagctggaaggacgtatctccggcagcattcattacgacaacgtggcaccgtgttttcttggtggtatgcagttgatgatcgaagaaaacgacatcatcagccagcaagtgccagggtttgatgagtggctgtgggtgctggcgtatccgggaattaaagtctcgacggcagaagcccgggctattttaccggcgcagtatcgccgccaggattgcattgcgcacgggcgacatctggctggcttcattcacgcctgctattcccgtcagcctgagcttgccgcgaagctgatgaaagatgttatcgctgaaccctaccgtgaacggttactgcctggcttccggcaggcgcggcaggcggtcgcggaaatcggcgcggtagtgagcggtatctccggctccggcccgaccttgttcgctctatgtgacaagccggataccgcccagcgcgttgccgactggttgggtaagaactacctgcaaaatcaggaaggttttgttcatatttgccggctggatacggcgggcgcacgagtactggaaaactaa

SEQ ID NO: 471232 - DNA, 2463 bp, Shigella flexneri
atgcgagtgttgaagttcggcggtacatcagtggcaaatgcagaacgttttctgcgtgttgccgatattctggaaagcaatgccaggcaggggcaggtggccaccgtcctctctgcccccgccaaaatcaccaaccacctggtggcgatgattgaaaaaaccattagcggccaggatgctttacccaatatcagcgatgccgaacgtatttttgccgaacttttgacgggactcgccgccgcccagccggggttcccgctggcgcaattgaaaactttcgtcgatcaggaatttgcccaaataaaacatgtcctgcatggcattagtttgttggggcagtgcccggatagcatcaacgctgcgctgatttgccgtggcgagaaaatgtcgatcgccattatggccggcgtgttagaagcgcgtggtcacaacgttaccgttatcgatccggtcgaaaaactgctggcagtggggcattacctcgaatctaccgtcgatattgctgagtccacccgccgtattgcggcaagccgcattccggctgatcacatggtgttgatggcaggtttcaccgccggtaatgaaaaaggcgaactggtggtgcttggacgtaacggttccgactactccgcggcggtgctggctgcctgtttacgcgccgattgttgcgagatttggacggacgttgacggggtctatacctgcgacccgcgtcaggtgcccgatgcgaggttgttgaagtcgatgtcctaccaggaagcgatggagctttcctacttcggcgctaaagttcttcacccccgcaccattacccccatcgcccagttccagatcccttgcctgattaaaaataccggaaatcctcaagcaccaggtacgctcattggtgccagccgtgatgaagacgaattaccggtcaagggcatttccaatctgaataacatggcaatgttcagcgtttccggcccggggatgaaagggatggttggcatggcggcgcgcgtctttgctgcaatgtcacgcgcccgtatttccgtggtgctgattacgcaatcatcttccgaatacagtatcagtttctgcgttccacaaagcgactgtgtgcgagctgaacgggcaatgcaggaagagttctacctggaactgaaagaaggcttactggagccgctggcggtgacggaacggctggccattatctcggtggtaggtgatggtatgcgcaccttgcgtgggatctcggcgaaattctttgccgcgctggcccgcgccaatatcaacattgtcgccattgctcagggatcttctgaacgctcaatctctgtcgtggtaaataacgatgatgcgaccactggcgtgcgcgttactcatcagatgctgttcaataccgatcaggttatcgaagtgtttgtgattggcgtcggtggcgttggcggtgcgctgctggagcaactgaagcgtcagcaaagctggctgaagaataaacatatcgacttacgtgtctgcggcgttgccaactcgaaggctctgctcactagtgtgcatggccttaatctggaaaactggcaggaagaacttgcacaagccaaagagccgtttaatctcgggcgcttaattcgcctcgtgaaagaatatcatctgctgaacccggtcattgttgactgcacctccagccaggcagtggcggatcaatatgccgacttcctgcgcgaaggtttccacgttgtcacgccgaacaaaaaggccaacacctcgtcgatggattactatcatcagttgcgttatgcggcggaaaaatcgcggcgtaaattcctctatgacaccaacgttggggctggattaccggttattgagaacctgcaaaatctgctcaatgcaggtgatgaattggtgaagttctccggcattctttcaggttcgctttcttatatcttcggcaagttagacgaaggcatgagtttctccgaggcgaccacgctggcgcgggaaatgggttataccgaaccggacccgcgagatgatctttctggtatggatgtggcgcgtaaactattgattctcgctcgtgaaacgggacgtgaactggagctggcggatattgaaattgaacctgtgctgcccgcagagtttaacgccgagggtgatgttgccgcttttatggcgaatctgtcacagctcgacgatctctttgccgcgcgcgtggcgaaggcccgtgatgaaggaaaagttttgcgctatgttggcaatattgatgaagatggtgtctgccgcgtgaagattgccgaagtggatgggaatgatccgctgttcaaagtgaaaaatggcgaaaacgccctggccttttatagccactattatcagccgctgccgttggtgctgcgcggatatggtgcgggcaatgacgttaccgctgccggtgtctttgccgatctgctacgtaccctctcatggaagttaggagtctga

SEQ ID NO: 471233 - DNA, 687 bp, Shigella flexneri
atgcgtataacgattatcctggtcgcacccgccagagcagaaaatattggggcagcggcgcgggcaatgaaaacgatgggttttagcgaactgcggattgtcgatagtcaggcacacctggagccagccacccgctgggtcgcacatggatctggtgatattattgataatattaaagttttcccgacactggctgaatcgttacacgatgtcgatttcactgtcgccaccactgcgcgtagtcgggcgaaatatcattactacgccacgccagtagaactggtgccgctgttagaggaaaaatcttcatggatgagccatgccgcgctggtgtttggtcgcgaagattccgggctgactaacgaagagttagcgttggctgacgtgcttactggtgtgccgatggtggcggattatccttcgctcaatctggggcaggcggtgatggtctattgctatcaattagcaacattaatacaacaaccggcgaaaagtgacacaacggcagaccaacatcaactgcaagctttacgcgaacgagtcatggcattgctgacgactctggcagtggcagatgacataaaactggtcgactggttacagcaacgcctggggcttttagagcaacgagacacggcaatgttgcaccgtttgctgcatgatattgaaaaaaatatcaccaaataa

SEQ ID NO: 471234 - DNA, 717 bp, Shigella flexneri
atgcagaccccgcacattcttatcgttgaagacgagttggtaacacgcaacacgttgaaaagtattttcgaagcggaaggctatgatgttttcgaagcgacagatggcgcggaaatgcatcagatcctctctgaatatgacatcaacctggtgatcatggatatcaatctgccgggtaagaacggtcttctgttagcgcgtgaactgcgcgagcgggcgaatgttgcgttgatgttcctgactggccgtgacaacgaagtcgataaaattctcggcctcgaaatcggtgcagatgactacatcaccaaaccgttcaacccgcgtgaactgacgattcgtgcacgcaacctgctgtcccgtaccatgaatctgggtactgtcagcgaagaacgtcgtagcgttgaaagctacaagttcaatggttgggaactggacatcaacagccgttcgttgatcggccctgatggcgagcagtacaagctgccgcgcagcgagttccgcgccatgcttcacttctgtgaaaacccaggcaaaattcagtctcgtgctgaactgctgaagaaaatgaccggccgtgagctgaaaccgcacgaccgtactgtagacgtgacgatccgccgtattcgtaaacatttcgaatctacgccggatacgccggaaatcatcgccaccattcacggtgaaggttatcgcttctgcggtgatctggaagattaa

SEQ ID NO: 471235 - DNA, 1353 bp, Shigella flexneri
atgttgaaatcccccctgttctggaaaatgaccaccttgtttggtgcagtattgctgttgttgattccgataatgctgattcggcaagtgattgtcgaacgtgccgattaccgtagcgatgtggaagatgcgattcgccaaagtaccagcgggccgcaaaaactcgttgggccgcttatcgctattcctgtgaccgagctttatacggtgcaggaagaggataaaaccgtggagcggaaacgaagttttatccatttttggttacctgagtcattgatggttgatggcaatcagaacgtggaagaacgcaagatagggatttataccggtcaggtctggcacagtgatttaacgctaaaagccgatttcgatgtttcgcgtcttagcgagctcaacgcgccaaatatcatcttaggcaagccctttattgtgattagcgtcggggatgcgcgtggtattggtgtggtgaaagcgcctgaagttaacggaacggcactgaccattgaacccggtaccgggttagagcaaggcgggcagggcgtgcatatccctttacccgaaggggactggcgtaagcagaacctgcagctgaatatggcactgaatttaagcggtaccggcgatctttctgtggtgcctgccgggcgtaatagcgaaatgaccttaaccagcaactggccgcatcccagttttttaggtgattttctaccagccaaacgggaagctagcgagtcaggttttcaggcgcaatggcaaagcagctggtttgctaataatctcggtgagcgttttgcttcaggcaatgataccggctgggaaaacttccccgcgtttagcgtcgcagtgacgacgccagccgatcaataccaattaacggaccgggcgactaagtacgccattctgctgattgcactgacttttatggcgttctttgtttttgaaacgctcaccgcgcaacgtttacacccaatgcaatatttgctggtggggctttcattggtgatgttttatttgctcttgctggcgctttctgaacatatcggttttaccgtggcatggataatcgccagtctgattggggcgttaatgaacggtatttatttgcaggcggtattgaaaggctggcgcaatagcatgttgtttaccctcgcgctgttgttgctggatggagtgatgtggggactgctcaactctgccgatagcgcgctgttgttgggaaccagtgtgctggtggtggcgctggccggcatgatgtttgtgactcgtaatatagactggtatgcgttttcactgccgaaaatgaaagccagtaaagaagttacaacggacgatgaattacgtatctggaaataa

SEQ ID NO: 471236 - DNA, 1425 bp, Shigella flexneri
atgcgtatcggcatgcggttgctgctgggctattttttactggtggcggtggcggcctggttcgtactggctatttttgtcaaagaagttaaaccgggcgtgcgaagagcaacggaggggacgttgatcgacacggcaacgttacttgcggagctggcgcgtcccgatttgctctctggggacccaacgcatgggcaactggcgcaggcgtttaatcagctacaacatcgcccgtttcgcgccaatattggtggcattaacaaagtgcgcaatgaatatcatgtctatatgaccgatgcgcatggcaaagtattgttcgattcggcaaataaagccgttggacaggattattcgcgctggaatgacgtctggctaacgttgcgtggtcagtatggtgcgcgcagcacgttgcaaaatcctgccgatcccgaaagttcggtgatgtatgttgccgcgccgattatgggcggctcgcggcttattggcgttttgagcgtaggcaaaccgaacgcggcgatggctccggtcattaaacgcagcgagcggcgaattttatgggccagcgccattttgttggggattgcactggtgattggcgcaggcatggtttggtggatcaaccgctccattgcccggctcactcgctatgctgattccgtcactgacaataagcccgttcctcttcccgatctcggtagtagcgagctgcgtaaactcgcgcaggcgctggaaagtatgcgcgtgaagctggaagggaaaaactatattgagcagtatgtttatgcgttaacccatgagctaaaaagcccactggcggcgattcgtggcgcggcggaaattttacgcgaaggtccgccgcctgaagtagtggctcgttttactgacaacattctgacacaaaatgcgcgaatgcaggcgctggtggaaacgttactacgccaggcaagactggagaatcgtcaggaagtcgttctgactgctgttgatgtggcggcattatttcgccgcgtcagcgaagcgcgcaccgtgcagttggcagaaaaaaacatcactttgcatgttatgcccaccgaggttaatgttgctgctgaaccggcgttactggatcaggcgctggggaatttactggataacgccatcgattttactcccgagagcggttgcataacgctaagcgccgaagtggatcaggaacacgtcacgcttaaggtgctggataccggtagtggtattcctgactacgcgctgtcacgtatttttgaacgcttttactctttgccgcgtgcaaatgggcaaaaaagcagcggtctggggttggcgttcgtcagtgaggtcgcccgtttgtttaacggcgaagtcacgctgcgcaacgtgcaggaaggtggcgtgctggcctcgctacgacttcaccgtcacttcacatag

SEQ ID NO: 471237 - DNA, 690 bp, Shigella flexneri
atgcaacgggaaacggtctggttagtggaagatgagcaagggatagccgacacgctggtctacatgttgcagcaggaaggttttgccgtcgaggtctttgagcgaggtttgccggtgctggataaagctcgccagcaggttccctacgtcatgattctcgacgttggtttgcctgatatcagtggctttgaattgtgccgccagttactggcgctccatccggcgttacctgtactgttcctgacggcccgaagtgaagaggtcgatcgcctgcttgggctggaaattggcgctgacgactatgtggctaaaccgttttcaccccgcgaagtgtgcgccagggtgcgcaccttactgcgtcgggtgaagaagttctcgacgccgtctcccgtcatccgtattggtcattttgaattgaatgaacccgcggcgcagatcagctggtttgacacgccattaacgctgacgcggtatgagtttttattgctgaagacgttactcaagtcgccaggccgcgtctggtcccgccagcaactaatggatagcgtgtgggaagatgcgcaggacacctacgatcgcaccgtcgatatccacattaaaacgctgcgtgccaagctgcgcgccatcaaccccgatctttcaccgattaatactcatcgcggcatgggatatagcctgaggggcttgtaa

SEQ ID NO: 471238 - DNA, 474 bp, Shigella flexneri
atgaaatacaagcatttgatcctgtctttaagcctgataatgctggggccattggctcatgcagaagagattggttcggtcgacaccgtatttaaaatgatcggcccggatcacaaaattgttgtggaagcctttgacgatcccgatgtgaaaaatgtcacctgttatgtgagccgggcgaaaaccggtggtattaaagggggattgggcctggcagaagatacctccgatgcggccatttcttgtcagcaagtcgggccgattgaactgtcggatcgtattaaaaacggcaaagctcagggcgaggtagtattcaaaaaacgcacgtccctggtctttaagtcgttacaggtcgtgcgcttttatgacgccaaacgcaacgcgctcgcttatctggcttactccgacaaagttgtagaaggttcgccgaaaaacgcgattagcgcggttcctgtcatgccgtggcggcaataa

SEQ ID NO: 471239 - DNA, 870 bp, Shigella flexneri
atggatcaggccggcattattcgcgaccttttaatctggctggaaggtcatctggatcagcccctgtcgctcgacaatgtagcggcgaaagcaggttattccaagtggcacttacagagaatgtttaaagatgtcactggccatgctattggcgcgtatattcgtgctcgtcgtttgtcgaaatcggcggtcgcactacgcctgactgcgcgtccgattctggacatcgcgctgcaataccgcttcgactctcaacagacatttacccgcgcattcaagaagcagtttgcccagactcctgcactttaccgccgttctcctgaatggagcgcctttggtattcgtccgccgctacgtctgggtgaattcacaatgccagagcacaaatttgtcaccctggaagatacgccgctgattggtgttacccagagctactcctgttcgctggagcaaatctctgatttccgccatgaaatgcgttatcagttctggcacgattttctcggcaacgcgccgaccattccgccggtgctctacggcctgaatgaaacgcgtccgagtcaggataaagacgacgaacaagaggtattctataccaccgcgttagcccaggatcaggcagatggctatgtactgacggggcatccggtgatgctgcagggcggcgaatatgtgatgtttacctatgaaggtctgggaaccggcgtgcaggagtttatcctgacggtatacggaacgtgcatgccaatgctcaatctgacgcgccgtaaaggtcaggatattgagcgatactacccggcagaagacgccaaagcgggagatcgcccaattaatctgcgctgtgaactgctgattcctatccgccgttaa

SEQ ID NO: 471240 - DNA, 648 bp, Shigella flexneri
atgttacaggtatacctagtccgccacggtgaaacgcagtggaacgccgagcgacgtattcagggccagtctgacagcccgctgaccgccaaaggtgagcaacaggcgatgcaggtggcaacccgtgccaaagagcttggcattacgcatattatcagtagcgatttaggacgcacccggcgtacggcggaaatcatcgcccaggcctgcggctgtgacatcatctttgattctcgcctgcgtgaattaaacatgggtgtgctggaaaaaagacatatcgattctctgaccgaagaagaagagaactggcgtcggcagctggtcaatggcaccgttgacgggcgtattcctgaaggcgagtcaatgcaggagctcagcgatcgcgtcaatgcggcactggaatcttgccgggacttaccgcagggaagccgaccgctgctggtgagccatggtattgcactgggatgtctggtgagtacgattctcggattaccagcatgggcagagcgccgcttacgtctgcgtaactgttctatttcgcgcgtggattatcaggaaagcctgtggctggcgtctggctgggtcgttgaaaccgcaggggacatctcgcatctggacgcccctgcattagatgagctgcagcgttaa

SEQ ID NO: 471241 - DNA, 474 bp, Shigella flexneri
atgcaccaagttgtctgtgcgaccaccaatcccgctaaaattcaggccattctgcaggcatttcacgagatcttcggcgaaggatcctgccatattgcatccgttgccgtcgagagcggtgtaccggaacaaccctttggcagtgaggaaacgcgcgctggcgcacgaaatcgggtagcaaatgcccgccgtttacttccagaggctgatttttgggtggcgattgaagctggcattgatggcgacagcactttcagttgggtggtgattgaaaacgccagccagcgcggcgaggcgcgttcggcaactttgccgttacctgcggtgattctggaaaaagttcgtgaaggcgaggcgcttggtcccgtgagtcgcgttataccggtattgatgagattggtcgtaaggaaggggcgatcggcgtgtttaccgccgggaaactcactcgcgccagcgtctatcaccaggcggtga

SEQ ID NO: 471242 - DNA, 297 bp, Shigella flexneri
atggcagaacagcgtcaccaggagtggttacgttttgtcgacctgcttaagaatgcctaccaaaacgatctccatttaccgttgttaaacctgatgctgacgccagatgagcgcgaagcgttggggactcgcgtgcgtattgtcgaagagctgttgcgtggcgaaatgagtcagcgtgagttaaaaaatgaactcggcgcgggcatcgcgacgattacgcgtggatctaacagcctgaaagccgcgcccgtggagctgcgtcagtggctggaagaggtgttgctgaaaagcgattga

SEQ ID NO: 471243 - DNA, 1938 bp, Shigella flexneri
gtggaaaaagccaaacaagttacctggcggctgttggctgccggtgtctgtctgctgacggtcagcagcgtggcgcgagccgactcactggatgagcagcgtagccgttacgcgcaaatcaagcaggcctgggataatcgacagatggatgtggtcgaacaaatgatgcctggactgaaggattatccgctttatccctacctggaataccgccagatcaccgatgacctgatgaatcaaccggcggtgacggtcactaactttgttcgcgctaaccccacgcttcctcccgctcgcacgctgcaatctcgtttcgtcaatgaactggcgcggcgtgaagactggcgtggcttgttagcctttagcccggaaaagcccggaactaccgaagcgcaatgtaattactactatgcgaaatggaacaccgggcagagtgaagaagcctggcaaggggcgaaagagctgtggctaaccggcaagagccagcctaacgcctgtgacaagttatttagcgtctggcgtgcgtcaggtaaacaagatccgctggcgtatttagagcgtatccgtctggcgatgaaagcgggtaacacaggcctggtaacagtgctggcagggcagatgcctgccgattaccagactatcgcctcggcaatcatttcactggcgaacaaccctaatacggtactgaccttcgcgcgtacaaccggcgcgaccgattttacccgtcaaatggcggcggtggcgtttgccagtgtggcgcggcaggatgccgaaaatgcacggctgatgatcccgtcgcttgcccaggcgcagcagcttaatgaagatcagattcaggagctgcgcgatatcgtcgcctggcgtttgatgggcaatgatgtcaccgatgagcaggcgaaatggcgcgatgacgccattatgcgctcgcaatccacgtcgttgattgaacgccgtgtgcgaatggcgcttggcaccggcgatcgtcgcggcctgaatacctggctggcgcgtctgccgatggaagcaaaagagaaagatgaatggcgttactggcaggcggatttattgctggaacgcggacgtgaagctgaagcgaaagagattttgcatcaactcatacaacagcgtggtttctacccgatggttgcagcacaacgcatcggtgaagagtatgagctgaagattgataaagcgccgcagaatgttgacagcaccctgactcaggggccggagatggcgcgcgtgcgcgagttgatgtactggaatctcgataataccgcgcgtagcgagtgggccaatctggtgaagagcaagtcaaaaacagagcaggctcaactggctcggtatgctttcaataaccaatggtgggatcttagcgttcaggcaacgatcgccgggaagctttgggatcatctggaagagcgattcccgctggcttacaacgatcttttcaaacgttacaccagtgggaaagagatcccgcaaagctatgcgatggcgattgcccgtcaggagagcgcctggaatccgaaagtgaaatcaccggtaggggccagcggcctgatgcagattatgcctggtacagcgacccatacggtgaagatgttctctattcctggttatagcagccctgggcaattgctggatccggaaacgaacatcaacattggcaccagttacctgcaatatgtttatcagcagtttggcaataaccgtattttctcctcagcagcttataacgccggacctggacgggtgcgaacctggcttggccacagcgccgggcgtatcgacgctgtggcatttgtcgagagtattccgttctccgagacgcgcggttatgtgaagaacgtgctggcttatgatgcttactaccgctatttcatgggggataaaccgacgttgatgagcgccacggaatggggacgtcgttactga

SEQ ID NO: 471244 - DNA, 1668 bp, Shigella flexneri
gtggctcaattcgtttataccatgcatcgtgtcggcaaagttgttccgccgaaacgtcatattttgaaaaacatctctctgagtttcttccctggggcaaaaattggtgtcctgggtctgaacggcgcgggtaagtccaccctgctgcgcattatggcgggcattgataaagacatcgaaggtgaagcgcgtccgcagccagacatcaagattggttatctgccgcaggaaccgcagctgaacccggaacacaccgtgcgtgagtccattgaagaagcggtttcagaagtggttaacgccctgaaacgcctggatgaagtgtatgcgctgtacgccgatccggatgccgattttgacaagctggccgctgaacaaggccgtctggaagagatcattcaggctcacgacggtcataacctgaacgtacagctggagcgtgcggcggatgcgctgcgtctgccagattgggacgcgaaaatcgctaacctctccggtggtgagcgtcgtcgcgtggcgttgtgccgcctgctgctggaaaaaccagacatgctgctgctcgacgaaccgaccaaccacctggatgccgaatccgtggcgtggctggaacgcttcctgcacgacttcgaaggcaccgtggtggcgattactcacgaccgttacttcctcgataacgttgcaggctggatcctcgaactggaccgcggtgaaggtattccgtgggaaggtaactactcctcctggctggagcagaaagatcagcgtctggcgcaggaagcttcacaagaagcggcgcgtcgtaagtcgatcgagaaagagctggagtgggtacgtcagggaactaaaggccgccagtcgaaaggtaaagcacgtctggcacgctttgaagagctgaacagcaccgaataccagaaacgtaacgaaaccaacgaactgtttattccacctggaccgcgtctgggcgataaagtgctggaagtcagcaacctgcgtaaatcctacggcgatcgcctgctgattgatgacctgagcttctcgatcccgaaaggggcgatcgtcgggatcatcggtccgaacggcgcgggtaaatcgaccctgttccgtatgatctccggtcaggaacagccggacagcggcaccatcactttgggtgaaacggtgaaactggcatcggttgatcagttccgtgactcaatggataacagcaaaaccgtttgggaagaagtttccggcgggctggatattatgaagatcggcaacaccgagatgccaagccgcgcctacgttggccgctttaactttaaaggggttgatcagggtaaacgtgttggcgaactttccggtggtgagcgcggtcgtctgcatctggcgaagctgctgcaggttggcggcaacatgctgctgctcgacgaaccaaccaacgacctggatatcgaaaccctgcgcgcgctggaaaacgccctgctggagttcccgggctgtgcgatggttatctcgcacgaccgttggttcctcgaccgtatcgccacgcacatcctggactaccaggatgaaggtaaagttgagttcttcgaaggtaactttactgagtacgaagagtacaaaaaacgcacgctgggcgcagacgcgctggagccgaagcgtatcaagtacaagcgtattgcgaagtaa

SEQ ID NO: 471245 - DNA, 168 bp, Shigella flexneri
atgagtttttttgatgagttgaaaacctctctggaagaggctgtcgagattaaacaaggtttgaaaaaacctgcacgggtgacccgccacgaaattgaggatgctaaggctgttgtagaccggaaaaggtgttcacgccgcatccggcattcggtgctcaatgcctga

SEQ ID NO: 471246 - DNA, 1233 bp, Shigella flexneri
atgtcgtcatttgattacctgaaaactgccatcaagcaacagggctgcacgctacagcaggtagctgatgccagcggtatgaccaaagggtatttaagccagttactgaatgccaaaattaaaagccccagcgcgcaaaagctggaggcattgcaccgttttttggggcttgaatttccccggcagaagaaaaccattggtgtcgtattcggtaagttctacccgctgcataccggacatatctaccttatccagcgcgcctgtagccaggttgacgagctgcatatcattatgggttttgacgatacccgcgaccgcgcgttgtttgaagacagcgccatgtcgcagcagcccacggtgccggatcgtctgcgctggctattgcaaacctttaaatatcagaaaaatatccgtattcatgctttcaacgaagagggcatggagccgtatccgcatggctgggatgtgtggagcaacggcatcaaaaagtttatggctgaaaaggggatccagccggacctgatctacacctcggaagaagccgatgcgccacagtatatggaacatctggggatcgagacggtgctggtcgatccgaaacgtacctttatgagtatcagcggtgcgcagatccgcgaaaacccgttccgctactgggaatatattcctaccgaagtgaagccgttttttgtgcgtaccgtggcgatccttggcggcgagtcgagcggtaaatccaccctggtaaacaaacttgccaatatcttcaacaccaccagtgcgtgggaatatggccgcgattatgtcttttcacacctcggcggtgatgagatcgcattgcagtattccgactacgataaaatcgcgttgggccacgcacaatacattgattttgcagtgaaatacgccaataaagtggcgtttattgacaccgattttgtcactacccaggcgttctgcaaaaagtacgaagggcgtgagcatccgttcgtgcaggcgctgattgatgaataccgtttcgatctggtgatcctgctggagaacaacacgccgtgggtggcggatggtttacgcagcctcggcagttcggtggatcgcaaagagttccagaacttgctggtggagatgctggaagagaacaatatcgaattcgtgcgggttgaagaggacgattacgacagccgtttcctgcgctgcgtggagctggtgcgggagatgatgggggagcaaggataa

SEQ ID NO: 471247 - DNA, 1383 bp, Shigella flexneri
gtggcaaaagctccaaaacgcgcctttgtttgtaatgaatgcggggccgattatccgcgctggcaggggcagtgcagtgcctgtcatgcctggaacaccatcaccgaggtgcgtcttgctgcgtcgccaacggtggcgcgtaacgagcgtctcagcggctatgccggtagcgccggggtggcaaaagtccagaaactctccgatatcagccttgaagagctgccgcgtttttccaccggatttaaagagttcgaccgcgtactaggaggcggcgtggtgccaggaagtgccattctgattggcggtaaccctggtgcggggaaatccacgctgttgctgcaaacgctgtgcaaactggcccagcagatgaaaacgctgtatgtcaccggcgaagagtcgctgcaacaggtggcaatgcgcgctcatcgccttggcctgccgactgacaatctcaatatgttgtcggaaaccagcatcgagcagatctgcctgattgccgaagaagagcaaccgaagctgatggtaattgactcgatccaggtgatgcatatggcggatgtacaatcatcgcctggtagcgtggcgcaggtgcgtgaaacggcggcttatctgacgcgtttcgccaaaacgcgcggtgtggcgattgtcatggttggacacgtaaccaaagatggttcgctggctggcccgaaagtgctggaacactgtatcgactgttcggtgcttctggatggcgatgccgactcccgttttcgcaccttacgcagccataaaaaccgcttcggcgcggtgaatgagctgggcgtcttcgcgatgaccgaacaggggctgcgtgaagtcagcaacccttcggcaattttcttaagtcgcggagatgaagtgacctccggcagctccgtgatggtggtgtgggaaggaacgcgtccgttgctggtggagattcaggcgctggtcgatcactcgataatggcgaatccgcgccgcgtggcagtggggctggaacaaaaccgtctggcaatcctgctggctgtcttgcaccgtcacggtggtctgcaaatggccgatcaggatgtgtttgtgaacgtggtcggcggcgtgaaggtaaccgaaaccagcgccgacttagcgttactgctggcgatggtttccagcctgcgtgacagaccgctgccacaggatctggtggtgtttggtgaagtcgggctggcaggggagatccgcccggtgcccagtggccaggagcggatttctgaagcggcgaaacacggttttcgccgggcgattgttccggcggctaacgtaccgaaaaaagcgccggaagggatgcagatttttggcgttaaaaaactctccgacgcgcttagcgtgttcgacgacttataa

SEQ ID NO: 471248 - DNA, 969 bp, Shigella flexneri
atgcctaacattacctggtgcgacctgcctgaagatgtctctttatggccgggtctgcctctttcattaagtggtgatgaagtgatgccactggattaccacgcaggtcgtagcggctggctgctgtatggtcgtgggctggataaacagcgtctgacccaataccagagcaaactgggtgcggcgatggtgattgttgccgcctggtgcgtggaagattatcaggtgattcgtctggcaggttcactcaccgcacgggctacacgcctggcccacgaagcgcagctggatgtcgccccgctggggaaaatcccgcacctgcgcacgccgggtttgctggtgatggacatggattccaccgccatccagattgaatgtattgatgaaattgccaagctggccggaacgggcgagatggtggcggaggtaaccgaacgggcgatgcgcggcgaactcgattttaccgccagcctgcgcagccgcgtggcgacgctgaaaggcgctgacgccaatattctgcaacaggtgcgtgaaaatctgccgctgatgccaggcttaacgcagctggtgctcaagctggaaacgctgggctggaaagtggcgattgcctccggcggctttactttctttgctgaatacctgcgcgacaagctgcgcctgacagccgtggtagccaatgaactggagatcatggacggtaaatttaccggcaatgtgatcggcgacatcgtagacgcgcagtacaaagcgaaaactctgactcgcctcgcgcaggagtatgaaatcccgctggcgcagaccgtggcgattggcgatggagctaatgacctgccgatgatcaaagcagcagggctggggattgcctaccatgccaagccaaaagtgaatgaaaaggcggaagtcaccatccgtcacgctgacctgatgggggtattctgcatcctctctggcagcctgaatcagaagtaa

SEQ ID NO: 471249 - DNA, 645 bp, Shigella flexneri
atggctcgcacaaaactgaaattccggctacatcgggcagtgattgtcctgttctgtcttgccttgttagtggcactgatgcagggggcgtcatggtttagtcaaaaccaccagcgacagcgtaatccacagctggaagaactggcccgcaccctggcgcgtcaggtgacgctgaacgttgcaccgctgatgcgtaccgactcaccggatgaaaaacgcattcaggcgatcctcgatcagttaacagatgaaagccgtatcctcgacgcgggtgtgtatgacgaacaaggcgatcttatcgcacgttctggcgaaagcgtcgaagtgcgcgatcggctggcgctcgacggtaaaaaagcaggcggctattttaaccagcagattgtcgagccaattgcgggtaaaaacggaccgctcggctatctgcgcctgacactcgacacccatacgctcgccaccgaagcccaacaggtggataacaccactaacattttacgcctgatgttgctgctctcactggcaatcggcgtagtgctgacccgcacgctgctacagggtaaacgcacccgctggcagcaatcgcccttcctgttaaccgccagcaaaccggtgccggaagaggaagaaagcgagaaaaaagagtga

SEQ ID NO: 471250 - DNA, 612 bp, Shigella flexneri
atgtccacattacgcctgctcatctctgactcttacgacccgtggtttaacctggcggtggaagagtgtatttttcgccaaatgcccgccacgcagcgcgttctgtttctctggcgcaatgccgacacggtagtaattggtcgcgcgcagaacccgtggaaagagtgtaatacccggcggatggaagaagataacgtccgcctggcgcggcgcagtggcggtggcggcgcggtgttccacgatctcggcaatacctgctttacctttatggctggcaagccggagtacgataaaactatctccacgtcgattgtgctcaatgcgctgaacgcgctcggcgtcagcgccgaagcgtccggacgtaacgatctggtggtgaaaaccgtcgaaggcgaccgcaaagtctcaggctcggcctatcgcgaaaccaaagatcgcggcttccaccacggcaccttgctactcaatgccgacctcagccgcctggcaaactatctcaatccggataaaaagaaactggcggcgaaaggcattacttcagtgcgttcccgcgtgaccaacctcaccgagctgctgccggggctcaccatgagcaggtttgcgaggccataa

SEQ ID NO: 471251 - DNA, 225 bp, Shigella flexneri
gtggaactgcatttcgacgttgaaaaaggccatatcacccgcgcccaggtatttaccgacagcctcaaccccgcgccgctggaagccctcgccgggcgactgcaaggctgcctgtaccgcgcggatatgctgcaacaagagtgcgaagcgctgttggttgacttcccggaccaggaaaaagagctacgggagttgtcgacgtggatagcgggggcggtaaggtaa

SEQ ID NO: 471252 - DNA, 264 bp, Shigella flexneri
atgatcgatctggaaaaccaggaacgggagattatcaatttaatgttcagccagcgtatttcctggctagccgccgtgcgtatcaggcataaattatcgcttgctgaagtaagtaaaatgttaggtatctcgattaattctctaaaacagatcgaaaagacggaacggcttagctcaaacatcaaaagcaaaatggcagaaatttatggttgtccaccagagttgctgatatgcccttcctggatgacggctgaacataaatga

SEQ ID NO: 471253 - DNA, 720 bp, Shigella flexneri
atggctaccccacacattaatgcagaaatgggcgatttcgctgacgtagttttgatgccaggcgacccgctgcgtgcgaagtatattgctgaaactttccttgaagatgcccgtgaagtgaacaacgttcgcggtatgctgggcttcactggtacttacaaaggccgcaaaatttccgtaatgggtcacggtatgggtatcccgtcctgctccatctacaccaaagaactgatcaccgatttcggcgtgaagaaaattatccgcgttggttcctgtggcgcagttctgccgcacgtaaaactgcgcgacgtcgttatcggtatgggggcctgcaccgattccaaagttaaccgcatccgttttaaagaccatgactttgccgctatcgctgactttgacatggtgcgtaacgcagtagatgcagctaaagcactgggcgttgatgctcgcgtgggtaacctgttctccgctgacctgttctactctccggacggcgaaatgttcgacgtgatggaaaaatacggcatcctcggcgtggaaatggaagcggctggtatctacggcgtggctgcagagtttggcgcgaaagccctgaccatctgcaccgtgtctgaccacatccgcactcacgagcagaccactgccgctgagcgtcagaccaccttcaacgacatgatcaaaatcgcactggaatccgttctgctgggcgataaagagtaa

SEQ ID NO: 471254 - DNA, 1224 bp, Shigella flexneri
atgaaacgtgcatttattatggtgctggactcattcggcatcggcgctacagaagatgcagaacgctttggtgacgtcggggctgacaccctgggtcatatcgcagaagcttgtgccaaaggcgaagctgataatggtcgtaaagggccgctcaatctgccaaatctgacccgtctggggctggcgaaagcacacgaaggttctaccggtttcattccggcgggaatggacggcaacgctgaagttatcggcgcgtacgcatgggcgcacgaaatgtcatccggtaaagataccccgtctggtcactgggaaatcgccggtgtcccggttctgtttgagtggggatatttctccgatcacgaaaacagcttcccgcaagagctgctggataaactggtcgaacgcgctaatctgccgggttacctcggtaactgccactcttccggtacggtcattctggatcaactgggcgaagagcacatgaaaaccggcaagccgattttctatacctccgctgactccgtgttccagattgcctgccatgaagaaactttcggtctggataaactctacgaactgtgcgaaatcgcccgtgaagagctgaccaacggcggctacaatatcggtcgtgttatcgctcgtccgtttatcggtgacaaagctggtaacttccagcgtaccggtaaccgtcacgacttggctgttgagccgccagcaccgaccgtgctgcagaaactggttgatgaaaaacacggccaggtggtttctgtcggtaaaattgcagacatctacgccaactgcggtatcaccaaaaaagtgaaagcgactggcttggacgcgctgtttgacgccaccatcaaagagatgaaagaagcgggtgataacaccatcgtcttcaccaacttcgttgacttcgactcttcctggggccaccgccgcgacgtcgccggttatgctgcgggtctggaactgttcgaccgccgtctgccggagctgatgtctctgctgcgcgatgacgacatcctgatcctcaccgctgaccacggttgcgatccgacctggaccggtactgaccacacgcgtgaacacattccggtactggtatatggcccgaaagtaaaaccgggctcactgggtcaccgtgaaaccttcgcggatatcggccagactctggcaaaatattttggtacttctgatatggaatatggcaaagccatgttctga

SEQ ID NO: 471255 - DNA, 1323 bp, Shigella flexneri
ttgtttctcgcacaagaaattattcgtaaaaaacgtgatggtcatgcgctgagcgatgaagaaattcgtttctttatcaacggtattcgcgacaacactatttccgaagggcagattgccgccctcgcgatgaccattttcttccacgatatgacaatgcctgagcgtgtctcgctgaccatggcgatgcgagattcaggaacagttctcgactggaaaagcctgcatctgaatggcccgattgttgataaacactcgaccggcggcgtcggcgatgtcacttcgctgatgttggggccgatggtcgcagcctgcggcggctatattccgatgatctccggtcgcggcctcggtcatactggcggtacgctcgacaaactggaatccatccctggcttcgacattttcccggatgacaaccgtttccgcgaaattattaaagacgtcggcgtggcgattatcggtcagaccagttcactggctccggctgataaacgtttctacgcgacccgtgatattaccgcaaccgtggactccatcccgctgatcactgcctcgatcctggcgaagaaactggcggaaggtctggacgcgctggtgatggacgtgaaagtgggtagcggcgcgtttatgccgacctacgaactctctgaagcccttgccgaagcgattgttggcgtggctaacggcgctggcgtgcgcaccaccgcgctgctcaccgacatgaatcaggtactggcctccagtgcaggtaacgcggttgaagttcgtgaagcggtgcagttcctgacgggtgagtatcgtaacccgcgtctgtttgatgtcacgatggcgctgtgcgtggagatgctgatctccggcaaactggcgaaagatgacgccgaagcgcgcgcgaaattgcaggcggtgctggacaacggtaaagcggcagaagtctttggtcgtatggtagcggcacaaaaaggcccgaccgacttcgttgagaactacgcgaagtatctgccgacagcgatgctgacgaaagcagtctatgctgataccgaaggttttgtcagtgaaatggatacccgcgcgctggggatggcagtggttgcaatgggcggcggtcgtcgtcaggcatctgacaccatcgattacagcgtcggctttactgatatggcgcgtctgggctaccaggtagacggtcagcgtccgctggcggttatcctcgcgaaagacgaaaacagctggcaggaagcggcgaaagcggtgaaagcggcaattaaacttgccgataacgcaccggaaagcacaccaactgtctatcgccgtatcagcgaataa

SEQ ID NO: 471256 - DNA, 780 bp, Shigella flexneri
atgactgatctgaaagcaagcagcctgcgtgcactgaaattgatggacctgaccaccctgaatgacgacgacaccgacgagaaagtaattgctctgtgtcatcaggccaaaactccggtcggcaataccgccgctatctgtatctatcctcgttttatcccgattgctcgcaaaactctgaaagagcagggcaccccggaaatccgtatcgctacggtaaccaacttcccacacggtaacgacgacatcgaaatcgcgctggcagaaacccgtgcggcaatcgcctacggtgctgatgaagttgacgtggtgttcccgtaccgcgcgctgatggcgggtgacgagcaggttggttttgacctggtgaaagcctgtaaagaggcttgcgcggcagcgaatgtactgctgaaagtgatcatcgaaaccggcgaactgaaagacgaagcgctgatccgtaaagcgtctgaaatctccatcaaagcgggtgcggacttcatcaaaacctctaccggtaaagtggctgtgaacgcgacgccggaaagcgctcgcatcatgatggaagtgatccgtgatatgggcgtagaaaaaaccgttggtttcaaaccggcgggcggcgtgcgtactgcggaagatgcgcagaaatatctcgccatcgcagatgaactgttcggtgctgactgggctgatgcgcgtcactaccgctttggtgcttccagcctgctggcaagcctgctgaaagcgctgggccacggcgacggtaagagcgccagcagctactaa

SEQ ID NO: 471257 - DNA, 1542 bp, Shigella flexneri
atgcccacttctcatgaaaatgcactgcaacaacgttgccagcaaattgtcaccagcccagtgcttagcccggagcagaagcgccattttctggcactggaagcagaaaacaatctgccttacccacagcttcctgccgaagcccgccgcgcgctggatgaaggtgtaatctgcgatatgtttgaaggtcatgcgccgtacaaaccgcgctatgtcttacccgattacgctcgttttctggcgaacggttccgaatggctggagctggaaggcgcgaaagatcttgatgacgcactctctctgctgaccattctttaccaccacgtaccgtcggtcacatcgatgccggtctacctggggcaactggatgcgttgttgcaaccgtatgttagaattctaacacaaaacgagatcgatgttcgaataaaacgtttctggcgttacctcgacagaaccctgccagatgcctttatgcacgccaatatcggcccgtctgattcgcccattacccgcgcgatcttacgtgcagacgcgcaggtttcaccgaacctgacctttatctacgatcctgaaatcacccctgatgacctgctgctggaagtggcgaagaacatctgtgaatgtagcaaaccgcacatcgccaacggtccggtgcatgataaaattttcacaaaagggggctacgggattgtgagctgttacaactcactgccgctggcgggtggtggcagcacgctggtacgccttaacctgaaagccattgccgagcgcagcgaatcgctggatgacttctttacgcgcactctaccgcactactgccagcagcagatcgccatcatcgatgcgcggtgtgaattcctctatcaacaatcacacttctttgagaatagcttcctggtgaaagaagggctgattaaccctgaacgttttgtgccaatgtttggcatgtatgggctggcggaagcggttaacttgctgtgtgagaaagaagggattgccgcgcgctacggtaaagaagccgccgcaaatgaagtgggttatcgcatcagcgcgcaactggcggagtttgtcgccaatacccccgtgaaatatggctggcaaaaacgcgccatgttacacgcacagtcggggatcagttccgatatcggcaccacgccgggcgcgcgtttgccgtatggcgatgagccagatccgatcacccatctgcaaactgtcgccccgcatcatgcttattattattccggcatcagcgacattctgacgctcgacgaaaccatcaaacgtaacccgcaggcactggtacagctttgcctcggtgcctttaaagccggaatgcgtgaatttaccgccaatgtcagcggtaacgatctggttcgcgttaccggttatatggtgcgtttgtcggatttagaaaaatatcgcgccgaaggttcacgcaccaacaccacctggctgggcgaagaagccgcacgcaacactcgtattctggaacgccagccgcgcgtgataagccatgaacagcagatgcgctttagtcagtaa

SEQ ID NO: 471258 - DNA, 864 bp, Shigella flexneri
atgaacagcagatgcgctttagtcagtaagattatccccttctcctgcgttgacgggccaggcagtcgtctggctctgtttttgcagggctgcaatctgcgctgcaaaaactgtcacaatccgtggacgatgggacgttgcaatgactgtggggagtgcgtgccacagtgtccgcatcaggcgttgcagattgttgacggcaaagtggtgtggaacgctgtggtctgcgagcaatgtgatacctgcctgaagatgtgtccgcaacatgccacaccaatggcgcaatccatgagcgtggacgaagtgcttagccatgtgcgcaaagcggtgctgtttattgaagggataacggtaagcggcggcgaagccacgacccaactgccgtttgtagtggcgctgtttactgctatcaaaaacgatccgcaactgcgccatctcacctgtctggtggacagtaacggtatgttgagcgaaaccggctgggaaaaattactcccggtgtgtgacggcgcaatgctcgatctcaaagcatggggtagcgaatgtcatcaacaattaaccggacgcgataatcaacagattaagcgcagcatctatttgctggcagagcgcggcaagctggcggaactgcgtttgctgatgatcccaggccaggtggattatttgcaacacatcgaagaactggcggcgtttatcaagggacttggtgatgttccggttcgcctgaacgcgtttcatgcccacggcgtgtatggcgaggcgcaaagctgggcgagcgccacgccggaagacgttgagccgttggctgatgcattaaaggtgcgcggggtgagccggttgatatttccggcgctctatttgtga

SEQ ID NO: 471259 - DNA, 783 bp, Shigella flexneri
ttgatttgccgttttatcgacactcactgccattttgatttcccgccttttattggcgatgaagaggccagcctgcaacgcgcggcacaagcgggcgtaggcaagatcattgttccggcgacagaggcggaaaattttgcccgcgtgcaggcgttagcggaaaattatcaaccgctgtatgccgcattgggcttgcatcctggtatgttggaaaaacatagcgatgtgtctcttgagcagctacagcaggcgctggaaaggcgtccggcgaaggtggtggcggtgggggagatcggtctggatctcttcggcgacgatccgcaatttgagaggcagcagtggttactcgacgaacaactgaaactggcgaaacgctacgatctgccggtgatcctgcattcacggcgcacgcacgacaaactggcgatgcatcttaaacaccacgatttgccgcgtgctggtgttgtccacggattttctggcagccagcaacaggctgaacggtttgtacagctgggctacaaaatcggcgtaggcggtactatcacctatccacgcgccagtaaaacccgcgatgtcatcgcaaaattatcgctggcatcgttgttgctggaaaccgatgcgccggatatgccgctcaacggttttcaggggcagcctaaccgcccggaacaggctgcccgtgtgtttgccgtgctttgcgagttacgcccggaacccgcggatgagattgccgaagtgttgcttaataacacgtatgcggtgtttaacgttcgtgggtag

SEQ ID NO: 471260 - DNA, 1074 bp, Shigella flexneri
gtggggcagcgaatacctgtaacgcttggtaatattgcgccgttgtcgctaaggccgttccagcctggacgaatagctctggtgtgcgaaggcggcggacagcgtggaattttcacggctggcgtgctggatgagtttatgcgcgcgcagtttaatcctttcgatctttatctcggcacatctgccggggcgcagaacctctcggcgtttatctgcaatcagcccggttacgcgcgcaaagtcatcatgcgctataccacaaaacgcgaatttttcgatccattgcgctttgtccgtggaggaaatcttatcgatctcgactggctggtggaggccaccgcaagccagatgccgttgcaaatggataccgccgcgcggttgtttgacagcggcaaatcgttttatatgtgcgcctgtcgtcaggatgactacgcgccgaattactttttaccaaccaaacaaaactggctggatgtgattcgcgcctccagtgcgatacctggcttttatcgtagcggagtgtcgctggaaggcattaactacctggatggcgggatcagtgatgcgattccggttaaagaggcggcaaggcagggcgctaaaacgttggtcgtcatccgcactgtgccgtcacaaatgtactacacgccgcagtggttcaaacgcatggaacgctggctgggtgacagtagcctgcagccgctggtcaatctggtgcagcatcatgaaaccagctatcgtgacattcagcaatttattgagaaaccaccgggcaagctgcggatatccgaaatttatccgccgaagccattacatagtatcgcgcttggcagtcggattccggcgctgcgtgaagactataaacttgggcgtttatgcggtcgttatttcctcgccacggttggcaagctattaactgaaaaagcgccgcttacccgccatctggtgccagtggtgacgccggaatcgattgtcattccgcctgcgccagtcgccaacgatacgctggttgccgaagtgagcgacgctccgcaggcgaacgacccgacatttaacaatgaggatctggcttga

SEQ ID NO: 471261 - DNA, 162 bp, Shigella flexneri
atgtttcgttggggcatcatatttctggttatcgcgttaatcgccgccgcacttgggtttggtggtctggccggtaccgctgcaggcgcagctaaaattgtctttgtcgtcgggattattctgttcctagtgagtttgttcatgggccgaaaacgaccctag

SEQ ID NO: 471262 - DNA, 606 bp, Shigella flexneri
atgactatgacaagactgaagatttcgaaaactctgctggctgtaatgttgacctctgccgtcgcgaccggctctgcctacgcggaaaacaacgcgcagactaccaatgaaagcgcagggcaaaaagtcgatagctctatgaataaagtcggtaatttcatggatgacagcgccatcaccgcgaaagtgaaggcggcgctggtggatcatgacaacatcaagagcaccgatatctctgtcaaaaccgatcaaaaagtcgtgaccctgagcggtttcgttgaaagtcaggcccaggctgaagaggcagtgaaagtggcgaaaggcgttgaaggcgtgacctctgtcagcgacaaactgcacgttcgcgacgctaaagaaggctcggtgaagggctacgcgggtgacaccgccaccaccagtgaaatcaaagccaaactgctggcggacgatatcgtcccttcacgtaaagtgaaagttgaaaccaccgatggcgtggttcagctctccggtaccgtagattctcaggcacaaagtgaccgtgctgaaagtatcgccaaagcggtagatggtgtgaaaagcgttaaaaatgatctgaaaactaagtaa

SEQ ID NO: 471263 - DNA, 1617 bp, Shigella flexneri
atgccgcttactcaagaagaaagaattatgacgttgtctccttatttgaaagaggtggcgaagcgccgcacttttgccattatttctcacccggacgccggtaaaactaccatcaccgagaaggtgctgctgttcggacaggccattcagaccgccggtacagtaaaaggccgtggttccaaccagcacgctaagtcggactggatggagatggaaaagcagcgtgggatctccattactacgtctgtgatgcagtttccgtatcacgattgcctggttaacctgctcgacaccccggggcacgaagacttctcggaagatacctatcgtaccctgacggcggtggactgctgcctgatggttatcgacgccgcaaaaggtgttgaagatcgtacccgtaagctgatggaagttacccgtctgcgcgacacgccgatcctcacctttatgaacaaacttgaccgtgatatccgcgacccgatggaactgctcgatgaagttgagaacgagctgaaaattggctgcgcaccgatcacttggccaattggctgcggcaagctgtttaaaggcgtttaccacctttataaagatgaaacctatctctatcagagcggtaaagggcacaccattcaggaagtccgcattgttaaagggctgaataacccggatctcgatgctgcggttggtgaagatctggcacagcagctgcgtgacgaactggaactggttaaaggcgcgtctaacgagttcgacaaagagctgttccttgcgggcgaaatcactccggtattcttcggtactgcgctgggtaacttcggcgttgatcatatgctgaatggcctggtggagtgggcgcctgcgccgatgccgcgtcagaccgatacccgtaccgtagaagcgagcgaagataaatttaccggcttcgtatttaaaattcaggccaacatggatccgaaacaccgcgaccgcgtggcgtttatgcgtgtggtgtccggtaaatatgaaaaaggcatgaaactgcgccaggtgcgcactgcgaaagatgtggtgatctccgacgcgctgacctttatggcgggtgaccgttcgcacgttgaagaagcgtatccgggcgatatcctcggcctgcacaaccacggcaccattcagatcggcgacacctttacccagggtgagatgatgaagttcaccggtattccgaacttcgcaccagaactgttccgtcgtatccgcctgaaagatccgctgaagcaaaaacagctgctcaaagggctggtacagctttccgaagagggcgcggtgcaggtgttccgtccaatctccaacaacgatctgatcgttggtgcggttggtgtgctgcagtttgatgtggtggtagcgcgcctgaagagcgaatacaacgttgaagcagtgtatgagtcagtcaacgttgccactgcccgctgggtagaatgtgcagacgcgaagaaattcgaagagttcaagagtaagaacgaaagccaactggcgcttgatggcggcgataacctcgcttacatcgctaccagcatggtcaacctgcgcctggcacaggaacgttatccggacgttcagttccaccagacccgcgagcattaa

SEQ ID NO: 471264 - DNA, 678 bp, Shigella flexneri
atgaagtgggactggattttctttgatgccgatgaaacgctgtttacctttgactcattcaccggcctgcagcggatgtttcttgattacagcgtcacctttaccgctgaagattttcaggactatcaggccgttaacaagccactgtgggtggattatcaaaacggcgcgatcacttcattacagcttcagcacgggcgtttcgagagctgggccgaacggctgaaagttgaagcaggcttgcttaacgatgcctttattaatgcgatggcggaaatctgtacgccgttgccgggcgcggtttctctgcttaacgccattcgtagcaacgctaaaatcggcatcatcaccaacggttttagcgccttgcagcaagtgcgtctggaacggacgggcctgcgtgattacttcgatttgctggtgatttccgaagaagttggcgttgccaaaccgaataagaaaattttcgattatgcgctggaacaggcgggcaatcctgaccgttcacgcgtgctgatggttggcgacactgccgagtccgatattctcggtggcatcaacgccgggcttgcgacctgctggctgaatgcgcacaatcgcgagcaaccagaaggcatcgcgcccacctggaccgtttcttcgttgcacgaactggagcagctcctgtgtaaacactga

SEQ ID NO: 471265 - DNA, 447 bp, Shigella flexneri
atgaacacgatttcttccctcgaaacgactgatttaccagcggcttaccacattgaacaacgcgcccacgcctttccgtggagtgaaaaaacctttgccagcaaccagggcgagcgttatctcaactttcagttaacgcaaaacggcaaaatggcggcgtttgcgattacgcaagtggtgctggatgaagctacattgttcaatattgcggtcgatcccgactatcagcgtcaggggctgggtagggcgctgctggaacatctgatcgacgaactggaaaaacgcggcgtggcgacactatggctggaagtccgtgcctcaaatgctgccgccattgccctgtacgaaagtttaggctttaacgaggcgacgattcgccgcaattactaccccaccacggacggtcgcgaagacgccatcatcatggcgttgccaatcagtatgtaa

SEQ ID NO: 471266 - DNA, 414 bp, Shigella flexneri
atgacatcccgacgagactggcagttacagcaactgggcattacccagtggtcgctgcgtcgccctggcgcgttgcagggggagattgccattgcgagcccggcacacgtccgtctggtgatggtggcaaacgatcttcccgccctgactgatcctttagtgagcgatgttctgcgcgcattaaccgtcagccccgatcaagtgctgcaactgacgccagaaaaaatcgcgatgctgccgcaaggcagtcgctgcaacagctggcggttgggtactgacgaaccgctatcattggaaggcgctcaggtggcatcaccggcgctcaccgaattacgggcaaacccaacggcacgcgccgcgttatggcaacaaatttgcacatatgaacacgatttcttccctcgaaacgactga

SEQ ID NO: 471267 - DNA, 1032 bp, Shigella flexneri
atgtctgcatttaccccggcaagtgaagtcttgctgcgtcacagtgatgatttcgaacaaagccgtattctgtttgccggagacttacaggatgacctgcccgcgcgtttagataccgcggccagccgtgctcatacccagcaattccaccattggcaggtgttaagctgccagatgggggataacgcccgttttagtctggtcgccacggcgaatgatgtcgcagattgcgatacgctgatttactactggccgaagaacaaaccggaagcccagttccagttgatgaatttactttctctgctgccagtggggacagatatttttgtcgttggcgagaaccgcagcggcgtgcgcagcgctgagcagatgctggcagattatgcgccgttgaataaagtcgacagcgctcgtcgctgtggcctctattttggtcgtctggaaaaacagccagtatttgatgcggataaattctggggcgaatacagcgtcgatggcctgacggtcaaaacgctgcctggcgtgtttagccgcgacggtctggatgtcggtagccagttgctgctctcgacgttaactccgcacacgaaaggtaaagtgctggatgtcggctgtggcgcgggtgtactttcagttgcctttgcgcgccattcgccgaaaattcgtctcaccttgtgcgatgtctctgccccggcggtagaagccagccgcgcaacacttgcagccaacggtgttgaaggtgaagtctttgccagcaacgtcttttccgaggtgaaaggttgttttgatatgatcatctccaacccgccgttccacgatgggatgcaaaccagcctggatgcggcgcaaacgctgattcgtggcgcggtgcgtcatcttaatagcggcggcgagctgcgaattgtagcgaacgccttcctgccttacccggacgtgctggatgagacatttggcttccatgaagttatcgcgcaaaccgggcgcttcaaggtatatcgcgccattatgacccgccaggcgaagaaaggttga

SEQ ID NO: 471268 - DNA, 372 bp, Shigella flexneri; identical to SEQ ID NO: 467509

SEQ ID NO: 471269 - DNA, 159 bp, Shigella flexneri
atgtcctcgctcgcccactcgctcaatcaactacgccctgaactattcgaaggccgtacattgctggtgtggtgcggtgaaaatcgaacctccgcccaacagcagcaactcaccagttggcaagaacaaggccatgatattttcccactcggtatttaa

SEQ ID NO: 471270 - DNA, 732 bp, Shigella flexneri
atgaagatgttgcgcgatccgctgttctggctcattgctctttttgtggcgctgattttctggctgccttacagccagccgctgtttgctgccttgttcccacaactgccacgacccgtttatcagcaagaaagttttgcagctctggcactggctcatttctggctggtgggaatttcgagtttgtttgcggtgatcattggcacaggtgccggaattgctgttactcgcccgtggggcgcggaatttcgcccactggtggaaactattgccgccgttggacagacttttccgcctgtcgcagtgctggcgattgccgttccggtgatcggctttggtctgcaaccagcgattatcgccttgatcctttacggtgtgctgcccatcctgcaggtgacacttgccgggctgggagcgattgatcccagcgtgacagaagttgcgaaaggtatgggaatgagtcgaggtcagcgactgcgtaaggtcgagctaccgctggcggctccggtgattctggcgggcgtgcgaacttcggtgattatcaacattggtacggcgacgatcgcctcaacggtaggggccagtacgctgggtacgcccatcatcatcgggcttagcggatttaataccgcgtatgtgatccagggggcgttactggtggcactggcggcgatcatcgcagaccgcctgtttgaaaggctggtgcaggcgcttagccagcacgcaaaataa

SEQ ID NO: 471271 - DNA, 927 bp, Shigella flexneri
atgattgaatttagccatgtcagcaaactgttcggcgcacaaaaagccgttaacgatctcaatctcaattttcaggaagggagtttttcggtgctgattggcacatctggctccggcaaatccaccaccctgaaaatgattaaccgcctggtggagcatgacagcggagtgatccgctttgccggagaagaaattcgctcgctgccagtactggagttgcgccgccggatgggctatgccattcaatctattggcctgttcccccactggagcgtggcgcaaaacatcgctaccgtgccgcaattacaaaaatggtcgcgggcgcggattgacgatcgtatcgacgaattaatggcgctactggggctggagtcaaatttgcgtgagcgttatccgcatcagctttccggtggtcagcagcaacgtgtgggagtggcgcgtgcactggctgccgatccgcaagtcttactgatggatgaaccttttggcgcactggacccggtaacgcgcggcgcgttgcaacaagagatgacgcgcattcaccgtttgctggggcgcactattgtgctggtcactcatgatattgatgaggcgctacggctggcagaacatctggtattgatggatcacggtgaagtggtgcagcaggggaatccgctgacgatgctgactcgtccggcgaatgattttgtccgccagttttttggacgtagtgaactgggggtgcacctgctttcgttacgtagcgtggcggattacgtgcgtcgcgaagaacgggcagaaggtgaggcactggcagaagagatgacgctacgcgatgcgctctccctgtttgtcgcgcggggatgcgaggtgctgccggtggtgaacacgcagggccagccttgcggcacgctgcattttcaggatctgctggtggaggcgtaa

SEQ ID NO: 471272 - DNA, 1158 bp, Shigella flexneri
gtgacttatctacgtattaatcctgttctggcgctgctgttgttgctgacggcaatcgcagcggcgctgccgtttatcagttacgcgcctaatcgtttagtctcgggtgaagggcttcatctctggcaactgtggccgcaaacgatctggatgctggtgggcgttggttgcgcctggctgacagcctgttttgtccccgctaaaaaaggcagcatttttgcactcattctggcgcaattcgtcttcgtattgttggtgtggggagctggaaaggcggcgacccaactggcgcaaaatggcagtgcgctggcgcgtaccagcctcggcagaggtttctggctggctgcggcgctggcattgctggcctgtagcgatgccatccgccgaatctccacgcatccgctgtggcgctggttgttgcatatgcagattgccattattccgctgtggttgctgtactccggcacgcttaacgatctctcactaatgaaagaatacgccaaccgtcaggatgtgtttgacgacgcgctggcacaacatctgacgttgctgtttggtgcggtgctgcctgcgttagtgattggtgtgccgttgggcatctggtgctacttttccactgcgcggcagggggcaattttttctctgctcaatgtcattcagaccgtgccttcggtggcgctctttggcctgttgattgcgccgcttgccgcgctggttacggcctttccgtggctggggaagctcggcatagcaggaaccggaatgacacccgcactgattgcgctggtgctctatgccttgctgccgctggtgcgaggcgtggtagtcggtttgaaccagatcccgcgcgatgtgctggagagcgccagagcgatggggatgagcggggcgcagcgtttcctgcatgttcagttaccgctggcgttactggtatttctgcgcagcctgcgggtggtgatggtgcaaactgtaggtatggcggtgattgcggcgttaatcggcgcaggcggttttggtgcgctggttttccaggggctgctaagcagcgccattgatttagtgttgctgggggtgatcccggtaattgttctggcggtgcttaccgacgcgctgttcgatttgcttatcgcactgctgaaggtgaaacgtaatgattga

SEQ ID NO: 471273 - DNA, 918 bp, Shigella flexneri
atgccactcttaaagctctgggcaggttcactggttatgttggcagccgtgagcctgccgctacaggcggcttcccccgttaaagtcggttcaaaaatcgataccgaaggcgcgctgctcggcaacatcatcttgcaggtactcgaaagccacggcgtaccgacggtgaataaagtgcaactcggaacgactcctgtggggcgcggggcgattacttccggtgaactggatatctatccggaatataccggcaatggcgctttcttctttaaagatgaaaacgatgcagcgtggaaaaatgccgggcagggctacgagaaagtcaaaaagctcgatgcggagcacaacaagttaatctggctgacgcccgcgcctgcaaataacacctggactatcgccgtgcgtcaggatgtggcagagaaaaacaaactcacttcgcttgccgacctgagtcgttatctgcaagagggcggcaccttcaaactggcagcctcggcagagtttatcgaacgcgccgatgcgttacccacgtttgaaaaagcctatggctttaagctcggtcaggatcagttgctgtcactggctggtggcgacacggcggtgacgattaaagccgctgcccagcaaacctctggcgttaatgccgcaatggcttacggcactgacggtccggtcgcggcgctggggctgcaaaccttaagcgatccgcaaggcgtgcaacctatctacgcgcctgcaccagtggtgcgtgaatcggtgttgaaggagtatccgcaaatggcacagtggctacagccagtcttcgccagcctcgatgcaaaaacattgcagcaactgaatgccagcattgcagtggaaggactggatgccaaaaaagtggctgccgactacctgaaacaaaaagggtgggcgaagtaa

SEQ ID NO: 471274 - DNA, 2268 bp, Shigella flexneri
gtgagtctggtcctgcagccagcactggcggatgatttattcggtaaccatccattaacgcctgaagcgcgggatgcgttcgtcaccgatctgctcaagaaaatgacggttgatgagaaaattggtcagctgcgcttaatcagcgtaggcccggataatccgaaagaggcgatccgcgagatgatcaaagacggtcaggttggggcgattttcaacaccgtaacccgtcaggatatccgcgccatgcaggatcaggtgatggaattaagccgcctgaaaattcctcttttctttgcttacgacgtgctgcacggtcagcgcacggtgttcccgattagcctcggtctggcctcgtcttttaacctcgatgcggtgaaaacggtcgggcgtgtctctgcttatgaagcggcagatgatggcctgaatatgacctgggcaccgatggtcgatgtctcgcgcgatccgcgctggggacgtgcttccgaaggttttggcgaagatacgtatctcacctcaataatgggtaaaaccatggtggaagcgatgcagggtaaaagcccggcagatcgttactcggtgatgaccagcgtcaaacactttgccgcatacggcgcggtagaaggcggtaaagagtacaacaccgtcgatatgagtccgcagcgcctgtttaatgattatatgccgccgtacaaagcggggctggacgcaggcagcggcgcggtgatggtggcgctgaactcgctgaacggcacgccagccacctccgattcctggctgctgaaagatgttctgcgcgaccagtggggctttaaaggcatcaccgtttccgatcacggtgcaatcaaagagctgattaaacatggcacggcggcagacccggaagatgcggtgcgcgtggcgctgaaatccggaatcaacatgagtatgagcgacgagtactactcgaagtatctgcctgggttgattaaatccggcaaagtgaccatggcagagctggacgatgctgcccgccatgtactgaacgttaaatatgatatggggttgtttaacgacccatacagccatttggggccgaaagagtctgacccggtggataccaatgccgaaagccgcctgcaccgtaaagaagcgcgtgaagtggcgcgcgaaagcctggtgttgctgaaaaaccgtctcgaaacgttaccgctgaaaaaatcggccaccattgcggtggttgggccactggcggacagtaaacgtgacgtgatgggcagctggtccgcagccggtgttgccgatcaatccgtgaccgtactgaccgggattaaaaattccgtcggtgaaaacggtaaagtgctgtatgccaaaggggcgaacgttaccagtgacaaaggcattatcgatttcctgaatcagtatgaagaagcggtcaaagtcgatccgcgttcgccgcaagagatgattgatgaagcggtgcagacggcgaaacaatctgatgtggtggtggctgtagtcggtgaagcacaggggatggcgcacgaagcctccagccggaccgatatcactattccgcaaggccaacgtgacttgattgcggcgctgaaagccaccggtaaaccgctggtgctggtgctgatgaacgggcgtccgctggcgctggtgaaagaagatcagcaggctgatgcgattctggaaacctggtttgcggggactgaaggcggtaatgcaattgccgatgtattgtttggcgattacaacccgtccggcaagctgccaatttccttcccgcgttctgtcgggcagatcccggtgtactacagccatctgaacaccggtcgtccgtataatgccgacaagccgaacaaatacacttcgcgttattttgatgaagctaacggagcgctttatccgttcggctatggtctgagctataccactttcaccgtctctgatgtgaaactttctgcgccgaccatgaagcgtgacggcaaagtgacggccagcgtgcaggtgacgaacaccggtaagcgcgagggggccacggtagtgcagatgtacttgcaggatgtgacggcttccatgagtcgccctgtgaaacagctgaaaggctttgagaaaatcaccctgaaaccgggcgaaactcagactgtcagcttcccgatcgatattgaggcgctgaagttctggaatcaacagatgaaatatgacgccgagcctggcaagttcaatgtatttatcggcactgattccgcacgcgttaagaaaggcgagtttgagttgctgtaa

SEQ ID NO: 471275 - DNA, 1716 bp, Shigella flexneri
atgtcttccatgacaacaactgataataaagcctttttgaatgaacttgcccgtctggtcggtcattcacacctgctcaccgatcccgcaaaaacggcccgctatcgcaagggcttccgttctggtcagggcgacgcgctggctgtcgttttccctggctcactactggaattgtggcgggtgctgaaagcctgcgtcaccgccgacaaaattattctgatgcaggctgccaatacaggcctgaccgaaggatcgacgccaaacggtaacgactatgatcgcgatatcgtgatcatcagcaccctgcgtctcgacaagctgcacgttctcggcaagggcgaacaggtgctggcctatccgggcaccacgctctattcgctggaaaaagccctcaaaccgctgggacgcgaaccgcattcggtgattggatcatcgtgtataggcgcatcggtcatcggcggtatttgtaacaactccggcggctcgctggtgcaacgtggcccggcgtataccgaaatgtcgttattcgcgcgtatagatgaagatggcaaactgacgctggtgaaccatctggggattgatctgggcgaaacgccggagcagatccttagcaagctggatgacgatcgcatcaaagatgacgatgtgcgtcacgatggtcgtcacgcccacgattatgactatgtccaccgcgttcgtgatattgaagccgacacgcccgcacgttataacgccgatccggatcggttatttgaatcttctggttgcgccgggaagctggccgtctttgcggtacgtcttgataccttcgaagcggaaaaaaatcagcaggtgttttatatcggcaccaaccagccggaagtgctgaccgaaatccgccgtcatattctggctaacttcgaaaatctgccggttgccggggaatatatgcaccgggatatctacgatattgcggaaaaatacggcaaagacaccttcctgatgattgataagttaggcaccgacaagatgccgttcttctttaatctcaagggacgcaccgatgcgatgctggagaaagtgaaattcttccgtccgcattttactgaccgtgcaatgcaaaaattcggtcacctgttccccagccatttaccgccgcgcatgaaaaactggcgcgataaatacgagcatcatctgctgttaaaaatggcaggcgatggcgtcggtgaagccaaatcgtggctggtggattatttcaaacaggccgagggcgatttctttgtctgtacgccggaggaaggtagcaaagcgtttttacaccgtttcgccgctgcgggcgcagcaattcgttatcaggcggtgcattccgatgaagtcgaagacattctggcactggatatcgctctgcggcgtaacgacaccgagtggtatgagcatttaccgccggagatcgacagccagctggtgcacaagctctattacggccattttatgtgctatgtcttccatcaggattacatagtgaaaaaaggcgtggatgtgcatgcgttaaaagaacagatgctggaactgctacagcagcgcggcgcgcagtaccctgccgagcataacgtcggtcatttgtataaagcaccggagacgttgcagaagttctatcgcgagaatgatccgaccaatagcatgaatccggggatcggtaaaaccagtaaacggaaaaactggcaggaagtggagtaa

SEQ ID NO: 471276 - DNA, 894 bp, Shigella flexneri
atgctggctgtgccttttgcaccgcaggccgttgcgaaaacggcagccgctaccaccgcttcacaaccggaaattgcctccggtagcgcgatgattgttgatctgaataccaacaaagtgatctattcgaaccacccggatctggtgcgtccgattgcgtctatcagcaaattaatgaccgcgatggttgtgctggatgcacgactgccgctggatgaaaaactaaaagtggatatcagccagacgccggagatgaaaggggtctattcgcgcgtacgactgaatagcgaaatcagccgtaaagatatgctgttgctggcgctgatgtcttcagaaaaccgcgcggcggcaagccttgcgcaccattatcccggtggttacaaagcctttattaaggcaatgaatgcgaaagcgaaatcgctcggaatgaacaacacgcgctttgttgaacctaccggattgtcggtgcataacgtttcaactgcccgtgacttaaccaaactgctcattgccagcaaacaatatccgttgatcgggcagttaagtactacccgggaagatatggcaaccttctctaacccgacgtatacgctgccgttccgcaatactaatcatctggtgtatcgcgataactggaatattcagttaaccaaaaccggctttaccaatgcggcgggccattgtctggtgatgcgtacggttatcaataataaaccggtggcgctggtagtgatggacgcgtttggcaaatatacccattttgccgatgccagccgcctgcgtacctggattgaaaccggtaaagtgatgcctgtgccggcagcagcgttgagctataaaaaacaaaaagccgcccaaatggcggcggcggggcagacggcacagaacgattaa

SEQ ID NO: 471277 - DNA, 588 bp, Shigella flexneri
atgagccatgtctggggactgttttcccatcccgatcgtgaaatgcaggtgattaatcgcgaaaacgaaacgatttctcaccattacacccaccacgttttgctgatggcggcgattccggtgatttgcgccttcattggcactacacagattggctggaattttggcgatggcactatcctgaagttatcctggtttaccggactggcgctggctgtcttgttttacggcgttatgctggctggggttgcggtgatggggcgggtcatctggtggatggcgcgcaattacccgcagcgtccgtctcttgcgcactgcatggtcttcgcgggctacgttgcaactccgctgtttttaagcggtctggtggcgctttatccactggtctggttgtgtgcgctggtcggcacggtggcgctgttttacaccggctacctgctttaccttggtattccgagcttcctgaatatcaacaaagaggaaggccttagcttctccagttcgacgctggcgattggcgtgctggtactggaagtgctgctcaccctaaccgttatactatggggctacggttatcgtttgttctag

SEQ ID NO: 471278 - DNA, 579 bp, Shigella flexneri
atggatctcaatacactcatctcacaatatggttatgccgcgctggttatcggtagcctggcggaaggtgaaaccgtgactttgctgggaggcgttgcggcacatcaggggctattaaagttcccactggtggtactttctgtggcgcttggtggcatgattggcgaccaggtgctctatctgtgcgggcggcggtttggcggcaagctgttacgccgtttctcgaaacatcaggataaaattgagcgggcacagaaacttatccaacgccatccgtatctgtttgtcattggtacgcgctttatgtatggctttcgggtgattggcccgacgctgattggtgccagccagctgccgccgaaaatctttctgccgctgaatattctcggcgcatttgcctgggcgttgatttttaccactattggttacgctggtggtcaggtgattgcgccgtggttgcacaatctcgaccagcatttgaagcactgggtctggttgattctggtcgtggttctggtggtgggcgtgcgctggtggctgaaacggcgcgggaagaaaaagccggataatcaggcgtaa

SEQ ID NO: 471279 - DNA, 264 bp, Shigella flexneri
atggcgctggagttggtcaggcataagattttggtgaacgcagtcgcgcctggggcgatagccacgccaatgaacagcatggatgatagcgacgtgaagcccgacgcggagccttcgattcctctacggcgttttggcgcaacgcatgagattgccagcctggtggtgtggctttgttcggagggcgcaaattacacgacagggcagtcgttgatagtggatggcggctttatgttggcgaatccgcagttcaacccagaatag

SEQ ID NO: 471280 - DNA, 249 bp, Shigella flexneri
gtggttacccacggcgtacgtgcggagatcgtgcaactggatctcggcaatctgccagaaggtgcgcaggcgctggagacactcatccagcgatttgggcgtattgatgtgctggtgaataatgcgggtgcaatgaccaaagcgccgtttcttgatatggcttttgatgagtggcgcaagatttttaccgttgatgttgatggtgcatttttatgctcgcaaattgcggctcgtcagatggtgaaataa

SEQ ID NO: 471281 - DNA, 1437 bp, Shigella flexneri
atgaatcgtgattccttttatccagccatcgcctgttttccgctgttactgatgctggccgggtgtgcgcctatgcatgaaacccgccaggcgttaagccagcaaacgcccgctgcacaagttgacaccgcattacccacggcgctgaaaaatggttggccagacagccaatggtggctggagtatcacgataatcagctcacttcattaattaacaatgcactacagaacgcaccggatatgcaggtggctgaacagcgcattcagctagctgaagcccaggcgaaggcagttgccactcaggatggtccgcagatcgacttttcggcggatatggagcggcaaaaaatgtcggcagaagggctaatggggccgtttgctctgaacgatccggccgcaggtacgaccggtccgtggtacaccaacggaacttttggcttaacggcgggctggcatctcgatatctggggaaagaatcgggcggaggttactgcccgcctgggtacggttaaagcacgggcggcggaacgcgagcaaacccgccaattgctggctggcagcgtagcccgcctgtactgggagtggcaaacccaggcggcgttaaacacggtcttgcagcaaatagaaaaagagcagaacaccattatcgcgaccgatcgccagctatatcagaacgggattacttcttcagttgacggtgtggaaaccgatattaatgccagcaaaacccggcagcagctcaacgatgtcgcggggaaaatgaaaattattgaggcacggttaaatgcactcacaaatcaccagactaagtcattgaagcttaaaccggtcgcgttgccgaaagtggcaagccagcttcctgatgaactggggtactccttactggcccggcgggcagatttgcaggcggcgcactggtacgttgagtcatcgttaagcactattgatgcggcaaaagcggcattttatcctgacatcaacctgatggccttcctgcaacaggatgcgttgcacttaagcgatctgttccgtcattccgcgcagcaaatgggcgttacggcaggcctgacgctacctattttcgatagtggtcgtcttaacgccaatctcgatatcgcaaaagccgaaagcaacttgtctatcgccagctacaacaaagcggtggttgaagcagtgaatgacgtggcgcgggcagccagtcaggttcagacactggcggagaaaaaccagcatcaggcgcaaattgagcgcgatgccttgcgtgtggtaggtcttgcgcaggcccgctttaacgcgggcatcattgctggttcccgcgtcagcgaagccagaatcccggcgctgcgtgagcgggccaatggcctgttattgcaagggcagtggctggatgcctccattcgactcaccggtgcgctgggcgggggttacaaacgctga

SEQ ID NO: 471282 - DNA, 948 bp, Shigella flexneri
atgcgtgtgttactggcaccgatggagggagtgcttgactctctggtgcgtgaattgctgaccgaagttaacgactacgatctgtgcatcaccgagtttgtccgcgtggtggatcaactgctgccggtaaaagtctttcatcgcatttgccctgagctacaaaacgccagccggacaccatctggtacgctggtgcgcgtgcagttgttaggtcagttcccacaatggctggcagagaacgccgcccgtgcggtggagttaggtttctggggcgtggatctcaattgcggctgcccgtcgaaaacggttaacggtagcggcggcggggcgacgttactcaaagatcctgaactcatctaccagggggcaaaagcgatgcgtgaagctgtaccggcgcatttgcctgtcagcgtgaaagtgcgtctgggctgggacagcggtgagaagaaatttgaaatcgccgatgcggttcaacaggctggcgctacggagctggtggtgcatgggcggacgaaagagcagggttaccgcgcggagcatattgactggcaggcgattggcgagattcgccagcggctgaatattccggtgattgccaacggtgaaatctgggactggcagagcgcgcaacaatgcatggcgatcagcggctgcgacgcagtgatgattggtcgcggggcgctcaatattcccaacctgagccgggtggtaaaatataacgaaccgcgaatgccgtggccggaggtggttgctttgctgcaaaaatatacccgtctggaaaagcagggcgataccgggttatatcacgttgcgcggattaaacagtggttgagttatttgcgtaaagaatacgatgaagcaacggaattatttcagcatgttcgggtgttgaataactcccctgatattgcaagggctattcaggcaattgatatcgagaaactctaa

SEQ ID NO: 471283 - DNA, 399 bp, Shigella flexneri
atgagtaagacactgaacattatctggcaatatttacgcgctttcatcctgatttatgcctgcctgtatgcaggcattttcattgcttccctgctaccggtaaccattccgggcagcatcatcgggatgcagatcctgtttgtcctgctggccttgcaaattcttccggcgaaatgggtcaatccggggtgctacgtactgattcgctatatggcgctattgtttgtgccgattggcgtaggcgtcatgcaatattttgatttgctccgcgcgcagtttggcccggtagtggtttcctgtgctgtcagtacgctggtggtttttctggtggtgagctggagttcacaactggtacacggtgaacgtaaagtcgtaggtcagaaaggatcagaagaatga

SEQ ID NO: 471284 - DNA, 696 bp, Shigella flexneri
atgatggcgaatatctggtggtcattaccgctgacgttgattgtcttttttgccgcccgcaaactggcggcacggtataagtttcccctgcttaacccgttgctggtagcaatggtggtgatcattccttttttaatgctgaccggcatctcttacgacagttactttaaaggtagcgaagtgctaaacgatctgctgcaaccggcggtcgtcgcgctggcctatcctttatatgagcagctacaccagatccgcgcgcgctggaaatcgatcatcaccatctgttttatcggcagcgtggttgcgatggtgacggggacttccgtggcattgttgatgggcgcttcaccggaaatcgccgcgtcaatcctgccgaaatcagtcaccacgcctattgcaatggcggttggcggcagtattggcggtattccggcaatcagcgcagtttgcgtgattttcgtcggcatcctcggcgcggtatttggccatacattgcttaatgcgatgcgtattcgtaccaaagctgcgcgcggtctggcaatggggactgcctcgcacgccctcggtacggcgcgctgcgccgagctggattatcaggaaggtgcatttagttcgctagcgctggtgttatgcgggataattacttcgctgatcgcaccgttccttttcccgattattctggcagtaatgggctaa

SEQ ID NO: 471285 - DNA, 885 bp, Shigella flexneri
atgcatccacgttttcaaaccgcttttgcccaacttgcggataacttgcaatctgcactggaacctattctggcagacaagtacttccccgctttgttgaccggggagcaagtctcatcgctgaagagcgcaacgggactggacgaagacgcgctggcattcgcactacttccgctggcggcggcctgtgcgcgtacgccattgtcgaattttaatgttggcgcaattgcgcgcggtgtgagcggaacctggtattttggtgccaatatggaatttattggtgcaacaatgcagcaaaccgttcatgccgaacaaagcgcaatcagccacgcttggttgagtggtgaaaaagcgcttgcagccatcaccgttaactatacgccttgtggtcactgccgtcagtttatgaatgaactgaacagcggtctggatctgcgtattcatttgccgggccgcgaggcacacgcgctgcgtgactatctgccggatgcctttgggccgaaagatctggagattaaaacgctgctgatggacgagcaggatcacggctatgcgctgactggtgatgcgctttctcaggcggcgattgcagcggcaaaccgttcgcacatgccttacagtaagtcaccaagcggtgtcgcgctggaatgtaaagacggtcgtattttcagcggcagctacgctgaaaacgccgcattcaacccgactctgccgccgttgcagggggcgttaattctgttgaatctcaagggttatgattacccggatatccagcgcgcggttctggcagaaaaagccgatgcgccgttgattcagtgggatgccacctccgcaacgctgaaagctctcggctgtcacagtatcgaccgcgtgcttctcgcttaa

SEQ ID NO: 471286 - DNA, 720 bp, Shigella flexneri
atgttaaagcgcgtgttcctcagcctgttagtcctgatcggcttgctgctgttgactgtgctcggcctcgatcgctggatgagctggaaaaccgcgccttatatctacgacgaattgcaggatctcccctaccgccaggtcggcgtggtgctcggcacagcaaaatattatcgtaccggcgttattaatcagtattatcgctaccgcattcaaggagcgattaatgcctataacagcggtaaggtaaattatctattactgagcggcgataacgcattgcaaagttataacgagccgatgaccatgcgcaaagatttaatcgctgctggtgtcgacccatcagatattgttctcgattacgcaggctttcgtacgctggattccatcgtgcgtacacgcaaagttttcgatactaatgatttcattattatcacccaacgtttccactgtgagcgagcattatttattgcgctgcatatggggattcaggctcagtgttatgccgtaccgtcaccgaaagatatgctgtcagtacgtattcgcgaatttgccgcccgtttcggtgcgctggctgacctttatatttttaaacgtgaaccgcgttttttagggccgctggtccctattccggctatgcaccaggtgccggaatatgcgcaggggtatcccgccgttacacccgaacagttacttgaattacaaaagaaacaaggaaagtag

SEQ ID NO: 471287 - DNA, 240 bp, Shigella flexneri
atggatgtacagcagttttttgtcgttgccgtttttttccttatcccgatattttgtttccgcgaagcatggaaaggctggcgcgcaggcgcgattgataaacgggttaaaaatgcaccggaaccggtgtatgtctggcgagcaaaaaatcccggactcttcttcgcttatatggtggcatatattggcttcggaattttatctatcggcatgattgtttatcttattttctatcgttaa

SEQ ID NO: 471288 - DNA, 1239 bp, Shigella flexneri
atgccgcaacaaaattatctggatgaactcactccggcttttacgccgttactggcgattaaagaagcctctcgctgtttattatgtcacgacgctccctgtagtcaggcttgcccggcacagaccgatccggggaaatttattcgctcaatctactttcgtaattttaaaggcgctgccgagacaattcgcgaaaataatgccctcggtgccgtttgtgccagagtgtgcccgacggagaaattatgccaaagcggttgtacccgtgccggtgttgatgctcccattgatatcggccgcttacagcgttttgttactgattttgaacaacaaaccgggatggaaatttatcagcccggtactaaaacgctcggcaaagtcgcgattattggcgcaggtcctgccggattgcaggccagtgtgacactgacaaaccagggttatgacgtcacgatttatgagaaagaagcgcaccccggtggctggttgcgtaacggtattccgcaattccggttaccgcaatcagtgctggatgcagagatcgcccgtattgaaaaaatgggcgtgaccattaagtgcaataacgaaatcggtaaaacactcaccctggagcaactgaaagcggaaaaccgcgcggtactggtcaccgtggggttatcaagcggttccgggctaccgctgtttgagcatagcgacgttgagattgccgtcgacttcctgcaacgtgtacgacaggcgcaaggcgatatcagcattccacaaagcgcattaattatcggcggcggtgatgtcgcgatggacgtagccagcacgctgaaagttctcggctgtcaggcggtaacttgcgtagcacgtgaagagttagatgagtttccggcaagcgaaaaagagtttgccagcgcccgggagctgggcgtttcgatcatcgatggattcacgccagtagccgtggaaggcaataaagtcacgtttaagcatgtacggttatcaggcgaactgacgatggcggcagataaaattattctcgccgtcggtcagcatgccagactggatgcctttgcggagttagagcagcagcgtaacaccatcaaaacacaaaattatcagacccgcgatccgcaagtctttgctgctggcgatattgttgagggtggcaaaaccgtggtctatgccgtgaaaaccgggaaagaagccgccgaggcgattcatcactatttagagggagcttgctcatgttaa

SEQ ID NO: 471289 - DNA, 369 bp, Shigella flexneri
atgttaacgaaagatctttcgattactttttgcggcgtgaactttcccaacccgttctgcctctcttcttcgccggtaggcaactgctatgagatgtgtgccaaagcctacgacacaggttggggcggtgtggtgtttaaaacgatcggcttttttatcgccaacgaagtctcgccgcgttttgatcatctggtgaaagaagataccggttttatcggcttcaaaaatatggagcagattgctgaacatccgttggaagagaatctgaccgccctgcgtcggctgaaggaagattacccggacaaagtattgatcgcttcgatcatgggggaaaatgagcagcaatgggagcagctggcgcggatatga

SEQ ID NO: 471290 - DNA, 429 bp, Shigella flexneri
atgggagcagctggcgcggatatgatcgagtgtaacttctcctgtccgcaaatgacttctcatgcgatgggtagcgatgtcgggcaaagcccggagctggtagaaaaatattgtcgggcagtgaaacggggttccacgctgccaatgctggcgaagatgacgccgaatatcggtgatatgtgcgaagtggcgctggcggcgaagcgcggcggcgcagatggcattgcggcaattaacaccgttaaatccatcaccaatatcgatcttaatcagaaaatcggtatgccgatcgttaacggtaaatcgagtatttccggatattccggtaaagcggtaaaaccgatcgccctgcgcttcattcagcaaatgcgcacccatccagaactgcgcaatttcccaatcagcggtatcggcggcattgaaacctag

SEQ ID NO: 471291 - DNA, 351 bp, Shigella flexneri
atggcgagcgggttatcgcattatctcgccgatcagggatttgattcgttgcaggagatggtaggtctggcgaataacaatattgtcccggcggaagatttagaccgcagttatattgtctatccccgtatcaatcttgacaaatgtgttggctgtggacgctgttatatttcctgttacgacggcggtcaccaggcgatggaatggagcgagaaaacccgcacaccgcattgtaataccgagaaatgtgtgggttgtctgctttgtggtcacgtctgcccggtgggttgtattgagctcggggaagtgaagtttaagaaaggcgagaaagaacacccggtaacgttgtaa

SEQ ID NO: 471292 - DNA, 1011 bp, Shigella flexneri
atgagtgcgttaaataagaaaagttttcttacttacctgaaagagggcggtatttacgtcgttcttttagttttgctggcgattattattttccaggacccaacatttttaagtctgttgaacttaagtaatattctcacccagtcatcggtgcgtattattatcgcgctcggtgtggcagggttaattgtcacccaggggaccgatctttctgctggtcgtcaggtagggctggcggcagtggtggctgcgacattattgcagtccatggataacgccaacaaagtgttcccggaaatggcgacgatgccgattgcgctggttattctgattgtctgtgccattggtgcggtgatcggtttgatcaacggtctgattatcgcttatctcaacgtgacgccgttcattaccacgctcggcacgatgatcatcgtctatggcatcaactcgctctattacgactttgtcggggcgtcgccaatttctggttttgacagtggcttctctacctttgctcagggctttgtcgcgctggggagtttccgtctctcttacatcaccttctacgcgttgattgcggtggcgttcgtctgggtgttgtggaacaaaacccgcttcggtaagaacatttttgccattggcggtaacccggaagcggcaaaaatatctggtgtcaacgtcggcctgaacctgctgatgatctacgcgttgtctggcgtgttctatgcctttggcgggatgttagaagccggacgtatcggctctgccaccaacaacctcggctttatgtatgagctggatgctatcgcggcgtgcgtggtaggcggtgtatcgttcagcggcggtgtggggacggtgattggcgtggtgaccggggtaattatttttaccgtcatcaactatggcctgacgtatatcggcgtaaacccatactggcagtacatcatcaaaggggcgattattatcttcgccgtagcgctggattcactgaaatacgcgcgtaagaagtga

SEQ ID NO: 471293 - DNA, 1521 bp, Shigella flexneri
atggtcagctcaacgactccgtcttccggggaatacttgttggaaatgagcggtatcaacaagtcctttcctggtgttaaggcacttgataacgttaatttaaaagtccggccacattctatccatgcattaatgggggaaaacggtgcaggaaaatcgacattattaaaatgcctgtttggtatttatcaaaaagactccggcaccattttattccagggtaaagagatcgatttccattccgccaaagaggcactggaaaatggtatttcgatggtacaccaggagttaaacctggtattacaacgttcggtgatggataacatgtggctggggcgatatcccaccaaaggcatgtttgtcgatcaggacaaaatgtaccgcgaaaccaaagcgatttttgatgaactggatattgatatcgatccgcgtgcgcgcgtcggcacattatccgtttcgcaaatgcagatgatcgaaatcgccaaagcgttttcctataacgcgaaaattgtgattatggatgaaccgacttcttcgttaaccgaaaaagaggtcaatcatctgttcactattattcgtaaattaaaagagcgcggctgcggtattgtttatatctcgcataaaatggaagaaatcttccagttatgtgatgaagttaccgtattgcgcgacggtcagtggatcgccaccgaaccgctggcaggactgacgatggacaagatcatcgccatgatggttgggcgttctcttaatcagcgttttcctgacaaagaaaacaagccgggcgaagtcatcctcgaggtgcgtaacctaacgtcactgcgccagccgtcgattcgcgatgtctcgtttgatctgcataaaggggagatcctcggtattgccgggctggtgggggcgaaacgtaccgatattgttgagacgttatttggtattcgcgagaaatcggctggcaccattacgttgcacggtaaacagatcaataaccataatgccaacgaagccataaaccacggatttgcactggtaactgaggagcgccgctcaacgggaatttatgcctatctggatattggttttaactcgttaatttccaatattcgcaactacaaaaataaagttggtttactggataactcgcggatgaaaagcgatacccagtgggtgattgattcgatgcgggtaaaaacgccgggtcatcggacgcaaattggttcgctctccggtggtaatcagcaaaaggtgattattggtcgctggctactaacgcaaccagaaatattaatgctcgatgaaccgacgcgcggtattgatgtcggggcgaagtttgaaatttatcagttaattgccgaactggcgaagaaaggcaaggggattattattatctcctctgaaatgcctgagttgttagggataacagaccgtattctggtcatgagcaatggtctcgtttccggaattgtcgatacaaaaacaacaacgcaaaacgaaattctgcgtcttgcgtctttgcacctttaa

SEQ ID NO: 471294 - DNA, 999 bp, Shigella flexneri
atgaataagaaggtgttaaccctgtctgctgtgatggccagcatgttattcggtgccgctgcacacgctgctgatactcgcattggtgtaacaatctataagtacgacgataactttatgtctgtagtgcgcaaggctattgagcaagatgcgaaagccgcgccagatgttcagctgctgatgaatgattctcagaatgaccagtccaagcagaacgatcagatcgacgtattgctggcgaaaggggtgaaggcactggcaatcaacctggttgacccggcagctgcgggtacggtgattgagaaagcgcgtgggcaaaacgtgccggtggttttcttcaacaaagaaccgtctcgtaaggcgctggatagctacgacaaagcctactacgttggcactgactccaaagagtccggcattattcagggcgatttgattgctaaacactgggcggcgaatcagggttgggatctgaacaaagacggtcagattcagttcgtactgctgaaaggtgaaccgggccatccggatgcagaagcacgtaccacttacgtgattaaagaattgaacgataaaggcatcaaaactgaacagttacagttagataccgcaatgtgggacaccgctcaggcgaaagataagatggacgcctggctgtctggcccgaacgccaacaaaatcgaagtggttatcgccaacaacgatgcgatggcaatgggcgcggtagaagcactgaaagcacacaacaagtccagcattccggtgtttggcgtcgatgcgctgccagaagcgctggcgctggtgaaatccggtgcactggcgggcacagtactgaacgatgctaacaaccaggcgaaagcgacctttgatctggcgaaaaacctggccgatggcaaaggtgcggctgatggcaccaactggaaaatcgacaacaaagtggtccgcgtaccttatgttggcgtagataaagacaacttggctgaattcagcaagaaataa

SEQ ID NO: 471295 - DNA, 1041 bp, Shigella flexneri
atgatcaccattcgtgatgtagcgcgtcaggctggcgtctctgtggcaacggtttcccgggtgctcaataacagcacgctggtcagtgccgacacgcgtgaagcagtaatgaaagccgtgagtgagctggattatcggccaaacgccaatgcccaggcgctggcaactcaggttagcgacaccattggcgtggtggtgatggacgtttctgatgcgtttttcggcgcgctggtaaaagcggtggatctggtcgcccagcagcatcagaaatacgtgctaatcggcaatagctatcatgaagcggaaaaagagcgtcacgccattgaggtgttaattcgccagcgttgtaatgcgttgattgttcactcaaaagcattgagtgacgatgaactggcgcaatttatggataacattcccggtatggtgttaatcaaccgcgttgtgccggggtacgcccatcgttgcgtttgcctggataatctcagcggtgcccgaatggcgacgcgcatgttgctgaataacggtcatcaacgtattggttatctttcttccagccacggcattgaagatgacgccatgcgtaaagcaggctggatgagtgcgttgaaagagcaggatattattccgccggaaagctggattggcactggtacgccggacatgccgggcggtgaggcggcgatggttgaactgctggggcgcaatctacaacttaccgctgtatttgcttataacgacaatatggccgctggcgcactgacagcattaaaagataatggcattgcgattccgttacatctctcaatcatcggtttcgatgatattcccatcgcccgttacaccgacccgcaattaacgaccgtgcgttatcccattgcttcaatggctaaattagccaccgaactggccttgcagggggcagcaggcaatattgatcctcgtgccagccactgttttatgccgacgttagtgcgtcgccattctgtcgcaacgcgccagaatgcggcggcgatcactaactcaacaaatcaggcgatgtaa

SEQ ID NO: 471296 - DNA, 1077 bp, Shigella flexneri
atggagcgcaacgtcacgctcgattttgttcgcggcgtcgccattctggggatcctgctattaaacatcagcgcctttgggctaccaaaggcggcttatctcaatcccgcctggtacgatgctattacgccgcaggatgcatggacctgggcatttctcgatctcatcggccaggtgaaattcctcacgctttttgcgctgctgtttggtgctggcctgcaaatgttgctgccccgtggcagactctggatccagtcgcggttaacgctgttagtcttgttgggctttattcacggtttattgttctgggacggcgatattctgctggcttacgggctggtggggcttggcgttttgctgttattggggctgatttccgacagccagaccagccgcgcctggacgccggatgcatcggctattttgtatgaaaaatactggaagcttcacggcggcgttgaagcgatcagtaatcgtgccgatggtgttggcaacagtttactggcactgggcgcacagtatggctggcaactggcagggatgatgctcattggtgcggcgctgatgcgcagcggctggctgaaagggcagttcagcttacgtcactatcgtcgtactggttttgtgctggtggcgattggggtgaccattaaccttcctgccatcgccctgcaatggcagctggactgggcgtatcgctggtgtgccttcttacttcaaatgccgcgggaactgagtgcgccgtttcaggcgattggctatgcgtcgctgttttatggcttctggccgcaattgagccgctttaagctggtgcttgcgatcgcctgcgtcggacggatggcgctgaccaactatctattgcaaacgctgatttgtaccacgcttttttaccacctcggtttgtttatgcattttgaccgcctggagctgctggcgtttgttattccggtatggctggcgaatatcctcttctctgttatctggctgcgttacttccgccaggggccggtggaatggctctggcgtcagttaactttgcgtgctgccggaccggcaatatctaaaacatcaagataa

SEQ ID NO: 471297 - DNA, 669 bp, Shigella flexneri
atgccatcactcagtaaagaagcggccctggttcatgaagcgttagttgcgagaggactggaaacaccgctgcgcccgcccgtgcatgaaatggataacgaaacgcgcaaaagccttattgctggtcatatgaccgaaatcatgcagctgctgaatctcgacctggctgatgacagtttgatggaaacgccgcatcgcatcgctaaaatgtatgtcgatgaaattttctccggtctggattacgccaatttcccgaaaatcaccctcattgaaaacaaaatgaaggtcgatgaaatggtcaccgtgcgcgatatcactctgaccagtacctgtgaacaccattttgttaccatcgatggcaaagcgacggtggcttatatcccgaaagattcggtgatcggtctgtcaaaaattaaccgtatcgtgcagttctttgcccagcgtccgcaggtgcaggaacgtctgacgcagcaaattcttattgcgctacaaacgctgctgggcaccaataacgtggctgtctcgatcgacgcggtgcattactgcgtgaaggcgcgtggcatccgcgatgcaaccagtgccacgacaacgacctctcttggtggattgttcaaatccagtcagaatacgcgccacgagtttctgcgcgctgtgcgccatcacaactga

SEQ ID NO: 471298 - DNA, 609 bp, Shigella flexneri
atggaaatgctcgaagagcaccgctgttttgaaggctggcagcaacgctggcgacacgactccagtaccttaaactgcccgatgacgttcagtatctttctcccaccccctcgtgatcacaccccgccaccagtgctgtactggctttccggattaacctgcaatgacgagaacttcaccaccaaggcgggtgcccagcgggtagcggcggaactggggattgtactggtgatgccagacaccagcccgcgcggcgaaaaggttgccaacgacgatggctacgatttaggccagggcgcaggcttttatcttaatgccacgcaaccgccgtgggcgacgcattaccggatgtatgattatctgcgcgatgaattaccggcgctggttcagtcgcaatttaatgtcagcgaccgctgcgccattagcggtcactcaatgggtggtcacggtgcgctgattatggcgctgaaaaatccgggtaaatacaccagcgtttcggcctttgcgcccattgtgaatccgtgcagcgtcccgtggggaatcaaagcgtttagcacctatttaggtgaggacaaaaatgcatgctggaatgggatagttgcgcgctga

SEQ ID NO: 471299 - DNA, 255 bp, Shigella flexneri
atgctggaatgggatagttgcgcgctgatgtatgccagtaacgcgcaggatgcgatcccgacgcttatcgatcagggcgataatgatcagtttcttgccgaccagttgcaacctgcggtattggcagaagccgcgcgccagaaagcgtggccgatgacgctgcgtattcagccgggatatgatcacagttactacttcatcgcctcttttatagaggatcacctgcgcttccatgcgcagtatttactgaagtga

SEQ ID NO: 471300 - DNA, 1992 bp, Shigella flexneri
atgtttaggttgaaccctttcgtacgggtcgggctgtgtttgtccgctatttcttgtgcatggcctgtgttagcggtcgatgatgatggcgaaacgatggttgtcactgcatcttccgtggaacaaaatcttaaagatgcacccgccagtatcagcgtcattacccaggaagacctgcagcgaaaaccggtacagaatctgaaggatgtcctcaaagaagtgcctggcgtacaactgacgaacgaaggggataaccgtaagggcgttagtattcgtggtctggacagcagctacaccctgattcttgtcgacggtaaacgcgttaactcccgcaatgccgtcttccgccacaatgatttcgatctgaactggatcccggtcgattccatcgaacgtattgaagtggttcgtggcccgatgtcgtcgctatacggctccgatgcgctcggcggtgtagtgaatatcatcaccaaaaaaatcggtcagaaatggtcgggtaccgttaccgtcgataccaccattcaggaacatcgcgatcgcggtgatacctataacggtcagttctttaccagtggaccattaattgatggtgtgctgggaatgaaagcttacggcagcctggcaaaacgtgaaaaggatgacccgcaaaactcaacgaccaccgataccggagaaacgccgcgtattgaaggattctccagccgcgacggcaatgtcgaatttgcctggacaccgaatcaaaatcacgattttactgccggatacggtttcgaccgtcaggatcgtgattccgattcgctggacaaaaaccgcctggaacgccagaactactgcgtcagccataatgggcgttgggattacggcaccagcgaactgaaatcctacggtgagaaagtcgagaacaaaaaccctggcaacagcagcccgataacttccgaaagcaatacggtcgacggcaaatacacgttgccgctgacggcgattaatcagtttctcacggttggcggtgaatggcgtcacgacaaacttagcgatgcggtgaacctgaccgggggaaccagctccaaaacgtctgccagccagtacgcgctgtttgtggaagatgaatggcggatcttcgagccgctggcgctgacgaccggcgtgcgtatggacgatcacgaaacctacggtgaacactggagtccgcgtgcctacatggtttataacgccaccgacaccgtaacggtgaaagggggctgggcgacggcatttaaagcaccttctctgttgcaacttagccctgactggacgagcaattcctgccgtggcgcatgtaagattgtgggtagcccggatctgaaaccagaaaccagcgaaagttgggagctggggctttactacatgggtgaagaaggctggctggaagggggtgaatccagcgttatcgttttccgtaacgatgtgaaagatcgtatcagcatcagccgtacgtctgacgtcaacgctgcaccgggctaccaaaactttgttggttttgagacgggcgctaacggacggcgcataccggtatttagctactacagcgttaacaaagctcgtattcagggcgtggaaaccgaactgaaaattccgttcaacgatgaatggaaactgtcgatcaactacacctacaacgatggtcgtgatgtcagcaacggcgaaaacaaaccgctatccgatctgccgttccatactgctaacggtacgctggactggaaaccgctggcgctggaagactggtcattctatgtttctggtcactataccgggcagaaacgcgccgacagcgcgacggctaaaacaccgggcggttataccatctggaataccggcgcggcctggcaggtgactaaagacgtcaaactgcgcgcaggcgtgctgaaccttggcgacaaggatctcagtcgtgacgactacagctataacgaagacggacgtcgttactttatggcagtggattatcgcttctga

SEQ ID NO: 471301 - DNA, 1470 bp, Shigella flexneri
atgggttccgaaactaaaactacagaagcgccgggcttacgccgtgaattaaaggcgcgtcacctgacgatgattgccattggcggttccatcggtacaggtctttttgttgcctctggcgcaacgatttctcaggcaggtccgggcggggcattgctctcgtatatgctgattggcctgatggtttacttcctgatgaccagtctcggtgaattggctgcatatatgccggtttccggttcgtttgccacttacggtcagaactatgttgaagaaggctttggcttcgcgctgggctggaactactggtacaactgggcggtgactattgccgttgacctggttgcagcacagctggtcatgagctggtggttcccggatacaccgggctggatctggagtgcgttgttcctcggcgttatcttcctgttgaactacatctctgttcgcggctttggtgaagcggaatactggttctcactgatcaaagtcacgacagttattgtctttatcatcgttggcgtgctgatgattatcggtatcttcaaaggcgcgcagcctgcgggctggagcaactggacaatcggcgaagcgccgtttgctggtggttttgcggcgatgatcggcgtagctatgattgtcggcttctctttccagggaaccgagctgatcggtattgctgcaggcgagtccgaagatccggcgaaaaacattccacgcgcggtacgtcaggtattctggcgaatcctgttgttctatgtgttcgcgatcctgattatcagcctgattattccgtataccgatccgagcctgctgcgtaacgatgttaaagacatcagcgtcagtccgttcaccctggtgttccagcacgcgggtctgctctctgcggcggcggtgatgaacgcagttattctgacggcggtgctgtcagcaggtaactccggtatgtatgcgtctactcgtatgctgtacaccctggcgtgtgacggtaaagcgccgcgcattttcgctaaattgtcgcgtggtggcgtgccgcgtaatgcgctgtatgcgacgacggtgattgccggtttgtgcttcctgacctccatgtttggcaaccagacggtatacctgtggctgctgaacacctccgggatgacgggttttatcgcctggctggggattgccattagccactatcgcttccgtcgcggttacgtattgcagggacacgacattaacgatctgccgtaccgttcaggtttcttcccactggggccgatcttcgcattcattctgtgtctgattatcactttgggccagaactacgaagcgttcctgaaagataccattgactggggcggcgtagcggcaacgtatattggtatcccgctgttcctgattatttggttcggctacaagctgattaaaggaactcacttcgtacgctacagcgaaatgaagttcccgcagaacgataagaaataa

SEQ ID NO: 471302 - DNA, 882 bp, Shigella flexneri
atgcacatcaccctccggcagttggaagtttttgcagaagtattgaaaagtggatcaaccacccaggcgtcggtgatgctggcgttgtcgcaatcagcagtgagcgcagccttgactgacctggaagggcagcttggcgttcaactgtttgatcgcgtggggaaaagactggttgttaatgaacacgggcggctgctctatccgcgagcgttggcactgcttgaacaggcggttgaaatcgaacaactgtttcgcgaagacaacggcgcgattcgtatctatgccagtagtaccatcggtaactacattctgcctgcagttatcgcccgttatcgccatgattatccgcagttgccgattgaacttagcgttgggaacagccaggacgtgatgcaagcggtgctggatttccgcgttgatattggctttattgaaggaccgtgccacagcactgaaatcatttctgaaccgtggctggaagacgagctggtggttttcgccgcgccgacttcgccgttggctcgtggtccggtcaccttagaacagctggccgctgcgccgtggatcctgcgtgaacgcggttccggcacgcgggatattgtcgattatctgttgctgtcacatttaccgaagtttgagatggcgatggaattaggtaactccgaggcaatcaaacatgcggtgcgtcatgggttgggaattagttgcctgtcgcgacgtgtgattgaagatcaattgcaggcaggcacattaagtgaagttgcggtccctctgccgcgcctgatgcgtacgttgtggcgtatacatcatcggcaaaaacacctttccaacgcgctacggcgctttctggactattgcgatcccgcaaatgtgccgcgttaa

SEQ ID NO: 471303 - DNA, 1050 bp, Shigella flexneri
atgacgaatatcaccttacagaaacaacatcgtacactgtggcattttattccggggttagccctgagtgcagttatcaccggggtcgccctgtggggtggttccattcccgcggttgcgggtgccgggtttagtgccctcaccctcgcaatcttgttggggatggttttaggcaacaccatctatccgcacatctggaaaagctgtgacggtggtgtgctgtttgccaagcaatatttattacgtctgggtatcattctttatggcttccgtctgacgttctcgcaaattgccgatgtcggtatcagtgggatcatcattgacgtgctgacgctgtccagtaccttcctgctggcttgcttcctggggcagaaagtgtttggtctggataagcacaccagttggttgatcggtgccggtagcagtatctgtggtgctgccgcggtactggcgactgagccggtagtgaaagcggaagccagtaaagtaaccgtggctgttgcaaccgttgttatcttcgggaccgtcgcgattttcctctacccggcgatatatccgctgatgtctcaatggtttagtccggaaactttcggtatctacattggttctactgtgcacgaagtggcgcaggtggtggcggcaggtcatgccatcagcccggatgcagaaaacgcagcagttatttccaaaatgctgcgcgtgatgatgctggctccgttcctcatcctgctggcggcgcgtgttaaacagctgtctggggcgaacagcggcgagaaaagcaaaatcactattccgtggtttgccatcttgttcatcgtagttgccatctttaactcgttccacctgttaccgcagagcgtggtgaacatgctggtaacgctggataccttcctgctggcaatggcgatggcggcgctgggtctgaccactcacgtcagcgcgctgaaaaaagctggggcgaaacctctgctgatggcactggtactgtttgcctggctgattgttggtggtggtgcgattaactatgtgattcaaagcgtcatcgcataa

SEQ ID NO: 471304 - DNA, 858 bp, Shigella flexneri
atgaaatacattggagcgcacgttagtgctgctggcggtctggcaaatgccgcaattcgcgccgccgaaatcgacgcaaccgcgtttgccttgttcaccaaaaaccaacgtcagtggcgtgccgcaccgctcacgacgcaaaccatcgatgaattcaaagccgcctgtgaaaaatatcactacacatcggcgcaaattcttccccacgacagttatctgatcaacctcggacatccggtcactgaagctctggaaaaatcgcgcgatgcctttatagatgaaatgcagcgttgcgaacaactggggctttctttgctcaacttccaccctggcagccatctgatgcagatttcagaagaggattgccttgcgcgtattgccgaatccatcaacattgcgctggataaaactcaaggtgtaacagcggtgattgaaaacaccgccggtcagggcagtaacttagggtttaaattcgaacatctcgcggcgattatcgacggcgtggaagataaatcccgcgtcggcgtctgcattgatacctgccatgctttcgctgccgggtatgatttgcgtactccagccgaatgcgaaaaaacgttcgctgattttgcccgtattgtcggctttaagtatctgcgcgggatgcaccttaacgatgcgaaaagtacctttggcagccgcgttgaccgccatcatagcctcggtgaaggcaatatcggtcatgatgcgttccgctggattatgcagaacgaccgtttcgacggcattccgctgatccttgaaaccatcaacccggatatctgggcagaagagatcgcctggctgaaagcgcaacaaactgaaaaagcggtagcctga

SEQ ID NO: 471305 - DNA, 1089 bp, Shigella flexneri
atgaataaccgggaaaaggagatccttgcaattttacggcgtaacccgctgattcagcagaacgaaattgcggacatgctgcaaatcagtcgttcgcgcgttgcggcgcatattatggatttaatgcgcaaaggccggattaaagacaaaggttacattctcaccgagcaggcatactgcgtagtggtggggacaatcaatatggatattcgcgggatggcggatatccattacccgcaagcggcttctcatcccggtacaattcattgttcggcaggcggcgttggacgcaatatcgcccacaatctggcgctgttaggccgtgacgtccatttgctttcagtgattggcgatgacttttatggcgaaatgctcctggaagaaacgcgccgtgccggcgtgaatgtctccggctgcgttcgtttgcatggtcaaagcacatcgacgtatctggcaattgccaatcgagacgatcaaaccgtgctggcaattaacgatacccatctgctggaacagttgacaccgcaactactgaacgggtcgcgcgatttacttcgtcatgcgggcgtggtactggctgattgcaacctgacagccgaggcgctggaatgggtctttaccctcgctgatgagatcccggtgtttgtcgataccgtttcagaattcaaagcgggcaaaatcaaacactggctggcgcatattcacaccctgaaacccactttaccggagctggaaattttatggggacaggcgatcaccagcgatgctgaccgtaatgccgcagtgaatgcattgcatcagcaaggtgttcagcaactgtttgtttatttgcccgatgagtcagtttattgcagcgaaaaggatggtgaacaatttttgctgactgtgccagcgcatacgacggtagacagttttggtgctgacgatggttttatggcgggtctggtatatagctttctggagggaaacaatttccgtgacagcgcccgttttgcgatggcctgcgcggcaatttcacgcgccagcggcagcttaaacaaccctaccctgtctgccgataacgcgctgtcattagtgccaatggtgtaa

SEQ ID NO: 471306 - DNA, 1251 bp, Shigella flexneri
atggatgtcatgagaagtgttctgggaatggtggtactgctggcaattgcgtttttactgtcagtaaacaagaagaagatcagcctgcgtaccgttggcgcggcgttagtgttacaggtcgtgattggcgggattatgctttggttaccgccagggcgttgggtcgcagaaaaagtcgcttttggcgtccacaaagtgatggcgtacagcgacgcaggtagcgcatttatcttcggttctctggtcggaccgaaaatggataccttatttgatggcgcaggatttatctttggtttcagggtattaccggcaattatcttcgtcactgcacaggtgagtattctctactacatcggtgtgatggggatcttaattcgcattctcggcggtatcttccagaaagctttaaatatcagcaagatcgagtcattcgtcgcggtcaccaccattttcctcgggcaaaacgaaattccggcgatcgtcaaaccctttatcgatcgtctgaatcgcaatgaattatttacagcgatttgtagtggcatggcctcgattgctggttcgacaatgattggttacgccgcactgggcgtacctgtggaatatttgctggcggcatcgttaatggcgatccctggcgggatcttgtttgcccgcctgttaagcccggctacggaatcttcgcaggtttcttttaataacctctctttcaccgaaacaccgccaaaaagcattattgaagccgatgcgacaggggcaatgaccgggctgaaaatcgccgccggtgtagcgacagttgttatggcatttgtcgccatcattgcgttaattaacggtattatcggcggcgttggcggctggtttggttttgaacatgcctcgctggagtccattttaggttacctgctggccccacttgcgtgggtaatgggtgttgactggagtgatgtaaatcttgccgggagtttgattggacagaaactggcaataaatgaatttgtcgcttatctcaatttctcaccctatctgcaaacggctggcactctggatgctaaaaccgtggcgattatttccttcgcgttgtgcggtttcgctaactttggttctatcggggtggtggtgggggcgttttctgcggttgcgccacaccgtgcgccggaaatcgcccggcttggtttacgcgcgctggcggcggcgacactttctaatctgatgagtgccaccattgccgggttctttattggtttagcgtag

SEQ ID NO: 471307 - DNA, 942 bp, Shigella flexneri
atggaaaagagaaaaattattctggattgtgagccgggtcatgatgatgctattgcaatgatgatggcagcgaaacattcggcaatagatttattaggcatcactattgtagcgggtaatcagacgcttgataaaacattaattaatggcctgaatgtttgccagaaactggagattaatgttccggtttatgcggggatgccgcaacccattatgcgtaaacaaatcgttgccgataatattcacggtgaaaccggactggatggcccggtattcgagccgctgacccgccaggcagaaagtacccatgcggtgaaatatatcatcgataccctgatggcaagcgatggcgatatcactctggtgccggttggtccgctttcaaatatcgcggtggcaatgcgtatgcaacccgcaatcctgcccaaaatccgtgaaattgtgctaatgggcggcgcttacggtacaggcaacttcaccccatctgccgagttcaatatctttgccgacccggaagccgcccgcgtggtgttcacctccggcgttccattagtgatgatgggcctcgatcttaccaaccagaccgtttgcaccccggatgtaattgctcggatggaaagggtaggcggccctgccggagagctgttcagcgacatcatgaacttcactctcaaaacgcagttcgaatactacggcctggctggcggcccggtgcatgacgccacctgcattggttatctgatcaaccctgatggcattaaaacccaggatatgtacgtcgaagtggacgtcaacagcggcccttgctacgggcgtacggtctgcgacgaactgggcgttcttggcaagcccgctaataccaaagtcggcatcactattgataccgactggttctggggcttagtcgaagagtgcgtgcgcggctacatcaaaacccattaa

SEQ ID NO: 471308 - DNA, 618 bp, Shigella flexneri
gtgaaagaaatccacaataatgaccttaagcagcaattgatgagtgaatctgcgtttaaggattgcttttcaacggatgtttcagccgatacgcggctgtttcattttttagcgcgtgactacattgtgcaggaagggcaacagccgtcatggctgttttatctgacgcgaggccgcgccaggctttacgccacgcttgccaatggtcgcgtgtcgctgatcgatttctttgccgctccctgttttattggcgagattgagttaatcgacaaagaccatgaaccgcgtgcggtgcaggctattgaagagtgttggtgccttgcgctccctatgaaacattaccgtccgctgttattaaacgacaccctatttttacgaaaactttgcgtcaccttaagtcataaaaattatcgtaatattgtttctttaactcagaatcaatcatttccgttagtgaatcgcctggcagcatttatattactctcacaagaaggtgatctttatcacgaaaagcatacgcaagcggcagagtatttaggcgtttcttatcgacatcttttatatgttctcgcgcaattcattcacgacggtttattaattaaaagaaaggatatctaa

SEQ ID NO: 471309 - DNA, 1251 bp, Shigella flexneri
atggatataatgagaagtgttgtggggatggtggtgttactggcaatagcatttctgttgtcagtgaataaaaagagcatcagtttgcgcacggttggagccgcactgctgctgcaaatcgctattggtggcatcatgctctacttcccaccgggaaaatgggcagtagaacaggcggcattaggcgttcataaagtgatgtcttacagtgatgccggtagcgccttcatttttggttcgctggttgggccgaaaatggatgtcctgtttgacggtgcgggttttatcttcgcctttcgcgtacttccggcgattattttcgttactgcgctcatcagtctgctgtactacattggcgtgatggggctgctgattcgcatccttggcagcattttccagaaagccctcaacatcagcaaaatcgaatcttttgttgcggttaccactattttcctcgggcaaaatgagatcccggcgatcgttaaaccgtttatcgatcgcgtgaatcgcaacgagttgtttaccgcaatttgtagcgggatggcgtccattgctggttcggtgatgattggttatgccggaatgggcgtaccaattgactacctgttagcggcatcgctgatggcgatccccggcggtattttgtttgcacgtattcttagcccggcaaccgagccttcgcaggtcacatttgaaaatctgtcgttcagcgaaacgccgccaaaaagctttatcgaagcggcggcgagcggtgcgatgaccgggctgaaaatcgccgctggtgtagcgacggtggtaatggcgtttgtcgcaattattgcgctgatcaacggcattatcggcggaattggcggctggtttggtttcgccaatgcctctctggaaagtatttttggctatgtgctggcaccgctggcgtggatcatgggtgtggactggagtgatgccaaccttgcaggtagcctgattgggcagaaactggcgattaacgaattcgtcgcttacctgagtttctccccatacctgcaaacgggcggcacgctggaagtgaaaaccgtggcgattatatcctttgcgctttgtggttttgctaactttggttctatcggtgttgtcgttggcgcattttcggctatttcgccaaaacgtgctccagaaatcgcccagcttggtttacgggcgctggcagcagcaacgctttccaacctgatgagtgcgactattgccgggttctttattggtctggcgtaa

SEQ ID NO: 471310 - DNA, 939 bp, Shigella flexneri
atgtctgaattaaaaatctcccctgaattattacaaatttctccggaagtgcaggacgctttaaaaaacaaaaaaccggttgtggcgctggaatcgaccattatttctcacgggatgccgttcccacaaaatgcccagaccgcaattgaagtagaagaaactattcgtaaacagggcgcagtacctgccactatcgccattattggcggcgtgatgaaagtgggtttaagcaaagaaaaaattgaattactgggtcgtgaagggcataacgtgaccaaagttagtcgtcgcgatttaccttttgttgttgccgccggaaaaaatggcgcaaccactgtggcttcaacgatgattattgcggcgcttgccggaattaaagtatttgccaccgggggaattggtggtgtgcatcgcggggcggaacataccttcgatatttctgccgatttgcaagaactggcaaatactaatgtcaccgttgtttgtgccggggcgaaatctattctcgatttaggattaaccactgagtatttagaaaccttcggtgtgccgttaattggctatcagactaaagcgctgcctgcgtttttctgccgtaccagctcgtttgacgtcagcattcgtctcgacagcgccagtgaaattgcccgtgcaatggcggtgaaatggcaaagcgggctgaacggtggcctcgtggtagcgaacccgatcccggaacagtttgcgatgccggaggaatctatcaatgcagccatagatcaagccgtcgccgaagccgaagagcagggcgttattggtaaagaaagtacaccgttcctgctggcgcgcgttgctgagctgaccggcggtgacagcctgaaatccaatatccagctggtgttcaacaacgccattctggcgagtgaaattgccaaagaataccagcgtctcgcgggttaa

SEQ ID NO: 471311 - DNA, 942 bp, Shigella flexneri
atgcgcgaaaaggattatgtcgtaattataggttcggcgaatattgatgtcgccggatattcacatgaatcattaaattatgcggattcaaatccaggtaaaataaaatttacgcctggtggagtagggcgcaatattgcacaaaacctggcgttgctgggtaacaaagcctggctactgagcgccgtaggcagtgatttttatggtcaatcgctgctaacgcaaaccaatcaatctggtgtttatgtcgataaatgcctgattgtgccgggagaaaatacgtcgagttatttatcattactcgataataccggtgaaatgctggttgctataaatgacatgaatattagcaacgctattacagctgaatatctcgcacagcaccgtgaatttattcagagggcaaaggtcattgtcgcggactgtaatatcagtgaagaggcactggcatggattctggataatgccgccaacgtacccgtatttgtcgatccggtttcagcgcggaaatgtgtcaaagtgcgcgaccgtctaaatcagatccacactctgaagccaaaccgccttgaagcggaaaccctgagtgggattgcgctgtcagggcgtgacgatgtggcaaaagttgctgcctggttccatcaacatggcctgaaccgactggtattgagcatgggcggcgacggcgtttattacagcgatatcagcggtgaaaatagctggtctgcgccgatcaaaaccaatgttattaatgttaccggagcgggcgatgccatgatggcgggacttgcttcgtgttgggtagacggaatgccgtttgccgaatctgttcgtttcgcacagggatgttcgtcaatggcgctctcctgtgaatacaccaataaccccgatttatcgattgccaacgttatatcgttagtggagaacgcagaatgtctgaattaa

SEQ ID NO: 471312 - DNA, 1692 bp, Shigella flexneri
atgaaaacgctgctgattattgacgctaatctcggtcaggcacgcgcctatatggcgaagaccctgctgggcgcggcggcgcgaaaagcaaaactggaaatcatcgacaatccgaacgacgcagaaatggcgattgttctcggtgattccatcccgaatgacagcgcgctgaacggtaaaaatgtctggctgggtgatatttcccgggcagttgcgcaccctgagctgttcctgagtgaagccaaaggccatgcgaaaccttacactgcgccggtcactgcgacagcaccggttgccgccagcggtccgaaacgcgtagttgcggtgactgcttgcccgactggcgtagcacacacctttatggcggctgaagccattgaaaccgaagcgaaaaaacgtggctggtgggtgaaagttgaaacccgtggttctgttggcgcgggtaatgcaatcactcccgaggaagtagccgcagcggatctggtgattgtggcggcagatatcgaagtggatctggcgaaatttgctggtaaaccgatgtatcgtacctctaccggtctggcgctgaagaaaacctcgcaggaactggataaagcggttgctgaagcaacgccgtatgaaccggcgggcaaagctcaaacggcgaccactgaaggtaagaaagagagtgcaggcgcttatcgtcacttgctaacgggcgtctcttacatgctgccgatggtcgttgctggtggtctgtgtatcgcgctttcttttgcttttggtatcgaagcgtttaaagagccgggtacgttggcagcggcgctgatgcagattggtggtggttcagcctttgcgctgatggtgccggtactggcaggttatattgccttctccattgccgatcgtccgggcctcacgccgggtctgattggcggtatgctggcggtcagcaccggttctggcttcattggcggtattattgcgggcttcctggctggttacattgcgaagttaatcagtacgcaactgaaactgccgcagagtatggaggcgctgaaaccgatcctgatcattccgctaatttccagtctggtggtcggtctggcgatgatctacctgatcggtaaaccagttgctggcattctcgaagggctgactcactggctgcagaccatggggactgcgaatgcggttctgctgggggcgatcctcggtggcatgatgtgtactgacatgggcggtccggtaaacaaagcagcgtacgcattcggtgtgggtctgctgagtactcaaacctatggcccgatggcggcgattatggcggcaggtatggtgccaccgctggcaatgggcctggcaacaatggtggcgcgtcgcaaattcgacaaagcgcagcaggaaggtggcaaagccgctctggtattgggactgtgcttcatttcggaaggtgcaattccgtttgctgctcgtgatccgatgcgtgtgctgccgtgctgtatcgtgggtggggcgctgactggcgcaatctcaatggcgattggtgcgaaactgatggcaccgcacggtggtctgtttgttctgctgatccctggcgctattacgccggtattgggttacctggtagcaattattgccggtacgctggtggcgggtttggcctatgccttcctgaaacgtccggaagtggacgcagtagcgaaagcagcgtaa

SEQ ID NO: 471313 - DNA, 939 bp, Shigella flexneri
atgagcagacgtgttgctacgatcacccttaatccggcttatgaccttgttggtttctgcccggaaattgaacgcggcgaagtgaacctggtgaaaaccaccggtctgcatgcggcgggtaaaggcatcaacgtggccaaagtattaaaagacctgggaattgatgtcaccgttggcggcttcctaggtaaagacaatcaggatggttttcagcaactgttcagcgagctgggcattgccaaccgtttccaggttgtacaggggcgcacccgaattaacgttaagctgacggaaaaagacggcgaagtgaccgacttcaacttctcgggtttcgaagtcacccccgccgactgggaacgctttgtgactgattctctgagctggctcggtcagttcgatatggtctgtgtcagcggaagcttaccgtcaggcgtcagcccggaagcgttcaccgactggatgactcgcctgcgtagtcagtgtccttgcattatctttgatagtagccgtgaagcgttagtagcaggtttgaaagcggcaccgtggctggtgaaacctaaccgccgcgagttggaaatctgggcaggccgtaaactgcctgaaatgaaagatgtgattgaagctgcacatgcgctacgtgaacaaggtattgcgcatgttgttatttcactgggtgccgaaggcgcgctttgggttaatgcctccggcgaatggatcgctaaaccaccgtcagtcgatgtcgtaagcaccgttggcgcaggggattctatggttggtggcctgatttatggcttgctgatgcgtgaatccagtgaacacacactgcgtctggcgacagctgttgcagccctggcggtaagtcaaagcaatgtgggtattaccgatcgtccgcagttggccgcaatgatggcgcgcgtcgacttacaaccttttaactga

SEQ ID NO: 471314 - DNA, 1131 bp, Shigella flexneri
atgttccagttatccgtacaggacatccatccgggcgaaaaggccggagacaaagaagaggcgattcgccaggtcgctgcggcgctggtgcaggccggtaatgtagcagaaggctacgtcaatggcatgctggcgcgcgaacagcaaacctcaacgttcctcggcaatggtattgctattccacacggcactaccgacacccgcgatcaggtgctgaaaaccggcgttcaggtatttcagttcccggaaggcgtcacctggggtgacggtcaggtagcgtacgtggcaatcggtattgctgccagctcggataaacatctgggcctgctacgccagctgacccacgtactgagcgatgattccgttgctgaacaactgaagtcagcaacaacagcagaagaacttcgcgcattactgatgggcgaaaagcagagtgagcagctgaagctcgacaacgaaatgctgacgctggatatcgtcgccagcgatctgctgactcttcaggcgctgaacgctgcgcgtctgaaagaggcgagggcagttgacgccactttcgtcaccaaagccatcaatgaacaaccgctgaatctcggacagggtatctggctgagcgatagcgccgaaggcaatctgcgtagtgcgattgcggtaagccgtgcggcaaatgcttttgatgtggacggcgaaacggcagccatgctggtgagtgtggcgatgaatgacgatcagcccatcgcggttcttaagcgtctcgctgatttgttgctcgacaataaagctgaccgcttgctgaaagcggatgcggcaacgttgctggcgctgctgaccagcgatgatgcgccgaccgacgacgtgttaagcgcggagtttgtggtgcgcaatgaacacggcctgcatgctcgtccaggtaccatgctggtcaataccattaaacaatttaacagtgatattaccgtgacaaaccttgatggcaccggcaaaccggcaaacggacgtagtctgatgaaagttgtggcacttggcgttaagaaaggtcatcgcctacgctttaccgcccagggtgcagatgctgaacaggcgctgaaagccattggcgacgctatcgctgctggtcttggggagggcgcataa

SEQ ID NO: 471315 - DNA, 1179 bp, Shigella flexneri
atgcataactcccccgcagtctccagcgcgaaatcgtttgacctgacctcgacggcgtttttaatcgttgcctttctcaccggtattgcgggtgctctgcaaaccccgacactcagtattttccttaccgatgaagtacatgcccgtccggcgatggtgggattcttctttaccggcagcgctgtcattgggattctggtaagtcagtttctcgctgggcgctctgataagcgcggcgatcgcaaatcgctgattgtcttttgctgcctgttaggcgtgctggcctgcaccctttttgcttggaatcgcaactactttgttttgctattcgttggcgtctttcttagcagctttggctcgaccgctaacccgcaaatgtttgcccttgcccgtgaacatgccgacaaaaccggacgtgaggcggtgatgttcagctcttttttacgcgctcaggtttcactggcatgggtcattggcccaccgctggcttatgcgttagcgatgggtttcagctttacggtaatgtatctgagcgcagcggtagcgtttattgtttgcggcgtgatggtgtggctgtttttaccgtcgatgcaaaaagagcttccgctggcgaccggcacggttgaagcgccgcgccgtaaccgtcgcgatacgctactgctgtttgtcatttgtacattgatgtggggctcgaacagcctgtacatcatcaacatgccgctatttattatcaacgaactgcatcttcccgagaaactggccggtgtgatgatggggaccgccgccgggctggaaatcccgacgatgttgattgccggatatttcgccaaacgtctgggtaagcgtttcttaatgcgcgttgctgccgtgggtggcgtctgtttttacgcaggaatgctgatggcgcattcacctgccattctgttgggcttgcagctgctaaatgctatttttattggcattctgggcggcatcgggatgctctattttcaggatttgatgcccggtcaggcaggttcagccaccacgctctataccaacacgtcgcgcgtgggctggatcatcgcaggatcagtggcgggcatcgtcgccgagatctggaattatcacgctgtgttctggtttgcgatggtgatgattatcgccactctgttttgggtaatgactccaacttactga

SEQ ID NO: 471316 - DNA, 387 bp, Shigella flexneri
gtggtgaaagtaaccgatgtgttattggcaagccatgaaaatacggcgcaaattattgatgcccgcccggctgcacgttttaacgcagaagttgatgaacctcgcccaggtttacgtcgcggacatattcccggtgcattgaacgttccgtggacggaactggtgcgcgaaggcgaactaaaaacgaccgatgaactggatgcgatattttttggtcgcggcgtcagctatgacaaaccgattatcgtcagctgcggctctggtgtaacggcagccgtggttttgttagcactcgcgacgctggatgtgccaaacgtgaaactgtacgacggcgcatggagtgaatggggcgcgcgggcagatttaccggttgagccagtgaaataa

SEQ ID NO: 471317 - DNA, 777 bp, Shigella flexneri
atgtccgaaacaaaaaacgaacttgaagacctgctggaaaaagcagcaaccgaaccggcgcaccgcccggcctttttccgtactctactggaatccaccgtctgggtgcctggtacggcggcgcagggcgaggctgtggttgaagatagtgcgcttgatttacagcactgggaaaaagaagacggcaccagcgtcattccttttttcacctcgttagaagcgcttcaacaggcggttgaagacgaacaggcatttgtcgtaatgcccgttcgcacattgtttgagatgacccttggcgaaacgctcttccttaatgccaaactgccgaccggtaaagaatttatgccgcgtgaaatcagtttgttgattggtgaagagggaaatccgctgagcagccaggaaatcctggaaggcggtgaatcgctgatattatcggaagtcgcagagccgccagcacaaatgattgattcactcaccaccttatttaaaaccattaagccggtgaagcgtgcttttatttgttcaattaaagagaacgaagaggcacagcctaatttacttattggcattgaagccgatggtgatatcgaagaaattattcaggcgacgggaagtgtagcgaccgatacattacctggcgatgaaccaatcgatatttgtcaggtgaaaaaaggggaaaaaggaattagccactttattaccgaacatattgcgccattctatgaacgtcgctggggtggttttttgcgtgactttaaacaaaaccggataatctaa

SEQ ID NO: 471318 - DNA, 1284 bp, Shigella flexneri
atgacagaagcgatgaagattaccctctctacccaacctgccgacgcgcgctggggagaaaaagcaacttacagcattaataatgacggcattaccctgcatttgaacggggcagacgatctggggctgatccagcgtgcggcccgcaagattgacggtctgggcatcaagcatgttcagttaagcggtgaaggctgggatgcggatcgctgctgggcattctggcaaggttataaaggcccgaaaggcacgcgtaaagtggagtggccggatctggacgatgcccagcgccaggaactggataaccgcctgatgatcatcgactgggtgcgtgacaccatcaacgcaccggcagaagaattgggaccatcgcaactggcacagcgtgctgttgatctgatcagcaacgtcgcgggcgatcgtgtgacttatcggatcaccaaaggcgaagatctgcgtgagcaaggttatatggggctgcacactgtcgggcgcggttcagaacgttctccggtattgctggcgctggattacaacccaactggcgataaagaagcaccggtgtacgcgtgcctggtaggtaaaggtatcacttttgactccggcggctacagcatcaaacagactgcgtttatggactcgatgaagtcggacatgggcggcgcggcaacggttaccggggcgctggcatttgccattatgcgcggactgaacaagcgcgtgaagctgttcctctgctgtgcggataacctgattagcggcaatgcgttcaagctgggcgatatcatcacctatcgcaacggtaaaaaagttgaagtgatgaacactgatgccgaagggcgtctggtgcttgccgatggtctgattgatgccagtgcgcagaaaccggaaatgatcattgatgcggcgaccctcaccggggcggcgaaaactgcgctgggtaatgattatcacgcgctgttcagttttgacgatgcgcttgccggtcgtttactggcgagtgcctcacaagagaacgaaccattctggcgtctgccgctggcggaattccaccgcagccagctgccgtctaactttgccgaactgaacaataccggaagcgcggcgtatccggcaggcgcgagcacggcggcgggcttcctgtcgcactttgttgagaactatcagcaaggctggctgcatatcgactgctcggcgacttaccgtaaagcgccggttgaacagtggtctgcgggcgctacgggacttggtgtgcgcacgatagctaatctgttaacggcgtaa

SEQ ID NO: 471319 - DNA, 201 bp, Shigella flexneri
atgggacttaagtggaccgatagccgcgaaattggcgaagcactgtacgatgcgtatcccgatcttgatccgaaaacggttcgattcaccgatatgcatcagtggatttgcgatctggaagatttcgacgacgacccgcaggcatccaacgagaaaatcctcgaagcgattttgttagtctggctggacgaagccgagtga

SEQ ID NO: 471320 - DNA, 336 bp, Shigella flexneri
atgccaaagattgttattttgcctcatcaggacctctgccctgatggcgctgttctggaagctaatagcggtgaaaccattctcgacgcagcgctgcgtaacggtattgagattgaacacgcctgtgaaaaatcctgtgcttgcaccacctgccactgcatcgttcgtgaaggttttgactcactgccggaaagctcagagcaggaagacgacatgctggacaaagcctggggactggagccggaaagccgtttaagctgccaggcgcgcgtcaccgacgaagatttagtggtcgaaatcccgcgttacactatcaaccatgcgcgtgagcattaa

SEQ ID NO: 471321 - DNA, 1851 bp, Shigella flexneri
atggccttattacaaattagtgaacctggtttgagtgctgcgccgcatcagcgtcgtctggcggctggtattgacctgggcacaaccaactcgctggtggcgacagtgcgcagcggtcaggccgaaacgttagccgaccatgaaggccgtcacctgctgccatctgttgttcactatcaacagcaagggcattcggtgggttatgacgcgcgtactaacgcagcgcttgacaccgccaacaccattagttctgttaaacgcctgatggggcgctcgctggctgatatccagcaacgctatccgcatctgccttatcaattccaggccagcgaaaacggcctgccgatgattgaaacggcggcggggctactgaacccggtgcgcgtttctgcggacatcctcaaagcactggcggcgcgggcaactgaagccctggcaggcgagctggatggtgtagttatcaccgttccggcgtactttgacgatgcccagcgtcagggcaccaaagacgcggcgcgtctggcggggttgcatgttctgcgcttacttaacgaaccgactgctgcggctatcgcctacgggctggattccggtcaggaaggcgtgatcgctgtttatgacctcggtggcgggacgtttgatatttccattctgcgcttaagtcgcggcgtgtttgaagtgctggcaaccggcggtgattccgcgctcggcggcgatgatttcgaccatctgctggcggattacattcgcgagcaggcggacattcctgatcgtagcgataaccgcgttcagcgtgaactgctggatgccaccattgcagccaaaatcgcgctgagcgatgcggactccgtgaccgttaacgttgcgggctggcagggcgaaatcagccgtgaacaattcaatgaactgatcgcgccactggtaaaacgaaccttactggcttgtcgtcgcgcgctgaaagacgcgggtgtagaagctgacgaagtgctggaagtggtgatggtgggcggttctactcgcgtgccgctggtgcgtgaacgggtaggcgaatttttcggtcgtccaccgctgacttccatcgacccggataaagtcgtcgctattggcgcggcgattcaggcggatattctggtgggtaacaagccagacagcgaaatgctgctgcttgatgtgatcccactgtcgctgggcctcgaaacgatgggcggcctggtggagaaagtgattccgcgtaataccactattccggtggcccgcgctcaggatttcaccacctttaaagatggtcagacggcgatgtctatccatgtaatgcagggtgagcgcgaactggtgcaggactgccgctcactggcgcgttttgcgctgcgtggtattccggcgctaccggctggcggtgcgcatattcgcgtgacgttccaggtcgatgccgacggtcttttgagcgtgacggcgatggagaaatccaccggcgttgaggcgtctattcaggtcaaaccgtcttacggtctgaccgatagcgaaatcgcttcgatgatcaaagactcaatgagctatgccgagcaggacgtaaaagcccgtatgctggcagaacaaaaagtagaagcggcgcgtgtgctggaaagtctgcacggcgcgctggctgctgatgccgcgctgttaagcgccgcagagcgtcaggtcattgacaatgctgccgctcacctgagtgaagtggcgcagggcgatgatgttgacgccatcgaacaagcgattaaaaacgtagacaaacaaacccaggatttcgccgctcgccgcatggaccagtcggttcgtcgtgcgctgaaaggccattccgtggacgaggtttaa

SEQ ID NO: 471322 - DNA, 516 bp, Shigella flexneri
atggattacttcaccctctttggcttgcctgcccgttatcaactcgatacccaggcactgagcctgcgttttcaggatctacaacgtcagtatcatcctgataaattcgccagcggaagcctggcggaacaactcgccgccgtacagcaatctgcaaccattaaccaggcctggcaaacgctgcgtcatccgttaatgcgcgcggaatatttgctttctttacacggttttgatctcgccagcgagcagcatactgtgcgcgacaccgcgttcctgatggaacagttggagctgcgcgaagagctggacgagatcgaacaggcgaaagatgaagcgcggctggaaagctttatcaaacgtgtgaaaaagatgtttgatacccgccatcagttgatggttgaacagttagacaacgaggcgtgggacgcggcggcggatacggtgcgtaagctgcgttttctcgataaactgcggagcagtgccgaacaactcgaagaaaaactgctcgatttttaa

SEQ ID NO: 471323 - DNA, 324 bp, Shigella flexneri; identical to SEQ ID NO: 458082

SEQ ID NO: 471324 - DNA, 387 bp, Shigella flexneri
atggcttacagcgaaaaagttatcgaccattacgagaatccgcgtaacgtgggttcctttgataacaacgacgagaacgtcggcagcggcatggtgggtgcaccggcctgtggcgacgtaatgaagttgcagattaaagtcaacgatgaaggtatcattgaagacgcgcgttttaaaacttacggctgcggttccgctatcgcttccagctccctggtcaccgaatgggtgaaagggaagtctctcgacgaagcgcaggcgatcaaaaacaccgatattgctgaagaacttgaactgccgccggtgaaaattcactgttctattctggcagaagacgcgatcaaagccgccattgcggactataaaagcaaacgtgaagcaaaataa

SEQ ID NO: 471325 - DNA, 1215 bp, Shigella flexneri
atgaaattaccgatttatctcgactactccgcaaccacgccggtggacccgcgtgttgccgagaaaatgatgcagttcatgacgatggacggaacctttggtaacccggcctctcgttctcaccgtttcggctggcaggctgaagaagcggtagatatcgcccgtaatcagattgccgatctggtcggcgctgatccgcgtgaaatcgtctttacctctggtgcaaccgaatctgacaacctggcgatcaaaggtgcagccaacttttatcagaaaaaaggcaagcacatcatcaccagcaaaaccgaacacaaagcggtactggatacttgccgtcagctggagcgcgaaggtttcgaagtcacctacctggcaccgcagcgtaacggtattatcgacctgaaagaactcgaagcggcgatgcgtgacgacaccatccttgtttccatcatgcacgtaaataacgaaatcggcgtggtgcaggatatcgcggctatcggcgaaatgtgccgtgctcgtggcattatctatcacgttgatgcaacccagagcgtgggcaaactgccaatcgacctgagccagttgaaagttgacctgatgtctttctccggtcacaaaatctatggcccgaaaggtatcggtgcgctgtatgtgcgtcgtaaaccgcgtgtacgcatcgaagcgcaaatgcacggcggcggtcacgagcgcggtatgcgttccggcactctgcctgttcaccagatcgtcggaatgggcgaagcctatcgcatcgcaaaagaagagatggcgaccgagatggaacgtctgcgcggcctgcgtaaccgtctgtggaacggcatcaaagatatcgaagaagtttacctgaacggtgacctggaacacggtgcgccgaacattctcaacgtcagcttcaactacgttgaaggtgagtcgctgattatggcgctgaaagacctcgcagtttcttcaggttccgcctgtacgtcagcaagcctcgaaccgtcctacgtgctgcgcgcgctggggctgaacgacgagctggcacatagctctatccgtttctctttaggtcgttttactactgaagaagagatcgactacaccatcgagttagttcgtaaatccatcggtcgtctgcgtgacctttctccgctgtgggaaatgtacaagcagggcgtggatctgaacagcatcgaatgggctcatcattaa

SEQ ID NO: 471326 - DNA, 489 bp, Shigella flexneri; identical to SEQ ID NO: 2622

SEQ ID NO: 471327 - DNA, 741 bp, Shigella flexneri
atgctgcaaaatattcgaattgtgctggtggagacgtcacacaccggcaatatgggttctgttgcccgtgccatgaaaacaatgggattaaccaatctgtggctggttaatccactggtgaaacccgactcccaggcgattgccctggctgcaggggccagcgatgtgattggtaatgctcacatcgtcgatacgctcgacgaagcgttagccggttgtagcctggtggtgggcaccagcgcacgctcccgcacgctgccgtggccgatgctcgacccgcgcgaatgcggtctgaaaagcgtcgctgaagcggcaaataccccggtggcgctggtgtttggtcgtgagcgcgtcggcttgaccaatgaagagttgcagaaatgccattatcatgtcgcgattgcggcaaacccggaatacagttcgctgaacctggcaatggcggttcaggttattgcctatgaagtgcgtatggcctggctggcaactcaggaaaatggcgagcaggtcgagcatgaagagacgccgtatccgctggtcgatgatctggagcgtttttatggtcatctggaacaaacgctgctggcaaccggttttatccgtgaaaaccatccggggcaggtgatgaataaattgcgccgtctgtttacccgtgcgcgcccggaaagccaggaattgaatatcctgcgcgggattctggcttctattgagcagcagaataaaggtaacaaggccgaataa

SEQ ID NO: 471328 - DNA, 804 bp, Shigella flexneri
atgcatccgatgctgaacatcgccgtgcgcgcagcgcgcaaggcgggtaatttaattgccaaaaactatgaaaccccggacgctgtagaagcgagccagaaaggcagtaacgatttcgtgaccaacgtagataaagctgccgaagcggtgattatcgacacgattcgtaaatcttacccacagcacaccatcatcaccgaagaaagcggtgaacttgaaggtactgatcaggatgttcaatgggttatcgatccactggatggtactaccaactttatcaaacgtctgccgcacttcgcggtatctatcgccgttcgtatcaaaggccgcaccgaagttgctgtggtatacgatcctatgcgtaacgaactgttcaccgccactcgcggtcaaggcgcacagctgaacggctaccgtctgcgcggtagcaccgctcgcgatctcgacggtaccattctggcgaccggcttcccgttcaaagcaaaacagtacgccactacctacatcaacatcgtcggcaagctgttcaacgaatgtgcagacttccgtcgtaccggttctgcggcgctggatctggcttacgtcgctgcgggtcgtgttgacggtttctttgaaatcggtctgcgtccgtgggatttcgcggcaggcgagctgctggttcgtgaagcgggcggcatcgtcagcgacttcaccggtggtcataactatatgctgaccggtaacatcgttgctggtaacccgcgtgttgtgaaagccatactggcgaacatgcgtgacgagttaagcgacgctctgaagcattaa

SEQ ID NO: 471329 - DNA, 855 bp, Shigella flexneri
atggcactgccagtgaacaaacgcgttcccaaaattctgtttattctctttgttgttgccttctgcgtttatttagtgccgcgcgttgccatcaacttcttctattatcctgacgataaaatttacggtcccgacccctggtcggcggaatccgtcgaatttacggctaaggacggtactcgtctgcaaggctggtttattccttcttcgacgggccctgctgacaacgccatcgcaaccatcattcatgctcacggcaatgccggaaatatgtccgcccactggccgctggtcagttggttacctgagcgtaatttcaacgtttttatgtttgattatcgcgggtttggtaaatcaaaaggcactccgtcccaggccggattgctggacgatacgcaaagcgccatcaatgtggtgcgccatcgcagtgatgtaaacccacaacagctggtgctgttcgggcagagtattggcggggcgaatattcttgctgttattggtcagggtgatcgtgaaggcatacgtgcggtgatcctcgactccacatttgcctcttatgcaaccatcgccaaccagatgatccccggcagtggctacttacttgatgagagttacagcggcgaaaattacatcgccagcgtcagcccgatcccgcttttactcattcacggtaaagccgatcacgttatcccatggcagcacagcgaaaagttgtatagcctggcaaaagagccaaaacggttgatcctaatcccggatggcgaacacattgatgctttttccgatcgtcacggcaatgtttatcgcgaacagatggtggactttatccttagcgcgttgaatccgcagaactaa

SEQ ID NO: 471330 - DNA, 1281 bp, Shigella flexneri
atgatgcctacgcttgctccaccatctgtcctttcggctccccagcgccgctgccagatcttgctgacgctctttcagccggggttgaccgccaccatggcaaccttcagcgagcttaatggtgtggatgatgatattgccagtcttgatatcagcgaaacaggacgggagatcctgcgctatcatcaactcacactgacgactggttatgacggtagctaccgggttgaaggtacagtgcttaaccaacgtttgtgtttatttcactggctacgacgtggtttccgtctgtgtccgtcatttattaccagccaattcacccccgccctgaagagtgaactgaagcggcgcggaattgcgcgtaacttttacgacgataccaatctacaagcgttagtgaatctctgctcccgacggctgcaaaaacgctttgaatcgcgcgatattcatttcctgtgtctgtatctgcaatattgtttgctgcagcaccacgctggaattacgcctcagtttaatccgctccaacgtcgctgggcggaatcctgccttgaatttcaggtagcgcaggaaattggacgccactggcagcgtcgggcgctccagcatgtaccgcctgatgagccactgtttatggcattacttttttccatgttgcgggttcccgatccactgcgggatgcgcatcagcgggacagacaattgcgtcagtctatcaaacgtctggtaaaccattttcgtgagctgggaaatgttcgtttttatgatgaacaggggttatgtgatcagctttatatccacctcgcccaggcgttaaatcgcagtttgtttgccatcggtattgataataccctgccggaagagttcgccagactgtatccacgcctggtacgcaccacccgcgcggcgctggccggatttgaaagtgaatacggcgtccatctttctgatgaggaaagtggtctggtcgcggtgattttcggtgcctggctaatgcaggaaaacgatctgcatgaaaaacagattattctactgaccgggaatgatagcgagcgagaagcgcagattgagcagcagttacgcgaactaacgttactgccgctcaacattaagcatatgtcggtaaaggcatttttgcagacaggcgctccgcgtggcgcggcactgattattgcgccttataccatgccgttaccgctcttttcaccaccgctgatctatacggacctgacgctgacaacacatcaacaggagcagatccgcaaaatgctcgaatcagcatga

SEQ ID NO: 471331 - DNA, 1140 bp, Shigella flexneri
atggttttgcaatccacgcgctggttggcgctcggctatttcacatacttttttagttacggcatttttttacctttctggagcgtctggcttaaagggattggtttaacgccagaaaccatcggcctgttattgggggcaggtctggttgcccgttttctcgggagtttgctcatcgcgccccgcgtcagcgatccttcccgcctgatttccgccttgcgcgtgctggcactgctgccacttctctttgctgtcgccttctgggcgggggcgcacgtagcgtggctgatgctggtgatgattggctttaacctctttttctcaccgctggtaccgttgaccgatgcactggcgaatacgtggcaaaagcagttcccgcttgattacggcaaagtgcgactgtggggctcggtggcgtttgtcattggctcggcgctgacgggcaaactggtcactatgtttgattatcgggtgatcctcgtgctgttgacgttgggcgtggcatccatgctgctcggctttctcatccgtccgacgattcagccacaaggggcaagccgccagcaggagagcaccggttggtctgcgtggttggcgctggttcgccagaactggcgctttctggcctgcgtttgtttattgcagggggcacatgcggcctattacggttttagcgccatttactggcaggcagctggctactcggcctcggcggtggggtatttgtggtcgctgggcgtggtggcggaagtcattatctttgcgctgagtaataaacttttccgccgttgtagtgctcgcgatatgctgttgatctcggcgatttgcggcgtagtgcgctggggcattatgggagcaactacggcgttgccgtggttgatagtggtgcaaattctgcattgcggcaccttcacggtctgccacctggccgccatgcgttatattgctgctcgccaggttagcgaagtcatccgtttacaggcggtttactctgccgtcgcgatgggcggcagtatcgctatcatgaccgttttcgccggtttcctgtatcaatatctgggccacggcgtgttctgggtaatggcgctggtggcgcttccggcaatgtttttgcgcccgaaagttgttccctcatgctga

SEQ ID NO: 471332 - DNA, 891 bp, Shigella flexneri
atggaactacggcatttacgctatttcgtcgcagtggcgcaggcactgaactttacccgtgcggcggaaaaactgcatacctcacagccttcgttaagcagccagatccgcgatcttgaaaactgtgtcggtgttccgttactggtgagggataagcgcaaagtcgcgttgacggcggcgggagaatgttttctccaggacgcgctggcaatcctcgaacaagcggaaaatgccaaattacgggcgcggaaaattgttcaggaagacagacaattaaccattggctttgtgccatcggcggaagtgaatttattgccaaaagtattaccgatgtttcgtctcagacagccagacaccttgattgagctggtgagtttaatcaccacgcaacaggaggaaaaaattcgccgtggtgaactcgacgtcggcttaatgcgccatcctgtttatagcccggagattgattatctggagctttttgacgaaccattagtggtggtgttaccggttgatcaccctttagcacatgaaaaagagatcaccgccgcgcaactggatggcgtgaatttcgtcagtaccgatccggcgtattccggttcgcttgcgccgatcgttaaagcgtggtttgcgcaagaaaacagccagccaaatatcgtccaggtggcaacgaatattctggtgaccatgaatctggtgggcatggggctgggcgtcactttgatacccggttatatgaataattttaataccgggcaggttgtttttcgtcccattgccggaaatgtgccttccattgctttactgatggcgtggaagaaaggggagatgaagctggcattacgcgatttcatcgccattgtgcaggaacgtttggcaagcgtaacggcataa

SEQ ID NO: 471333 - DNA, 1362 bp, Shigella flexneri
atgaccacaccctcagatttgaacatttaccaactgattgacacccaaaacggtcgggtcactccgcgtatttataccgacccggacatttaccaactggagcttgagcgtattttcggtcgttgctggctatttctcgcccacgaaagccagatcccaaaacccggtgatttctttaacacctacatgggagaagatgtagttgtcgtggtgcgccagaaagacggcagcatcaaggcgtttctcaaccaatgccgccaccgggccatgcgtgtgagttatgcagattgtggcaacactcgcgcctttacctgcccgtatcacggctggtcttatggcattaacggcgagttgatcgatgtaccgctggaacctcgcgcctacccacaagggttgtgtaaatcccactgggggctaaacgaagttccttgtgtggagagttataaaggactgatttttggcaactgggataccagcgcaccgggcctgcatgattacctgggtgacattgcctggtatctggatggcatgctggatcgtcgcgaaggcggcaccgaaattgtcggcggcgtacaaaagtgggtgatcaactgtaactggaaattcccggcagagcagttcgccagtgaccagtatcatgctctgttcagccatgcttctgccgttcaggtattaggggcgaaagatgatggcagcgataagcgcctcggtgatggacaaaccgcccgcccggtgtgggaaaccgccaaagatgcgctgcaatttggtcaggacggtcacggtagcggtttcttctttactgaaaaaccggatgctaatgtctgggtcgatggcgcagtttcaagctattaccgcgaaacctatgccgaagcagaacaacgtttaggtgaagttcgcgccctgcgcctggcgggtcataacaatatattccccacgctttcatggctaaacggcactgccacactccgcgtctggcatccgcgcggccctgatcaagttgaagtgtgggcgttctgtattactgacaaagccgcctccgatgaagttaaagccgcttttgaaaacagcgccactcgtgcttttggtcctgctggttttctcgagcaggatgactcggagaactggtgtgaaatccagaaattgcttaaaggccaccgcgcccgcaacagcaaactgtgtctggaaatggggcttggtcaggaaaagcgccgcgacgacggcattcctggcattactaactatatcttttcagaaactgccgctcgtggaatgtaccaacgctgggccgatcttctgagtagcgaaagctggcaggaagtgctcgataaaaccgccgcttaccagcaggaggtgatgaaatga

SEQ ID NO: 471334 - DNA, 519 bp, Shigella flexneri
atgagtgcgcaagtttcactggagttacatcaccgcattagccagtttctctttcacgaagccagtctgctggatgactggaaatttcgtgactggttggcacagctcgacgaagagattcgttacaccatgcgcaccacggttaacgcgcaaacacgcgaccgtcgcaaaggcgtccagccgccgacgacctggattttcaatgacaccaaagaccagctggagcggcgaatcgcccgtctggaaacgggcattgcctgggcagaagagccgccgtcacgcactcgtcacttaatcagcaactgccaggtaagcgaaaccgacatcccaaacgtatttgccgtgagggtgaattatctactttatcgggcacaaaaagagcgcgatgaaacattctatgttggaacgcgtttcgacaaagttcgccgtctggaagatgacaactggcgcttgctggaacgggatatcgtcctggatcaagcggtgatcacttcccataacctgagtgtactgttctga

SEQ ID NO: 471335 - DNA, 321 bp, Shigella flexneri
atgaatcgaatttatgcgtgtcccgttgcggatgtgccggagggtgaggctctccggatagatacctcgcccgtcatcgccttgttcaacgtgggcggcgagttttatgccattaacgatcgttgcagccatggtaatgcgtcgatgtcagaagggtatctggaagatgacgccacggtggagtgcccgctacacgccgccagtttttgcctgaaaacggggaaagcgttatgcctgcccgccaccgatccgctcaccacttatccagtacacgttgaaggtggtgacattttcatcgacttaccggaggcgcagccatga

SEQ ID NO: 471336 - DNA, 813 bp, Shigella flexneri
atgagcgatctgcataacgagtccatttttattaccggcggcggatcgggattagggctggcgctggtcgagcgatttatcgaagaaggcgcgcaagttgccacgctggaactgtcggcggcaaaagtcgccagtctgcgtcagcgatttggcgaacatattctggcggtggaaggtaacgtgacctgttatgccgattatcaacgcgcggtcgatcagatcctgactcgttccggcaagctggattgttttatcggcaatgcaggcatctgggatcacaatgcctcactggttaatactcccgcagagacgctcgaaaccggcttccacgagctgtttaacgtcaacgtactcggttacctgctgggcgcaaaagcctgcgctccggcgttaatcgccagtgaaggcagcatgattttcacactgtcaaatgccgcctggtatcctggcggcggtggcccgctgtacaccaccagtaaacatgccgcaaccggacttattcgccaactggcttatgaactggcaccgaaagtgcgggtgaatggcgtcggcccgtgtggtatggccagcgacctgcgcggcccacaggcgctcgggcaaagtgaaacctcgataatgcagtctctgacgccggagaaaattgccgccattttaccgctgcaatttttcccgcaaccggcggattttacggggccgtatgtgatgttggcatcgcggcgcaataatcgcgcattaagcggtgtgatgatcaacgctgatgcgggtttagcgattcgcggcattcgccacgtagcggctgggctggatctttaa

SEQ ID NO: 471337 - DNA, 516 bp, Shigella flexneri
atgaaagaaaaaacgatcattattgtcggtggcgggcaagcggcggcaatggctgcggcctcgctacgccagcaagggttcaccggtgagctgcatctgttttccgatgagcgacatcttccttatgaacgacctccactctcgaaatccatgttgctggaagattccccgcagttacagcaggtgttacccgctaactggtggcaggaaaacaatgttcatctgcattccggtgtaaccatcaaaacgctgggtcgcgacacacgagagttagtgttaaccaacggcgaaagctggcactgggatcagctttttatagcaaccggcgcggcagctcgaccgctgccgttgcttgatgcactgggagaacgctgctttaccctacaccatgccggtgatgccgccagactgcgagaagttctgcagcccgaacggtcagtcgtgattgtcggtgccggaactattggtctggaactggctgccagcgccacgcagcgcagcgcagatgtaaggtga

SEQ ID NO: 471338 - DNA, 696 bp, Shigella flexneri
gtgacagtgattgaactggcggcaaccgtcatgggccgtaatgcaccaccgcccgtgcaacgctatcttttacagcgccatcagcaggctggtgtgcgcattctgctcaataatgccattgaacatgtggtcgatggtgaaaaagtagaactgacgctgcaaagtggggaaacgcttcaggctgatgtggtgatttacggtattggtatcagcgccaacgagcaactggctcgcgaggccaaccttgatactgccaatggcattgtcattgatgaggcttgccgcacctgcgatcccgcgatctttgccggtggcgatgtggcaatcactcgtcttgataatggtgcactacaccgctgcgaaagctgggaaaacaccaataaccaggcgcaaattgccgctgccgcaatgttagggctaccgctaccgctactgccgccgccgtggttctggagcgatcagtacagtgataacttacagtttattggcgatatgcgtggcgatgactggctttgtcgtggcaacccggaaactcagaaggcgatttggtttaatctgcaaaacggcgtgcttatcggtgcggtcacgctgaatcagggccgtgagattcgcccaattcgcaaatggatccagagcggcaaaacgtttgatgcgaaactgctgatagatgagaacatcgcgcttaaatcactgtaa

SEQ ID NO: 471339 - DNA, 423 bp, Shigella flexneri
atgaacacactacgttattttgattttggagctgcccgccccgttttgttattaattgcccgtatcgccgtggtcttaattttcattatttttggttttcccaaaatgatgggctttgacggtacggtccaatatatggcctcgttgggcgcgccaatgccgatgctggcagcgattattgcggtagttatggaagtgcccgccgcgatattaatcgtgcttggctttttcacccgtccgctggcggtgctgtttattttctacacgctgggtacggcggtgattggtcaccattactgggatatgaccggcgatgcggttgggccaaatatgattaatttctggaagaatgtcagtatcgctggcgcgttcttgctattggcaattaccggaccgggggcaatttctctcgatcggcgttag

SEQ ID NO: 471340 - DNA, 873 bp, Shigella flexneri
atgaccatctataccttatcccacgggtcgctaaagctggacgtttctgaccagggcggcgtaatcgaaggcttctggcgcgatacgacgccgctcttacgtcctggtaaaaaaagcggtgtggcaaccgatgcctcatgttttccgctggtgccatttgcaaaccgggtgagcggcaaccgttttgtctggcaggggcgtgagtatcaactgcaaccgaatgttgagtgggatgcgcactatctacacggcgatggctggctgggcgagtggcaatgtgtctcgcacagcgatgatagtttgtgtctggtgtatgaacatcgcagcggtgtctatcactatcgggtaagtcaggcgtttcatttaacggcggatacgctgacggtgacgctctctgtcaccaatcaaggggcagagacgctgccatttggtaccggctggcatccttattttccgttgtcaccacaaacgcggattcaggcgcaggcgagcggttactggctggaacgggagcagtggctggcgggtgagttttgcgagcagctaccgcaggaactggattttaaccagctcgcgccgttgccgcgtcagtgggtgaacaatggttttgccggatggaatggtcaggcccgcatcgagcagccgcaggaaggttatgccatcatcatggaaacgacgccacctgcaccgtgttatttcatctttgtttccgaccctgcgtttgataaaggatatgcgtttgatttcttctgtctggaaccgatgagccatgcgccggatgatcatcatcgcccggaagggggtgatctcattgcgctagcaccaggggaatcaacaacctcagagatgtcgttgcgggtagagtggctgtaa

SEQ ID NO: 471341 - DNA, 1062 bp, Shigella flexneri
atgaaaacgatgctggctgcttatttactaggaaattcaaccgtcgatctgcgggaagttgcggtgccgacgccggggattaaccaggtactgatcaaaatgaaatcctccgggatttgcggaagcgatgtccactatatctatcatcaacaccgtgccacggcggcggcacccgataaaccgttataccagggatttatcaacggtcatgaaccgtgcgggcagattgtggcgatggggcaaggctgccgccattttaaagagggcgaccgcgtgctggtgtatcacatttctggctgtggtttttgcccgaactgccgccgcggctttcctatctcttgtactggcaaaggaaaagcggcttacggctggcagcgtgacggcggtcatgccgaatatctgctggcggaagaaaaagatctgatcctcctgccggatgcgctgagctacgaagatggtgcgtttatcagttgcggcgttggcacggcctatgaagggattttgcgcggcgaagtttccggcagcgataacgtgctggtggtcggtctggggccggtcggcatgatggcgatgatgctggcgaaaggtcgcggtgcaaaacggatcatcggcgttgatatgctgccggaacgtctggcgatggcaaaacagttaggggggatggatcacggctatttagcaaccaccgaaggtctgccgcagataattgctgaacttacccacggtggcgcggatgttgcgctcgattgttccggtaatgccgcaggtcgcttgctggcactgcaatccactgctgactgggggcgggtggtttacattggtgaaaccggaaaagtggaattcgaggtcagcgctgatctgatgcaccatcaacggcggattatcggctcctgggtgaccagtctgttccatatggaaaaatgcgcccacgatttgactgactggaagctgtggccgcgtaacgccattacccatcgcttctcgctagaacaggcaggtgatgcctatgtgctgatggcgagcggcaaatgcgggaaagttgtgattaacttcccggattaa

SEQ ID NO: 471342 - DNA, 999 bp, Shigella flexneri
atgtatgcttcgtcattaccattgccgcagggcaagagcgtctcgctcaaacaatttgtcagtcgccatattaatgagatcggtttgctggtggtgattgccattctttatctggtcttctccctgaacgcgcctggctttatctcattgaataaccagatgaacgtgctgcgcgatgccgccaccattgggattgccgcctgggcgatgacgctgattattatctccggtgaaattgatgtcagcgttgggccgatggtggcttttgtctcggtgtgcctggcatttttgctgcaatttgaagttccgttggcgattgcttgtctgctggtgttgctgttaggcgcgctgatgggaacgctcgccggggtgctgcgcggcgtgtttaacgtaccaagtttcgttgccacactggggctgtggagcgctctgcgcggaatggggctgtttatgaccaacgcactgccagtgccgattgacgaaaacgaggtgctggactggctgggcggacaatttctcggtgtgccagtatccgcgctgatcatgatggtgttgtttgcgctgtttgtgttcattagccgaaaaaccgccttcgggcgctcggtttttgccgttggcggtaatgccacggcggcgcagttgtgcggtattaacgttcgtcgagtgcgcattcttatctttaccctttcgggattattagcggcggtgaccggcattttgttggcggcacgcctcggttccggtaacgcaggtgccgcaaacggtctggagtttgacgtcatcgccgcggtcgtggtcggcggtacggcactttccggcggtcgcggttccctgttcggtacattgcttggtgtgctggtgattacgctaatcggtaacggtctggtgctgctcggtattaactcctttttccagcaggtggtacgcggcgtcatcatcgtggtggcggtgctggcgaatatcttgctgacccagcgaagcagtaaagcgaaacgctaa

SEQ ID NO: 471343 - DNA, 1512 bp, Shigella flexneri
atgttcacggcaacagaggcagtcccggtagcaaaagtggtggcaggaaataagcgttaccccggcgtcgttgcgctggataacgttaacttcacgctcaataaaggcgaagttcgtgcgctgttaggtaaaaacggcgcgggcaaatcgactctcattcgaatgcttaccggcagcgaacgcccggatagcggtgatatctggattggcgagacgcgactggaaggtgacgaagctacgttgactcgccgtgccgctgaactgggggttcgtgcggtttatcaggaattaagtctggtggaagggctgacggtggcagaaaacctctgccttggtcaatggcctcgccgcaacggcatgattgattacctgcaaatggcgcaggatgcccaacgttgcttacaggcgctgggcgttgacgttagtcctgaacaacttgtttcaacgctaagcccggcgcaaaagcaactggtggaaattgcacgggtgatgaagggcgagccgcgcgtggtcattcttgatgaacccaccagctcgcttgccagtgcagaagttgaactggtgatcagtgcggtgaaaaagatgtcggcactgggcgtggcggtgatttatgtcagccaccggatggaagaaatccgccgcattgcctcctatgccaccgttatgcgcgatggtcaggtggcgggcgatgtgatgctcgaaaacacctccacgcatcatattgtgtcgctaatgctagggcgtgatcacgttgatattgcgccggttgcccctcaggaaattgtggatcaggccgtactggaagtccgtgcgttacgccataagcccaagctggaggatatcagctttacgctacgtcgtggcgaagtgcttggcattgctggcctgctgggggcagggcgcagtgaattgctgaaggcgattgttgggctggagacgtatgaacagggcgaaattgttatcaacggcgagaaaatcatgcgccccgattacggcgacatgctgaaacgcggcattggctatacgccagaaaaccgcaaagaagcggggatcattccctggctaggcgttgacgaaaatacagtgctgaccaatcggcaaaaaatcagcaccaacggtgtgctgcaatggtccaccatccgccgcctgaccgaagaggtgatgcagcggatgacggtcaaggctgccagtagcgaaacacccatcggcacgctttctggtggcaatcagcaaaaagtggtgatcggtcgttgggtctatgccgccagccagattttgttgctcgacgagccaacgcgcggcgtcgatatcgaagccaaacagcagatttaccgtattgtccgtgagctggctgccgaaggaaaaagcgtggtgtttatctccagtgaagtggaggaattgccgctggtgtgtgaccgcatcctgttattacagcacggcacgttctcgcaggagtttcactcgccggtcaatgtggatgagctgatgtccgccattctgtctgtgcactga

SEQ ID NO: 471344 - DNA, 984 bp, Shigella flexneri
atgcctaaaaaaatgagaacaacccgtaatctattattaatggctacgctattaggtagcgcactatttgccagggctgcggataaagaaatgaccattggtgcaatataccttgatacccagggatattacgctggagtgcgtcagggcgttcaggatgcggcaaaagattcttcagtacaggtacagttaattgaaactaacgcccagggggatatttcgaaagaaagtacctttgttgataccctcgtggcgcgtaatgtcgatgccattattttatcggcagtgtctgaaaatggcagtagccgtaccgttcgtcgcgccagtgaagcgggtattccggtgatttgctacaacacctgtattaatcaaaagggtgtcgataaatatgtctcggcgtatctggtcggcgatccactggaatttggtaaaaaactgggtaacgctgccgccgattattttattgccaataaaattgaccagccgaaaattgccgtcatcaattgcgaagcctttgaagtttgtgtgcagcgacgtaaaggatttgaagaagtattaaaatcccgcgttcccggcgcgcaaattgtcgctaaccaggaagggactgttttagataaagcgatttccgttggtgaaaaactgattatctccacgccggatctcaacgccattatgggggagtcgggcggtgcgacactcggcgcggtaaaagcggtacgtaatcaaaatcaggccggaaaaattgctgttttcggttcggatatgacaaccgaaattgctcaggagctggaaaacaatcaggtgctgaaagcggtagtggatatttccggtaagaaaatgggcaatgctgttttcgcgcaaacattgaaggttatcaataaacaagccgacggtgaaaaagtgattcaggtgccaatcgatctctataccaaaacggaagatggtaaacagtggctggcaacgcacgttgatggtctgccctaa

SEQ ID NO: 471345 - DNA, 3102 bp, Shigella flexneri
gtgtggctggaaaacgactacatcaaagtgatgatcctgccggaactgggcggtcgggtgcatcgcgcatgggataaagtgaaacagcgcgattttgtctatcacaatgaagtcattaaacctgcgctggtggggatgctgggaccgtggatctccggcgggattgagtttaactggccgcaacaccatcgcccgaccacctttatgcccgttgatttcaccctcgaagcccatgaagacggtgcacagacggtgtgggtcggcgaaacggagccgatgcatggtttacaggtgatgacaggtttcaccctgcgccctgaccgggcggcactggaaatcgccagccgcgtctataacggcaacgccacgccgcgtcatttcttgtggtgggccaacccggcagtgaaagggggtgaagggcatcagagcgttttcccaccggatgtgactgcggtgtttgatcacggcaaacgggccgtctccgctttccccatcgccaccggcacttactacaaagtggactactccgccggagtggacatttctcgctataaaaatgtgcctgttccaacctcatatatggccgaaaaatcgcagtacgattttgtcggcgcgtggtgtcacgatgaagatggcggtttgctgcacgttgccaaccaccatattgcgccaggtaaaaaacagtggagttggggacacagtgaatttggccaggcgtgggataagagtctgaccgacaataacggcccgtatatcgaactgatgaccggtatttttgccgataaccagcctgattttacctggcttgatgcttacgaagagaagcgtttcgagcagtatttcctgccttatcattctctgggcatggtgcaaaatgcctcccgcgatgcggtgataaaactccagcgtagtgagcgggggattgagtgggggctgtatgccatctctccgttgaacggataccgtctggcgatccgcgaaatcggcaaatgcaacgcgttgctcgatgatgccgtggccctgacaccagcgaccgccatccagggcgtgttgcacggtatcaatcctgacagactgaccattgaactctccgatgccgacggcaatattgtactgagttatcaggaacatcagccgcaggagttgccgttgccggacgtcgccaaagcgccactggcagcacaagacattaccagtacagatgaagcctggtttatcggtcagcatctggagcaatatcatcacgccagccgttcaccgttcgattactacctgcgcggcgtggcgctggacccgctggattatcgctgtaacctggcgctggcgatgctggaatataaccgcgcagatttcccgcaagcggtggcgtatgccagtcaggcgctgaaacgcgcacatgcgctgaacaaaaacccgcagtgtggacaagcaagtttgattcgcgccagtgcttacgaacgtcagggacaatatcaacaagccgaagaggatttctggcgtgcggtctggagcggcaatagtaaagcaggcggctattatggtctggcacgactggcggcgcgtaatgataacttcgacgcgggtctggatttttgccaacaaagtcttcgtgcctgcccaaccaatcaggaagtgctttgcttgcataatctgctgctggtgttaagtggtcgtcaggacaacgcgcgtttgcagcgcgagaaactgctgcgtgattatccgctgaacgccactctgtggtggctgaactggttcgatggtcgtagcgaatcagccctcgcgcagtggcgcggtctgtgtcagggacgcgacgttaacgctctgatgaccgccgggcaactgattaactggggaatgcccaccctggcggcagagatgctgaacgcactggactgccagcgcacgctgccgctttacctgcaagccagcttgctgccgaaagccgaacgtggcgaactggtcgcaaaagccattgatgtcttcccgcagtttgtccgtttcccgaatacgctggaagaagtggcggcgctggagagtattgaagagtgctggtttgctcgccatttactggcctgcttctactacaacaaacgtagctacaacaaagccattgccttatggcaacgttgcgtagagatgtcgccggagtttgccgacggctggcgcgggttagcgatccatgcgtggaataagaaacacgattatgagctggccgcgcgttatcttgataatgcttatcagcttgcgccgcaggatgcacgtctgcttttcgaacgggatttgctggataagttaagtggagccacaccggagaaacgactggcacgtctggaaaataatctggaaattgcgctgaaacgcgacgacatgaccgcagaactgctcaatttgtggcatctcacgggtcaggcagacaaagcggcggacattctcgccacgcgtaaattccacccgtgggaaggcggggaagggaaggtcaccagtcagtttatcctcaaccagttattacgcgcctggcagcatcttgatgccagagagccgcagcaggccagcgaactgcttcatgccgcgctgtattatccggagaatttaagcgaaggccgtttaccggggcaaactgataacgacatctggttctggcaggcgatatgcgccaacgcgcagggcgatgaaactgaagcgatgcgttgtttacgtctggcggcgaccggcgatcgcaccattaacatccacagttattacaacgatcagccggttgattatctcttctggcaaggaatggcgctgcgactgctgggtgaacagcaaaccgcacagcaactgtttagtgaaatgaaacagtgggcgcaagagatggctaaaaccagtattgaggcggatttctttgctgtttcacaacctgacctgttatcgctgtatggcgatttacaacagcagcataaagaaaaatgcctgatggtggcgatgctggcgtccgcgggactcggggaggttgcgcaatatgagtctgctcgcgctgaattgacggcgattaatccggcctggccgaaagcggcattattcaccactgtgatgccttttatttttaactacgttcactaa

SEQ ID NO: 471346 - DNA, 174 bp, Shigella flexneri
atgactccagtaaaagtgtggcaagagcgcgttgagatcccgacctatgaaaccgggccgcaggatatacatcccatgttcctggaaaatcgcgtttatcagggatcgtccggcgcggtttatccctacggcgtgaccgatacgctgagcgagcagaaaaccctgaaatcctag

SEQ ID NO: 471347 - DNA, 1194 bp, Shigella flexneri
atgagagcctgcattaacaatcaacagattcgccaccataacaaatgcgtgattctggaactgctgtaccggcaaaagcgcgccaataaatcaacgctggcccggctggcgcaaatttcgattccggcagtcagtaatattttgcaggaactggaaagcgaaaaacgggtggtgaatattgacgatgaaagccagacgcgcgggcatagtagcggtacatggctgattgcgccggaaggtgactggacgctgtgcctgaacgtgacgcccaccagtattgagtgtcaggttgctaatgcttgtttaagtccgaaaggcgaatttgagtatttacagattgatgtaccgacgccgcaggcgctgctgtccgaaatcgaaaaatgctggcatcgccaccgtaaattgtggccggaccgcaccatcaatctggcgctggcaatccacgggcaggttgatccggtgaccggcgtatcgcaaaccatgccgcaagcgccgtggacaacgccagttgaggtgaagtatctgctggaagagaagctgggcattcgggtgctggtcgataatgactgcgtgatgctggcgctggcggagaaatggcaaaataattcgcaggaacgggatttctgcgtgatcaacgttgattacggcattggctcgtcgttcgtgattaacgagcaaatttatcgcggcagtttgtatggtagcggacagattggtcacaccatcgttaatccggatggcgtcgtctgcgactgtggacgttacggcagcctggaaaccgtcgcctcgttaagtgcattaaaaaaacaggcgcgggtatggctaaaatcacaaccggttaatactcagcttgagcctgaaaaactgacaaccgcgcagttaatcgctgcctggcagagtggagaaccgtggatcaccagctgggttgatcgctctgccaatgccattggtttgagtctgtataacttcctcaacatcctcaatattaatcagatttggttgtacggtcgcagttgtgcctttggtgagaactggcttaatactattattcgccagacaggatttaacccgttcgaccgcgacgaaggaccgagcgtgaaagcgacgcaaattggcttcgggcaattaagccgcgcacaacaggtgctgggaattggctatttgtatgttgaggcgcagttacgacagatttga

SEQ ID NO: 471348 - DNA, 1254 bp, Shigella flexneri
atgttaaagcgtgaaatgaacattgccgattatgatgccgaactgtggcaggctatggagcaggaaaaagtacgtcaggaagagcacatcgaactgatcgcctccgaaaactacaccagcccgcgcgtaatgcaggcgcagggttctcagctgaccaacaaatatgctgaaggttatccgggcaaacgctactacggcggttgcgagtatgttgatatcgttgaacaactggcgatcgatcgtgcgaaagaactgttcggcgctgactacgctaacgtccagccgcactccggctcccaggctaactttgcggtctacaccgcgctgctggaaccaggtgataccgttctgggtatgaacctggcgcatggcggtcacctgactcacggttctccggttaacttctccggtaaactgtacaacatcgttccttacggtatcgatgctaccggtcatatcgattacgccgatctggaaaaacaagccaaagaacacaagccgaaaatgattatcggtggtttctctgcatattccggcgtggttgactgggcgaaaatgcgtgaaatcgctgacagcatcggtgcttatctgttcgttgatatggcgcacgttgcgggcctggttgctgctggcgtctacccgaacccggttcctcatgctcacgttgttactaccaccactcacaaaaccctggcgggtccgcgcggcggcctgatcttggcgaaaggtggtagcgaagagctgtacaaaaaactgaactctgccgttttccctggtggtcagggcggtccgttgatgcacgtaatcgccggtaaagcggttgctctgaaagaagcgatggagcctgagttcaaaacttaccagcagcaggtcgcgaaaaacgctaaagcgatggtagaagtgttcctcgagcgcggctacaaagtggtttccggcggcactgataaccacctgttcctggttgatctggttgataaaaacctgaccggtaaagaagcagacgccgctctgggccgtgctaacatcaccgtcaacaaaaacagcgtaccgaacgatccgaagagcccgtttgtgacctccggtattcgtgtaggtactccggcgattacccgtcgcggctttaaagaagccgaagcgaaagaactggctggctggatgtgtgacgtgctggacagcatcaatgatgaagccgttatcgagcgcatcaaaggtaaagttctcgacatctgcgcacgttacccggtttacgcataa

SEQ ID NO: 471349 - DNA, 1191 bp, Shigella flexneri
atgcttgacgctcaaaccatcgctacagtaaaagccaccatccctttactggtggaaacggggccaaagttaaccgcccatttctacgaccgtatgtttactcataacccagaactcaaagaaatttttaacatgagtaaccagcgtaatggcgatcaacgtgaagccctgtttaacgctattgccgcctacgccagtaatattgaaaacctgcctgcgctgctgccagcggtagaaaaaatcgcgcagaagcacaccagcttccagatcaaaccggaacagtacaacatcgtcggtgaacacctgttggcaacgctggacgaaatgttcagcccggggcaggaagtgctggacgcgtggggtaaagcctatggtgtactggctaatgtatttatcaatcgcgaggcggaaatctataacgaaaacgccagcaaagccggtggttgggaaggtactcgcgatttccgcattgtggctaaaacaccgcgcagcgcgcttatcaccagcttcgaactggagccggtcgacggtggcgcagtggcagaataccgtccggggcaatatctcggcgtctggctgaagccggaaggtttcccgcatcaggaaattcgtcagtactctttgactcgcaaaccggatggcaaaggctatcgtatcgcggtgaaacgcgaagagggtgggctggtatccaactggttgcacaatcacgccaatgttggcgatgtcgtgaaactggtcgctccggcaggtgatttctttatggctgtcgcagatgacacaccagtgacgttaatctctaccggtgttggtcaaacgccaatgctggcaatgctcgacacgctggcaaaagcaggccacacagcacaagtgaactggttccatgcggcagaaaatggcgaagttcacgcctttgctgatgaagttaaggaactggggcagtcactgccgcgctttaccgcgcacacctggtatcgtcagccgagcgaagccgatcgcgctaaaggtcagtttgatagcgaaggtctgatggatttgagcaaactggaaggtgcgttcagcgatccgacaatgcagttctatctctgcggcccggttggcttcatgcagtttaccgcgaaacagttagtggatctgggcgtgaagcaggaaaacattcattacgaatgctttggcccgcataaggtgctgtaa

SEQ ID NO: 471350 - DNA, 339 bp, Shigella flexneri
atgaaaaagattgatgcgattataaaacccttcaagctggacgatgtccgcgaagcactggccgaagtcggtattaccggcatgacggtgaccgaagtgaaaggctttggtcgccagaaaggccataccgagctgtaccgcggcgcggagtatatggtggattttctgccgaaagtgaaaattgagattgtcgtaccggacgacattgtcgatacctgtgtcgataccattattcgcacggcgcaaaccggcaaaatcggtgacggtaaaatcttcgtctttgacgtggctcgggtcattcgcatccgtaccggtgaagaggacgacgcggcaatttaa

SEQ ID NO: 471351 - DNA, 1335 bp, Shigella flexneri
atgagccataaacctgcgcatttattattggtcgatgacgatctgggattgctgaaactgcttggcctgcgcctgaccagcgaaggctacagtgtggtcacggcggaaagtggcgctgaaggattacgggtactgaatcgcgaaaaagtagatttagttatcagcgacctgcggatggatgaaatggacggtatgcagctatttgctgaaatccagaaagtgcagccgggaatgccagtaattattcttactgcgcatggttctatccccgatgccgttgctgcaacacagcagggcgtttttagtttcctcaccaagcctgtcgataaagatgcgctatatcaggcaattgacgatgcgctggagcaatccgcgccagccaccgatgaacgctggcgcgaggcaattgtcacccgcagcccgctgatgctgcgtttgctggaacaggcgcggctggtggcgcaatcagacgtcagcgttttgattaacggtcagagcggcaccgggaaagagattttcgcccaggctatccacaacgccagcccgcgcaacagcaaaccatttattgctattaactgtggcgcattgcccgagcaattgctggagtcggagctgtttggtcatgcgcgtggcgcgtttactggcgctgtcagcaatcgcgaaggtttattccaggcggcggaaggcggaacgctatttctcgatgaaattggcgatatgcctgcgccgttacaggtcaaactgctgcgcgtgttgcaggagcgtaaagtgcgcccgctgggcagtaaccgcgatattgatatcaatgtgcggattatttctgccactcaccgtgatctgtcaaaagcgatggcgcgcggggaattccgcgaagatctctattaccgcctcaacgttgtcagcctgaaaattccggcactggcggagcgcacagaagacattccgctactggcaaatcacctgttgcgccaggcggcagagcgacataaaccgtttgtccgcgcgttctctaccgatgcgatgaaacgcctgatgaccgcgagctggccgggtaatgtgcgccagttggtcaacgtgattgaacagtgcgtggcgctgacctcatctccggtgattagtgatgcgctggtggagcaggcgctggagggtgaaaatacggcgctgccaacctttgttgaggcacgtaatcattttgaactcaactatttgcgtaagctgctgcaaatcaccaaaggcaacgtcacccacgcggcgagaatggcggggcgcaaccggacagaattttataaactgctttcccgacacgagctggatgcaaacgatttcaaggaatga

SEQ ID NO: 471352 - DNA, 714 bp, Shigella flexneri
atgcgacacatttttcaacgattattgccccgacggctgtggctggcagggctgccatgtctggcattgctgggttgcgtgcagaatcacaataagccagccattgatacgccagcagaagaaaaaattccggtttatcaactggctgactatctttctactgaatgtagcgacatctgggcgctgcaaggtaaatcaaccgaaaccaatccgctttactggctgcgggcgatggattgtgctgatcgtttaatgcctgcgcagtcgcgtcagcaagctcgccaatatgacgacggcagctggcaaaatacctttaaacaagggattttgctcgccgacgccaaaattacgccgtatgagcgccgccagctggtcgcgcgtattgaagcgttaagtaccgagatcccggcacaggttcgcccactgtatcaactctggcgcgacggtcaggcgctgcaactgcaactggcggaagagcgccaacgttacagtaaactccagcagtccagcgacagcgagctggatacattgcgccagcaacatcacgttctacagcagcaactggaactcaccacccgcaagctggaaaacctgaccgatattgaacgccagctctcgacccgcaaaccggctggaaatttctcgccggatacgccgcacgagagtgaaaagcccgcgccatccacccatgaggtcactcctgatgagccataa

SEQ ID NO: 471353 - DNA, 1383 bp, Shigella flexneri
atgctggcatttttgctaattctactacccctgttggtgctggcatggcaagcctggcaaagcctgaatgcgcttagcgatcaggcggcgctggttaaccgcactacgcttattgatgcccggcgtagtgaagcgatgaccaacgcggcgctggagatggagcgtagctaccgtcagtattgcgtgctggacgaccctacgcttgcgaaggtttatcaaagccagcgcaagcgttacagcgaaatgctcgatgcccacgcaggcgtactgccagacgataaactttaccaggcattgcgtcaggatttgaacaatctggcccaacttcagtgtaacaacagtggtcccgatgctgccgccgccgcgcgtcttgaagcctttgccagtgccaataccgaaatggtgcaggccacgcgcacagtggtgttctctcgtgggcagcaacttcagcgtgaaatcgccgaacgtgggcaatattttggttggcaatcgctggtgctatttctggtgagtctggtgatggtgctacttttcacgcggatgattatcgggccggtgaaaaatatcgagcgcatgatcaaccgtctgggggaagggcgttctctgggcaatagcgtttcgttctgtggaccgagcgagttacgctcggttgggcaacgtattctttggttaagtgagcgcctgtcatggctggaatcccaacgccatcaatttttaagacatttatctcatgaattaaaaacgccactggcgagtatgcgcgagggcactgaattactggctgatcaggttgtcgggccgcttacgccagagcaaaaagaggtggtgagcattcttgatagcagcagctgcaatttgcaaaaactgatcgaacaactgcttgattacaaccgtaaacaggcggacagtgcggtggaactggagaatgttgaattagcaccgctggtggagacagtggtttctgctcatagcctgcccgcacgggctaaaatgatgcataccgacgtcgatctcaaagcaacagcttgcctggcggagccaatgctgctgatgagcgtactggataatctttactccaatgcggtgcactacggggctgaatccggtaacatttgccttcgcagcagtttacatggtgcgcgggtttatattgatgtcatcaatacaggcacgcccattccgcaagaggaacgcgccatgatcttcgaccccttttttcagggaagccaccagcgaaaaggggcggtgaagggcagcggtctgggattaagcattgccagggattgtattcgccgtatgcaaggggaactgtatctggtcgacgagagcgggcaagacgtttgtttccgcattgaattaccgtcgtcgaaaaacacgaaataa

SEQ ID NO: 471354 - DNA, 4044 bp, Shigella flexneri
atggcaacttattacagccattggcggcacgcgttgctaattcacgatggtgattttatttccacgcaaacggtttcgtcagcgcatcagattctttataatgacgcccgtttccccccccttgggtacaccgaaagcttagaagacgagagacttatgatggaaattctgcgtggttcgcctgcactgtcggcattccgaatcaacaaactgctggcacgttttcaggctgccaggctcccggttcacaatatttacgccgagtatgtccattttgctgacctcaatgcgtcgttaaacgatgatgagcacgcacaacttgaacgcctgctgaaatatggtccggcactcgccagccacgccccgcaaggcaaactcctgctggtgaccccgcgtcctggcaccatctctccctggtcttcgaaagcgaccgatattgcccataactgcgggctacaacaggtaaaccgccttgagcgcggcgttgcttactatatagaagccggtacgctgaccaatgaacaatggcagcaggttaccgctgaactgcacgaccgcatgatggaaacggtcttttttgatttagatgatgcagagcagttgtttgcccaccatcaaccgactccggtcacaagcgttgatttgctggggcagggccgtcaggcgctgatcgacgctaacctgcgtcttggcttggctctggcggaagatgaaattgactatctgcaggatgctttcacaaagcttggtcgtaacccgaacgacatcgagctgtatatgttcgctcaggcgaactctgagcactgccgccacaaaatttttaacgccgactggattatcgacggtgaacaacagccgaaatcgctgttcaggatgatcaaaaatactttcgaaaccacgccagatcacgttctctctgcttataaagataacgccgccgtaatggaaggttctgaagtgggccgctactttgctgaccacgaaacgggctgctacaatttccatcaggaaccggcgcacatcctgatgaaagtcgaaactcacaaccacccgacggcgatttctccgtggccgggcgcggcgaccggttccggcggtgaaatccgcgatgaaggtgccaccgggcgcggcgcgaagccgaaagctggtttggttggtttctccgtatccaacctgcgaattcctggcttcgaacagccgtgggaagaagatttcggtaagcctgagcgcattgttaccgcgctggacatcatgaccgaaggcccgctgggcggtgcggcgtttaacaacgaatttggtcgtccggcactgaacggctacttccgtacttatgaagaaaaagtgaacagccacaatggcgaagagctgcgcggttatcacaaaccgatcatgctggcgggcgggatcggcaacattcgcgccgatcacgtacaaaaaggcgagatcaacgtcggtgcgaagctggtcgttctcggcggcccggcaatgaacatcggtcttggcggcggcgcggcgtcttccatggcgtctggtcagtctgatgccgacctcgactttgcttccgtacagcgcgacaacccggagatggagcgtcgttgccaggaagtgatcgaccgttgctggcagcttggtgatgctaacccaattctgtttatccacgacgtcggtgcgggcggtctttctaacgcgatgccggagctggtgagcgacggcggacgcggcggtaaatttgaactgcgcgatattctaagcgacgaaccgggcatgagcccgctggaaatctggtgtaacgaatcccaggaacgctacgtgctggcggttgctgccgatcaattaccgctgtttgacgaactgtgtaagcgtgagcgcgcaccctacgcggtgattggtgaagcgaccgaagaactgcatctttctctgcacgatcgtcattttgataatcagccgatcgatctgccgctggacgtcctgcttggtaaaacgccgaagatgacccgcgatgtacaaacgctgaaagcgaagggcgatgcgctggtccgtgaagggatcaccattgcagacgcggtgaaacgcgtactgcatctgccgaccgtggcggagaaaactttcctggtgaccatcggtgaccgcagcgtaaccggcatggtggcgcgcgatcagatggtggggccgtggcaggtgccggtcgctaactgcgcggtcactaccgccagcctcgacagctactacggtgaagcgatggcgattggcgagcgtgcgccggttgcgctgctggatttcgccgcctctgcccgtctggcggtcggtgaagcgttaaccaatattgccgcaacacagattggcgatatcaaacgcattaaactttccgccaactggatggcggcggcaggccaccctggtgaagatgcgggcctgtatgaagccgttaaagccgtgggtgaagaactttgtccggcgctgggcctgacgatcccggtgggtaaagactctatgtcgatgaaaacccgctggcaggaaggtaacgaagagcgcgaaatgacgtcgccgctgtcgctggtgatttctgcatttgcccgcgtggaagatgtacgtcacaccatcacgccgcagctttgtaccgaagataacgcactgctgctgattgatttgggcaaaggcaataacgcgctgggcgcaacggcgctggcgcaggtttatcgtcagcttggcgacaaaccggcagatgtacgcgatgttgtccaactgaaaggcttctatgacgcgattcaggcgctggttgcacagcgtaagctgctggcgtatcacgaccgctctgatggaggcctgctggtaacgctggcggaaatggcctttgcaggtcattgtggcattgacgcggatatcgcctctctgggtgacgatcgcctggcggcgttgtttaacgaagaactgggtgcggtgattcaggttcgtgccgctgaccgtgaagcggtcgagtccgtactggcacagcatgggcttgcggattgcgtccattatgttgggcaggcggtttccggtgaccgttttgtgattaccgccaacgggcagactgtattcagcgaaagccgcactacgttgcgtgtctggtgggcagaaactacctggcagatgcagcgcctgcgtgacaacccggagtgtgccgatcaggagcatcaggcgaaatctaacgacgccgatccgggcctgaatgtaaaactgtcgttcgatatcaacgaagatgtggcagcaccgtatattgccactggcgcacgtccgaaagttgccgtactgcgtgagcagggcgtgaactcgcatgttgaaatggcggcagctttccaacgtgggggctttgatgctatcgacgtgcatatgagcgacctgctgactggacgtacgggactggaggattttcacgccctggtcgcgtgcggaggtttctcctacggtgatgtgctgggtgccggtgaaggttgggcgaagtctatcctgttcaatgaccgtgtacgcgatgagtttgcaaccttcttccatcgtccgcaaacgctggccctgggggtatgtaacggttgccagatgatgtctaacctgcgtgaactgatcccggggagtgagttgtggccacgttttgtgcgtaacacctccgatcgctttgaagcgcgtttcagcctggttgaagtaacccaaagcccgtctctgctgttgcaggggatggtgggctcgcaaatgccgattgctgtctctcatggtgaagggcgcgtggaagtgcgtgatgcggcgcatctggcggcactggaaagcaaagggctggtggcactgcgctatgtcgataacttcggcaaagtcactgaaacctacccggctaacccgaacggttcaccgaacggtattacggcggttacgactgaaagtggtcgagtcaccattatgatgccgcacccggaacgtgttttccgtactgtcagcaactcctggcatccggaaaactggggcgaggatggcccatggatgcgcattttccgcaatgcgcgtaagcagttggggtaa

SEQ ID NO: 471355 - DNA, 1557 bp, Shigella flexneri
ttgaaaaaattaaagattaattatctgttcatcggcattctggcactgctgctcgcggtcgctctctggccatccattccctggtttggtaaagccgacaaccgtatcgccgccattcaagcgcggggagagttgcgtgtgagcaccattcatactcccctgacttataacgaaatcaacgggaaaccttttggcctagattacgaactggcgaaacagtttgccgattacctcggcgtaaaactgaaagtgaccgtgcggcagaatatcagccagctgtttgacgaccttgataatggtaacgccgacctgctggcggcaggactggtctataacagtgagcgggtaaaaaattatcagcctggccctacctattattccgtgtcacaacaactggtttataaagtgggtcagtatcgcccacgtacgctgggcaacctgacggcggagcaactcaccgttgcaccgggtcatgtggtggttaacgatctccagaccctgaaagaaacaaaattcccggaattaagctggaaggtagacgacaaaaaaggctctgcggaattaatggaagatgtcatcgaaggaaaactcgattacaccattgctgattctgtcgccatcagcctgtttcagcgcgttcacccggagctcgccgtagcgctcgatatcaccgatgaacaaccggtgacttggtttagcccgttagatggcgataataccctttccgccgccctgctcgacttcttcaacgaaatgaatgaagacggtacgctggcacgcattgaagagaaatacctggggcatggcgatgattttgattacgtcgatacgcgcacatttttacgcgccgtcgatgcggtactgccgcagttaaagcccctgtttgagaaatacgccgaagaaattgactggcgtttgctggccgctattgcttatcaggaatcgcactgggatgcacaggccacttcaccgacgggtgtgcgcggcatgatgatgttaaccaaaaataccgcgcaaagcctcggcattacggatcgtaccgatgccgaacagagcatcagcggtggcgtgcgttatttgcaggatatgatgagtaaagtgccggaaagtgtgccggagaacgaacggatctggtttgccctcgctgcgtacaatatgggctatgcgcatatgctggatgcccgcgccctgacggcaaaaaccaaagggaatcctgacagttgggctgacgtaaaacagcgtctgcctttacttagccagaaaccctattacagcaagctgacttacggctacgctcgtgggcatgaagcctacgcttatgtcgaaaatattcgtaagtatcagattagcctggtgggttatctgcaagagaaagagaagcaggctacagaagcggcgatgcaactggcgcaggattatccggcggtatcgcctacggagttgggcaaagagaaatttccttttctctcgtttctttcccagtcgtcatcaaactatttgacccattctccctctctgctgttttccaggaaagggagtgaagagaaacaaaattaa

SEQ ID NO: 471356 - DNA, 504 bp, Shigella flexneri
ttgtctgaagtcgaatttagccacgaatattggatgcgtcacgcgctgacgctggcgaaacgtgcctgggatgagcgggaagtgccggtcggcgcggtattagtgcataacaatcgggtaatcggcgaaggctggaaccgcccgattggtcgccatgatcccaccgcacatgcagaaatcatggccctgcggcagggtggtctggtgatgcaaaattatcgtctgatcgacgccacgttgtatgtcacgcttgaaccatgtgtaatgtgtgccggagcgatgatccacagtcgcattggtcgcgtggtctttggtgcgcgtgacgcgaaaactggcgctgcgggatctttaatggatgtgctgcatcatccgggtatgaatcaccgagtggaaattacggaaggaatactggcggatgagtgcgcggcgttgctcagtgacttctttcgcatgcgccgccaggaaattaaagcgcagaaaaaagcgcaatcctcgacggattaa

SEQ ID NO: 471357 - DNA, 636 bp, Shigella flexneri
ttggcaactcacgagcgtcgtgtggtgttttttgacttagatggaacattgcatcagcaggatatgttcggcagttttctgcgctatttactgcgtcgccaaccgctgaatgcgttacttgtcctgccgttgttaccgattatagccattgcgttattgataaaaggtcgtgcggcacgctggccgatgagtctgcttctgtgggggtgcacttttggtcacagcgaagcacgtttacagacgttgcaggccgatttcgtgcgctggtttcgcgacaatgttaccgcctttccgctggttcaggagcgattaaccacctacctgttaagttccgatgctgatatctggttgattaccggctctccgcagccgctggttgaagcggtttatttcgatacgccctggctgccgcgggttaatcttatcgccagccaaattcagcgtggctatggtggttgggtattgacgatgcgttgtctgggacatgaaaaggtcgcacaactggagcgcaaaatcggcacgccgctgcggctgtacagtggctatagcgacagtaatcaggacaatccgctgctttatttctgtcagcatcgttggcgagtaaccccgcgcggtgaactccagcaactggaatag

SEQ ID NO: 471358 - DNA, 849 bp, Shigella flexneri
atgaacggcttacttcgtatccgtcagcgttaccaagggcttgcccagagtgataaaaaactggcggattatctgctgctacaacctgatacggcgcgccatttaagctctcagcaactggccaacgaagccggagtcagtcagtccagcgtcgtgaagttcgcgcaaaaactcggctataaaggttttccggcgcttaagttggcgttgagtgaagcgctggcaagccagccggaatcgccctccgtgcccattcataaccaaatccgcggtgatgatccgttacggctggtcggcgaaaaactgattaaagaaaatactgccgctatgtacgcaacgctaaacgttaatagtgaagagaaactgcatgaatgcgtaacaatgttgcgctctgcgcggcggataattctgaccggtattggcgcttcgggtctggtggcgcaaaactttgcctggaagctgatgaagattggcttcaatgctgccgcactgcgcgatatgcatgcgctactcgcaacagtacaggcgtcgtcccctgacgatctgttattagccatttcctacaccggtgtacgacgcgagttaaacctggcggcagatgagatgctgcgagtgggcggaaaagtgctggcgattaccggctttactccgaatgccctgcaacagcgtgcttctcattgcctgtataccattgccgaagaacaagcgacaaacagtgcttcaatctctgcttgtcacgctcagggaatgttaacggatttgctgttcattgcgctgattcagcaggatctggaactggcaccagaacgtattcgtcatagtgaagcgctggtgaaaaaactggtctga

SEQ ID NO: 471359 - DNA, 441 bp, Shigella flexneri
atgcttattggctatgtacgcgtatcaacaaatgaccagaataccgatctacaacgtaatgcgttgaactgtgcaggatgcgagctgatttttgaagacaagataagtggtacaaagtccgaaagaccggggctgaaaaaactgctcaagacattatcggcaggcgacacactggttgtctggaagctggatcggctggggcgcagtatgcggcatcttgtcgtgctggtggaggagttgcgcgaacgaggcatcaactttcgtagtctgactgattcaattgataccagcacaccaatgggacgctttttcttccatgtgatgggtgccctggctgaaatggaacgtgaactgattgttgaacgaacaaaagcaggactggaagctgctcgcgcacagggacgaattggcggtcgccgtcccaaactttcaccagaataa

SEQ ID NO: 471360 - DNA, 294 bp, Shigella flexneri
atgaaaccaacgacactactgcttattttcacttttttcgctatgccaggcatcgtatacgccgagtcgccttttagctcactgcagtccgcaaaagagaaaaccacggtattacaagatttacgtaaaatttgcacgccacatgcgtcattatcagatgaagcgtgggaaaagttaatgttgtcagatgaaaacaataaacaacatatacgcgaggccatcgtggcgatggaacgtaataatcagagcaattattgggaagcgttgggtaaggtagaatgcccggatatgtaa

SEQ ID NO: 471361 - DNA, 1239 bp, Shigella flexneri
atgttaaagtggtcggcttttcccctgaaacatgccacgggtaacaccatgagtgaatttattgccgaaaaccgcggcgcggatgccatcacccgaccgaactggtcagccgttttctcggtggcgttttgtgtcgcctgtctgattatcgttgagtttttgcccgtcagtttgttgacgccaatggcccaggatttaggcatttcggaaggggttgccgggcaatcggtgaccgtgaccgcctttgtggcaatgtttgccagtttgtttattacccagacaattcaggccactgaccgccgctacgttgttattttgtttgccgttttgctgacgctctcctgcttgctggtttcctttgctaactcattcagtttgcttttaatcggtcgtgcctgtctggggctggcgctgggcgggttctgggcgatgtcggcgtcgctgaccatgcgtctggtaccgccgcgtacggtgccgaaggcgctgtcggtgatcttcggcgcggtttctattgcgctggtgattgccgcgccgttgggcagttttttaggcgagcttatcggttggcgcaatgtctttaatgcggcggcggtgatgggcgtgctgtgtattttctggattatcaaatcattgccttcactgccaggcgaaccctcgcatcagaaacaaaatactttccgcttattacaacgtccgggtgtgatggcagggatgatcgccatcttcatgtctttcgccgggcagtttgctttcttcacgtatattcgcccggtgtatatgaacctggcgggattcggcgtggatggcttaacgctggtgctgttgagttttggtatcgccagctttattggtacgtcgctttcgtcgttcattcttaaacgttcggtaaaactggccttagcaggcgcgccgttaatactggctgtgagtgcgttggtactgacgttgtggggaagcgataaaatcgttgctaccggcgtggcgattatctgggggctaacttttgcattggttcccgtcggctggtcaacgtggatcacccgctcgctggccgatcaggcagaaaaagccgggtctattcaggtggcggttattcagcttgctaatacctgtggcgcggcaatcggcggttatgcgctggataatattggtctgacttcgccgttgatgttgtccggcacattgatgttgctgactgcattgttggttactgcaaaggtgaaaatgaagaaatcctga

SEQ ID NO: 471362 - DNA, 453 bp, Shigella flexneri
atgatctggataatgctcgccacgctggcggtagtgtttgtggttggttttcgggtgctgacatccggggccagaaaagcgattcgccgtctcagcgatcggctgaatatcgatgtcgtacccgtggagtcgatggtcgatcaaatgggaaagtcagccggtgacgaatttttacgttatttgcatcgcccggatgagtcgcacctgcaaaacgccgcgcaggtgttgcttatctggcaaattgtcattgtcgatgatagcgaacagaacctgctgcaatggcaccggattttacaaaaagcccgcctttccgcgccgattaccgatgctcaggtcaggctggcgctgggttttctgcgtgaaaccgaacctgaaatgcaggatattaatgcttttcagatgcgctataacgcgttctttcagcctgccgagggcgttcactggttgcattga

SEQ ID NO: 471363 - DNA, 1335 bp, Shigella flexneri
atgaataatgacaataccgattacgtgagtaatgaatcagggacgctttcgcgattatttaaactacctcagcatgggaccaccgtccgcacagaattgattgcggggatgaccacttttttaaccatggtgtacattgtttttgtgaacccgcaaatcctcggcgcggcacaaatggacccgaaagtggtgtttgttaccacctgtttgattgccggtatcggcagtattgcgatggggatatttgctaacttacccgtggcgctggctccggcaatggggctgaacgccttctttgcgttcgtggtcgtgggggcgatggggatctcctggcagaccgggatgggcgcgatattctggggcgcaattgggctatttttgctcacgctgtttcgtatccggtactggatgatctccaacattccattaagtttacgtattggtatcaccagtggaatcggattatttattgccttaatgggattaaaaaacactggtgttattgtcgccaataaagacacgctggtgatgattggcgatttaagttctcacggcgtgttgttaggtattttagggttttttattataaccgtgttgtcatcacgtcattttcatgccgcggtgctggtttctattgtggtgacgtcttgctgtggattatttttcggtgatgttcattttagcggcgtctattccattccgcctgatattagcggcgtcattggtgaagtagatttgagcggcgcgttaacacttgaactcgccggtatcattttctcctttatgctgatcaacctatttgattcatcaggaacattaattggtgtaactgataaagcgggcttaatagatagcaacggtaaattccccaatatgaataaggcgctgtatgttgatagcgtcagttcggtggcaggcgcatttatcggtacctcgtctgttactgcctatattgaaagtacttctggtgtggcagtcggtggtcgcacggggctaacggctgtcgtggtcggcgttatgttcctgttagttatgttcttctcaccgctggtggcgatggttcctccttacgcaaccgctggagcgttaatctttgttggcgtgctgatgacttcgagcctggcgcgcgttaactgggatgattttaccgaatcggtgcctgcgtttattaccacggtgatgatgccctttactttctcgatcaccgaagggattgcactcggctttatgtcgtactgcatcatgaaagtgtgcaccgggcgctggcgcgatctgaacctgtgtgtggtggtggtcgcagctctgttcgcattgaagattattctagtggattag

SEQ ID NO: 471364 - DNA, 1767 bp, Shigella flexneri
atgaataattccattaaccataaatttcatcacattagccgggctgaataccaggaattgttagccgtttcccgtggcgacgctgttgccgattatattattgataatgtctctattctcgacctgatcaatgccggagaaatttccggcccaattgtgattaaaggacgttacattgccggtgttggcgcagaatacgctgatactccggctttgcagcggattgatgctcgcggcgcaacggcggtgccagggtttattgatgctcacctgcatattgaatccagcatgatgacgccggtcacttttgaaaccgctaccctgccgcgcggcctgacgaccgttatttgcgaccctcatgaaatcgtcaacgtgatgggagaagccggattcgcctggtttgcccgctgtgccgaacaggcaaggcaaaaccagtacttacaggtcagctcttgcgtgcccgctctggaaggctgcgatgttaacggtgccagttttacccttgaacagatgctcgcctggcgggaccatccgcaggttaccggccttgcagaaatgatggactaccctggcgtaattaacgggcagaatgcgctgctcgataaactcgatgcatttcgctacctgacgctggacggtcactgtccgggtttgggtggcaaagaacttaacgcctatattgctgcgggtattgaaaactgccacgaaagttatcagctggaagaaggacgccggaaattacaactcggcatgtcgttgatgatccgcgaagggtccgctgccagcaatctcaacgcactggcaccgttgatcaacgaatttaacagcccgcaatgcatgctctgtaccgatgaccgtaacccgtgggagatcgcccatgaagggcatatcgatgccttaattcgccgcctgatcgaacaacacaatgtgccgctgcatgtggcatatcgcgtcgccagctggtcgacggcgcgccactttggtctgaatcacctcggcttactggcacccggcaagcaggccgatatcgtcctgttgagcgatgcgcgtaaggtcacggtgcagcaggtactggtgaaaggcgaaccgattgatgcgcaaaccttacaggcggaagagtcggcgagactggcgctgtctgccccgccatatggcaataccattgcccgccagccagtttccgccagcgactttgccctgcaattcacgcccggaaaacgctatcgggtcattgacgtcatccataacgaattgattacgcactcccgctccagcgtctacagcgaaaatggttttgatcgcgatgatgtgtgctttattgccgtacttgagcgttacgggcaacggctggctccggcctgtggtttgctcggcggctttggcctgaatgaaggcgcgctggctgcgacagtcagccatgacagccataatattgtggtgatcggtcgcagtgccgaagagatggcgctggcggtcaatcaggtgattcaggatggcggcgggctgtgcgtggtacgtaacggccaagtacaaagtcatctgccgttacccattgccgggctgatgagcaccgacacggcgcagtcgctggcggaacaaattgacgccttgaaagccgccgcccgtgaatgcggtccgttacccgatgagccgtttattcagatggcgtttctttctctgccagtgatccccgcgctaaaactaaccagtcaggggctatttgatggcgagaagtttgccttcactacgctggaagtcacggaataa

SEQ ID NO: 471365 - DNA, 1392 bp, Shigella flexneri
atgctggctttcctaaaccaggttcgcaagccgaccctggaccttccgctcgaagtgcggcgcaaaatgtggttcaaaccgttcatgcaatcctacctggtggtctttatcggctacctgacgatgtacctgattcgcaagaactttaacatcgcgcagaacgatatgatttcgacctacgggttgagcatgacgcagctggggatgatcggcctgggtttctccatcacttatggcgtgggtaaaacgttggtttcatactacgccgacggcaaaaacaccaaacaattcctgccgttcatgcttatcctctctgccatttgtatgctgggcttcagtgccagtatgggcagcggctcggttagcctgttcctgatgattgccttctacgccttaagcggctttttccagagtaccggcggttcgtgcagttactccaccatcaccaaatggacgccgcgtcgtaaacgcgggacattcctcggtttctggaatatttctcacaaccttggcggtgcaggcgcagcaggtgtggcgctgttcggggcaaattacctgttcgatggccatgtcatcggcatgtttatcttcccgtcgattatcgcgctgattgtcggttttatcggcctgcgttacggcagcgactccccggaatcttatggcctcggcaaagctgaagaactgttcggcgaggagatcagcgaagaggacaaagagacagaatctaccgatatgaccaagtggcagatctttgttgagtatgtgctgaaaaacaaagtgatctggctgctgtgcttcgccaacattttcctctatgtggtacgtattgggatcgaccagtggtcaaccgtatacgcgttccaggaactgaaactctctaaagcggtggcgattcagggctttacgctgtttgaagctggtgcgctggtcggtacgctgctgtggggctggctctctgacctggcgaacggtcgccgtggcctggtggcctgcatcgcgctggcgctgattatcgccacgctcggtgtgtatcaacatgccagtaacgaatatatctatctggcttctctctttgcgttgggtttcctggtctttggcccgcaattgttgattggtgtggctgctgttggctttgtacctaaaaaagcgattggcgctgccgatggtattaaaggcacctttgcttacctgattggtgacagctttgccaagttaggtctgggaatgattgccgatgggacgccggtattcggccttaccggctgggcaggcaccttcgccgcgctggatatcgccgcgattggttgtatctgcctgatggcgatagtggcggtaatggaagaacgcaaaatccgccgcgagaaaaaaattcagcagttgacagtggcataa

SEQ ID NO: 471366 - DNA, 1320 bp, Shigella flexneri
atgttgccgtttctgaaagcgcctgccgatgcgccattaatgactgataaacatgaaattgatgcccgttatcgctactggcgtcggcatattctgctgaccatctggctgggttacgcgctgttttacttcacgcggaaaagttttaacgccgcggtaccagaaatccttgctaacggcgtgctcagccgtagcgatatcggcctgttagcgaccctgttttacattacttacggcgtgtcgaagtttgtctccggcattgtcagcgatcgctcaaatgcccgttattttatggggatagggcttatcgccacgggcatcatgaacattctgtttggcttctcgacgtcgctatgggcgtttgccgtgctctgggtgctgaacgcctttttccagggctggggttcaccggtgtgtgcgcgtctgttaacggcctggtattcacgtaccgagcgcggcggttggtgggcgttatggaacacggcgcataacgtcggcggcgcactcattcccattgtgatggcagcgagcgcgctgcattacggctggcgtgccgggatgatgattgctggttgtatggcgatagtcgtggggatttttctctgctggcggctacgcgatcgcccgcaggcgttaggtttaccggcggtcggtgaatggcggcacgacgcgctggaaattgctcaacaacaagaaggggcagggttgacgcgtaaagagatcctcaccaaatatgtgttgctgaatccgtatatctggctgctttcgttttgctatgtgctggtctatgtggtccgggcggcgatcaacgactggggcaatttgtatatgtccgagacgctgggcgtcgatctggtcacggcgaatacggcagtgacgatgtttgaactgggcggatttatcggtgcgctggtagccggttggggctcggacaaattgtttaacggcaaccgtgggccgatgaatttgattttcgccgccggaattttgctttcagtcggctcgctgtggctgatgccatttgccagctacgtgatgcaggcaacctgcttcttcaccattggtttttttgtctttggcccgcagatgttaattggtatggcggcggcagagtgttcccacaaagaggcggcaggggcggcgacggggtttgtcggcttgtttgcttatctgggggcgtcgcttgctggttggccgctggcgaaagtgctcgatacctggcactggagcggattttttgtggttatctctatcgccgccgggatttccgcactgctgttactgccctttttgaacgcccagacaccgcgtgaagcgtga

SEQ ID NO: 471367 - DNA, 1503 bp, Shigella flexneri
atgaagacgttgttctcccgcttaattaccgttattgcctgcttttttatcttctctgccgcatggttttgcctatggagtatcagcctgcatctggttgagcgccctgatatggcggtgctgttatttccgtttggtctgcgtctggggctaatgctgcaatgcccgcgcggatactggcccgtattgctgggtgcggagtggctgctgatttactggctaacgcaggcggtcggtttaacccattttccgttattgatgatcggtagtttactgacgttactgcccgtagcgctgatctcgcgctatcgccatcagcgtgactggcgcaccttgctgttacagggtgcggcgttaacggcggcggcgttgttgcagtcgctgccctggctttggcacggcaaagagtcgtggaatgcgctgttgctgactttaactggcggtctgacgctggccccgatatgtctggtgttctggcactatctcgccaataacacctggctgccgctcggcccgtcactggtttctcagcccatcaactggcgcgggcggcatctggtctggtacttgctgctgtttgttatcagtctctggctccagttgggattgccggacgaactgtcgcgctttacgccattctgtctggcgctgccgattatcgcgctggcctggcactatggctggcaaggagcgctgattgcgacgttgatgaacgccatcgcgctgatcgccagtcaaacctggcgcgatcatctggtggatttattactctcgttgctggtgcaaagtctgacagggttgttactgggcgcaggcatccagcggttgcgtgaacttaaccagtcgctacaaaaggaactggcgcgcaatcagcatctggctgaacgtttgttagaaaccgaagagagcgtgcgccgcgacgtggcgcgtgagctgcacgacgatatcggtcagaccatcactgctattcgtactcaggcgggcattgttcagcggctggcggcagataacgccagtgtgaagcagagcgggcagctcatcgaacaactgtcgctgggcgtttacgacgcggtgcgccgtttgttaggacggttacgtccgcgccagctggatgatctcaccctggagcaggccatccgctcactgatgcgggaaatggagctggaagggcgcggcattgtcagccatctcgaatggcgtatcgatgaatcagcattaagcgaaaaccagcgcgtgacgctgtttcgtgtctgccaggaagggctgaacaacattgtgaaacatgccgatgccagcgcggttacgctgcaaggctggcagcaggatgaacggttgatgctggtgattgaagacgatggcagcggtttgccgccgggttccgggcaacaaggttttggcctcaccggaatgcgcgagcgcgtaacggcgctgggcggcacattacacatttcctgtctgcacggcacgcgtgtcagcgtttctctacctcaacgttatgtctaa

SEQ ID NO: 471368 - DNA, 591 bp, Shigella flexneri
atgatcaccgttgcccttatagacgatcacctcatcgtccgctccggctttgcgcagctgctggggctggaacctgatttgcaggtagttgccgagtttggttcggggcgcgaggcgctggcggggctgccggggcgcggtgtgcaggtgtgtatttgcgatatctccatgcccgatatctccggtctggagctgctaagccagctgccgaaaggtatggcgacgattatgctctccgttcacgacagtcctgcgctggttgagcaggcgcttaacgcgggggcacgcggctttctttccaaacgctgtagcccggatgaactcattgctgcggtgcatacggttgccacgggcggctgttatctgacgccggatattgccattaaactggcatccggtcgtcaggacccgctgaccaaacgtgaacgccaggtggcggaaaaactggcgcaaggaatggcggtgaaagagattgccgccgaactgggcttgtcaccgaaaacggtacacgtccatcgcgccaatctgatggaaaaactgggcgtcagtaacgacgtagagctggcgcgccgcatgtttgatggctggtga

SEQ ID NO: 471369 - DNA, 291 bp, Shigella flexneri
atgcaaaacacaactcataacaacgtaattctggagctcaccgttcgcaaccatccgggcgtaatgacccacgtttgtggcctttttgcccgccgcgcttttaacgttgaaggcattctttgtctgccgattcaggacagcgacaaaagccatatctggctactggtcaatgacgaccagcgtctggagcagatgataagccaaatcgctaagctggaagatgtcgtgaaagtgcagcgtaatcagtccgatccgacgatgtttaacaagatcgcggtgttttttcagtaa

SEQ ID NO: 471370 - DNA, 1689 bp, Shigella flexneri
atggcaagttcgggcacaacatcgacgcgtaagcgctttaccggcgcagaatttatcgttcatttcctggaacagcagggcattaagattgtgacgggcattccgggcggttctatcctgcctgtttacgacgccttaagccaaagcacgcaaatccgccatattctggctcgccatgaacagggcgcggggtttatcgctcagggaatggcgcgcaccgacggtaaaccggcggtctgtatggcctgtagcgggccgggtgcgactaacctggtgaccgccattgctgatgcgcggctggactccatcccgctgatttgcatcactggtcaggttcccgcctcgatgatcggcaccgacgccttccaagaagtggacacctacggcatctctatccccatcaccaaacacaactatctggtcagacatatcgaagagctcccacaggtcatgagcgatgccttccgcattgcgcaatcaggccgccctagcccggtgtggatagacattcctaaggatgtacaaacggcggtttttgagattgaagctcagcccgcggtggcagaaaaagccgctgcacccgcctttagcgaagaaagcattcgtgacgcagctacaatgattaacgctgccaaacgcccggtgctttatctgggtggtggtgtgatcaatgcgcctgcgcgggtgcgtgaactggcggagaaagcgcaactgcctaccaccatgactttaatggcgctgggcatgctgccaaaagcgcatccgttgtcgctgggtatgctggggatgcacggcgtgcgcagtaccaactatattttgcaggaggcggatttgttgattgtgctcggtgcgcgttttgatgaccgggcgattggcaaaaccgagcagttctgtccgaatgccaaaattattcatgtcgatatcgatcgcgcagagctgggtaaaatcaagcagccgcatgtggcgattcaggcggatgttgatgacgtgctggcgcaattgatcccgcgggtggaagcgcaaccgcgtgcagagtggcaccagttggtagcggatttgcagcgcgaattcccgtgtccaatcccgaaagcgtgcgatccattaagccattacggcctgatcaacgccgttgccgcctgtgtcgatgacaatgcgattatcaccaccgatgtgggtcagcatcagatgtggaccgcgcaagcttatccgctcaatcgcccacgccagtggctgacctccggtgggctgggcacgatgggttttggcctgcctgcggcgattggcgcggcgctggcgaacccggatcgcaaagtgttgtgtttctccggcgacggcagcctgatgatgaatattcaggagatggcgaccgccagtgaaaatcagctggatgtcaaaatcattctgatgaacaacgaagcgctggggctggtgcatcagcaacagagtctgttctacgagcaaggcgtttttgccgccacctatccgggcaaaatcaactttatgcagattgccgccggattcggcctcgaaacctgtgatttgaataacgaagccgatccgcaggctgcattgcaggaaatcatcaatcgccctggcccggcgctgatccatgtgcgcattgatgccgaagaaaaagtttacccgatggtgccgccaggtgcggcgaatactgaaatggtgggggaataa

SEQ ID NO: 471371 - DNA, 174 bp, Shigella flexneri
atgctgacgcatcttatccgccctaccatccctcccggcaacatttattgccgcttttgtttacatattctgccgctaaacaattccccattcctggcgtatatctggctaacattcatcaatgtgatagattcctctcccgcatttatgggaatgcgtagtgacttattctaa

SEQ ID NO: 471372 - DNA, 1185 bp, Shigella flexneri
atgaaaaggcaaagaaacgtcaatttgttattgatgttggtattactcgtggccgtcggtcagatggcgcaaaccatttatattccagctattgccgatatggcgcgcgatctcaacgtccgtgaaggggcggtgcagagcgtaatgggcgcttatctgctgacttacggtgtctcacagctgttttatggcccgatatccgaccgtgtcggtcgccgaccagtgatcctcgtcggaatgtccatttttatgctggcaacgctggtcgcggtcacgacctccagtttgacggtattgattgccgccagcgcgatgcaggggatgggcaccggcgttggcggcgtaatggcgcgtactttgccgcgtgatttatatgaacggacacagttgcgccatgctaacagcctgttaaacatggggattctcgtcagtccgttgctcgcaccgctaatcggcggtctgctggatacgatgtggaactggcgcgcctgttatctctttttgttggttctttgtgctggtgtgaccttcagtatggcccgctggatgccggaaacgcgtccggtcgatgcaccgcgcacgcgcctgcttaccagttataaaacgcttttcggtaacagcggttttaactgttatttgctgatgctgattggcggtctggccgggattgctgcctttgaagcctgctccggcgtgctgatgggcgcggtgttagggctgagcagtatgacggtcagtattttgtttattctgccgattccggcggcattttttggggcatggtttgccgggcgtcctaataaacgcttctcaacgttgatgtggcagtcggttatctgctgcctgctggctggcttgctgatgtggatccccgactggtttggcgtgatgaatgtctggacgctgctcgttcccgccgcgctgttctttttcggtgccgggatgctgtttccgctggcgaccagcggcgcgatggagccgttccccttcctggcgggcacggctggtgcgctggtcggcggtctgcaaaacattggttccggcgtgctggcgtcgctctctgcgatgttgccgcaaaccggtcagggcagcctggggttgttgatgaccttaatgggattgttgatcgtgctgtgctggctgccgctggcgacgcggatgtcgcatcaggggcagcccgtttaa

SEQ ID NO: 471373 - DNA, 498 bp, Shigella flexneri
atgacaggaagtcaggtcattgatgctgaagaggacaggcataagctggttgtagagtacaaggatgctctgcaacctgccgatttttatcacaatttcaaacagcggggcatccgctccgtacagctcattccctatcttgaatttgatgaccggggcgatctgacggccgcttcggtgacagcagagctgtgggggaaatttttaattgccctgtttgagtgttgggtgcgggcagatatcagtcgtatctcgattgagctttttgacgccaccttacaaaaatggtgtggcagcgaaaacccgcaaccgcgccgtgactgccaggcgtgcgactggcatcgcctgtgcccgcacgctcggcaggagacgccagacagcgtgctttgtgcgggctatcaggcgttttattcttactccgcaccgcatatgcgggtgatgcgtgatctgataaagcagcatcgttctcccatggagctgatgacgatgctgcggtga

SEQ ID NO: 471374 - DNA, 363 bp, Shigella flexneri
atgccggatagccgtaaagccagacgcattgccgacccagggctgcagccggagcgcacatcactggcgtggtttcgtaccatgctgggctacggcgcgttgatggcgttggctatcaaacacaactggcaccaggcgggcatgttattctggatttcgattggcatcctcgccatcgtggcgctgatcctctggcactacacccgtaatcgcaatttaatggatgtcacgaatagcgatttttcccaatttcacgtagtccgtgacaaatttttgatctccctcgcggtgttatctctcgcaatactgtttgctgtaacgcatatacatcaacttatcgtatttattgagagagtcgcatga

SEQ ID NO: 471375 - DNA, 348 bp, Shigella flexneri
atgaaaatttcccgccttggagaagcgcccgattaccgcttctcgctggctaatgagcgtacttttctggcgtggatccgtaccgcactaggatttctggcggcgggggttgggcttgatcaacttgcgccagatttcgccacgcccgtcattcgtgaactgctggcgttgttgttgtgtctgttttccggcgggttagcaatgtatggctacctgcgctggttacgcaatgaaaaagcgatgcgtctgaaagaggacctgccctacaccaacagcttattaatcatcagcttaatattgatggttgtggcggtgatcgttatgggactggtgttgtatgccggatag

SEQ ID NO: 471376 - DNA, 414 bp, Shigella flexneri
atgggtatcatagcgcaaaataaaatcagttcattgggcatgctgttcggtgccatcgctttaatgatggggattatccacttttcattcggccctttttccgcaccaccgccaacgcttgaaagcatcgtggcggacaaaacggctgaaattaaaagaggtcttctcgccggaataaaaggcgaaaaaattaccactgtggagaaaaaagaggacatggatatcgataaaatcctcgatcaaagcggtatcgcactggccattgctgcgctactttgcgcatttattggcggtatgcgtaaggaaaatcgctggggcattcgcggcgcgctggtttttggtatcggcatcgtgtgcagcattttgctgatattcctgattttttccttcctgaccggcggttcgctggtttaa

SEQ ID NO: 471377 - DNA, 939 bp, Shigella flexneri
atggtggtttcgtatgatgagccgcatcacccgttcacctgtccggtggagtatttagagaaatacgctgatttttactacgaacttggcgagaaatcacaggatgacctggcgaacaaaccggaacatcaccgcttatgggcgcaggcgatgccatcgccagtcggtgatgacgggctttatcaccatccgctctattttgcctgcaatgactttgttgatgaccaaatcggacgtgtcatcaatgccttaacgccagagcaacgtgaaaatacgtgggtcatttatacctccgatcacggtgaaatgatgggcgcacataagctgatcagtaaaggagcggcgatgtatgacgacatcacccgtattccgctgatcatccgttcgccgcaaggggagcggcgacaggtcgatacgccagtcagtcatattgatttactgccgacaatgatggcgctggcagatattgaaaaaccagagattctgccgggggaaaatatccttgccgtgaaagagccacgcggcgtgatggtggaatttaaccgctacgagattgagcatgacagctttggcggttttattccggtgcgttgctgggtgacggatgactttaaactggtgctcaacctcttcaccagtgatgaactttacgatcgccgtaatgacccaaatgaaatgcataacctgatcgatgatatccgttttgcagacgttcgcagcaaaatgcatgacgccttattggattacatggacaaaattcgcgatccgttccgcagttaccaatggagtctgcgtccgtggcgtaaagatgcacgaccgcgctggatgggggcgtttcgcccacgcccacaagatggctattcgccagtggtacgcgactatgacaccggcctaccgacgcaaggagtgaaggtggaggagaaaaaacagaaattctga

SEQ ID NO: 471378 - DNA, 477 bp, Shigella flexneri
atggtcggttgctatagcggtaaaccgctgaatacgcaaaatattgatagtctggcggcggaaggtattcgctttaattccgcctacacttgttcaccggtttgtacgcctgcacgggccggactattcaccggtatctacgctaaccagtccggcccgtggaccaacaacgtcgcgccaggcaaaaacatctccactatggggcgctactttaaggatgccggctatcacacctgttacatcggcaaatggcatctcgacggtcatgactatttcggcactggcgagtgtccgccggagtgggatgctgattactggtttgatggggcgaactatcttagcgaactgacggaaaaagagatcagcctgtggcgcaatggcctaaacagcgtcgaagatttacaggcgaaccatattgacgaaaccttcacctgggcgcaccgcatcagcaatcgagcggtagattttctgcaatag

SEQ ID NO: 471379 - DNA, 1716 bp, Shigella flexneri
atgaattcgttacaaatcttgagttttgtcggttttacgctgctggtggcggtgatcacctggtggaaggttcgcaaaacagataccggatcgcaacaaggctattttcttgccggacgttcactaaaagcgccggttattgccgcttcgttaatgttaaccaacctttccacggaacaactggttggtctttccgggcaggcctacaaaagcggcatgtcggtgatgggctgggaagtgacttcagcggtgacgctgatcttcctcgcgctaatctttttaccgcgctatctgaagcgcggcattgccaccatccccgattttctggaggaacgttatgataaaacgacgcgtattatcatcgacttctgcttcctcattgccaccggcgtctgctttctgccgattgttctctactccggcgcgttggcgctcaacagcctgtttcacgtcggggaatcgctacagatttctcacggtgcggctatctggctactggtaattttgcttggtctggcgggaattttgtatgcggtgatcggcggactgcgcgcaatggcagtggcggactccatcaacggtattgggctggttatcggcgggttgatggtgccggtatttggcctgatcgcgataggcaagggcagctttatgcagggcattgagcaaattaccaccgttcacgccgagaaattaaactcagtcggtggcccgaccgatcccttgccgattggcgcggcatttaccggtttaattctggtgaacaccttttactggtgtacaaatcagggcatcgtgcaacgcacgctggcgtcaaaaagcctggcggaagggcaaaagggggcgctgttaacggcggtgctgaaaatgctcgacccgctggtactggtgctgccagggttgattgcgtttcatctgtatcaggatctaccgaaagccgacatggcctacccgacgctggtcaataacgttttgccagtgccactggagggtttcttcggcgcggtgttatttggtgcggtgatcagtaccttcaacggctttctgaatagcgccagtacattattcagtatgggtatttaccgtcgcatcattaaccagaatgccgagccgcagcagctggtcaccgtcgggcgcaaatttggtttctttatcgctatcgtttcggttttggtagcgccgtggatcgccaacgcgccgcaggggctgtatagctggatgaaacagctcaacggcatttacaacgtgccgctggttaccatcatcattatgggctttttctttccgcgcatcccggcgctggcggcaaaagtggcgatggggattggcataatcagctacatcaccatcaactatctggtgaagttcgacttccatttcctctatgtgctggcctgtacgttctgcatcaacgtggtcgtgatgctggtgatcggttttatcaaaccgcgcgccacgccgttcaccttcaaagatgcgtttgcggtggacatgaaaccgtggaaaaacgtcaagatcgcgtcaattggtatcctgttcgcgatgattggcgtctatgtcgggctggctgaattcggcggctacggtacgcgctggttagcgatgatcagttatttcatcgctgccgtagtgattgtctacctgatttttgacagctggtggcatcgtcacgacccagccgtaacctttactcccgacgcgaaggatagcctatga

SEQ ID NO: 471380 - DNA, 894 bp, Shigella flexneri
atgaatggaaaattgcaaagttcagatgtaaaaaacgaaactccgtacaatattcccttattgattaacgaaaatgtgatctccagcggaatttctctgatctcgctctggcatacctacgccgacgagcattaccgggtgatctggccgcgggacaagaagaaaccgcttatcgccaactcatgggttgcggtgtataccgtacaaggatgtgggaaaattcttttaaagaatggcgaacaaataactctgcatagcaactgtattatatttttaaagccaatggatattcactcttatcactgtgaaggtttagtctgggaacagtactggatggaatttacccccaccagtatgatggatattcccgttggtcagcaaagcgttatttataatggcgaaatttataatcaggaactcaccgaagttgctgagttaataacttcaccagaagcaataaaaaataatctggcagtcgcttttctgacgaaaattatttatcagtggatttgtcttatgtccgcagatggtaaaaaagatccacaacggcggcaaattgaaaaattaattgccactttacatgccagtctgcaacaacgctggagcgtagctgatatggctgccacgatcccctgtagcgaagcctggttgcgtcgtctgtttttacgctataccggcaagacgccgaaagaatattacctcgatgcgcgtctggatctggcgctatcgctattaaagcaacaaggaaactcggttggcgaagtcgctgatacgctcaacttcttcgactcctttcatttcagcaaagcctttaaacataaatttggttatgcgccgtcagccgtgctaaagaatacggaccagcacccaacggatgccagtccacacaattaa

SEQ ID NO: 471381 - DNA, 177 bp, Shigella flexneri
atgagtcagcaagtggcggtggaaaaactggtcgtggacgcctgggaacagcgttcatatcagcacctgtggcaggcgattacgttgtcgaaaacggtaccgagcgcctcggtcgccaaagctattctggatgagttgctggaggccaacaaagcgtactggccagagttacgttaa

SEQ ID NO: 471382 - DNA, 216 bp, Shigella flexneri
atgctcaactactccaacccggcagcaattgtcgcagaagccacgcgtcgtctgcgcccgaatgcgaaaatcctcaacatctgtgacatgccaatcggtattgaaagccggatggcgcaaattgttgggctgcaagatcgcaaacagatgcgcgtgcgctactacggcctgaaccactggtggtcggcgatatcccgcagtttcagaaagggttaa

SEQ ID NO: 471383 - DNA, 423 bp, Shigella flexneri
atgaccaaattctcagtggttgtcgcaggcggtggaagcacctttacgccaggcatcgtgttgatgctcctggcgaatcaggaccgtttcccgcttcgtgcactgaaattttatgataacgatggcgcgcggcaggaagtgattgccgaagcctgtaaagtcatccttaaagaaaaagcgccggacattgcgtttagttacaccaccgatcctgaagtggcgttcagcgacgttgattttgtcatggcgcacatccgcgtcggcaagtacccgatgcgcgaactggatgaaaaaatcccactgcgccacggtgttgttggtcaggaaacttgcggacccggcggaatagcgtacggcatgcgttccattggcggcgtcctggaactggtggattatatggaaaaatattcaccaaacgcctag

SEQ ID NO: 471384 - DNA, 1617 bp, Shigella flexneri
atgctcagtcaaattcaacgctttggcggcgcgatgttcacgccagtgctgctgtttcccttcgccgggattgtggtgggtcttgccatcttgctgcaaaacccgatgtttgtcggggaatcactgaccgatccgaacagtttattcgcgcaaatcgtacacattattgaagagggcggttggacggtattccgtaatatgccgctgatttttgctgtcggtttacccattggccttgctaagcaagcgcagggacgtgcttgtctggcggtgatggtgagtttcctgacctggaactatttcatcaatgcgatgggaatgacctggggaagctacttcggcgtcgatttcactcaggacgcggtggcaggtagcggtctgacaatgatggccgggattaaaaccctcgataccagcattatcggcgcaattatcatttccggcattgtgacggcgctgcataaccgtctgttcgataaaaaactgccggtttttctcggcattttccaggggacgtcttatgtggtgattatcgccttcctggtgatgatcccctgtgcctggctgacattgctcggctggccaaaagtacaaatggggattgaatctctgcaagcgttcctgcgttcggcgggtgcgcttggggtgtgggtttacaccttcctcgaacgtattctgatcccaaccggtttacaccacttcatctacggaccgtttatctttggtccggcagctgttgaaggcggcattcagatgtactgggcgcagcatctgcaagagttcagtctgagcgccgagccactgaaatcgttgttcccggaaggcggttttgccctgcacggtaactcaaaaatctttggtgccgtgggcatttctttagcgatgtacttcactgccgcaccggaaaatcgggtaaaagtggcgggcttgctgattcccgcaaccttaaccgccatgctggtgggaattaccgaaccgctggaatttaccttcctgttcatttcaccgttgctgtttgcggtacacgccgtgctggcggcctcaatgtcgaccgtaatgtatctctttggtgtggtgggcaacatgggcggaggtctgattgaccaggttttaccgcaaaactggatcccgatgttcagcaaccacgcggatatgatgctgacccaaatcgccattgggttgtgctttaccctgctgtacttcgtggttttccgcaccctgattctgcagttcaacatgtgcacgccgggacgtgaagatgcggaagtgaaactctactcaaaagccgaatacaaagcctcgcgaggccaaaccaccgctgcagagccaaaaaaagagctggatcaggctgccggtatcctgcaagccctgggcggggtcggcaatatctccagcattaacaattgcgcgacgcgtctacgtattgcactgcatgacatgtcacaaacgctggatgacgaagtctttaaaaagctgggagcgcacggcgtcttccgtagtggcgatgccattcaggtgatcattggtctgcatgtatcccaattgcgtgaacagctcgatagcttaattaattctcatcaatcagcagaaaatgttgccattacggaggcagtataa

SEQ ID NO: 471385 - DNA, 675 bp, Shigella flexneri
atgatctacaaaagcattgcggagcggttaagaattcgacttaattccgcggatttcacgctaaacagccttcttcccggtgaaaaaaagctggcggaagagtttgcggtatcgcggatgactatccgtaaagccattgacctgctggtagcgtgggggctggtggtccgccgccacggcagcggcacttacctggtgcgcaaagatgtgctgcatcaaaccgccagcctgaccggactggtggaggtgttaaaacggcagggaaaaacggtcaccagccaggtgctgatttttgaaatcatgcctgcgcctccggccattgccagccagttacggattcaaatcaacgagcagatctacttctcccgtcgcgttcgttttgtggaagggaaaccgctaatgctggaagacagctatatgccggtaaaactgttccgtaacctttcgctgcaacatctggaagggtcgaagtttgaatatattgaacaagagtgcgggattttgattggcggtaattatgaaagcctgatgccggtgctcgccgatagactgctggcgcggcaaatgaaggtagcggaacacacgccactgctgcggatcacctcgttgtcatatagcgagagcggggagtttttgaattattcagtgatgttcagaaatgccagcgaatactag

SEQ ID NO: 471386 - DNA, 1662 bp, Shigella flexneri
atgagtgatatagcattaacggtcagtattctggctttggtggcagtcgtcggtttgtttatcggcaacgtcaaatttcgcggcataggattaggtattggcggcgtgctgtttggtgggatcatcgtcggccattttgtttctcaggcggggatgacattaagtagcgatatgctgcatgttattcaggaatttggcctgatcctgttcgtttataccatcgggattcaggtagggccgggcttctttgcctcattgcgcgtctccggattacgcctcaacctgtttgctgttctgatcgtcatcatcggtggtctggttaccgccatcctgcataaactgtttgatattccactgccggtagtgctggggattttctccggtgcggtaaccaatacgccagcgctgggggcagggcagcagatcttgcgcgacctgggtacaccaatggaaatggtcgatcagatggggatgagttacgcgatggcgtatccattcggcatttgcgggattttgttcaccatgtggatgttgcgggttattttccgcgtcaatgtcgagacagaagctcagcagcacgagtcttcacgcaccaatggcggcgcgctgatcaagactatcaatattcgcgttgagaaccctaacctgcatgatttagccattaaagatgtaccgattctcaacggcgacaaaattatctgctcgcgtctgaaacgagaagaaaccctaaaagtaccttcgccagataccattatccaactgggcgatttgctgcatctggtggggcagccagcggatttacataatgcgcaactggtgattggtcaggaggtcgatacctcgctgtctacgaaaggcactgatttgcgcgtcgagcgtgtggtggtcaccaatgaaaacgtgctcggaaaacgtattcgcgacctgcactttaaagaacgctatgacgttgttatctcgcgcctgaaccgtgccggggtcgaactggtcgccagtggcgatatcagcctgcagttcggcgatatcctcaacctggtggggcgtccgtccgcaattgatgccgttgccaatgtgctggggaatgcgcagcaaaaactgcaacaggttcagatgctgccagtgtttattggcatcgggcttggcgtattgttaggttctattcccgtctttgtgccaggattcccggccgcgttgaaactggggctggcgggcggtccgctgattatggcgttgatcctcgggcgtatcggcagtatcggcaagctgtactggtttatgccgccaagtgccaacctcgtgctgcgggagctggggatcgtgctgttcctctcggtcgttggtctgaaatctggtggggattttgtgaataccctggtcaatggcgaagggctaagctggattggttatggtgccctgatcaccgccgttccgctgattactgttggcattctggcgcggatgttagccaaaatgaattacctgaccatgtgcgggatgctggcaggttccatgaccgatcctccggcgctggcgtttgctaataatcttcatccaaccagtggtgcggcggcgctctcttacgccactgtctatccgttagtgatgttcctgcgcattatcaccccccaattactggcggtgctcttctggagtatcggttaa

SEQ ID NO: 471387 - DNA, 429 bp, Shigella flexneri
atgcgtaacttcgatttatccccactgatgcgtcaatggatcggttttgacaaactggccaacgcactgcaaaacgccggtgaaagccagagcttcccgccgtacaacattgagaaaagcgacgataaccactaccgcattacccttgcgctggcaggtttccgtcaggaagatttagagattcaactggaaggtacgcgcctgagcgtaaaaggcacgccggagcagccaaaagaagagaaaaaatggctgcatcaagggcttatgaatcagccatttagcctgagttttacgctggctgaaaatatggaagtctctggcgcaaccttcgtaaacggtttactgcatattgatttaattcgtaatgagcctgaacccatcgcagcgcagcgtatcgctatcagcgaacgtcccgcgttaaatagctaa

SEQ ID NO: 471388 - DNA, 414 bp, Shigella flexneri
atgcgtaactttgatttatccccgctttaccgttctgctattggatttgaccgtttgtttaaccacttagaaaacaaccagagccagagtaatggcggctaccctccgtataacgttgaactggtagacgaaaaccattaccgcattgctatcgctgtggctggttttgctgagagcgaactggaaattaccgcccaggataatctgctggtggtgaaaggtgctcacgccgacgaacaaaaagagcgcacctatctgtaccagggcatcgctgaacgcaactttgaacgcaaattccagttagctgagaacattcatgttcgtggggctaacctggtaaatggtttgctgtatatcgatctcgaacgcgtgattccggaagcgaaaaaaccgcgccgtatcgaaatcaactaa

SEQ ID NO: 471389 - DNA, 261 bp, Shigella flexneri
atgtcccataccggggggaaagaaggaacgtatcccggcacccgcgccagcgccaccatgattggcgacgatgaaaccaactggggcactaagtcgctggcgattctcgatatgccgtttaccgctgtaatggacacgcttttactgccgtgggatgtgttccgcaaagacagctcggtgcgctcgcgcgttgaaaaaagcgaagccaacgcgcaagccaccaatgcggttattccaccggccagaatgcctgataactga

SEQ ID NO: 471390 - DNA, 1227 bp, Shigella flexneri
atgaaacagataacctttgctccccgtaatcacctgctcaccaataccaataccaataccaatacctggacgcccgacagccagtggctggtatttgacgtgcgtccttctggggcgtcgtttaccggcgagaccattgagcgtgtgaatatccatacaggcgaggtcgaggttatctatcgcgcgtcacagggcgcacacgtcggcgtggtgaccgttcatccgaagtcagagaaatatgtctttattcacggccctgaaaatcctgatgaaacatggcattacgacttccatcatcgacgcggagtcattgctgaaggcggcaaggtgagcaatctcgatgcaatggatattaccgcgccgtatacgccaggagcgctgcgcggtggcagccatgtgcatgtctttagcccgaacggtgaaagggggagctttacctataacgaccatgtaatgcatcaactcgatccggcgctggatttgcgaaacgtcggggttgctgcaccgtttggcccggtcaacgtacaaaagcaacatccgcgtgaatacagcggtagccactggtgtgtgctggtgagtaaaaccacgcccacgccgcagcctggcagtgatgaaatcaatcgtgcttatgaagaaggatgggtaggaaatcacgcgctggcgtttattggcgacacactttcgccaaagggcgagaaagtgccggagctatttatcgttgagttaccgcaagatgaagctagctggaaatcggcaggtgatgcgccgttaagtggaacggaaacaaccctacccgcgccaccgcgtggcgtcgtgcagcgacgtttaacctttacccatcatcgggcttatccggggttagtcaacgtcccgcgccactgggtgcgctgtaatccgcagggtacgcaaatcgcgtttttaatgcgtgatgataacggcattgtgcaactgtggcttatctcgtcacagggcggcgaaccgcgcaagttaacccataacaaaacggatattcagtctgcatttaactggcatccgtcaggagaatggttgggctttgtgctggataatcgaattgtttgtgcccatgcgcaaagcggcgaggttgagtatttaaccgaaaaccacgccaatccaccttctgcggacgccgtggtcttctcgccggatggtcaatggctggcgtggatggaaggtggccagctgtggatcaccgaaactgatcgctaa

SEQ ID NO: 471391 - DNA, 1101 bp, Shigella flexneri
atggaacatttcgacgtggcgattattggcctcggcccggcagggtcggcgttggcacgaaagttagccggcaaaatgcaggtgatcgcgctggataaaaagcaccagtgcggtactgaaggtttcagcaaaccttgcggcggtctgctggcaccggacgcgcagcgatcttttattcgcgatggactgacgcttcctgtcgatgtgatcgccaatccacagattttcagcgtcaaaactgtcgacgtcgccgcatcgctcacgcgtaactaccagcgaagctatatcaatattaatcgccatgctttcgacttgtggatgaaatcgctgatccccgccagcgttgaggtttatcacgatagcctgtgccgaaaaatctggcgtgaggatgataaatggcatgtcatttttcgtgcagacggctgggagcaacatattaccgcccgctatctggtcggtgccgatggcgcaaactcgatggtgcggcgacatctctacccggatcatcaaatccgtaaatatgtcgctatccagcagtggttcgcagagaaacatccggtgccgttctactcctgcatctttgataatgcgataactgactgttactcatggagtatcagcaaagatggttattttatctttggcggtgcctatccaatgaaagacggtcagacgcgtttcacgacgctgaaagagaaaatgagcgcctttcagttccagtttggcaaagcggtgaaaagtgagaaatgcacggtgttgtttccctcacgctggcaggattttgtctgtggtaaggacaacgcctttctgattggtgaagcggcgggatttatcagcgccagctcgctggaggggattagctatgcgctggatagcgcagagattctgcgtgcggtgttcctgaaacagccggagaagagcaacgccgcttactggcgcgccacacacaaactgcgtttaaaactcttcggcaagatagtaaaaagccgatgcctgaccgcaccggctttaagaaagtggattatgcgcagtggtgtggcgcatattccacagttgaaagattatccaacgcgcttcacatcacccaccagcaggatgtaa

SEQ ID NO: 471392 - DNA, 1293 bp, Shigella flexneri
atggatattcccgttaatgcagcaaagccggggcgtcggcgttatctgacgctggtgatgatctttattacggtggtcatttgttatgttgaccgcgctaacctggccgtggcttccgcccatattcaggaagagttcggcattacgaaagcggaaatgggctatgtattttcggccttcgcctggctttatacgctatgccagatccccggcggttggtttttagatcgcgtaggttctcgcgtgacttattttattgcgatatttggttggtcagtggtgactttattccaaggctttgccacgggattaatgtcattaattggtctgcgtgcgataaccggtattttcgaagcgcccgctttcccgaccaataaccggatggtgaccagctggttcccggaacatgaacgcgcttccgccgttggtttttatacgtctggtcagtttgtcggtctggcgtttttgactccgctgctgatctggattcaggagatgttgagctggcactgggtgttcattgtcactggtggtatcggcattatctggtcgctgatttggtttaaggtttatcagccgccgcgcctgaccaaaggtatcagcaaagctgaactggattacattcgtgatggcggcggtctggtggatggtgatgcgccggtgaagaaagaggcgcgtcagccgttaacagccaaagactggaaactggtgttccatcgtaaactgatcggcgtttatcttgggcaatttgcggtggcttctgcactgtggtttttcttaacctggttcccgaactatttaacccaggaaaaaggaatcacggcgctgaaagcaggctttatgaccacggtgccattcctcgcggcgtttgtcggcgtcctgctctctggctgggtcgcggatctgctggtacgtaagggcttttcactgggctttgcgcgtaaaacgccgattatctgcggcttgctgatctccacctgcattatgggcgctaactacaccaacgatccgatgatgattatgtgcctgatggcgctggcattcttcggcaacggttttgcttcgattacctggtcgctggtctcttctctggcaccgatgcgcctgattggtttaaccggcggcgtgtttaacttcgccggtggtctgggcggcatcaccgttccgctggtggtggggtacctggcgcagggttacggtttcgcgcctgcactggtttatatctccgccgtcgcgttgattggcgcgctctcttacatcctgctggtgggtgatgtgaagcgcgttggataa

SEQ ID NO: 471393 - DNA, 213 bp, Shigella flexneri
atgggcattcattacaacaaaggcgcggagttactcgactttgtgaaaaacaaagaagacttcagcatggttggcggcttctttaaaccgttaacgaaaccgggcttaggtgtggaaatcgacgaagctaaagttattgagttcagtaaaaatgccccggactggcgtaatccgctctggcgtcatgaagataacagcgtagcagagtggtaa

SEQ ID NO: 471394 - DNA, 930 bp, Shigella flexneri
atgaaaatcaccaaaattaccacgtatcgtttacctccccgctggatgttcctgaaaattgaaaccgatgaaggcgtggtcggttggggcgagcccgtgattgaaggccgcgcccgtacggtggaagcggcagttcacgagctgggtgactatttgattggtcaggatccttcgcgcatcaacgacttatggcaagtgatgtatcgcgccggattttatcgtggcggtccaatcctgatgagcgccatcgccgggatcgaccaggcgttatgggatatcaaaggcaaagtgctgaatgcgccagtctggcaactgatgggcggcctggttcgcgacaaaattaaagcctacagttgggtcggcggcgatcgtccggcggatgttatcgacggcattaaaaccctgcgcgaaatcggcttcgataccttcaaactgaacggttgtgaagaactggggctaattgataactcccgcgcggtagatgcggcagtcaacaccgtggcacaaattcgtgaagcttttggcaatcagattgagtttggtcttgatttccacggtcgcgtcagcgcgccaatggcgaaagtgctgattaaagaactggagccgtatcgcccgctgtttattgaagagccggtgctggcggaacaagccgaatactacccgaaattggcggcacaaacgcatattccactggcggcgggtgagcgcatgttctcacgtttcgattttaaacgcgtgctggaggcaggcggtatttcgattctgcaaccggatctctcccatgcaggcggtattaccgaatgctacaaaattgctggaatggcagaagcctatgatgtgacccttgcgccgcactgtccgttcggaccgattgcactggcggcttgcctgcatatcgactttgtttcctataacgcggtacttcagtaa

SEQ ID NO: 471395 - DNA, 618 bp, Shigella flexneri
atgcagtggcaaactaaactcccgctgatcgccattttgcgcggcattacgcccgacgaggcgctggcgcatgttggcgcggtgattgacgccgggttcgacgcggttgaaatcccgctgaattccccacaatgggagcagagcattcccgccatcgttgatgcgtatggcgacaaggcgttgattggcgcaggtacggtactgaaacctgaacaggtcgatgcgctcgccaggatgggctgtcagctcatcgttacgcccaatatccatagtgaagtgatccgccgcgcggtgggctacggcatgaccgtttgccccggctgcgcgacggcgaccgaagcctttaccgcgctcgaagcgggcgcgcaggcgctgaaaatatttccgtcatcggcttttggtccgcaatacatcaaagcgttaaaagcggtattaccaccggacatcgcagtctttgccgttggcggcgtgacgccagaaaacctggcgcagtggatagacgcaggttgtgttggggcgggcttaggcagcgatctttatcgcgccgggcagtccgtagaacgcaccgcgcagcaggcagcagcatttgttaaggcgtatcgagaggcagtgcaatga

SEQ ID NO: 471396 - DNA, 879 bp, Shigella flexneri
atgacagctcgctacatcgcaattgactggggatcgaccaatctgcgcgcctggctttatcagggcgaccactgcctggagagcaggcaatcagaagcaggcgtcacgcgcctgaacggaaaatctccggctgcggtgttagcagaagtcacgaccgactggcgtgaagaaaatacgccagtggtgatggcaggaatggtcggcagcaatgtcggctggaaagttgctccgtatttatctgttcctgcccgtttttcgtctattggcgaacaattaacgtctgttggcgacaatatctggattattcccggattatgcgtctctcatgacgataaccacaatgtgatgcgcggcgaagaaacacaattgatcggcgcgcgagctctggctccttcctctctttatgttatgcccggtacgcattgcaaatgggtgcaggccgatagccagcaaatcaacgattttcgcaccgtgatgaccggtgaattacatcatttactgttaaatcactcattgattggcgcaggtttgccgccgcaggaaaactctgccgatgccttcgcggctggccttgagcgcggccttaatgcgcccgccatattgccgcagctttttgaagttcgcgcctcgcatgtgctgggaacacttccccgcgaacaggtcagcgaatttctctctggtttgttgattggcgcagaggttgccagtatgcgcgactatgtgacccatcaacacgccatcacccttgtcgccggaacatcgctgaccgcgcgctaccagcaagcctttcaggcgatgggttgcgacgtggcggcggtggcgggcgacacggcatttcaggctggtataaggagcatcgctcatgcagtggcaaactaa

SEQ ID NO: 471397 - DNA, 690 bp, Shigella flexneri
atgactctcaataaaaccgatcgcattgtcattacgctgggtaaacagatcgttcacggcaaatacgtatctggctcgccacttccggctgaggcggagctctgtgaagagtttgcaacctcgcgcaacatcatccgtgaggtgttccgttcgctgatggcgaagcggctgattgaaatgaaacgttatcgcggggcgtttgtggcaccgcgtaaccagtggaattacctcgacactgacgtactgcaatgggtgctggaaaacgactacgacccacggcttatcagtgccatgagcgaagtgcgaaatctggtggaaccggcgattgcccgttgggcagcagagcgcgcgacctccagcgatctggcgcagattgaatcggcgctgaacgagatgattgccaacaatcaggaccgcgaagcgtttaacgaagcggatattcgctaccacgaggcggtgctgcagtcggtgcataacccggtgttacagcaacttagcattgcgatcagttcgctgcagcgggcggtttttgaacgaacctggatgggcgatgaggccaacatgccgcaaacgctccaggaacataaggcgctgttcgatgcgatacggcatcaggacggcgatgcggcagagcaggcggcgcttaccatgattgccagctcgacacgaaggttaaaggaaatcacatga

SEQ ID NO: 471398 - DNA, 657 bp, Shigella flexneri
atgaagttgaattttaagggattttttaaggctgccggtttattcccactggcgctgatgctttcaggctgtatctcgtatgctctggtttcccataccgcaaagggttgttcaggaaagtatcaatcgcagtcagacaccatcactgggctatcgcaggcaaaagatagtaatggaacaaaaggctatgtttttgtaggggaatcgctggattaccttatcactgatggtgccgatgacatcgttaagatgctcaatgatccagcacttaaccggcacaatattcaggttgccgatgacgcaagatttgttttaaatgcggggaaaaagaaatttaccggcacaatatcgctttactactactggaataacgaagaagaaaaggcactggcaacgcattatggttttgcctgtggtgttcaacactgtaccaggtcactggaaaacctaaaaggcacaatccatgagaaaaataaaaacatggattactcaaaggtgatggcgttctaccatccatttaaagtgcgattttatgaatactattcacccagaggcattccggatggtgtttccgcagcattactgccagtgactgttacactggacatcattactgcaccgctgcaatttctggttgtatatgcagtaaaccaataa

SEQ ID NO: 471399 - DNA, 813 bp, Shigella flexneri
atggctatcaaactcattgctatcgatatggatggcacccttctgctgcccgatcacaccatttcacccgccgttaaaaatgcgattgccgcagctcgcgcccgtggcgtgaatgtcgtgctaacgacgggtcgtccgtatgcaggtgtgcacaactacctgaaagagctgcatatggaacagccgggcgactactgcattacttataacggcgcgctggtacagaaggccgctgatggtagcaccgtggcgcaaaccgctctcagctatgacgactatcgtttcctggaaaaactctctcgcgaagtcggttctcatttccacgccctggaccgcaccacgctgtacaccgctaaccgcgatatcagctactacacggtgcatgaatccttcgttgccacaattccgctggtgttctgcgaagcggagaaaatggaccccaatacccagttcctgaaagtgatgatgattgatgaacccgccatcctcgaccaggctatcgcgcgtattccgcaggaagtgaaagagaaatataccgtgctgaaaagtgcgccgtacttcctcgaaatcctcgataaacgcgttaacaaaggtacgggtgtgaaatcactggccgacgtgttaggtattaaaccggaagaaatcatggcgattggcgatcaggaaaacgacatcgcaatgattgaatatgcaggcgtcggtgtggcgatggataacgctattccttcggtgaaagaagtggcgaactttgtcacaaaatccaaccttgaagatggcgtggcgtttgctattgagaagtatgtgctgaattaa

SEQ ID NO: 471400 - DNA, 399 bp, Shigella flexneri
atggggctttttgatgaagttgtcggtgcctttctgaaaggcgatgcggggaaatatcaggcgattttaagttgggttgaggagcagggtggcattcaggtgctgctggaaaaactgcaaagtggcggcttaggggccattctctcaacctggttgagtaatcaacagagaaatcaatcagttagcggcgagcaactggagtcggcgctcggcacaaatgcggtgtccgatctcgggcaaaaacttggcgtggataccagtacggcttccagtttactggcagagcaattgccgaagattattgatgcgctctcaccgcaaggtgaagtgtcagcacaagccaataacgatctgctttccgcaggcatggaactgctgaaagggaaactcttccgctaa

SEQ ID NO: 471401 - DNA, 2415 bp, Shigella flexneri
atgtcgaattcttatgactcctccagtatcaaagtcctgaaagggctggatgcggtgcgtaagcgcccgggtatgtatatcggcgacacggatgacggcaccggtctgcaccacatggtattcgaggtggtagataacgctatcgacgaagcgctcgcgggtcactgtaaagaaattatcgtcaccattcacgccgataactctgtctctgtacaggatgacgggcgcggcattccgaccggtattcacccggaagagggcgtatcggcggcggaagtgatcatgaccgttctgcacgcaggcggtaaatttgacgataactcctataaagtgtccggcggtctgcacggcgttggtgtttcggtagtaaacgccctgtcgcaaaaactggagctggttattcagcgcgagggtaaaattcaccgtcagatctacgaacacggtgtaccgcaggctccgctggcggttaccggcgagactgaaaaaaccggcaccatggtgcgtttctggcccagcctcgaaaccttcaccaatgtgaccgagttcgaatatgaaattctggcgaaacgtctgcgtgagttgtcgttcctcaactccggcgtttccattcgtctgcgcgacaagcgtgacggcaaagaagaccacttccactatgaaggcggcatcaaagcgttcgttgaatatctgaacaagaacaaaacgccgatccacccaaatatcttctacttctccaccgaaaaagacggtattggcgttgaagtggcgctgcagtggaacgatggcttccaggaaaacatctactgctttaccaacaacattccgcagcgtgacggcggtactcacctggcaggcttccgtgcggcgatgacccgtaccctgaatgcctacatggacaaagaaggctacagcaaaaaagccaaagtcagcgccaccggtgacgatgcgcgtgaaggcctgattgcggtcgtttccgtaaaagtgccggacccgaaattctcctcccagaccaaagacaaactggtttcttctgaggtgaaatcggcggttgaacagcagatgaacgaactgctggcggaatacctgctggaaaacccaactgatgcgaaaatcgtggttggcaaaattatcgatgctgcccgtgcccgtgaagcggcgcgtcgcgcgcgtgaaatgacccgccgtaaaggtgcgctcgacttagctggcctgccgggcaaactggcagactgccaggaacgcgatccggcgctttccgaactgtacctggtggaaggggactccgcgggcggctctgcgaagcaggggcgtaaccgcaagaaccaggcgattctgccgctgaagggtaaaatccttaacgtcgagaaagcgcgcttcgataagatgctctcttctcaggaagtggcgacgcttatcaccgcgcttggctgtggtatcggtcgtgacgagtacaacccggacaaactgcgttatcacagcatcatcatcatgaccgatgcggacgtcgacggctcgcacattcgtacgctgctgttgaccttcttctatcgtcagatgccggaaatcgttgaacgcggtcacgtctacatcgctcagccgccgctgtacaaagtgaagaaaggcaagcaggaacagtacattaaagacgacgaagcgatggatcagtaccagatctctatcgcgctggacggcgcaacgctgcacaccaacgccagtgcaccggcattggctggcgaagcgttagagaaactggtatctgagtacaacgcgacgcagaaaatgatcaaccgcatggagcgtcgttatccgaaagcaatgctgaaagagcttatctatcagccgacgttgacggaagctgacctttctgatgagcagaccgttacccgctgggtgaacgcgctggtcagcgaactgaacgacaaagaacagcacggcagccagtggaagtttgatgtccacaccaatgccgaacaaaacctgttcgagccgattgttcgcgtgcgtacccacggtgtggatactgactatccgctggatcacgagtttatcaccggtggcgaatatcgtcgtatctgcacgctgggtgagaaactgcgtggcttgctggaagaagatgcgtttatcgaacgtggcgagcgtcgtcagccggtagccagcttcgagcaggcgctggactggctggtgaaagagtcccgtcgtggcctctccatccagcgttataaaggtctgggcgagatgaacccggaacagctgtgggaaaccaccatggacccggaaagccgtcgtatgctgcgcgttaccgttaaggatgcgattgccgctgaccagttgttcaccacgctgatgggcgacgccgtagaaccgcgtcgtgcgtttattgaagagaacgccctgaaagcggcgaatattgatatttaa

SEQ ID NO: 471402 - DNA, 1074 bp, Shigella flexneri
atgtccctcacccgcttgttgatccgcgatttccgcaatattgaaaccgcggatctcgctttatctcccggctttaactttctggtaggtgccaacggcagtggcaaaaccagcgtgctggaagccatctatacgctcggccatggtcgggcgtttcgcagtttgcagattggtcgcgtcattcgccatgagcaggaggcatttgttctccacgggcgattacagggcgaagagcgcgagacggcgattggcttaaccaaagacaaacagggcgacagcaaagtccgtattgacggtacggacgggcataaagtcgcggaactggcgcacctgatgccgatgcagttgataacgccagaagggtttactttactcaacggcggccccaaatacagaagagcattcctcgactggggatgctttcacaacgaacctggatttttcaccgcctggagcaatctcaagcgattgctcaagcagcgcaatgcggcgctgcgccaggtgactcgttacgaacagctacgcccgtgggataaagaactgatcccgctggcggagcaaatcagcacctggcgcgcggagtatagcgccggtatcgcggccgatatggatgatacctgtaagcaatttctccctgagttttctctgactttctctttccagcgcggctgggagaaagagacagagtacgctgaggtgctggaacgtaattttgaacgcgatcgccagctaacctacaccgcgcatggcccgcataaagcggacttacgcattcgcgccgacggtgcgccggtggaagataccttatcgcgtgggcagcttaagctgttgatgtgcgccttacgtctggcgcaaggagagttcctcactcgtgaaagcgggcggcggtgtctctacctgatagatgattttgcctctgagcttgatgatgagcgtcgcgggttgcttgccagccgcttaaaagcgacgcaatcacaggtctttgtcagcgcgatcagtgctgaacacgttatagacatgtcggacgaaaattcgaagatgtttaccgtggaaaagggtaaaataacagattaa

SEQ ID NO: 471403 - DNA, 1101 bp, Shigella flexneri
atgaaatttaccgtagaacgtgagcatttattaaaaccgctacaacaggtgagcggtccgttaggtggtcgtcctacgctaccgattctcggtaatctgctgttacaggttgctgacggtacgttgtcgctgaccggtactgatctcgagatggaaatggtggcacgcgttgcgctggttcagccacacgagccaggagcgacgaccgttccggcgcgcaaattctttgatatctgccgtggtctgcctgaaggcgcggaaattgccgtgcagctggaaggtgaacggatgctggtgcgctccgggcgtagccgtttttcgctgtctaccctgccagcggcggatttcccgaacctcgatgactggcagagcgaagtcgaatttaccctgccgcaggcgacgatgaagcgtctgattgaagcaacccagttttcgatggcgcatcaggatgttcgctattacttaaacggtatgctgtttgaaaccgaaggtgaagaactgcgcaccgtggcaaccgacggccaccgtctggcggtctgttcaatgccaattggtcaatctttgccaagccattcggtgatcgtaccgcgtaaaggcgtgattgaactgatgcgtatgctcgacggcggcgacaatctgctgcgtgtgcagattggcagcaataacattcgtgcccacgttggcgactttattttcacctcgaaactggtggatggtcgcttcccggattaccgtcgcgttctgccgaagaacccggacaaacatctggaagcaggctgcgatctgctcaagcaggcgtttgctcgcgcggcgattctctctaacgagaaattccgcggtgtgcgcctgtatgtcagcgaaaaccagctgaaaattactgccaacaacccggaacaggaagaagcggaagagatcctcgacgttacctatagcggtgcggagatggaaatcggcttcaacgtcagctatgtgctggatgttctgaacgcgctgaaatgcgaaaacgtccgcatgatgctgaccgattcggtttccagcgtgcagattgaagatgccgcatcacagtcggctgcctatgttgtcatgccaatgagactgtaa

SEQ ID NO: 471404 - DNA, 1404 bp, Shigella flexneri
gtgtcactttcgctttggcagcagtgtcttgcccgattgcaggatgagttaccagccacagaattcagtatgtggatacgcccattgcaggcggaactgagcgataacacgctggccctgtacgcgccaaaccgttttgtcctcgattgggtacgggacaagtaccttaataatatcaatggactgctaaccagtttctgcggagcggatgccccacagctgcgttttgaagtcggcaccaaaccggtgacgcaaacgccacaagcggcagtgacgagcaacgtcgcggcccctgcacaggtggcgcaaacgcagccgcaacgtgctgcgccttctacgcgctcaggttgggataacgtcccggccccggcagaaccgacctatcgttctaacgtaaacgtcaaacacacgtttgataacttcgttgaaggtaaatctaaccaactggcgcgcgcggcggcttgccaggtggcggataaccctggcggtgcctataacccgttgttcctttatggcggcacgggtctgggtaaaactcacctgctgcatgcggtgggtaacggcattatggcgcgcaagccgaatgccaaagtggtttatatgcactccgagcgctttgttcaggacatggttaaagccctgcaaaacaacgcgatcgaagagtttaaacgctactaccgttccgtagatgcactgctgatcgacgatattcagttttttgctaataaagaacgatctcaggaagagtttttccacaccttcaacgccctgctggaaggtaatcaacagatcattctcacctcggatcgctatccgaaagagatcaacggcgttgaggatcgtttgaaatcccgcttcggttggggactgactgtggcgatcgaaccgccagagctggaaacccgtgtggcgatcctgatgaaaaaggccgacgaaaatgacattcgtttgccgggtgaagtggcgttctttatcgccaagcgtctacgatctaacgtacgtgagctggaaggggcgctgaaccgcgttattgctaacgccaactttaccggacgggcgatcaccatcgacttcgtgcgtgaggcgctgcgcgacttgctggcattgcaggaaaaactggtcaccatcgacaatattcagaagacggtggcggagtactacaagatcaaagtcgcggatctcctttccaagcgtcgatcccgctcggtggcgcgtccgcgccagatggcgatggcgctagcgaaagagctgactaaccacagtctgccagagattggcgatgcgtttggtgggcgtgaccacacgacggtgcttcatgcctgccgtaagatcgagcagttgcgtgaagagagccacgatatcaaagaagatttttcaaatttaatcagaacattgtcatcgtaa

SEQ ID NO: 471405 - DNA, 141 bp, Shigella flexneri; identical to SEQ ID NO: 1817

SEQ ID NO: 471406 - DNA, 327 bp, Shigella flexneri
ttgttaactcccagtcaattcacattcgtcttccagcagccacaacgggctggcacgccgcaaattaccattctcggccgcctgaattcgctggggcatccccgtatcggtcttacagtcgccaagaaaaacgttcgacgcgcccatgaacgcaatcggattaaacgcctgacgcgtgaaagcttccgtctgcgccaacatgaactcccggctatggatttcgtggtggtggcgaaaaaaggggttgccgacctcgataaccgtgctctctcggaagcgttggaaaaattatggcgccgccactgtcgcctggctcgcgggtcctga

SEQ ID NO: 471407 - DNA, 1647 bp, Shigella flexneri
atggattcgcaacgcaatcttttagtcatcgctttgctgttcgtgtctttcatgatctggcaagcctgggagcaggataaaaacccgcaacctcaggcccaacagaccacgcagacaacgaccaccgcagcgggtagcgccgccgaccagggcgtaccggccagtggccaggggaaactgatctcggttaagaccgacgtgcttgatctgaccatcaacacccgtggtggtgatgttgagcaagctctgctgcctgcttacccgaaagagctgaactctacccagccgttccagctgttggaaacttcaccgcagtttatttatcaggcacagagcggtctgaccggtcgtgatggcccggataacccggctaacggcccgcgtccgctgtataacgttgaaaaagacgcttatgtgctggctgaaggtcaaaacgaactgcaggtgccgatgacgtataccgacgcggcaggcaacacgtttaccaaaacgtttgtcctgaaacgtggtgattacgctgtcaacgtcaactacaacgtgcagaacgctggcgagaaaccgctggaaatctcctcgtttggtcagttgaagcaatccatcactctgccaccgcatctcgataccggaagcagcaacttcgcactgcacaccttccgtggcgcggcgtactccacgcctgacgagaagtatgagaaatacaagttcgataccattgccgataacgaaaacctgaacatctcttcgaaaggtggttgggtggcgatgctgcaacagtatttcgcgacggcgtggatcccgcataacgacggtaccaacaacttctataccgctaatctgggtaacggcatcgtcgctatcggctataaatctcagccggtactggttcagcctggtcagactggcgcgatgaacagcaccctgtgggttggcccggaaatccaggacaaaatggcagctgttgctccgcacctggatctgaccgttgattacggttggttgtggttcatctctcagccgctgttcaaactgctgaaatggatccatagctttgtgggtaactggggcttctccattatcatcatcacctttatcgttcgtggcatcatgtacccgctgaccaaagcgcagtacacctccatggcgaagatgcgtatgctgcagccgaagattcaggcaatgcgtgagcgtctgggcgatgacaaacagcgtatcagtcaggaaatgatggcgctgtacaaagctgagaaggttaacccgctgggcggctgcttcccgctgctgatccagatgccaatcttcctggcgttgtactacatgctgatgggttccgttgaactgcgtcaggcaccgtttgcactgtggatccacgacctgtcggcacaggacccgtactacatcctgccgatcctgatgggcgtaacgatgttcttcattcagaagatgtcgccgaccactgtgaccgacccgatgcagcagaagatcatgacctttatgccggtcatcttcaccgtgttcttcctgtggttcccgtcaggtctggtactgtactatatcgtcagcaacctggtaaccattattcagcagcagctgatttaccgtggtctggaaaaacgtggcctgcatagccgcgagaagaaaaaatcctga

SEQ ID NO: 471408 - DNA, 1365 bp, Shigella flexneri
atgagcgataatgacactatcgtagcccaggccacgcctccgggacgtggcggcgttggcatcctgcgcatctccggcttcaaagcccgtgaagttgccgaaaccgtgctgggtaaactgcctaagccgcgctacgccgattatcttccgtttaaagacgccgacggcagcgtgctcgatcaggggattgcgctatggttccctggcccgaactcgttcaccggcgaagatgtgctggaactgcaaggtcatggcggtccggtgatcctcgacctgctgttaaaacgcattctgaccattcccggcctgcggattgctcgccctggtgagttttccgaacgcgcgtttcttaacgataaacttgacttagcccaggccgaggcgattgccgatcttatcgacgccagttcggaacaggcggcccgttcggcacttaactcgctgcaaggcgcattctccgcacgggttaatcatctggtagaagccctcacccacttgcgcatttacgtcgaagcggcaattgatttccctgatgaagagatcgatttcctctccgacggcaaaattgaagcccagcttaatgacgtgatggccgatctcgatgcagtgcgtgctgaagcacgtcagggtagtttgttgcgcgaagggatgaaagtagtgattgccggacgtcctaatgccggtaaatcgagcctgttaaacgcgctggcgggccgtgaagcggcaatcgtaaccgatatcgccggaaccacgcgtgacgtgctgcgtgagcatatccacattgacggaatgccgctgcatatcatcgacactgccgggctacgtgaggccagtgacgaagtggaacgtattggtatcgagcgcgcgtggcaggaaattgaacaggccgaccgcgtgctgtttatggtcgatggcaccacgacagacgccgttgatccggcagagatctggccggaatttatcgcccgtctgcccgcgaaactgccgatcaccgtggtacgcaataaagccgatatcaccggcgaaacgctgggaatgagtgaagtgaacggtcacgcgttaattcgtctctcggcaaggactggtgaaggcgtggacgtgctgcgtaaccatctcaaacagagcatgggctttgacaccaatatggaaggcggcttcctggcgcgccgtcgccacttacaggcgctggaacaggcagcggagcatttgcagcaaggtaaagcgcaactgttgggagcctgggcaggtgaactgctggcggaagagttgcgcctggcacagcagaacttaagcgaaatcaccggggaatttacttcagacgacctgctggggcggattttctccagcttctgtattggtaagtaa

SEQ ID NO: 471409 - DNA, 1242 bp, Shigella flexneri
ttggagtcattacccgaatttgaactgccagaaattaccgataatgaactgttagtgagtgtaatttctgacagcgtctgtttatcgacctggaaagcggcgttactcggtagtgaacataaacgcgtacccgacgatttagaaaatcatccggtcattaccgggcatgaatgtgccggggttattgtcgaagtgggtaaaaatctcactggcaaatataaaaaaggccagcgttttgtattgcaaccggcgatggggttaccaagcggatattcagcgcgctacagctacgaatattttggcggcaatgccacttatatgattattcccgaaatcgccattaatttgggctgcgtattaccgtatcacggctcttattttgctgcggcgtcgctggcagagcctatgtgctgcattattggtgcttatcatgccaattatcacaccacgcaatatgtttatgagcatcgcatgggcgtcaaacctggcggcaatattgcactgctggcgtgtgcgggtccgatgggcattggcgctatcgattacgccattaacggtggcatacaaccgtcacgggtggtggtggtcgatatcgacgacaaacgcctggcgcaggtgcagaagctgctgccggtggatctggcggccagtaaaggcattgagctggtgtatgtgaataccaaagggatgagcgatcctatccagatgctgcgggcgctgacaggagatgtcgggttcgatgacatttttgtttatgcggcggtgcctgctgtcgttgagatggctgacgaattactggcggaagatggctgtctgaacttctttgccgggctgacggataaaaacttcaaagtgccgtttaatttctacaacgtccattacaacagcacgcacgtagtcggtacatccggcggttcaacggacgacatgaaagaggcgattgcccttagcgccacaggacagttacagccgtcgtttatggtgacccatattggtggcctggatgcggtgccagaaaccgtgctcaatctgccggatatccctggcggtaaaaaactcatttataacggcgtgaccatgccgctcactgccattgccgattttgccgaaaaaggcaaaaccgatccgctgtttaaagagttggcgcggctggttgaggaaacgcacggcatctggaatgaacaggccgagaaatatctgctggcacaatttggcgttgatatcggggaggccgcgcaatga

SEQ ID NO: 471410 - DNA, 966 bp, Shigella flexneri
atgatgtccctggcgtggccattatttcgcgttacggaacaggcagcgttggctgcctggccgcaaaccggatgtggcgacaaaaataaaattgatggcctggcggtcaccgcgatgcgccaggcattaaacgacgtcgcttttcgtggacgagtggttatcggcgaaggagaaattgaccatgcgccgatgctgtggattggcgaagaggtgggcaaaggcgatgggccagaagtcgatatcgcggttgatcccattgaaggcacgcggatggtggcgatggggcagagcaatgcgctggcggtcatggctttcgctcctcgagatagcctgttacatgcgcccgatatgtatatgaaaaagctggttgttaatcgactggctgccggggcgattgatctgtctttgcctctggcggacaacttgcgtaacgtggcgcgggcgttaggtaaaccgctggacaagctgcgcatggttacgctggataaaccgcgtctgagtgccgcgattgaagaagcaacacagctgggcgtgaaggtttttgccctgccggatggcgatgtcgccgccagcgtgctgacctgctggcaggataatccttacgatgtgatgtacaccatcggcggtgcgccagaaggcgtgatttctgcctgtgccgttaaagcgttaggcggggatatgcaggccgagctgattgacttttgtcaggctaaaggggattacacggaaaatcggcagattgcagagcaggagcgcaagcgttgtaaggcaatgggcgttgacgttaaccgtgtgtactcgctcgatgaactggtgagggggaacgatatcctctttagcgctacgggcgtgacgggcggcgagttggtgaacggtatccaacagacggcgaatggggtgcggacgcagacattactgatcggcggcgcggaccaaacgtgtaatataatagactccctgcattga

SEQ ID NO: 471411 - DNA, 510 bp, Shigella flexneri
atggcgacgctgacagaagatgatgtgcttgagcaactggatgcacaggacaatttattttcatttatgaaaactgcgcattctattttgctccaggggatacgccagtttctgccgtcgctgtttgtcgataacgatgaagagatcgtcgaatatgcagtgaagccgttactcgcccaaagcggcccgcttgacgatattgatgttgcgctgcgtttgatttatgcgctggggaaaatggataaatggctgtatgccgatatcacgcacttttcccagtactggcattacctgaacgaacaggatgaaacgcccggatttgccgatgatataacctgggattttatcagcaatgtcaacagtataactcgcaatgcgacgctctacgatgcgttaaaagcgatgaagttcgccgatttcgccgtctggtcagaggcgcgttttagcggaatggtcaaaacggcgctgacgctggcagtaacgaccaccttaaaggaattaacgccgtga

SEQ ID NO: 471412 - DNA, 714 bp, Shigella flexneri
gtgaaaattgaattaacggtgaatgggctgaacgtgcaagcgcagtaccatgatgaagagatagaacgcgtgcataaactgttgctgcgtatgctggcggccttacagacggtaaatccgcagcggcgtacggtggtttttctttgcgctccgccggggacgggtaaatctaccctaaccaccttctgggaatatctcgcgcaacaagacccggagctgcccgctattcaggcgctcccgatggatggttttcaccattacaatagctggctggacgcgcatcaattgcgccccttcaaaggcgcaccagagacatttgacgttgcgaaactggcggaaaatctgcgccaggtggtggaaggggattgtacgtggccgcagtacgatcgacaaaagcatgatcctgttgaagatgcgttgcacgttaccgcaccactcgtcatcgtcgaaggaaactggttgttgctggacgacgagaagtggtgccagcttgcgcaattttgtgatttctcgatctttatcaacgcgccagctgctgcgttgcgggagcgtctggtggggcgcaagctggcgggaggggtatcgctggcagatgcagaagccttttatgaccgtaccgacgggccgaatgttcgccgggtgctggaagagagtctgcctgcaaatttgaccttaatgatgaccgctacgggtgaatatcgtctggtggattaa

SEQ ID NO: 471413 - DNA, 678 bp, Shigella flexneri
atgttaacgttaaataagatatcttatcgctggcctggcgcggcaacggattgtctttgcgacatttctctgcaactcaaacaaggtgaatggttggcgctgaccggtgacaatggcgcagggaaatcgacgctgttacgagtaatggcaggtcttcttacgcccacagccggtacggttatgctgcaacaacaggcgatgaaaaacctgaaaaaccgccagcgcgcggcaaaggttggcgtactgtttcaggaagcggaaaaccaactttttcacagcaccgtcgctgacgagatcgcatttggtttgaaactgcaaaaatgcccggcggatgaaatcactcaacgtacccatgctgccctgcaatgttgtcagttagcagacactgccaactcgcacccgttggatctgcatagtgcgcagcgacggatggtcgccgtcgcctgcctggaagcactctctccgccactattactgctggacgagccgagtcgggattttgacgaaaattggttgagcgtgtttgaaagctggctggagaagtgccgccagcgaggcacgagcgtggtagcaatcagtcatgacgccgcatttacccggcgtcatttctctcgtgtggtgcggctggaagatggtgtaatcaggaacgttaatccaccagacgatattcacccgtag

SEQ ID NO: 471414 - DNA, 678 bp, Shigella flexneri
atggttacgttagaacagttccgttattgcccgacacactcaacgcatcctccgttctgttatgactttcactatgtcaaaccggggatggtcgccatctttggtgacaacggcagtggcaaaagtacgctggcacagctgatggcgggctggtatccggactttctgccaagagagataacaggcacggggacgctcctcggtacgcccattgggcatctcccgcttaatgaacaatccgccaccatccagctcgtccagcaatcgccctatttgcagctctccggctgtacctttagcgtggaagaagaagttgcctttgggccagaaaatctgtgtcttgctgaagcagagattatggcgcggattgatgccgccctgactctgaccgagtgccagccgttgcgccatcgtcacccggcaacactctccggtggagagacacagcgcgtgatcatcgcctgcgccatcgcgatgcagccaaagctcttaattcttgatgaagcctttagccgcctgacgccgcaggccagcgaaatgctgttgcagcgcttacaacactgggcgtttgaacgtggttcgctgattattctttttgaacgtcatcgcacacctttcctgaactactgccagcaagcgtggcaattgcaaaacggagcgctccagccactatgttaa

SEQ ID NO: 471415 - DNA, 399 bp, Shigella flexneri
atgcagtacgtccccgtgcaatgttttattcgcgctctgtttgcttctcgcctgccgccaggcgtcgcttatctgtttgccgggccgttattggtcgttgagcagttaaaacggcaattagcgattattcatgaagcgcagcgtgcccgcggcgtgccgctggatgagggctggtatcagcgtttacgtgctatgcccgcgttaattattccgctaacacacaatgcgcttaacgatctggctgtccgtggtgcggcgctggatatgcgggcatttcggatccacaaccgacgaacaacgttgtgggcaccagccgatagcaccctacaacgcgtagcgcgttacaccatgatcttgctgatgctgacagaattcggagcgtggatatggttacgttag

SEQ ID NO: 471416 - DNA, 309 bp, Shigella flexneri
atgcatccatttacctcattaacactgtgggcattggcggcctgcaccacgcttatcctgcccgcgcagaccattttgccgatctatagcgcggcgacctttttctgccttattgcgctaaaggccacgcggcggcgggcaaaatatgtcgtctggctgatgttctcgctgggagccgggctgtggctggtacacggtggctggctaccagaatggctaagcggcacgccacgctcgccagaacggtggtcgcatgctattacgctctggttgctgattctggcgattgtttcaacctcacagttgtga

SEQ ID NO: 471417 - DNA, 579 bp, Shigella flexneri
atggcgcgtagccacttttccagtcaggcactggtgttgatcgttatatctatcgccatcaatatgatcggcgggcaactggccagcatggtcaaattacctatatttctcgactccatcggcacacttattagcgcggtactgcttggtccggtgatcggaatgctgaccggcttactgaccaatttactctggggattgctgaccgacccgatcgccgccgcatttgcacccgtcgcgatggtcatcggcctggtctccggttggctggcgcgagcgggttggtttcgcaccctgccaaaagtcgttgtcagcggcgtgattattacgcttgcggtaacggtcgtcgctgtaccgctgcgtactgcgctgttcggcggtgtcaccggtagcggagccgatttgttcgttgcctggatgcactcgatggggcaaaacctggtggagtcggtggcgattacggtgataggcgcgaacctggtcgataaaattcttacagcggtgattgtctggcttttactgcgccagctgccgattcgcaccacgcgccattttccggcaatggctgccgtgcgctaa

SEQ ID NO: 471418 - DNA, 1020 bp, Shigella flexneri
atgaccgtacgcgtagcgataaatggcttcggtcgcatcgggcgtaatgtggttcgtgctttgtatgaatccggacgccgggcggaaattaccgtggtggcaatcaacgaactggcggatgctgcgggcatggcgcatttgttgaaatatgacaccagccatggccgttttgcatgggaagtacgacaggaacgcgatcaactttttgttggtgatgacgccatccgcgtattgcatgaacgttcactgcaatcgctcccctggcgtgaacttggcgttgatgtagtcctcgactgcaccggcgtatatggctcccgcgagcatggcgaagcgcatattgccgccggggccaaaaaagtgctcttttcacatcctggcagtaacgatctcgacgcgaccgttgtttacggcgtcaatcaggatcaacttcgtgcggaacaccgcatcgtttctaacgcttcctgtaccacgaattgcataattcccgtcatcaaattgttagatgatgcgtacggtattgagtccggcactgtgaccacaattcactccgccatgcacgatcaacaggttattgatgcataccatcctgacctgcgtcgcacccgggcagccagccagtcgatcattccggtcgatactaaactggccgctggtatcacacgattttttccgcaatttaacgatcgctttgaagcgattgcggtacgtgtgccaaccataaatgtgacggcaatcgatttaagcgtgacggtgaagaaacctgtaaaagccaatgaagtcaacctgtttctgcaaaaagcagcacaaggtgcatttcatggtatagttgactatacggaattgccgttggtctctgtagattttaaccacgatccgcacagtgccattgtcgatggcacccaaacccgggtcagtggcgcacacctgatcaaaacgttggtctggtgcgataacgaatggggctttgctaaccgaatgctcgacacgacgttagctatggctactgttgctttcaggtaa

SEQ ID NO: 471419 - DNA, 1164 bp, Shigella flexneri
atgtctgtaattaagatgaccgatctggatcttgctgggaaacgtgtatttatccgtgcggatctgaacgtaccagtaaaagacgggaaagtaaccagcgacgcgcgtatccgtgcttctctgccgaccatcgaactggccctgaaacaaggcgcaaaagtgatggtaacttcccacctgggtcgtcctaccgaaggcgagtacaacgaagaattctctctgctgccggttgttaactacctgaaagacaaactgtctaacccggttcgtctggttaaagattacctcgacggcgttgacgttgctgaaggtgaactggttgttctggaaaacgttcgcttcaacaaaggcgagaagaaagacgacgaaaccctgtccaaaaaatacgctgcactgtgtgacgtgttcgtaatggacgcattcggtactgctcaccgcgcgcaggcttctactcacggtatcggtaaattcgctgacgttgcgtgcgcaggcccgctgctggcagctgaactggacgcgctgggtaaagcactgaaagaacctgctcgcccgatggtggctatcgttggtggttctaaagtatctaccaaactgaccgttctggactccctgtctaaaatcgctgaccagctgattgttggtggtggtatcgctaacacctttatcgcggcacaaggccacgatgtgggtaaatccctgtacgaagctgacctggttgacgaagctaaacgtctgctgaccacctgcaacatcccggttccgtctgatgttcgcgtagcaaccgagttctctgaaactgcaccggctaccctgaaatctgttaacgatgtgaaagctgacgagcagatcctggatatcggtgatgcttccgctcaggaactggctgaaatcctgaagaatgcgaaaaccattctgtggaacggtccggttggcgtgttcgaattcccgaacttccgcaaaggtactgaaatcgtggctaacgctatcgcagacagcgaagcgttctccatcgctggcggcggcgacactctggcagcaatcgacctgttcggcattgctgacaaaatctcctacatctccactggcggcggcgcattcctcgaattcgtggaaggtaaagtactgcctgcagtagcgatgctcgaagagcgcgctaagaagtaa

SEQ ID NO: 471420 - DNA, 1080 bp, Shigella flexneri
atgtctaagatttttgatttcgtaaaacctggcgtaatcactggtgatgacgtacagaaagttttccaggtagcaaaagaaaacaacttcgcactgccagcagtaaactgcgtcggtactgactccatcaacgccgtactggaaactgctgctaaagttaaagcgccggttatcgttcagttctccaacggtggtgcttcctttatcgctggtaaaggcgtgaaatctgacgttccgcagggtgctgctatcctgggcgcgatctctggtgcgcatcacgttcaccagatggctgaacattatggtgttccggttatcctgcacactgaccactgcgcgaagaaactgctgccgtggatcgacggtctgctggacgcgggtgaaaaacacttcgcagctaccggtaagccgctgttctcttctcacatgatcgacctgtctgaagaatctctgcaagagaacatcgaaatctgctctaaatacctggagcgtatgtccaaaatcggcatgactctggaaatcgaactgggttgcaccggtggtgaagaagacggcgtggacaacagccacatggacgcttctgcactgtacacccagccggaagacgttgattacgcatacaccgagctgagcaaaatcagcccgcgtttcaccatcgctgcgtccttcggtaacgtacacggtgtttacaagccgggtaacgtggttctgactccgaccatcctgcgtgattctcaggaatatgtttctaagaaacacaacctgccgcacaacagcctgaacttcgtattccacggtggttccggttctactgctcaggaaatcaaagactccgtaagctacggcgtagtgaaaatgaacatcgataccgatacccaatgggcaacctgggaaggcgttctgaactactacaaagcgaacgaagcttatctgcagggtcagctgggtaacccgaaaggcgaagatcagccgaacaagaaatactacgatccgcgcgtatggctgcgtgccggtcagacttcgatgatcgctcgtctggaaaaagcattccaggaactgaacgcgatcgacgttctgtaa

SEQ ID NO: 471421 - DNA, 861 bp, Shigella flexneri
atggaagatttgaatgttgtcgatagcataaacggcgcgggaagctggctggtagctaaccaggcgctgctgctaagttatgcagtaaacatcgtggcggcactcgcgatcatcatcgttggtttgattatcgcgcggatgatttccaacgcggtgaatcgcctgatgatctcccgtaaaatcgatgccactgttgctgattttctttctgcattagtccgttacggtattatcgcctttacgctaatcgctgccctgggacgcgtgggtgtacaaacagcgtcagtcattgctgtactcggtgccgcaggcttagctgttggtctggctttgcaggggtcactttctaacctggccgctggcgtgttacttgtcatgttccgcccgttccgtgccggagaatatgttgacctcggcggcgtagccggtactgtgctgagtgtgcagattttctccaccaccatgcgtactgcagacggtaaaattatcgttattccgaacggtaaaattattgccggaaatattattaacttctcccgcgagccagttcgccgtaacgaatttattattggcgtggcgtatgattccgatatcgatcaggttaagcagatcctgaccaatattatccagtctgaagatcgcattttgaaagatcgcgaaatgactgtgcgcctgaacgaacttggtgcatcgtcgattaatttcgtggtccgcgtctggagcaacagcggcgatctgcaaaacgtgtactgggatgtgctggagcgtattaaacgtgaatttgatgccgccggtatcagcttcccgtacccgcaaatggatgtgaactttaagcgggtgaaagaagacaaagctgcgtaa

SEQ ID NO: 471422 - DNA, 636 bp, Shigella flexneri
gtgttttcttattactttcaaggtcttgctcttggggcagctatgattctgccgctcggcccacaaaatgcttttgtgatgaatcagggcattcgtcgtcagtaccacattatgattgccttactttgcgctatcagcgatttggtcctgatttgcgcggggatttttggtggtagcgcgttattgatgcagtcgccgtggttgctagcgctggtcacctggggcggcgtagtcttcttgctctggtatggttttggcgcttttaaaacagcgatgagtagtaatattgagttagctagtgccgaagtcctgaagcaaggcagatggaaaattatcgccaccatgttggcagtgacctggctgaatccgcatgtttacctggatacttttgttgtactgggcagccttggcgggcagcttgacgtcgaaccaaaacgttggtttgcgctcgggacaattagcgcctctttcctgtggttctttggtctggctattctcgcagcctggctggcaccgcgcctgcgcacggcaaaatcacagcgcattatcaatctggtagtgggatgtgtcatgtggtttatagccttgcagctggcgagagacggtattgctcatgcacaagccttgttcagttag

SEQ ID NO: 471423 - DNA, 741 bp, Shigella flexneri
gtgaagttcaaagttatcgccctggcggcattaatgggtattagcgggatggcagcgcaggctaacgaattgccggatggaccgcatattgtcacctccggtacggcaagtgtggatgcggtgccagacattgccactcttgcgattgaagttaacgtggccgcgaaggatgccgctacagccaagaaacaggcagatgagcgcgtcgcacaatacatttccttccttgaactcaatcagatcgcgaaaaaagatatcagctcagcgaatttacgcacccagccagattatgactatcaggatggtaaaagtatcctgaaaggctaccgagctgtgagaacggtggaagtcacgctccgtcagttagacaaactgaattccttgctggatggcgcgctgaaggcgggtcttaacgaaattcgttctgtgtcgctgggcgtggcgcagccggatgcctataaagacaaagcgcgtaaggcagcgattgataacgcgattcatcaggcgcaggaactggcgaacggctttcatcgtaaactggggccggtatatagcgtgcgctaccatgtttccaactatcagcccagcccaatggtgcggatgatgaaagccgatgccgcgccggtgtctgcccaggaaacttacgagcaggccgctattcagtttgatgatcaggtcgatgtggtcttccagttagaacctgtggatcaacaacccgctaaaacacctgcagcacaataa

SEQ ID NO: 471424 - DNA, 951 bp, Shigella flexneri
atggacatttttatttcgaaaaagatgcgcaatttcattttattagcgcaaaccaataatattgcccgggcggcagaaaaaatccatatgacggcttcgccatttggtaaaagcattgccgcgctggaagaacaaattggctatacgctatttacccgcaaagataataatatcagcctcaataaagccggtcaggaactgtatcaaaaactgttcccggtttatcaacgactttctgcgattgataatgaaatccataactcagggcgtcgttcacgagaaattgtgattggcatagataatacttatccgacaattattttcgatcagttgattagtctcggagataagtatgaaggcgtgaccgcccagccagttgagttcagcgaaaacggcgttatcgataatctttttgaccgtcagttagattttattatctccccacagcatgtatctgcacgagttcaggaactggaaaacctgactatcagtgaattaccaccgctgcgattgggctttctcgtttctcgccgttatgaagagcgtcaagagcaagagctgcttcaggagctgccctggctacaaatgcgctttcaaaaccgggctaacttcgaagcaatgattgatgcgaatatgcgaccttgtgggatcaatcccaccattatttatcgtccctacagttttatggccaaaatcagcgccgtggagcgcggacattttctgacggtgatcccgcattttgcctggcgactggtgaatccggcaacgctgaaatattttgatgcgccgcacaggccgatgtatatgcaggaatatctttattcaatcagaaatcatcgttataccgccacgatcttcagcatattgctgaagatcgtgacgggacaaaccattaacccagcatcgagccggttgcaattaaattacggtgtaagtcgaagacgtggctaa

SEQ ID NO: 471425 - DNA, 1479 bp, Shigella flexneri
atggaaactcagtggacaaggatgaccgccgatgaagcggcagaaattatccagcataacgacatggtggcatttagcggctttaccccagcgggttcgccgaaagccctacccgccgcgattgcccgcagagctaacgaacagcatgaggccaaaaagccgtatcaaattcgcctgctgacgggggcgtcaatcagcgccgccgctgacgatgtactttctgacgccgatgctgtttcctggcgtgcgccatatcaaacatcgtccagtttacgtaaaaagatcaatcagggcgcggtgagtttcgttgacctgcatttgagcgaagtggcgcaaatggtcaattacggtttcttcggcgacattgatgttgccgtcattgaagcatcggcactggcaccggatggtcgagtctggttaaccagcgggatcggtaatgcgccgacctggctgctgcgagcgaagaaagtgatcattgaacttaatcactatcacgatccgcgcgttgcagaactggcagatattgtgattcctggcgcgccaccgcggcgcaatagcgtgtcgatcttccatgcaatggatcgcgtcggtacccgctatgtgcaaatcgatccgaaaaagattgtcgccgtcgtggaaaccaacttgcccgacgccggtaatatgctggataagcaaaatcccatgtgccagcagattgccgataacgtggtcacgttcttattgcaggaaatggcgcatgggcgtattccgccggaatttctgccgctgcaaagtggcgtgggcaatatcaataatgcggtaatggcacgtctgggggaaaacccggaaattcctccgttcatgatgtattcggaagtgctacaggaatcggtggtgcatttactggaaaccggcaaaatcagcggggccagcgcctccagcctgacaatctcggccgattccctgcgcaagatttacgacaatatggattactttgccagccgcattgtgttgcgtccgcaggagatttccaataacccggaaatcatccgtcgtctgggcgtcatcgctctgaacgtcggcctggagtttgatatttacgggcatgcaaattcaacgcacgtagccggggtcgatctgatgaacggcatcggcggcagcggtgattttgaacgcaacgcgtatctgtcgatctttatggctccgtcgattgctaaagaaggcaagatctcaaccgtcgtgccaatgtgcagccatgttgatcacagcgaacacagcgtcaaagtgatcatcaccgaacaagggatcgccgatctgcgcggtctttccccgcttcaacgcgcccgcactatcattgataattgtgcacatcctatgtatcgggattatctgcatcgctatctggaaaatgcgcccggcggacatattcaccacgatcttagccacgtcttcgacttacaccgtaatttaattgcaaccggctcgatgctgggttaa

SEQ ID NO: 471426 - DNA, 786 bp, Shigella flexneri
atgtcttatcagtatgtgaacggtgccactatcaacaaagtggcggtcattgagtttaactatggacgaaaacttaatgccttaagtaaagtctttattgatgatcttatgcaggcgttaagcgatctcaaccggccggaaattcgctgtatcattttgcgggcgccaagtggatccaaagtcttctccgcaggtcacgatattcacgaactgccgtctggcggtcgcgatccgctctcctatgatgatccattgcgtcaaatcacccgcatgatccaaaaattcccgaaaccgatcatttcgatggtggaaggtagtgtttggggtggcgcatttgaaatgatcatgagttccgatctgatcatcgccgccagtacctcaaccttctcaatgacgcctgtaaacctcggcgtcccgtataacctggtcggcattcacaacctgacccgcgacgcgggcttccacattgtcaaagagctgatttttaccgcttcgccaatcaccgcccagcgcgcgctggctgtcggcatcctcaaccatgttgtggaagtggaagaactggaagatttcaccttacaaatggcgcaccacatctctgagaaagcgccgttagccattgccgttatcaaagaagagctgcgtgtactgggcgaagcacacaccatgaactccgatgaatttgaacgtattcaggggatgcgccgcgcggtttatgacagcgaagattaccaggaagggatgaacgctttcctcgaaaaacgtaaacctaatttcgttggtcattaa

SEQ ID NO: 471427 - DNA, 996 bp, Shigella flexneri
atgattaatgaagccacgctggcagaaagtattcgccgcttacgtcagggtgagcgtgccacgctcgcccaagccatgacgctggtggaaagccgtcacccacgtcatcaggcgctaagtacacagctgcttgacgctattatgccgttctgtggtaacgccctgcgactgggcgttaccggcacacccggcgcggggaaaagtacctttcttgaagcctttggcatgttgttgattcgtgagggattaaaggttgctgttattgcggtcgatcccagcagcccggtcactggcggtagcattctcggggataaaacccgcatgaatgacctggcgcgtgccgaggcggcgtttattcgcccggtaccctcctccggtcatctgggcggtgccagtcagcgagcacgggaattaatgctgttatgcgaagcggcgggttatgacgtagtgattgtcgaaacggttggcgtcgcgcagtcggaaacggaagtcgcccgcatggtggactgttttatctcgttgcaaattgccggtggcggcgatgatctgcagggcattaaaaaagggctgatggaagtggctgatctgctcgttatcaacaaagacgatggcgataaccataccaatgtcgccattgcccggcatatgtacgagagtgccctgcatattctgcgacgtaaatacgacgaatggcagccacggggtctgacttgtagcgcactggaaaaacgtggaatcgatgagatctggcacgccatcatcgacttcaaaaccgcgctaactgccagtggtcgtttacaacaagtgcggcaacaacaatcggtggaatggctgcgtaagcagaccgaagaagaagtactgaatcacctgttcgcgaatgaagatttcgatcgctattaccgccagacgcttttagcggtcaaaaacaatacgctctcaccgcgcaccggcctgcggcagctcagtgaatttatccagacgcaatattttgattaa

SEQ ID NO: 471428 - DNA, 2145 bp, Shigella flexneri
atgtctaacgagcaggagtggcaacagcttgccaacaaggaattgagccgtcgggagaaaactgtcgactcgctggttcagcaaaccgcggaagggatcgccatcaagccgctgtataccgaagccgatctcgataatctggaggtgacaggtacccttcctggtttgccgccctacgttcgtggcccgcgtgccactatgtataccgcccaaccgtggaccatccgtcagtatgctggtttttcaacagcaaaagagtccaacgctttttatcgccgtaacctggccgccgggcaaaaaggtctttccgttgcgtttgaccttgccacccaccgtggctacgactccgataacccacgcgtggcgggtgacgtcggcaaagcgggcgtcgctatcgacaccgtggaagatatgaaagtcctgttcgaccagatcccgctggataaaatgtcggtttcgatgaccatgaatggcgcagtgctaccagtactggcgttttatatcgtcgccgcagaagagcaaggtgttacacctgataaactgaccggcaccattcaaaacgatattctcaaagagtacctctgccgcaacacctatatttacccaccaaaaccgtcaatgcgcattatcgccgacatcatcgcctggtgttccggcaacatgccgcgatttaataccatcagtatcagcggttaccacatgggggaagcgggtgccaactgcgtgcagcaggtagcatttacgctcgccgatgggattgagtacatcaaagcagcaatctctgccggactgaaaattgatgacttcgctcctcgcctgtcgttattcttcggtatcggcatggatctgtttatgaacgtcgccatgttgcgtgcggcacgttatttatggagcgaagcggtcagtggatttggcgcacaggatccgaaatcactggcgctgcgtacccactgccagacctcaggctggagcctgactgaacaggatccgtataacaacgttatccgcaccaccattgaagcactggctgcgacgctgggcggtactcagtcactgcataccaacgcctttgacgaagcgcttggtttgcctaccgatttctcagcacgcattgcccgcaacacccagatcatcatccaggaagaatcagaactctgccacaccgtcgatccactggccggatcctattacattgagtcgctgaccgatcaaatcgtcaaacaagccagagctattatccaacagatcgacgaagccggtggcatggcgaaagcgatcgaagcaggtctgccaaaacgaatgatcgaagaggcctcagcgcgcgaacagtcgctgatcgaccagggcaagcgtgtcatcgttggtgtcaacaagtacaaactggatcacgaagacgaaaccgatgtacttgagatcgacaacgtgatggtgcgtaacgagcaaattgcttcgctggaacgcattcgcgccacccgtgatgatgccgccgtaaccgccgcgttgaacgccctgactcacgccgcacagcataacgaaaacctgctggctgccgctgttaatgccgctcgcgttcgcgccaccctgggtgaaatttccgatgcgctggaagtcgctttcgaccgttatctggtgccaagccagtgtgttaccggcgtgattgcgcaaagctatcatcagtctgagaaatcggcctccgagttcgatgccattgttgcgcaaacggagcagttccttgccgacaatggtcgtcgcccgcgcattctgatcgctaagatgggccaggatggacacgatcgcggcgcgaaagtgatcgccagcgcctattccgatctcggtttcgacgtagatttaagcccgatgttctctacacctgaagagatcgcccgcctggccgtagaaaacgacgttcacgtagtgggcgcatcctcactggctgccggtcataaaacgctgatcccggaactggtcgaagcgctgaaaaaatggggacgcgaagatatctgcgtggtcgcgggtggcgtcattccgccgcaggattacgccttcctgcaagagcgcggcgtggcggcgatttatggtccaggtacacctatgctcgacagtgtgcgcgacgtactgaatctgataagccagcatcatgattaa

SEQ ID NO: 471429 - DNA, 894 bp, Shigella flexneri
atgaaacgcccggactacagaacattacaggcactggatgcggtgatacgtgaacgaggatttgagcgcgcggcacaaaagctgtgcattacacaatcagccgtctcacagcgcattaagcaactggaaaatatgttcgggcagccgctgttggtgcgtaccgtaccgccgcgcccgacggaacaagggcaaaaactgctggcactgctgcgccaggtggagttgctggaagaagagtggctgggcgatgaacaaaccggttcgactccgctgctgctttcactggcggtcaacgccgacagtctggcgacgtggttgcttccggcactggctcctgtgttggctgattcgcctatccgcctcaacttgcaggtagaagatgaaacccgtactcaggaacgtctgcgccgcggcgaagtggtcggcgcggtgagtattcaacatcaggcgctgccgagttgtcttgtcgataaactcggtgcgctcgactatctgttcgtcagctcaaaaccgtttgccgaaaaatattttcctaacggcgtaacgcgttcggcattattgaaagcgccagtggtcgcgtttgaccatcttgacgatatgcaccaggcctttttgcagcaaaacttcgatcttcctcctggcagcgtaccctgccatatcgttaattcttcagaagcgttcgtacaacttgctcgccagggcaccacctgctgtatgatcccgcacctgcaaatcgagaaagagctggccagcggtgaactgattgacttaacgcctgggctatttcaacgacggatgctctactggcaccgctttgctcctgaaagccgcatgatgcgtaaagtcactgatgcgttactcgattatggtcacaaagtccttcgtcaggattaa

SEQ ID NO: 471430 - DNA, 660 bp, Shigella flexneri
atgacgcaggatgaattgaaaaaagcagtaggatgggcggcacttcagtatgttcagcccggtaccattgttggtgtaggtacaggttccaccgccgcacactttattgacgcgctcggcacgatgaaaggccagattgaaggggccgtttccagttcagatgcttccactgaaaaactgaaaagcctcggcattcacgtttttgatctcaacgaagtcgacagccttggcatctacgttgatggcgcagatgaaatcaacggccacatgcaaatgatcaaaggcggcggcgcggctctgacccgtgaaaaaatcattgcttcggttgcggaaaaatttatctgtattgccgacgcctccaagcaggttgatattctgggtaaattcccgctgccagtagaagttatcccgatggcacgtagtgcagtggcgcgccagctggtgaaactgggcggtcgtccggaataccgtcagggcgtggtgaccgataatggcaacgtgatcctcgacgtccacggcatggaaatccttgacccgatagcgatggaaaacgccataaatgcgattcctggcgtggtgactgttggcttgtttgctaaccgtggcgcggacgttgcgctgattggcacacctgacggtgtcaaaaccattgtgaaatga

SEQ ID NO: 471431 - DNA, 1233 bp, Shigella flexneri
atggcaaaggtatcgctggagaaagacaagattaagtttctgctggtagaaggcgtgcaccaaaaggcgctggaaagccttcgtgcagctggttacaccaacatcgaatttcacaaaggcgcgctggatgatgaacaattaaaagaatccatccgcgatgcccacttcatcggcctgcgatcccgtacccatctgactgaagacgtgatcaacgccgcagaaaaactggtcgctattggctgtttctgtatcggaacaaaccaggttgatctggatgcggcggcaaagcgcgggatcccggtatttaacgcaccgttctcaaatacgcgctctgttgcggagctggtgattggcgaactgctgctgctattgcgcggcgtgccggaagccaatgctaaagcgcaccgtggcgtgtggaacaaactggcggcgggttcttttgaagcgcgcggcaaaaagctgggtatcatcggctacggtcatattggtacgcaattgggcattctggctgaatcgctgggaatgtatgtttacttttatgatattgaaaacaaactgccgctgggcaacgccactcaggtacagcatctttctgacctgctgaatatgagcgatgtggtgagtctgcatgtaccagagaatccgtccaccaaaaatatgatgggcgcgaaagagatttcgctaatgaagcccggctcgctgctgattaatgcctcgcgcggtactgtggtggatattccggcgctgtgtgatgcgctggcgagcaaacatctggcgggggcggcaatcgacgtattcccgacggaaccggcgaccaatagcgatccatttacctctccactgtgtgaattcgacaacgtccttctgacgccacacattggcggttcgactcaggaagcgcaggagaatatcggcttggaagttgcgggtaaattgatcaagtattctgacaatggctcaacgctctctgcggtgaacttcccggaagtctcgctgccactgcatggtggtcgtcgtctgatgcacatccacgaaaaccgtccgggcgtgctaactgcgctgaacaaaatcttcgccgagcagggcgtcaacatcgccgcgcaatatctacaaacttccgcccagatgggttatgtagttattgatattgaagctgacgaagacgttgccgaaaaagcgctgcaggcaatgaaagctattccgggtaccattcgcgcccgtctgctgtactaa

SEQ ID NO: 471432 - DNA, 603 bp, Shigella flexneri
atgacgcaactaccagagctcccactgacattatcccgacaagaaatccgcaaaatgattcggcaacgtcgtcgtgcgttaacgccggaacaacagctggaaatgggtcaacaagccgctacccggatgatgacttatcccccggtggtgatggcgcatacggtcgctgtattcctctcttttgatggtgaactcgacacccagccgctaatagaacaactctggcgcgccggtaagcgcgtatatcttccagttttgcatccctttagtgccggtaatttgctgttcctgaattaccatccgcaaagcgaactggtgatgaacaggttgaagatccatgagccaaaactggatgtgcgtgacgtgctacccctttcccgattagacgtgctgatcacaccgctggtcgcctttgatgagtacggtcagcgcctgggaatgggcggtggtttttatgatcggaccttacaaaactggcagcactataaaacgcaaccggtgggttatgcgcatgattgtcagttggtggaaaaactccccgttgaagagtgggatatccctcttcctgcggtggttacaccgtcgaaagtctgggagtggtaa

SEQ ID NO: 471433 - DNA, 330 bp, Shigella flexneri
atgtctgcacaacccgtcgatatccaaatttttggccgttcactgcgtgtgaactgcccgcctgaccaaagggatgcgttgaatcaggcagcggacgatctgaaccaacggttgcaagatctgaaagaacgcactagagtcacaaatactgaacagttggtcttcattgccgcattgaatatcagctatgagttagcgcaagaaaaagcaaagactcgtgactacgcggcaagtatggaacagcgtattcggatgctgcagcagaccatagaacaagcgttacttgaacaaggtcgcatcaccgaaaaaactaaccaaaactttgaatga

SEQ ID NO: 471434 - DNA, 579 bp, Shigella flexneri
atgtctatacagaacgaaatgcctggttacaacgaaatgaaccagtatctgaaccaacaagggacgggtctgacccctgccgagatgcatggtttaatcagtgggatgatatgtggcggtaacgatgacagctcatggctgccgctacttcacgacctgacgaacgaaggcatggctttcggtcatgagctggcacaggcactgcgtaaaatgcactctgccaccagcgatgccctgcaggatgacggcttcctttttcagctttatctgcctgatggcgatgatgtcagcgttttcgatcgggctgatgcactggcaggttgggtcaatcacttcctgcttggtcttggcgttacgcaaccgaagctggacaaagtgaccggcgaaaccggtgaagccatcgacgatctgcgtaacatcgcgcagctgggctacgacgaagacgaagatcaggaagagcttgaaatgtcgcttgaagagatcatcgaatacgttcgtgttgccgcgctgttatgccacgacacctttactcatccgcaaccgaccgcgccagaagtacaaaaaccgactctacactaa

SEQ ID NO: 471435 - DNA, 1326 bp, Shigella flexneri
atgagtgagatatcccggcaagagtttcagcgtcgccgtcaggccctggtggagcaaatgcaacccggcagcgccgcgctgatttttgctgcaccagaagtaacacgtagcgccgacagcgaatacccctatcgtcagaacagtgacttctggtacttcaccggctttaacgaaccggaagcggtgctggtgctgattaaaagcgatgacactcataaccacagcgttctgtttaaccgcgttcgcgacctgacggcggagatctggtttggccgtcgcttaggccaggatgccgcgccagagaaactgggcgttgaccgcgcactggcattcagcgaaatcaatcagcaactttatcaactacttaacggcctggatgtggtttaccatgcccagggcgaatatgcatatgctgatgaaatcgtgaacagtgcgctggaaaaactgcgtaaaggttcgcggcaaaatctcaccgcaccggcaacgatgatcgactggcgtcctgttgttcatgaaatgcgcctgttcaaatcgccagaagagattgccgtactccgccgcgcgggagaaatcaccgccatggcacatacacgggcgatggaaaaatgccgtccgggaatgttcgagtaccatctggaaggcgaaattcaccacgaatttaaccgccacggtgcgcgctatccttcctataacaccattgtaggcagcggtgaaaacggctgcattctgcactacaccgaaaacgagagtgaactgcgcgacggtgacctggtgttgattgacgcgggttgtgaatacaaaggttacgcgggcgatattacccgcaccttcccggtcaacggcaaattcacccaggcccagcgtgaaatctacgacattgtgctggagtctctcgaaaccagcctgcgcctgtatcgtccgggaacttccattctggaagtcactggtgaagtggtgcgcatcatggttagcggcctggtaaaactcggcatcctgaaaggtaatgttgatgaactgatcgctcagaacgcccatcgtcctttctttatgcatggccttagccactggttaggactggatgtccatgacgttggcgtttatggtcaggatcgctcgcgcattctggaaccggggatggtactgaccgtagagcctggtctgtatatcgcgccggatgcggatgtgccagaacaatatcgcggtatcggcattcgcattgaagacgacattgtgattaccgaaaccggcaacgaaaacctcaccgccagcgtggtgaaaaagccggaagaaatcgaagcgttgatggctgctgcgagaaagcaatga

SEQ ID NO: 471436 - DNA, 1179 bp, Shigella flexneri
atgagcgtaatcatcgtcggtggcggcatggcgggcgcgacgctggcgctggctatttcccggttaagtcacggggcgctgccggtacatttgattgaagcgactgcgccagagtcacatgctcatccgggctttgatggacgagcgatagcgctggcggcgggtacctgtcagcaactggcgcgcatcggcgtctggcaatctctggctgattgcgcaaccgccatcactaccgtgcatgtcagcgatcgtggtcatgctggattcgtcaccctcgccgcagaagattaccaactggcggcgctggggcaggttgtcgaattgcataatgtcgggcaacggctgtttgcattgctgcgaaaagcacctggcgtaatgctgcattgccccgatcgcgtagctaacgttgcccgtactcagagtcatgttgaagtgacgctggagagcggcgagatgctgacgggccgcgtgctgatagccgctgatggcacccattcagcgttagccaccgcgtgcggcgttgattggcagcaggagccttacgaacaactggcagtgattgccaacgttgctacttctgttgcgcacgaaggccgcgcttttgaacgcttcacgcaacatggcccgctggcgatgttgccgatgtctgacggacgctgttcgctggtctggtgtcatccactggaacggcgcgaagaggtgctgtcgtggagcgacgagaagttttgccgtgaactccagtctgcctttggctggcgactggggcaaattacccacgccggtaaacgcagtgcttatccgctggcattaacccgcgccgccagaccgattacccatcgcactgtgctggtgggcaatgcggcgcaaactctgcacccgattgccgggcaagggtttaacctcggtatgcgagatgtcatgagccttgcggaaaccctgactcaggcgcatgagcgcggagaagacatcggtgattacggcatattgtgccgctatcagcagcgtcgacagagcgatcgcgaagcaaccatcggcgtcacggacagcctggtacatctttttgccaaccgttgggcaccgctggttgtcgggcgcaacatcggactgatgacgatggaattattcaccccggcacgcgatgtgctggcgcagcgcaccctcggttgggtggcgcgttga

SEQ ID NO: 471437 - DNA, 1203 bp, Shigella flexneri
atgcaaagtgttgatgtagccattgttggcggcggcatggtggggctggcggttgcctgcggcttacaggggagcggcttacgcgttgccgtactggagcagcgcgtaccggaacctctggcggtagatgcactaccacaactgcgcgtttcggctatcaatgccgccagcgaaaaattactcacccgtcttggcgtctggcaggacattctcgctcgtagggccagttgttatcacggcatggaagtgtgggacaaagacagttttggtcacatctcgtttgacgatcaaagcatgggctatagccatcttgggcacatcgttgaaaactcagtgattcactacgcgctgtggaacaaagcgcagcagtcgtcagatattactctgttggcccccacagaattacagcaggtcgcctggggagaaaatgaaaccttcctgacgctgaaagatggcagcatgttaacggcgcgtctggtgattggcgcggacggtgctaattcctggttgcgcaacaaagcagatattccgctgactttctgggattatcagcatcacgcgctggtagcgaccattcgcacggaagaaccgcatgatgcggtggcgcggcaggttttccatggcgaaggcattctggcctttttaccgcttagcgatccgcatctttgctcgattgtctggtcactgtcgccagaggaagcgcagcggatgcagcaggcaagtgaagacgaatttaatcgcgcgttaaatatcgcttttgataatcgccttggtttatgcaaggttgagagcgcgcgtcaggtgttcccgctgacggggcgttatgcgcgccagtttgccgcacaccgtctggcgctggtgggcgacgccgcgcataccattcacccactggcggggcagggcgttaatctcggatttatggacgccgcagagctgattgctgaactgaaacggttgcatcgtcagggtaaagacatcgggcagtacatttacctgcgccgctatgaacgtagccgcaagcacagcgcggcgctgatgctggctggtatgcagggttttcgcgatctcttttccggcgctaatccggcgaaaaaactgctgcgtgatattggtttgaaactggccgacacgcttcctggcgttaagccgcaacttatccgccaggcaatgggattaaacgatttgcctgaatggctgcgttaa

SEQ ID NO: 471438 - DNA, 1095 bp, Shigella flexneri
atggcacaacagactcctttgtacgaacaacacacgctttgcggcgctcgcatggtggatttccacggctggatgatgccgctgcattacggttcgcaaatcgacgaacatcatgcggtacgtaccgatgccggaatgtttgatgtgtcgcatatgaccatcgtcgatctccgcggcagccgcacctgggagtttctgcgttatctgctggcgaacgatgtggcgaagctcaccaaaagcggcaaagccctttactcggggatgttgaatgcctctggcggtgtgatagatgatctcatcgtctactactttactgaagatttcttccgcctcgttgttaactccgccacccgcgaaaaagacctctcctggattacccaacacgctgaacctttcggcatcgaaattaccgttcgtgatgacctttccatgattgccgtgcaagggccgaatgctcaggcaaaagctgccacactgtttaatgatgctcagcgtcaggcggtggaagggatgaaaccgttctttggcgtgcaggtgggcgatctgtttattgccaccactggttataccggtgaagcgggctatgaaattgcgctgcccaatgaaaaagcggccgatttctggcgtgcgctggtggaagcgggcgttaagccctgcggtctgggggcgcgtgacacgctgcgtctggaagcgggcatgaatctttatggtcaggagatggacgaaactatttctcctttagccgccaacatgggctggactatcgcctgggaaccgacagatcgtgactttatcggtcgtgaagccctggaagtgcagcgtgagcatggtacagaaaaactggttggtctggtgatgaccgaaaaaggcgtgctgcgtaatgaactgccggtacgctttaccgatgcgcagggcaaccagcatgaaggcattatcaccagcggtactttctccccgacgctgggttacagcattgcgctggcgcgcgtgccggaaggtattggcgaaacggcgattgtgcaaattcgcaaccgtgaaatgccggttaaagtgacaaaacctgtttttgtgcgtaacggcaaagccgtcgcgtga

SEQ ID NO: 471439 - DNA, 390 bp, Shigella flexneri
atgagcaacgtaccagcagaactgaaatacagcaaagaacacgaatggctgcgtaaagaagccgacggcacttacaccgttggtattaccgaacatgctcaggagctgttaggcgatatggtgtttgttgacctgccggaagtgggcgcaatggttagcgcgggcgatgactgcgcggttgccgaatcggtaaaagcggcgtcagacatttatgcgccagtaagcggtgaaatcgtggcggtaaacgacgcactgagcgattccccggaactggtgaacagcgaaccgtatgcaggcggctggatctttaaaatcaaagccagcgatgaaagcgaactggaatcactgctggatgcgaccgcatacgaagcattgttagaagatgagtaa

SEQ ID NO: 471440 - DNA, 2874 bp, Shigella flexneri
atgacacagacgttaagccagcttgaaaacagcggcgcttttattgaacgccatatcggaccggacgccgcgcaacagcaagaaatgctgaatgccgttggtgcacaatcgttaaacgcgctgaccggccagattgtgccgaaagatattcagcttgcgacaccaccgcaggttggcgcaccggcgaccgaatacgccgcactggcagaactcaaggctattgccagtcgcaataaacgcttcacgtcttacatcggcatgggttacaccgccgtgcagctaccgccggttatcctgcgtaacatgctggaaaatccgggctggtataccgcgtacactccgtatcagcctgaagtctcccagggccgccttgaagcactgctcaacttccagcaggtaacgctggatttgactggactggatatggcctctgcttctcttctggacgaggccaccgctgccgccgaagcaatggcgatggcgaaacgcgtcagcaaactgaaaaatgccaaccgcttcttcgtggcttccaatgtgcatccgcaaacgctggatgtggtccgtactcgtgctgaaacctttggttttgaagtgattgtcgatgacgcgcaaaaagtgctcgaccatcaggacgttttcggcgtgctgttacagcaggtaggcactaccggtgaaattcacgactacactgcgcttattagcgaactgaaatcacgcaaaattgtggtcagcgttgccgccgatattatggcgctggtgctgttaactgcgccgggtaaacagggcgcggatattgtttttggttcggcgcaacgcttcggcgtgccgatgggctacggtggcccacacgcggcattctttgcggcgaaagatgaatacaaacgctcaatgccgggccgtattatcggtgtatcgaaagatgcagctggcaataccgcgctgcgcatggcgatgcagactcgcgagcaacatattcgtcgtgagaaagcgaactccaacatttgtacttcccaggtactgctggcaaacatcgccagcctgtatgccgtttatcacggcccggttggcctgaaacgtatcgctaaccgcattcaccgtctgaccgatattctggcggcgggcctgcaacaaaaaggtctgaaactgcgccatgcgcactatttcgacaccttgtgtgtggaagtggccgacaaagcgggcgtactgacgcgtgccgaagcggctgaaatcaacctgcgtagcgatatcctgaacgccgtggggatcacccttgatgaaaccaccacgcgtgaaaacgtaatgcagcttttcagtgtgctgctgggcgataaccacgggctggagatcgacacgctggacaaagacgtggctcacgacagccgctctatccagcctgcgatgctgcgcgacgacgaaatcctcacccatccggtgtttaatcgctatcacagcgaaaccgaaatgatgcgctatatgcactcgctggagcgtaaagatctggcgctgaatcaggcgatgatcccgctgggttcctgcaccatgaaactgaacgccgccgccgagatgatcccaatcacttggacggaatttgccgaactgcacccgttttgcccgccggaacaggctgaaggttatcagcagatgattgcgcagctggctgactggctggtgaaactgaccggttacgacgccgtttgtatgcagccgaactccggcgcacagggcgaatacgcgggcctgctggcgattcgtcattatcatgaaagccgcaacgaagggcatcgcgatatctgcctgatcccggcttctgcgcacggaactaaccccgcttctgcacatatggcaggaatgcaggtggtggttgtggcgtgtgataaaaacggcaacatcgatctgactgatctgcgcgcgaaagcggaacaggcgggcgataacctctcctgtatcatggtgacttatccttctacccacggcgtgtatgaagaaacgatccgtgaagtgtgtgaagtcgtgcatcagttcggcggtcaggtttaccttgatggcgcgaacatgaacgcccaggttggcatcacctcgccgggctttattggcgcggacgtttcgcacctcaacctgcataaaactttctgcattccgcacggcggtggtggtccgggtatgggaccgatcggtgtgaaagcgcatctggcaccgtttgtaccgggtcatagcgtggtgcaaatcgaaggcatgttaacccgtcagggcgcagtttctgcggcaccgttcggtagcgcctctatcctgccaatcagctggatgtacatccgcatgatgggcgcagaagggctgaaaaaagcaagccaggtggcaatcctcaacgccaactatattgccagccgcctgcaggatgccttcccggtgctgtataccggtcgcgacggtcgcgtggcgcacgaatgtattctcgatattcgcccgctgaaagaagaaaccggcatcagcgagctggatattgccaagcgcctgatcgactacggtttccacgcgccgacgatgtcgttcccggtggcgggtacgctgatggttgaaccgactgaatctgaaagcaaagtggaactggatcgctttatcgacgcgatgctggctatccgcgcagaaattgaccaggtgaaagccggtgtctggccgctggaagataacccgctggtgaacgcgccgcacattcagagcgaactggtcgccgagtgggcgcatccgtacagccgtgaagttgcggtattcccggcaggcgtggcagacaaatactggccgacggtgaaacgtctggatgatgtttacggcgaccgtaacctgttctgctcctgcgtaccgattagcgaataccagtaa

SEQ ID NO: 471441 - DNA, 744 bp, Shigella flexneri
atggctatagcacttgtgaccggtggcagtcgcggcatcgggcgggcaactgcattactgttggcgcaagaagggtatacggtggcggttaattatcagcaaaacctccacgcggcgcaggaagtgatgaacttaataatgcaagctggtggcaaagcattcgtgctccaggcggatatcagcgacgaaaaccaggtcgttgcgatgtttacagcaatcgatcagcacgatgaaccgctagcagcgctggtcaataacgccgggatcttgtttacccagtgcaccgttgaaaaccttaccgcagagcgaatcaaccgagtactttccaccaacgtgacgggatattttctctgctgccgcgaggcggtaaaacgcatggcgcttaaaaatggtggcagtggcggcgctatcgtcaatgtctcttcggtggcctcacggttgggttcgccaggggaatatgttgattacgcggcatcgaaaggggcgattgattcgttaaccaccggactatcgctggaagtcgccgcgcaggggatccgcgttaactgcgtgcggccagggtttatttataccgaaatgcacgccagcggcggcgagcctggacgcgtcgatcgcgttaagtcgaacatccccatgcagcgtggtggacaggcagaagaggtcgcgcaggccattgtctggctactaagtgataaagcctcttacgtcacgggaagttttatcgatttggcgggcgggaaataa

SEQ ID NO: 471442 - DNA, 1434 bp, Shigella flexneri
gtgaaaaaactcaccttaccgaaagatttcttatggggtggcgccgttgccgctcatcaggtcgaaggcggctggaacaaaggcggcaaaggaccgagcatttgtgacgttctgaccggtggcgcacacggcgtgccgcgcgaaatcaccaaagaagtcttgccaggaaaatactatccaaaccatgaagccgttgatttttatggtcactacaaggaagacatcaagctatttgccgaaatgggcttcaaatgttttcggacttccatcgcctggacgcgtatttttccaaaaggtgatgaagctcagccaaacgaagaagggctgaagttttacgactctctgttcgatgaactgctgaaatacaacatcgaaccggtgataaccctctcccactttgaaatgccgctgcatctggtgcagcaatacggtagctggaccaaccgtaaattcgttgatttctttgtccgtttcgcggaagtggtattcgaacgctacaagcataaagtcaaatactggatgaccttcaacgaaataaacaaccagcgtaactggcgtgcgccgctgtttggttactgctgctccggcgtggtgtataccgagcatgacaacccggaagagacgatgtaccaggtgctgcatcaccagtttgtcgccagcgccctggcagtgaaagccgcgcgtcgcattaacccggagatgaaagtcggctgtatgctggcgatggtgccgctctatccctactcatgtaacccggacgatgtgatgttcgctcaggagtcgatgcgcgaacgctacgtctttaccgatgtgcagctatgcggctattacccgtcctatgtattgaacgagtgggaacgtcgcggatttaatatcaaaatggaagacggcgatctcgatgtactgcgcgaaggcacctgcgattatcttggtttcagctattacatgaccaacgcagtgaaggccgaaggcggcaccggcgatgcgatctctggttttgaaggcagcgtaccgaacccgtatgttaaagcgtctgactggggctggcagattgatccagtaggtctgcgctatgccctttgcgaactgtatgagcgttatcagaggccgctgtttattgtcgaaaacggttttggcgcttacgacaaagtggaagaagatggcagcatcaacgacgactaccgcattgactacctgcgcgcccatattgaagagatgaaaaaagcagtgacttacgatggtgtggatctgatgggctacacaccgtggggctgcatcgactgcgtgtcattcactaccgggcagtacagcaaacgctacggctttatctatgtgaataaacatgacgacggtactggcgatatgtcgcgttcacgtaagaagagctttaactggtacaaagaggtgattgccagcaacggcgagaagctttaa

SEQ ID NO: 471443 - DNA, 201 bp, Shigella flexneri
gtgcttcgtgtcggacgttttgaagatgacggttatttttgcacgattgaagtcaccgcaacctcaaccgtaacgctggatacactgacggaaaaacatgcagagcaggaaaatatgaccctgcctgaactgaaaaaggtcattgctgacatctatcccggtcagacacaattttatatgattgaatttaaatgtctttaa

SEQ ID NO: 471444 - DNA, 660 bp, Shigella flexneri
atggttcagaagcccctcattaagcagggatattcgctggcagaggaaattgccaacagcgtcagtcacggcattgggctggtgtttggtatcgttgggctggtgttgctactggttcaggcggtggatctcaatgccagcgccacagcgataaccagttacagcctctatggcggcagtatgatcctgctgttcctcgcttcgacgctctatcacgccattcctcatcaacgggcaaaaatgtggctgaagaaatttgaccattgcgctatttacctgttgattgccggaacctacacgccgtttttgctggtggggctggattctccgttagcgcgcgggttgatgattgttatctggagcctagcattgctggggattctgttcaaactgaccatcgcgcaccgattcaaaattttatctctggtgacttatctggcgatgggctggctgtcgctggtggtaatttatgaaatggcagttaagctcgcggcgggcagcgttaccttactggcggtaggcggcgtggtttattcgctcggggtgattttctacgtctgcaaacgcattccatacaaccatgccatctggcacggcttcgtgctcggcggtagtgtgtgccactttctggcgatctatttgtatattgggcaggcgtaa

SEQ ID NO: 471445 - DNA, 981 bp, Shigella flexneri
atggcttttacaccttttcctccacgtcagcctacggcttctgcccgtttaccgctgacgctgatgacgcttgatgactgggcgcttgccaccattactggcgcggacagcgaaaaatatatgcagggtcaggtgacagcagatgtcagccagatggcagaagatcagcacctgctcgccgcccattgcgacgccaaaggtaaaatgtggagcaatttacgtctgttccgcgacggcgatggctttgcatggattgaacggcgcagcgtgcgtgaaccgcagctgactgaactgaaaaaatatgcggtattctctaaagtgaccatcgcgccagacgacgagcgtgtgctgcttggtgttgccggttttcaggcgcgcgccgcgctggcaaatctctttagcgaactgccttcgaaagaaaaacaggtagtcaaagaaggcgcgaccactttgctatggtttgaacacccggcagaacgtttcctgatcgtaaccgatgaagctactgctaatatgctgaccgataaactgcgcggtgaagcggaactgaacaatagccaacagtggctggcattaaacattgaagctggtttcccggtgattgatgccgccaacagcgggcagtttatcccacaggcgaccaatctccaggcgctgggcggtatcagctttaagaaaggctgttataccggacaagagatggtggcgcgagcaaaattccgtggtgccaacaaacgcgcgctctggttgctggcaggtagtgccagccgactgccggaagctggtgaagacttagagctgaaaatgggcgagaactggcgtcgtaccggtacggtgctggctgcggtaaaactggaagatggtcaggtcgtggtacaggtcgtcatgaataacgatatggaaccggacagcatcttccgcgtacgcgacgatgcgaatacactgcatatcgagccgctgccgtattcgctcgaagagtaa

SEQ ID NO: 471446 - DNA, 267 bp, Shigella flexneri
atggacattaacaacaaagcccgaattcattgggcatgccgccgtggtatgcgcgaactcgatatttcaatcatgccgtttttcgaacatgagtacgacagcttaagcgatgacgaaaaacgcatctttattcgtctgctggaatgtgacgatccggacctgtttaactggctgatgaatcacggtaaaccggccgatgcagaactggaaataatggtccgactcatccagacacggaaccgggaacgtggtcctgtggcaatctga

SEQ ID NO: 471447 - DNA, 408 bp, Shigella flexneri
gtggtcctgtggcaatctgatttgcgcgtctcctggcgcgcacagtggctttccttgctgattcatgggctggttgccgctgttattttactcatgccctggccgctcagttacaccccgttatggatggtgttactttcgctggtggtatttgattgcgttcgcagccagcggtgtattaatgctcgccagggggaaattcgcttgttgatggacgggcgtttgcgttggcaagggcaggagtggagcatcgtcaaagcaccgtggatgattaagagcggcatgatgctgcgtttacgttctgatggcggtaaacggcaacatttatggctggcagccgacagcatggacgaagccgaatggcgggatttacggcggattttgttgcaacaagagacgcaaagataa

SEQ ID NO: 471448 - DNA, 522 bp, Shigella flexneri
atgaatatgggtcttttttacggttccagcacctgttacaccgaaatggcggcagaaaaaatccgcgatattatcggcccagaactggtgaccttacataacctcaaggacgactccccgaaattaatggagcagtacgatgtgctcattctgggtatcccgacctgggattttggtgaaatccaggaagactgggaagccgtctgggatcagctcgacgacctgaaccttgaaggtaaaattattgcgctgtatgggcttggcgatcaactgggatacggcgagtggttcctcgatgcgctcggtatgctgcatgacaaactctcgaccaaaggcgtgaagttcgtcggctactggccaacggaaggatatgaatttaccagcccgaaaccggtgattgctgacgggcaactgttcgtgggtctggcgctggatgaaactaaccagtatgaccttagcgacgagcgtattcagagctggtgcgagcaaatcctcaacgaaatggcagagcattacgcctga

SEQ ID NO: 471449 - DNA, 897 bp, Shigella flexneri
gtgaaacaggagctggcacgcatcgagcagtttcttgatgctctgtggctggaaaaaaatctggctgaaaatacgttgaacgcttaccgtcgcgatctgtcaatgatggtggagtggttgcatcaccgcgggttgacgctggcgacggcgcaaagtgacgatttgcaggcattactggcagaacggctggagggcgggtataaagccaccagctcagcgcgtttgctgagtgcagtgcgccgattgttccagtatctttatcgcgaaaagtttcgtgaagacgatcccagtgcgcatctcgcttcaccgaaattgccccagcgtttgccaaaagatttaagcgaagcgcaggtcgaacgtttattacaggcgccattaattgatcagccactggagctacgcgataaagccatgcttgaagtgttgtatgctaccgggctgcgtgtctctgaactggtcgggctgacaatgagtgatatcagcctgcgtcagggcgtagtgcgggtcattggtaaaggcaacaaagagcgcctggtgccgttaggggaagaggcggtttactggctggaaacctatctggaacatgggcgtccgtggctgctgaatggtgtgtcaattgacgtgttgtttcccagccagcgtgcgcagcagatgacgcgacagaccttctggcaccgcattaaacattatgccgtgctggcgggtatcgacagcgaaaagctgtcaccgcatgtgttgcgtcacgcttttgccactcatttattaaatcatggtgcggatttacgcgtggtgcagatgctactgggccacagcgatctttccaccacgcaaatttatacgcatgtcgctaccgagcgtctgcggcaacttcatcaacagcatcacccgcgggcgtga

SEQ ID NO: 471450 - DNA, 711 bp, Shigella flexneri
atgaagaaaggttttatgttgtttactttgttagcggcgttttcaggctttgctcaggctgatgacgcggcaattcaacaaacgttagccaaaatgggcatcaaaagcagcgatattcagcccgcgcccgtagctggcatgaagacagttctgactaacagcggtgtgttgtacatcaccgatgatggtaaacatatcattcaggggccaatgtatgacgttagtggcacggctccggtcaatgtcaccaataagatgctgttaaagcagttgaatgcgcttgaaaaagagatgatcgtttataaagcgccgcaggaaaaacacgtcatcaccgtgtttactgatattacctgtggttactgccacaaactgcatgagcaaatggcagactataacgcgctggggatcaccgtgcgttatcttgctttcccgcgccaggggctggacagcgatgcagagaaagaaatgaaagctatctggtgtgcgaaagataaaaacaaagcgtttgatgatgtgatggcaggtaaaagcgtcgcaccagccagctgcgacgtggatattgccgaccattacgcacttggcgtccagcttggcgttagcggtactccggcagttgtgctgagcaatggcacacttgttccgggttaccagccgccgaaagacatgaaagaattcctcgacgaacaccaaaaaatgaccagcggtaaataa

SEQ ID NO: 471451 - DNA, 1734 bp, Shigella flexneri
gtgaaacaacagatacaacttcgtcgccgtgaagtcgatgaaacggcagacttgcccgctgaattgcctcccttgctgcgccgtttatacgccagccggggagtacgcagtgcgcaagaactggaacgcagtgttaaaggtatgttgccctggcagcaactaagcggtgtcgaaaaggccgttgagatcctttacaacgcttttcgcgaaggaacgcggattattgtggtcggtgatttcgacgccgacggcgcgaccagcacggctctaagcgtgctggcgatgcgctcgcttggttgcagcaatatcgactacctggtaccaaaccgtttcgaagacggttacggcttaagcccggaagtggtcgatcaggcccatgcccgtggcgcgcagttaattgtcacggtggataacggtatttcctcccatgcgggagttgagcacgctcgctcgttgggcatcccggttattgttaccgatcaccatttgccgggcgacacattacccgcagcggaagcgatcattaaccctaacttgcgcgactgtaatttcccgtcgaaatcactggcaggcgtgggtgtggcgttttatctgatgctggcgctgcgcacctttttgcgcgatcagggctggtttgatgagcgcggcatcgcaattcctaacctggcagaactgctggatctggtagcactggggacagtagcggacgtcgtgccgctggacgctaataatcgcattctgacctggcaggggatgagtcgcatccgtgccggaaagtgccgtccagggattaaagcgctgctggaagtggcaaatcgcgatgcacaaaaactagccgccagcgatttaggttttgcgctgggaccgcgtctcaatgctgccgggcgactggatgatatgtccgttggtgtggcgctgttgctgtgcgacaacatcggcgaagcgcgcgtgctggcaaatgaactcgatgcgctaaaccagacgcgaaaagagatcgaacaaggaatgcaggttgaagccctgaccctgtgcgagaaactggagcgcagccgtgacacgctacccggcgggctggcaatgtatcaccccgaatggcatcagggcgttgtcggtattctggcttcgcgtatcaaagagcgttttcaccgtccggttatcgcctttgcgccagcaggtgacggtacgctgaaaggttccggtcgctccattcaggggctgcatatgcgtgatgcgctggagcgattagacacactctaccccggcatgatgctcaagtttggcggtcatgcgatggcggcgggtttgtcgctggaagaggataaattcgaactctttcaacaacggtttggcgaactggttactgagtggctggccccttcgctattgcaaggcgaagtggtgtcagacggtccgttaagcccggccgaaatgaccatggaagtggcgcagctgctgcgcgatgctggcccgtgggggcagatgttcccggagccgctgtttgacggtcatttccgtctgctgcaacagcggctggtgggcgaacgtcatttgaaggtgatggtcgaaccggtcggcggcggtccactgctggatggtattgcttttaatgtcgataccgctctctggccggataacggcgtgcgcgaagtgcaactggcttataagctcgatatcaacgagtttcgcggcaaccgcagcctgcaaattatcatcgacaatatctggccaatttag

SEQ ID NO: 471452 - DNA, 882 bp, Shigella flexneri
atgaaacaggggctggaagatgtttctggtctgctggaactggctgtagaagctgacgacgaagaaacctttaacgaagccgttgctgaactcgacgccctggaagaaaaactggcgcagcttgagttccgccgtatgttctctggcgaatatgacagcgccgactgttacctcgatattcaggcggggtctggcggtacggaagcacaggactgggcgagcatgcttgagcgtatgtatctgcgctgggcagaatcgcgtggtttcaaaactgaaatcatcgaagagtcggaaggtgaagtggcgggtattaaatccgtgacgatcaaaatctccggcgattacgcttacggctggctgcgtacagaaactggcgttcaccgcctggtgcgtaaaagcccgtttgactccggcggtcgtcgccacacgtcgttcagctctgcgtttgtttatccggaagttgatgatgatattgatatcgaaatcaacccggcggatctgcgcattgacgtttatcgcgcgtccggcgcgggcggtcagcacgttaaccgtaccgaatctgcggtgcgtattacccacatcccgaccgggatcgtgacccagtgccagaacgaccgttcccagcacaagaacaaagatcaggccatgaagcagatgaaagcgaagctttatgaactggagatgcagaagaaaaatgccgagaaacaggcgatggaagataacaaatctgacatcggctggggcagccagattcgttcttatgtccttgatgactcccgcattaaagatctgcgcaccggggtagaaacccgcaacacgcaggccgtgctggacggcagcctggatcaatttatcgaagcaagtttgaaagcagggttatga

SEQ ID NO: 471453 - DNA, 1518 bp, Shigella flexneri
atgtctgaacaacacgcacagggcgctgacgcggtagtcgatcttaacaatgaactgaaaacgcgtcgtgagaagctggcgaacctgcgtgagcagggaattgccttcccgaacgatttccgtcgcgatcatacctctgaccaattgcacgcagaattcgacggtaaagagaacgaagaactggaagcgctgaacatcgaagtcgccgttgctggccgcatgatgacccgccgtattatgggtaaagcgtctttcgttaccctgcaggatgtgggtggccgcattcagctgtacgttgcccgtgacgatctgccggaaggcgtttacaacgagcagttcaaaaaatgggacctcggcgacatcctcggcgcgaaaggtaaactgttcaaaaccaaaaccggcgaactgtctatccactgtaccgagctgcgtctgctgaccaaagcactgcgtccgctgccggataaattccacggcttgcaggatcaggaagcgcgctatcgtcagcgttatctggatctcatctctaacgatgaatcccgtaacacctttaaagtacgctcgcagatcctctctggtattcgccagttcatggtgaaccgcggctttatggaagttgaaacgccgatgatgcaggtgatcccaggcggtgccgctgcgcgtccgtttatcacccaccataacgcgctggatctcgacatgtacctgcgtatcgcgccggaactgtacctcaagcgtctggtggtcggtggcttcgagcgtgtattcgaaatcaaccgtaacttccgtaacgaaggtatttccgtacgtcataacccagagttcaccatgatggaactctacatggcttacgcagattacaaagatctgatcgagctgaccgaatcgctgttccgtactctggcacaggatattctcggtaagacggaagtgacctacggcgacgtgacgctggacttcggtaaaccgttcgaaaaactgaccatgcgtgaagcgatcaagaaatatcgcccggaaaccgacatggcggatctggataacttcgactctgcgaaagcgattgctgaatctatcggtatccacgttgagaagagctggggtctgggccgtatcgttaccgagatcttcgaagaagtggcagaagcacatctgattcagccgaccttcattactgaatatccggcagaagtttctccgctggcgcgtcgtaacgacattaacccggaaatcacagaccgctttgagttcttcatcggtggtcgtgaaatcggtaacggctttagcgagctgaatgacgcggaagatcaggcgcaacgcttcctggatcaggttgccgcgaaagacgcaggtgacgacgaagcgatgttctacgatgaagattacgttaccgcactggaacatggcttaccgccgacagcaggtctggggattggcatcgaccgtatggtaatgctgttcaccaacagccataccatccgcgacgttattctgttcccggcgatgcgtccggtgaaataa

SEQ ID NO: 471454 - DNA, 549 bp, Shigella flexneri
atgcaaacggaacacgtcattttattgaatgcacagggagttcccacgggtacgctggaaaagtatgccgcacacacggcagacaccctcttacatctcgcgttctccagttggctgtttaatgccaaggggcaattattagttacccgccgcgcactgagcaaaaaagcgtggcctggcgtgtggactaactcggtttgtgggcacccacaactgggagaaagcagcgaagacgcggtgatccgccgttgccgttatgagcttggcgtggaaattacgcctcctgaatctatctatcctgactttcgctaccgcgccaccgatccgagaggcattgtggaaaatgaagtgtgtccggtatttgccgcacgcaccaccagtgcgttacagatcaacgatgatgaagtgatggattatcaatggtgtgatttagctgatgtattacgcggtattgatgccacgccgtgggcgttcagtccgtggatggtgatgcaggcgacaaatcgcgaagccagaatacgattatctgcatttacccagcttaaataa

SEQ ID NO: 471455 - DNA, 126 bp, Shigella flexneri
atgaattttttaatgcgcgctatattcagtctgttgttgctttttactctctctattcctgtcatttctgactgtgttgcaatggccattgaaagtcgcttcaaatatatgatgctacttttttaa

SEQ ID NO: 471456 - DNA, 414 bp, Shigella flexneri
atggtgccaaaaatggcggtgctggtagcctccattccgcaatttgtgctgggcggcgctggtctagtgatgttcggcatggtactggcgacagggattcgaattctgtcgcgctgtaactacaccaccaaccgttacaacctctatattgtggcgatcagtctcggcgttggcatgactccgacgctctctcacgatttcttttctaagttaccggccgtactgcaaccgctgctacatagcggcattatgctcgcaacccttagcgccgttgtgctgaacgtcttctttaatggctatcagcatcatgctgacctggtgaaggaatccgtctctgataaagatttagaagtcaggacagtacgtatgtggcttctgatgcgcaagctgaagaaaaatgagcatggagaataa

SEQ ID NO: 471457 - DNA, 636 bp, Shigella flexneri
gtgaaatttccgctacctggacgcataaaaccggaactctcgccaaaagccgggcactccgaaggaattgacgcgttgcgctgctctgtaacggcatttaccgcaagccatttatttcgccagcgacaatccgcagagaaccaaacgcatcaggaaacgactgaacacaataaatactgtattgatcaacatattatactggcacctccagcacgcagtgaggatacactgtatcatcagcgaatcttatcactgcggagctggttgaacgactttctgagcgaaataagtcggttcccggtaacaacaacagaatccttttttaattattgtttcgttgtttttggtgtgattcagaaaataaatattttagacagtagccagtcaggcgttaaaaatggggcggatagtgaggcggttttggctgcgcttattgaacatttagaattgatcaatccttctggcagattaagccaaaatacccgttcggcaatgcttcagttacgcgaagaggaatggtctgaattctttttttggttgctaaattctctggagtgtctggattatgtgattattaatttaactccagaaagcaaaaaaacgttgatgagtgaacaccgtaacaatattcggtag

SEQ ID NO: 471458 - DNA, 1698 bp, Shigella flexneri
atgaaatcccccgcaccttctcgcccgcaaaaaatggcgttaattccagcctgtatctttttgtgtttcgctgcgctatcggtgcaggcagaagaaacaccggtaacaccacagccgcctgatattttattagggccgctgtttaatgatgtgcaaaacgccaaactttttccggaccaaaaaacctttgccgatgccgtgccgaacagcgatccgctgatgatccttgctgattatcggatgcagcaaaaccagagcggatttgatctgcgccatttcgttaacgtcaatttcaccctgccgaaagaaggcgagaaatatgttccgccagaggggcagtcactgcgcgaacatattgacggactttggccggtattaacgcgttctaccgaaaacaccgaaaaatgggattctctgttaccgctgccggaaccttatgtcgtgccgggcggacgttttcgcgaggtatattactgggacagttacttcaccatgttaggacttgccgaaagtggtcactgggataaagtcgcggatatggtggccaattttgctcatgaaataaacacttacggtcatattcccaacggcaaccgcagttactatttaagccgctcgcaaccgcccttctttgccctgatggtagagttactggcgcagcatgaaggcgatgccgcgttgaagcaatacctgccgcaaatgcaaaaagaatatgcttactggatggacggtgttgaaaacctgcaagccggacaacaggaaaaacgcgttgtaaaacttcaggatggtacccttctcaaccgctactgggacgatcgcgatacgccacgaccagagtcatgggtggaagatattgccaccgccaaaagcaatccgaatcgacctgccactgaaatttaccgcgacctgcgctctgccgctgcgtctggctgggatttcagctcgcgctggatggacaacccgcagcagttaaataccttacgcaccaccagcatcgtaccggtcgatctgaacagcctgatgtttaaaatggaaaaaatcctcgcccgcgccagcaaagctgcaggagataacgcgatggcaaaccagtacgaaacgctggcgaatgcccgtcaaaaagggatcgaaaaatacctgtggaacgatcaacaaggctggtatgccgattacgacctgaaaagtcataaagtgcgcaatcagttaaccgcggccgccctgttcccgctgtacgtcaatgcggcagcgaaagatcgcgccaacaaaatggcgacggcgacgaaaacacatctgctgcaacccggcggcctgaacaccacgtcggtgaaaagtgggcaacaatgggatgcgccaaatggctgggcaccgttacagtgggtcgcgacagaaggattacaaaactacgggcaaaaagaggtggcgatggacattagctggcacttcctgaccaatgttcagcacacctatgaccgggagaaaaagctggtggaaaaatatgatgtcagcaccaccggaacggggggcggcggtggcgaatatccattacaggatggctttggctggaccaatggcgtgacgctgaaaatgctggatttgatctgcccgaaagagcaaccgtgtgacaatgttccggcgacgcatccgaccgttaagtcagcaacgacgcaaccctcaaccaaagaggcacaacccacaccttaa

SEQ ID NO: 471459 - DNA, 1419 bp, Shigella flexneri
atggtaaacctggtcatagtttcacatagcagccgactgggagaaggtgtcggtgaattagcccgtcagatgttaatgagtgatagttgtaaaatcgccattgccgcgggaattgacgatccacaaaatcccattggtaccgatgccgtcaaagtgatggaggccatcgaatctgttgctgatgccgaccatgtgctggtcatgatggatatgggtagcgcattattgagtgctgaaactgcgctggaattgctggctcccgagatcgccgcaaaagtacgtttgtgtgctgcgccgttggtcgaaggtacactggcagcaacggtcagcgcggcctcgggggcggatatcgacaaagttatctttgacgctatgcatgcgctggaagccaaacgtgaacaactgggtttaccgtcctccgacactgaaatctctgacacatgtcctccgtacgatgaagaagcccgttctctggcggtggtcataaaaaaccgtaacggcctgcatgtacgtccggcctcccggctggtttataccttatcgacatttaatgccgatatgttgctggaaaaaaacggcaaatgcgtcacaccagagagtattaaccagattgcgttactacaagttcgctataacgatacgctgcgcctgattgcgaaagggccagaagctgaagaggcactgatcgctttccgtcacctggctgaagataactttggtgaaacggaggaagtcgctccacctactctgcgtcccgttctgcctgtttcgggtaaagccttttattatcaaccagttttatgtacggtacaggcaaaatcaaccctgaccgaggaagaagaacaagatcgattacgccaggctattgacttcacgttattagatctgatgacgttaacagcgaaagcagaagccagcgggcttgacgatattgccgcaatcttttctggtcaccatacactgttaggtgatccggaactgctggcggcggcaagcgaactccttcagcatgaacattgcacggcagaatatgcctggcagcaagttcttaaagaacttagccagcaataccagcaactggatgatgaatatctacaagctcgctatattgatgtggacgatcttctgcatcgcaccctggtccacctgacccaaacgaaagaagaactcccgcagtttaactcgccaactattctactggcggagaacatttatccttccacagtactgcaactggatccggcggttgtaaaaggtatctgccttagcgccggaagtccggtatcccacagcgccctaatcgcccgtgaactggggattggctggatttgccagcagggtgagaaactgtatgcgatacaaccagaagaaacgctaacgctggacgttaaaacgcaacgtttcaaccgtcagggttaa

SEQ ID NO: 471460 - DNA, 633 bp, Shigella flexneri
atgtcactgagcagaactcaaattgttaactggctcactcgttgtggcgatattttcaacaccgagagcgagtatcttaccgggctggatcgcgagattggcgacgctgaccacgggctaaatatgaaccgaggctttagcaaagtggtggaaaaactccctgctatcgcagataaagatatcggtttcattctcaaaaataccggtatgacgctgctttccagcgtcggtggtgccagtggtccgctgttcggtaccttctttatccgcgccgcacaggcgacccaggcacggcaaagcctgacactggaagagctttatcagatgttccgcgatggcgcggacggcgtaatcagtcgcgggaaagccgaacctggcgataaaaccatgtgtgatgtgtgggtgccggtggtggaatcgttacgtcagtccagcgagcaaaatctctctgttccggtggcgctcgaagctgccagtagcatcgccgaatccgctgcacaaagtacgattacgatgcaagcccgcaaaggccgcgccagttatctcggtgaacgcagtattggtcaccaggatcccggcgcgacctcggtgatgtttatgatgcaaatgttggcgttagccgcaaaagagtaa

SEQ ID NO: 471461 - DNA, 1071 bp, Shigella flexneri
atgaaaaaattgatcaatgatgtgcaagacgtactggacgaacaactggcaggactggcgaaagcgcatccatcgctgacactgcatcaggatccggtgtatgtcacccgagctgatgcccctgttgcaggaaaagtcgccctgctgtcgggtggcggcagcggacacgagccgatgcactgtggttatatcggtcaggggatgctttcgggggcctgtccgggcgaaattttcacctcaccgacgcccgataaaatctttgaatgctccatgcaaattgatggcggcgaaggtgtactgttgattatcaaaaattacaccggcgatattcttaactttgaaacagcgaccgagttactgcacgatagcggcgtaaaagtgaccactgtggtcattgatgacgacgttgcggtaaaagacagtctttataccgccgggcgacgcggcgttgccaacaccgtattaattgaaaaactcgtaggcgcagcggcggagcgtggcgactcactggacgcctgtgcggaactggggcgtaagttgaataatcaaggccactcaataggtatcgctctcggtgcctgtaccgttcctgccgcgggcaaaccttcttttacccttgcggataatgagatggagtttggcgtcggcattcatggtgagccaggtattgaccgccgccctttctcttcccttgatcaaaccgtcgatgaaatgttcgacaccctgctggaacatggctcataccatcgcactttgcgtttctgggattatcaacaaggcagctggcaggaagaaccacaaaccaaacaaccgctccagtctggcgatcgggtgattgcactggttaacaatcttggcgcaactccgctttctgagctgtacggcgtctataaccgcctgaccacacgttgccagcaagcgggattgactatcgaacgtaatttaattggcgcgtactgcacctcactggatatgaccggtttctcaatcaccttactgaaagttgatgacgaaacgctggctctctgggacgccccggtccacaccccggcccttaactggggtaaataa

SEQ ID NO: 471462 - DNA, 1920 bp, Shigella flexneri
atgagtggcgcttttaacaacgatggtcggggcatatctcccttaattgcaacctcctgggagcgatgcaataagctgatgaaacgggagacatggaacgtaccacatcaggcccagggcgtgacatttgcttctatttatcggcgtaagaaagcgatgctgacgctcgggcaggctgcgctggaagatgcctgggaatatatggcaccgcgagagtgtgcgctgtttatcctcgatgaaaccgcctgcattctcagccgtaatggcgatccgcaaaccttgcagcagctaagtgcactgggattcaatgacggcacgtattgcgccgagggaattattggtacttgtgcgctatcgttagcggctatctctggtcaggccgtgaaaacgatggccgatcaacatttcaaacaggcactctggaactgggccttttgtgcaacgccgttgtttgacagcaagggccgattgacgggaacaatagcgctggcgtgtccggttgagcaaactaccgcagctgatttgccgttgacgttggcaatcgcccgcgaggtcggtaatttactgctgacggacagtttgctcgctgaaactaaccgtcatttaaatcaacttaatgccctgttagaaagtatggatgatggcgtgattagctgggacgagcagggtaatttgcaatttattaatgcccaggcggcgcgggtcttgcgccttgacgcgacggcaagtcagggacgggcaatcactgaactcttaacgttacccgccgtattgcaacaagcaataaaacaggcacatccgctcaaacacgtagaagcaacctttgaaagccagcaccagtttattgatgcggtgataacccttaaaccgataatagaaacgcagggaaccagctttattttgttgctccatcctgtggaacagatgcggcagttaatgaccagtcaattaggaaaagtcagccataccttcgctcatatgccacaggacgatccgcaaacccgccgcttgattcattttggtcgccaggcggcgcgcagtagctttcctgtcctgctttgtggagaagagggcgtgggcaaggcactgctaagtcaggcaattcataatgaaagcgagcgtgctgcaggtccttatatcgccgtcaattgtgagttatatggtgatgctgcgctggcggaagaatttattggtggcgatcgcacggacaatgaaaatggccgtctgagtcggctggaactggcacacggcggcacgctgtttcttgaaaagattgaatatctggcggtggagttacagtctgctttgctgcaggttatcaagcagggggttatcacgcgactggatgcgcggcgtttaataccaattgatgtcaaagtgattgcaacaacgaccgcggacctcgcaatgctggtggaacaaaatcgttttagtcgccagctgtattacgcgctgcatgcatttgaaattaccatcccgcctctgcgtatgcggcgtggcagcattccggcgctggtgaataacaaattacgcagtcttgaaaaacgcttctctacgcggctgaaaattgatgacgatgccctcgctcgcctagtttcttgtgcatggccaggcaacgattttgaactttacagcgtcatcgagaatcttgctctgagtagtgataacgggcgcattcgcgtcagtgatttacctgaacatctgtttaccgagcaggcgacagatgatgtcagcgccacccgcctttccaccagtctgtcatttgcggaagttgaaaaagaggcaattattaacgcagcccaggtcacaggcggtcgcattcaggaaatgtcggctttacttgggatcggccgcactacgctgtggcggaaaatgaagcaacatggcattgatgcagggcagtttaagcgccgggtatga

SEQ ID NO: 471463 - DNA, 2868 bp, Shigella flexneri
atgggcatcaaacaacacaatgggaataccaaagccgatcgtctcgctgaattaaaaatccgttcgccctcaattcaactgataaaatttggcgctattggtttgaatgcaattatcttttcccccctgctgatagctgctgatacaggaagtcaatatggcaccaatattactattaatgatggtgacagaattacaggagataccgccgatccatcaggaaacctctatggtgtaatgaccccagcaggaaacacgcctggcaatatcaacctgggtaatgatgtcaccgtcaatgtcaacgacgcctctggatatgcaaaaggaatcattattcagggcaaaaacagctccctgacagctaaccgactcacagtagatgttgttggtcaaacctctgccatcggcattaacttaattggtgactatacccatgctgacttaggcacaggcagcaccattaagagtaacgatgacggcatcattattgggcatagctcaacactaacagccactcaattcaccattgaaaactcgaacggtataggcctaaccatcaatgactatggcaccagtgtcgatcttggaagcggaagtaaaatcaagaccgatggaagtacaggtgtttatatcggtggtctcaacggcaataacgccaatggtgctgcgcgttttacggcgacagacctgacaatcgatgttcagggctacagcgccatggggataaacgtacagaaaaactctgttgtcgatctcggaacaaacagtaccattaaaaccaatggcgataatgctcacggcctctggagctttggccaggttagcgcgaatgcactcactgttgatgtaactggagccgcggccaatggcgtcgaagttcgtggtggtacaaccactatcggtgcagatagccatatttcttccgcgcagggcggtggcctcgtcaccagtagttcagacgcgacaatcaatttttctggcacggcagcgcaacgaaacagcatcttttccggcggttcttatggtgcctcggcccagacggcaacggctgttatcaacatgcaaaataccgatattacggttgatcgtaatggcagtctggcgctgggtttgtgggcgctcagcggcggtagaataaccggagacagtttggctatcaccggcgcggcaggagccagagggatttatgccatgaccaacagccagatcgacctcacgagcgatctggtcattgatatgagtacacccgaccagatggccatcgcaacgcaacatgacgatggttatgccgccagccgcatcaacgcctcgggtcgtatgcttatcaacggtagcgttctttccaaaggtgggctaatcaatctggatatgcaccctgggtcggtttggacaggttcctccctcagcgataatgtcaatggcgggaaactggacgttgcaatgaataacagcgtctggaacgtaacaagtaattctaatctcgacacgctggcgctgagccattcaactgtcgattttgccagccacgggtcaactgccggcacatttaccacattaaacgtagagaacctgagcggtaacagtacctttattatgcgtgctgatgttgttggcgagggtaatggcgttaataatagaggggatttattgaatatcagcgggagtagtgctggtaatcacgtattggctatccgcaaccagggcagcgaggccacaacgggaaatgaagttctgacagtggtaaaaaccactgacggcgcggcctcgttcagcgcgtcttctcaggttgagttggggggatatctgtacgatgtgcgtaaaaatggcactaactgggagctttacgcttccgggacagttccggaaccgactcctaatcctgaacccacaccagctcccgctcagcctcccatagtcaaccccgatcctacgcctgaacccgctcccacgcctaaacccaccacgaccgcagatgctggcggcaattatctcaatgtcggttacttattgaactatgttgaaaaccgtacgctgatgcaacggatgggtgacttgcgaaatcagagtaaagacggtaatatctggttgcgcagttatgggggaagcctggactcctttgccagtggcaaactgagcggctttgacatgggttacagcggtatccagtttggtggggataaacgtctctctgatgtaatgccgttgtatgtcggtctgtatattgactcaacacatgcatcgccggactatagcggaggcgacggtaccgcacgttcagactacatgggaatgtacgccagttacatggcacaaaacggtttttacagcgatctcgttataaaagcatcgcgccagaaaaatagtttccacgtactggacagtcagaacaacggcgttaacgccaacggcactgcgaatggaatgagcatctccctggaagccgggcagaggttcaacctgtcccctactggttatgggttctatatagagccgcaaacccagcttacatacagccaccagaatgagatggctatgaaggcgaataatggcctcaatatacatctgaatcactacgaatcgctgctggggcgtgccagcatgatactggggtatgacatcaccgcaggcaacagccagctgaatgtctatgtgaagactggcgctatccgcgagttttcaggggataccgaatatctgttgaacgactcccgggagaagtacagtttcaaaggtaatggctggaataacggcgtgggagtcagtgcacagtataacaaacagcacacattctatctcgaagcggattacacgcagggtaacctctttgatcagaagcaagtcaacggaggatatcgcttcagcttttaa

SEQ ID NO: 471464 - DNA, 1092 bp, Shigella flexneri
atgggattcaaatgcggtatcgtcggtttgcccaacgtcgggaaatctaccctgttcaacgcgctgaccaaagccggtattgaagcggccaactttccattctgcaccattgagccgaacacaggcgtcgtaccaatgcctgaccctcgcctggatcaactggctgaaatcgtaaaaccgcaacgtacgcttcccacgaccatggaatttgtcgatatcgccggtctggtaaaaggcgcatcgaaaggcgaaggtctgggtaaccagttcctgaccaacatccgtgaaaccgaagcgatcggtcacgttgttcgctgctttgaaaatgacaacatcattcacgtttccggcaaagttaacccggctgacgatattgaagttatcaacaccgaactggcgctggcagacctcgacacctgcgaacgtgcgattcatcgcgtacagaagaaagccaaaggtggcgataaagacgcgaaagctgagctggcggtcctggaaaaatgcctgccccagctggaaaacgcaggtatgctgcgcgcgctggatttaagcgctgaagagaaagcggctattcgttacctgagcttcctgacgctgaaaccaacaatgtacatagccaacgtcaacgaagatggttttgaaaacaacccatatcttgaccaggtgcgtgaaatcgcggcgaaagaaggttctgttgtggttccggtttgtgctgctgttgaagcagacattgccgaactggacgacgaagaacgtgacgagtttatgcaggagcttgggctggaagaaccgggcctgaaccgtgtgatccgtgccggttataagctgctgaacctgcaaacttacttcaccgctggggtgaaagaagtgcgtgcatggaccattccggttggagcaaccgcgccgcaggcagcgggcaaaatccatactgattttgaaaaaggctttatccgtgcacaaaccatctcgtttgaagatttcatcacttacaaaggtgaacaaggcgcgaaagaagcaggcaaaatgcgtgcagaaggtaaagattacatcgtgaaagatggcgatgtgatgaacttccttttcaacgtctaa

SEQ ID NO: 471465 - DNA, 585 bp, Shigella flexneri
gtgacgattaaattgattgtcggcctggcgaaccccggtgctgaatacgccgcaacgcgacataatgctggtgcctggttcgttgacttactggcagagcgtttgcgcgctccgctgcgcgaagaggctaaattctttggttatacttcgcgagtcacccttggaggcgaagatgtccgcctgttagtcccgactacatttatgaatctcagcggcaaagccgttgcggcgatggccagttttttccgcattaatccggacgaaattctggtggcccacgacgaactggatctgcctcctggcgtcgccaaatttaagttgggcggtggccatggtggtcacaatggactgaaagacatcatcagtaaattgggtaataaccctaactttcaccgtttacgcatcggaatcggtcatccgggcgataaaaataaagttgtcggttttgtgttaggcaaaccgcctgttagtgaacagaagttaattgatgaagccatcgacgaagcggcgcgttgtactgaaatgtggtttacagatggcttgaccaaagcaacgaaccgattgcacgcctttaaagcgcaataa

SEQ ID NO: 471466 - DNA, 279 bp, Shigella flexneri
atgaaacgcaaaaacgcttcgatactcggtaacgtgctcatggggttgggtctggtggtaatggtggtcggcgtggggtattcaatcctcaaccagttaccacagtttaatatgccccagtatttcgcacatggtgcagtgctaagtattttcgtcggtgccattctctggctggcgggtgcccgtgttggcgggcatgaacaggtgtgcgaccgttactggtgggttcgtcactatgacaaacgttgccgccgtagcgataatcgccgtcatagctaa

SEQ ID NO: 471467 - DNA, 1653 bp, Shigella flexneri
atgcctttccgcgctctgatcgacgcttgctggaaagaaaaatatactgccgcacggtttacccgtgacctgattgccgggataaccgtcgggattattgctatcccgctggcgatggcgttggctattggtagtggtgtggccccccagtacggtttatataccgcagctattgcggggattgtcattgctctaacgggtgggtcacgctttagcgtttccggtccgactgcggcatttgtggtaattctctatcccgtttcgcaacagtttggactggcaggactgctggttgcgaccttgttgtcgggaatctttttgattctgatggggctggcacgctttggtcgtctgattgagtatattccggtttccgtcaccttaggtttcacctcgggtatcgggatcaccatcggtaccatgcagattaaagattttctcggtctgcaaatggcccatgtcccggaacattatctacaaaaagtcggcgcattatttatggcgctgccgaccattaatgtgggtgatgctgccattggcattgtgacgcttggcattctggttttctggccgcgtctgggcattcgtttacccggtcaccttccggccttgctggctggttgcgcggtgatggggattgttaacctgctcggcggacatgttgctaccatcggttcgcaattccactacgtcctggccgatggttctcagggtaacggtattccgcaactgctgccgcaactggtgctgccgtgggatctgcctaattcagaattcacgctaacctgggattctattcgcaccctgctgcctgcggcattctcaatggcaatgctcggggcgatcgaatctctgctctgcgctgtggtactggatggtatgaccgggactaagcacaaggcgaatagtgaactggtcggtcaggggctggggaatatcatcgctccattctttggtggtattaccgctactgctgccatcgcgcgttctgccgctaacgtccgtgccggggcaacttcccctatctcggcggtgatccactctattctggttattctcgccctgctggtactggcaccactgctctcctggctgccgctttccgccatggcagccctgctgttgatggtggcgtggaacatgagtgaagcgcacaaagtggtcgacttgctgcgtcatgcgccgaaagatgacatcatcgtcatgctgctgtgtatgtcactgaccgtgctgtttgatatggttattgccatcagcgtggggatcgtgctggcatcgctgctgtttatgcgtcgtatcgcacgtatgactcgcctggcaccggtagtcgtagatgttccagacgatgtcctggttctgcgcgttattggcccgctgttttttgctgctgctgaaggcttattcacggacctggagtcacgtcttgaaggcaaacggattgtgattctgaagtgggatgccgttccggtacttgatgctggtggtcttgatgcgttccagcgttttgtgaagcgtctgcccgaaggatgtgaactgcgcgtgtgcaacgtggaattccagccactgcgaactatggctcgcgcaggcattcaaccgatcccgggacgcctcgcgttcttcccgaatcgtcgcgcggcgatggcggatttataa

SEQ ID NO: 471468 - DNA, 1014 bp, Shigella flexneri
atgcctggcccgcacagttttcggcagattctttccaccaatggacgcatgcctgaggttcttctcgtgcctgatatgaagctttttgctggtaacgccaccccggtactagcacaacgtattgccaaccgcctgtacacttcactcggcgacgccgctgtaggtcgctttagcgacggcgaagtcagcgtacaaattaacgaaaatgtacgcggtggtgatattttcatcatccagtccacttgtgcccctactaacgacaacctgatggaattagtcgttatggttgatgccctgcgtcgtgcttccgcaggtcgtatcaccgctgttatcccctactttggctatgcgcgccaggaccgtcgcgtccgttccgctcgtgtaccaatcactgcgaaagtggttgcagacttcctctccagcgtcggtgttgaccgtgtgctgacagtggatctgcacgctgaacagattcagggtttcttcgacgttccggttgataacgtatttggtagcccgatcctgctggaagacatgctgcagctgaatctggataacccaattgtggtttctccggacatcggcggcgttgtgcgtgcccgcgctatcgctaagctgctgaacgataccgatatggcaatcatcgacaaacgtcgtccgcgtgcgaacgtttcccaggtgatgcatatcatcggtgacgttgcaggtcgtgactgcgtactggtcgatgatatgatcgacactggcggtacgctgtgtaaagctgctgaagcgctgaaagaacgtggtgctaaacgtgtatttgcgtacgcgactcacccgatcttctctggcaacgcggcgaacaacctgcgtaactctgtaattgatgaagtcgttgtctgcgataccattccgctgagcgatgaaatcaaatcactgccgaacgtgcgtactctgaccctgtcaggtatgctggccgaagcgattcgtcgtatcagcaacgaagaatcgatctctgccatgttcgaacactaa

SEQ ID NO: 471469 - DNA, 852 bp, Shigella flexneri
atgcggacacagtggccctctccggcaaaacttaatctgtttttatacattaccggtcagcgtgcggatggttaccacacgctgcaaacgctgtttcagtttcttgattacggcgacaccatcagcattgagcttcgtgacgatggggatattcgtctgttaacgcccgttgaaggcgtggaacatgaagataacctgatcgttcgcgcagcgcggttgttgatgaaaactgcggcagacagcgggcgtcttccgacgggaagcggtgcgaatatcagcattgacaagcgtttgccgatgggcggcggtctcggcggtggttcatccaatgccgcgacggtcctggtggcattaaatcatctctggcaatgcgggctaagcatggatgagctggcggaaatggggctgacgctgggcgcagatgttcctgtctttgttcgagggcatgccgcgtttgccgaaggcgttggtgaaatactaacgccggtggatccgccagagaagtggtatctggtggcgcaccctggtgtaagtattccgactccggtgatttttaaagatcctgaactcccgcgcaatacgccaaaaaggtcaatagaaacgttgctaaaatgtgaattcagcaatgattgcgaggttatcgcaagaaaacgttttcgcgaggttgatgcggtgctttcctggctgttagaatacgccccgtcacgcctgactgggacaggggcctgtgtctttgctgaatttgatacagagtctgaagcccgccaggtgctagagcaagccccggaatggctcaatggctttgtggcgaaaggcgttaatctttccccattgcacagagccatgctttaa

SEQ ID NO: 471470 - DNA, 624 bp, Shigella flexneri
atgcccctgcccgattttcgtcttatccgcctgctaccgctggctgctcttgtgctcactgcctgttccgttaccacgcccaaaggtcctggcaaaagcccggattcgccacaatggcgtcagcatcagcaagacgtgcgcaatcttaatcagtatcagactcgcggcgcgttcgcttatatttctgaccaacaaaaagtgtacgcccgctttttctggcagcaaaccggccaggatcgctaccgtctgctgctcactaacccattgggcagcacggaactggagctgaatgctcaaccgggtaacgtgcagttagtcgacaataaaggtcagcgttataccgccgatgacgccgaagagatgattggcaaattgaccggaatgccaattccgctcaacagcttgcgccagtggattttaggtttaccgggtgatgcaaccgactacaaactggacgaccagtaccgcctgagcgaaattacctacagccagaatggcaaaaactggaaggttgtttatggtggttatgacaccaaaacgcaacctgcgatgccagccaatatggaactcaccgacggtggtcaacgcatcaagttaaaaatggataactggatagtgaaataa

SEQ ID NO: 471471 - DNA, 1257 bp, Shigella flexneri
atgacccttttagcactcggtatcaaccataaaacggcacctgtatcgctgcgagaacgtgtatcgttttcgccggataagctcgatcaggcgcttgacagcctgcttgcgcagccgatggtgcagggcggcgtggtgctgtcgacgtgcaaccgcacggaactttatcttagcgttgaagagcaggataacctgcaagaggcgttaatccgctggctttgcgattatcacaatcttaatgaagaagatctgcgtaaaagcctctactggcatcaggataacgacgcggttagccatttaatgcgtgttgccagcggcctggattcactggttcttggggagccgcagatcctcggtcaggttaaaaaagcgtttgtcgattcgcaaaaaggtcatatgaaggccagcgaactggaacgcatgttccagaaatctttctctgtagcgaaacgcgttcgcactgaaacagatatcggtgccagtgctgtgtctgtcgcttttgcggcttgtacgctggcgcggcagatctttgaatcgctctctacggtcacagtgttgctggtaggcgcgggcgaaaccatcgagctggtagcgcgtcatctgcgcgaacataaagtacagaagatgattatcgccaaccgcactcgcgaacgtgcccaaattctggcagatgaagttggcgcggaagtgattgccctgagtgagatcgacgaacgtctgcgcgaagccgatatcatcatcagttccaccgccagcccgttaccgattatcgggaaaggcatggtggagcgcgcattaaaaagtcgtcgtaaccaaccaatgctgttggtggatattgccgttccgcgcgatgttgagccggaagttggcaaactggcgaatgcttatctttatagtgtggacgatctgcaaagcatcatttcgcacaacctggcgcagcgtaaagccgcagcggttgaggcggaaactattgtcgctcaggaaaccagcgaatttatggcgtggctgcgagcacaaagcgccagcgaaaccattcgcgagtatcgcagccaggcagagcacgttcgcgatgagttaaccgccaaagcgttagcggcccttgagcagggcggcgacgcgcaagccattatgcaggatctggcatggaaactgactaaccgcttgatccatgcgccaacgaaatcacttcaacaggccgcccgtgacggggataacgaacgcctgaatattctgcgcgacagcctcgggctggagtag

SEQ ID NO: 471472 - DNA, 1083 bp, Shigella flexneri
atgaagccttctatcgttgccaaactggaagccctgcatgaacgccatgaagaagttcaggcgttgctgggtgacgcgcaaactatcgccgaccaggaacgttttcgcgcattatcacgcgaatatgcgcagttaagtgatgtttcgcgctgttttaccgactggcaacaggttcaggaagatatcgaaaccgcacagatgatgctcgacgatcctgaaatgcgtgagatggcgcaggatgaactgcgcgaagctaaagaaaaaagcgagcaactggaacagcaattacaggttctattactaccaaaagatcctgatgacgaacgtaacgccttcctcgaagtccgtgccggaaccggcggcgacgaagcagcgctgtttgcaggcgatctgttccgtatgtacagccgttacgccgaagcccgccgctggcgggtagaaatcatgagcgccagcgagggtgaacatggtggttataaagagatcatcgccaaaattagcggtgatggtgtgtatggtcgtctgaaatttgaatccggcggtcatcgcgtgcaacgtgttcctgctacggaatcgcagggtcgtattcatacttctgcttgtaccgttgcggtaatgccagaactgcctgacgcagaactgccggacatcaacccagcagatttacgcattgatactttccgctcgtcaggggcgggtggtcagcacgttaacaccaccgattcggcaattcgtattactcacttgccgaccgggattgttgttgaatgtcaggacgaacgttcacaacataaaaacaaagcgaaggcgctttcagtgctcggtgctcgcatccacgctgctgaaatggcaaaacgccaacaggccgaagcgtctacccgtcgtaacctgctggggagtggcgatcgcagcgaccgtaaccgtacttacaatttcccgcaggggcgcgttaccgatcaccgcatcaacctgacgctctaccgcctggatgaagtgatggaaggtaagctggatatgctgattgaaccgattatccaggaacatcaggccgaccaactggcggcgttgtccgagcaggaataa

SEQ ID NO: 471473 - DNA, 834 bp, Shigella flexneri
atggaatatcaacactggttacgtgaagcaataagccaacttcaggcgagcgaaagcccgcggcgtgatgctgaaatcctgctggagcatgttaccggcagagggcgtacttttattctcgcctttggtgaaacgcagctgactgacgaacaatgtcagcaacttgatgcgctactgacacgtcgtcgcgatggtgaacccattgctcatttaaccggggtgcgagaattctggtcgttgccgttatttgtttcgccagcgaccttaattccgcgcccggatacggagtgtctggtggagcaggcactggcgcggttgcctgaacaaccttgccgtattctcgatctcgggacgggtaccggggcgattgcgcttgcgctggctagcgagcgcccggactgcgaaattatcgctgtagatcgtatgcctgatgctgtctccctggcacaacgtaatgcccagcatctggcgatcaaaaatatccacattctgcaaagcgactggtttagcgcgctagccgggcagcagtttgcgatgattgtcagcaatccgccgtatattgacgagcaggacccacatcttcaacaaggcgatgtccgctttgagccgctcactgcgctggttgcggcagacagtggaatggcagacatcgtgcatatcatcgaacagtcgcgtaacgcgctggtatccggcggctttctgcttctggaacatggctggcagcagggcgaagcggtgcgacaagcatttatcctcgcggggtatcatgacgtcgaaacctgccgtgactatggtgataacgagcgcgtaacgctcggccgctattatcaatga

SEQ ID NO: 471474 - DNA, 393 bp, Shigella flexneri; identical to SEQ ID NO: 459656

SEQ ID NO: 471475 - DNA, 810 bp, Shigella flexneri
atgagatcgttagctgatttcgaatttaataaagcgccattgtgcgaaggcatgatcctggcttgcgaagcaatccgccgcgattttccctcgcaagatgtttacgacgaactggagcgtctcgttagtctggcgaaggaagaaatcagccagcttctgcctttagaagagcagctggaaaaactgatcgcgctgttttacggcgactggggatttaaagcctcacgcggcgtttatcgtctttccgatgcattatggctggaccaggtgttaaagaatcgacagggcagtgcggtatcattaggtgcggttttattatgggtcgcgaatcgtctcgatttgccgctgctgccggtgattttccctacgcagctgatattgcgcattgaatgtccggatggcgaaatttggctgattaatccttttaacggtgaatcgttaagcgaacatatgctggacggatggttaaagggaaatatcagcccgtcggcggaactgttttatgaagaccttgatgaagctgataacattgaggtaatccgcaaattgctggatacactcaaagcctcgttgatggaagaaaatcagatggagctggcgttacgcaccagcgaagctttattacaattcaaccctgaagatccctatgaaattcgcgatcgcgggttgatttatgcgcaactggattgcgaacacgttgcgttgaacgatttaagttatttcgttgaacagtgtccggaagacccgatcagcgaaatgatccgtgcgcaaataaataacatcgcgcataaacatattgtgctgcattaa

SEQ ID NO: 471476 - DNA, 855 bp, Shigella flexneri
atgaaacaaaaagtggttagcattggcgacatcaacgtagcaaatgacctgccgttcgtactgtttggcggtatgaacgtgctggaatctcgcgatctggcgatgcgcatttgcgagcactacgtaactgtgacccagaaactgggtatcccttacgtgttcaaagcctcttttgacaaagccaaccgctcctccatccactcttatcgtggaccgggcctggaagaagggatgaaaatcttccgggagttgaagcagacttttggcgtgaaaattatcaccgacgttcacgaaccaagtcaggcacagcccgttgctgatgtcgtggatgtgattcagttgccggcgtttcttgctcgccagactgacctggttgaagccatggcgaaaaccggtgcggtaattaacgtcaagaaaccacagtttgtcagcccgggacagatgggtaatatcgttgataaattcaaagaaggcggcaacgaaaaagtgattctttgcgatcgtggtgctaacttcggctatgacaacctggttgtcgatatgctgggcttcagcattatgaagaaagtgtctggtaactcgccggtgattttcgacgtgacccacgcactgcaatgccgcgatccgtttggcgcagcttccggtggtcgtcgtgctcaggtggctgagctggcacgagccggtatggcggtaggtctggcggggctgtttattgaagcgcatccggatccggaacatgcgaaatgtgatggtccatccgcgctgccgctggctaaactggaaccgttcctcaagcagatgaaagcgattgatgatctggtgaaaggtttcgaagaactggataccagcaagtaa

SEQ ID NO: 471477 - DNA, 1101 bp, Shigella flexneri
atgtcaaatgctcaagaggcggtaaaaacccgccacaaggagacttcgcttattttcccggttctggtgctggtagtgctgttcctgtggggaagtagccagacactaccagtggtcattgccatcaatcttcttgcgcttattggtattttaagtagcgcctttagtgttgtccgtcatgcggacgtattagcccatcgcctgggagaaccttacggttcgcttattcttagcctttcagtggttattcttgaagtcagtttgatttcagctttaatggcaaccggcgacgccgcgccaacgctaatgcgtgatacgctctattcaatcattatgattgttaccggtgggctggttggcttttcattattgttgggcggtcgtaagtttgccacccaatatatgaatctgtttggtatcaagcagtatttaattgcgctgttccccctggcgataatcgtactggtatttccaatggctctgcctgcggcgaatttttcaaccggtcaggcgttactggtagcattaatttctgcggcaatgtatggcgtatttttgctgatccaggccaaaacgcatcaaagtttgtttgtctacgagcacgaagatgacagtgatgacgacgacccgcaccacggtaaaacgtctgcccatagcagcctgtggcatgctatctggttgattatccatctgattgccgttattgcagtcaccaaaatgaacgccagctcgctggagacattgctcgacagcatgaatgcccctgttgcctttactggcttcctggtggcactgttgattctgtcgccggaaggtttaggtgcgttaaaagcagtgttgaacaaccaggttcagcgcgcgatgaatctgttctttggttcagtgttagcaacaatttcgcttaccgtacctgtcgtcacgctaattgcctttatgacgggtaacgaattgcagtttgcacttggtgcgccagaaatggtggtgatggtggcctctttagtgctgtgccatatctccttctccaccggacgtactaacgtgctcaatggcgcagcgcatctggcactgtttgccgcctatttgatgacgatatttgcctga

SEQ ID NO: 471478 - DNA, 231 bp, Shigella flexneri
atgccgtataaaacgaaaagcgatctgccggaaagcgtaaagcacgttctaccgtctcatgcccaggatatctataaagaagcgttcaacagcgcatgggatcaatataaagataaagaagatcggcgtgatgacgccagtcgcgaagaaaccgcgcataaagtggcctgggctgctgtgaagcatgaatatgccaaaggggatgatgataaatggcataaaaaatcgtaa

SEQ ID NO: 471479 - DNA, 717 bp, Shigella flexneri
atgcagtggcggaggtgtaaggtgataacgcgtgatttcttgatgaatgccgattgtaaaacggcatttggtgccattgaagaatcactcttatggtcagcagaacaacgggcggcttcgctggcggcgacgctggcttgtcgacctgatgagggaccggtgtggatcttcggttatggatcgttgatgtggaatccggcactggagtttaccgaatcatgcaccggtacactggttggatggcatcgcgcgttttgcctgcgcctgaccgccgggcgcgggactgcgcaccagccgggacggatgcttgcactgaaagagggcggacgcaccacaggcgtcgcctatcgactaccagaagagacgctggagcaggaactaaccctgttgtggaagcgcgagatgattaccggctgttatctgccaacctggtgtcagcttgatcttgatgatggacgcacagtaaacgccattgtgtttattatggacccgcgacatccagaatatgaatctgacactcgcgctcaggtcatcgcgccgttgattgcggcggcgagcggtccgctgggaaccaatgcacaatacctgttttcactggaacaggagcttatcaaactgggaatgcaggacgatgggctgaatgatttgctggtatcggtaaaaaaactactggcggagaattatccggatggtgtgttaaggccgggattcgcctga

SEQ ID NO: 471480 - DNA, 354 bp, Shigella flexneri
atgcaaaaaatcgtgatcgttgccaatggcgcaccttacgggagcgaatccttgtttaacagcttgcggctggccattgcgttacgagagcaggagagcaatctggatctgcgtctgttcctgatgtctgatgcggtcacagccgggttgcgcgggcaaaaaccaggggaaggctacaacattcagcaaatgctggagatccttaccgctcagaatgtaccggtgaaattgtgcaaaacctgtaccgacgggcgcgggattagcacacttcctctgattgatggggtggaaatcggtactcttgtggaactggcgcaatggacgctgtcagccgataaagtgctcacattttaa

SEQ ID NO: 471481 - DNA, 1395 bp, Shigella flexneri
ttgagccgtttcgttcctcgcattatcccgttttatttactcttgcttgtagcaggcggtacagctaacgcacaatctaccttcgagcaaaaagcggcaaatccctttgataataacaatgatggtctgccggatttaggcatggctcccgaaaatcatgatggggaaaaacactttgctgaaattgtgaaagatttcggcgaaaccagtatgaatgataacgggctggatactggcgagcaggcaaaagctttcgcattgggaaaagtccgcgacgcgcttagtcaacaggttaatcagcacgtagagtcctggctatcaccgtggggaaatgccagtgttgacgtcaaagtggataacgaaggacatttcaccggcagtcgtggaagctggtttgtgccgttacaagataatgatcgttatctcacctggagccagcttggtcttactcagcaggataatgggttggtgagcaatgtgggcgttgggcaacgctgggcgcgcggcaactggctggtgggttataacactttttatgacaacttgcaggacgaaaatcttcagcgagcgggctttggtgccgaagcgtggggcgaatatttgcgattatcggcaaacttttatcagccgtttgctgcatggcatgaacagacagccacgcaggaacaacggatggcgcgtgggtacgacctgacagctcggatgcgcatgccgttctatcaacacctcaataccagtgtcagcctagaacagtattttggtgatcgtgttgatttgtttaactctggtacgggttatcacaatcccgtcgcgttgagtctgggattaaattacacccctgtgccattagtcactgtgacggcccagcataaacagggggaaagtggcgaaaatcaaaataacctcgggctgaatcttaattaccgctttggtgtaccgctcaaaaaacaactttctgcgggcgaggttgccgaaagtcagtcgttacgtggtagtcgctatgacaatccgcagcgaaataatctaccgactcttgagtaccgacagcgaaaaacgttaacggtgtttctggcgacaccgccgtgggatctaaaacctggcgaaacagtgccgctgaaattacaaatccgcagtcgttacggtattcggcaactgatttggcagggcgatacgcagatattaagtttgacgccgggcgcacaagccaacagcgcggagggctggacgctgatcatgcctgactggcagaacggggaaggggcaagcaatcactggcgattgtctgtggtggtggaagataaccaggggcagcgtgtctcctccaatgagatcacgctaacgcttgtcgaaccgttcgatgcattgtcaaacgacgaactgcgctgggaaccgtaa

SEQ ID NO: 471482 - DNA, 651 bp, Shigella flexneri
atgagtaatcaggaaccggctactatcctgctgattgacgatcacccgatgctgcgaactggcgtaaaacagcttatcagtatggcaccagatatcaccgtggttggcgaagcgagtaatggcgaacagggtattgaactggcggaatctcttgatcccgatctgatcctgttagatctcaatatgcccggcatgaacggtctggaaacgctggataaactgcgcgaaaagtccctctcagggcgcattgtggtattcagcgtctctaaccatgaagaagatgtggtcaccgcactgaaacgcggcgcggatggctatctgttaaaagatatggaaccggaagatctgctgaaagcattgcatcaggcagctgctggcgaaatggtattaagcgaagcattaacgcctgttctggccgccagcttgcgcgctaaccgtgccactactgagcgcgatgttaaccagttaaccccacgcgagcgcgatattctcaagctgattgcccagggtttgccgaacaagatgattgcccgccgcctggatatcaccgaaagcacagtaaaagtgcacgtcaagcacatgctgaagaaaatgaagctcaagtctcgcgtggaagcagcggtatgggtgcatcaggagcgcattttctga

SEQ ID NO: 471483 - DNA, 1797 bp, Shigella flexneri
atgcttaaacgttgtctctctccgctcaccctggttaatcaggttgcgcttattgtgttgctttctactgctattggactggcagggatggcggtttctggctggctggtgcaaggcgttcagggcagcgcccatgcgatcaacaaagcgggatcgctgcgcatgcaaagttaccgtctgttggcggcagtgccattaagcgagaaagacaagcccttaattaaagagatggaacaaacggcatttagcgccgagttgactcgagcagcagaacgagacggacaactggcgcaattacagggtttacaagattactggcgtaatgaactgatccctgcgctgatgcgtgcacaaaaccgagaaacggtgtcagcggatgtcagccagtttgttgccgggcttgatcagctggtatctggttttgaccgcaccacggaaatgcgtattgagacagtggtactggtccatcgggtaatggcggtatttatggcacttttactggtgttcactattatctggttgcgggcgcgactgctacaaccgtggcggcaactgctggcaatggcgagtgccgtcagccatcgcgattttacccaacgcgcaaacatcagcgggcgcaacgaaatggcgatgcttggaactgcgttgaacaatatgtctgcagaactggccgaaagttatgccgtacttgagcagcgggttcaggagaaaaccgccgggctggagcataaaaatcagatcctctcttttttatggcaggctaaccgccgtttgcattcccgcgccccgctgtgtgaacgcctgtcaccggtactcaacggcttacagaatttaaccctgctacgtgatatcgaactgcgggtgtatgacactgatgatgaagagaatcatcaggagtttacctgccagccagatatgacttgtgatgataaaggctgccagctctgcccgcgcggcgtattacccgttggtgatcgcggcacgaccctgaagtggcggctggctgactctcatacgcagtacggtattttgctggcgaccctgccgcaggggcgtcatcttagccatgatcaacaacaactggtggataccctggttgaacaacttaccgccacgctggcgctggatcgccatcaggaacgtcagcaacagttgatcgtgatggaagagcgtgccaccattgcgcgcgaactgcatgattctattgcccaatctctctcttgcatgaagatgcaggtgagttgtttacagatgcagggcgatgcgctgccagaaagcagccgcgaactgttaagtcagatccgtaacgaactgaatgcatcctgggcgcagttgcgtgaattgctcaccacattccgcttgcagctcaccgagcctggattacgtccggcgctggaagcgagttgcgaagagtacagcgccaaatttggcttcccggtgaagctggattatcaattgccgcctcgtctggtgccttcacatcaggcaatccacttgttgcaaattgcccgtgaggcattaagtaacgccctcaaacattcgcaagcgagtgaggtcgtggtgacggtggcgcaaaacgataatcaggtcaaactgaccgtccaggataacggctgcggcgtgcctgaaaatgccatccgcagcaatcactacggcatgataataatgcgcgaccgtgcgcaaagtttacgaggcgattgccgcgtccgccgtcgtgaatcaggtggcaccgaagtggtggtcacctttattcccgaaaaaactttcacagacgtccaaggagatacccatgagtaa

SEQ ID NO: 471484 - DNA, 219 bp, Shigella flexneri
atgagcaataaccttaatgaatgtgacgatatattctggaatggcagtattctcggctattggctgaagtatacccatagccggaaagagttactccttatttgccgtgtggttagtcgctttacatcggtaagggtagggattctacagcaccgtgaaaaatctcataatttttatgaaatcactgtactcactatgggtaatgataaatatcaatga

SEQ ID NO: 471485 - DNA, 1392 bp, Shigella flexneri
atgagtcactcatctgcctccgaaagggctactggagctgtcataacagattggcgaccggaagatcctgcgttctggcaacaacgcggtcaacgtattgccagccgcaacctgtggatttccgttccctgtctgctgctggcgttttgcgtatggatgttgttcagcgctgttgcggtgaacttaccgaaagtcggttttaattttacgaccgatcagctatttatgttgactgcgctgccttcggtttctggcgcgttattacgtgttccatactcctttatggttcctatcttcggtggtcgtcgctggacggcgttcagcaccggtattctgattattccttgcgtctggctgggttttgccgtgcaggatacctccacgccttatagcgtcttcatcatcatctctctgctatgcggctttgctggcgcgaacttcgcatccagtatggcaaacatcagcttcttctttccgaaacagaagcagggtggcgcgctgggtctgaatggtggtctgggaaacatgggcgtcagcgtcatgcagttggttgctccgctggtggtatcactgtcgattttcgcagtatttggtagccagggcgtcaaacagccggatgggactgagctgtatctggcgaatgcgtcctggatatgggtgccgttccttgccatcttcaccattgcggcgtggtttggcatgaacgatcttgctacctcgaaagcctccatcaaggagcagttgccggtactcaaacggggtcatctgtggattatgagcctgctgtatctggcaaccttcggctccttcatcggcttctccgcgggctttgcgatgctgtcaaaaacgcagttcccggatgttcagattctgcaatacgctttcttcgggccgtttattggtgcgctggcgcgttctgcaggtggtgcattatctgaccgtctgggcggaactcgtgtcacgctggtgaactttattctgatggcgattttcagcggcctgctgttcctgaccttaccgactgacgggcagggcggaagcttcatggcgttcttcgcggtcttcctggcgctgttcctgacagctgggctgggtagtggttccactttccagatgatttcagtgatcttccgtaaactgacaatggatcgcgtgaaagcagaagggggttctgacgaacgtgcgatgcgtgaagcggcaaccggcacggcagcggcgctgggtttcatctctgcgattggcgcgattggtggcttctttatcccgaaagcgtttggtagctcgctggcattaacgggttcgccagtaggtgcaatgaaagtatttttgattttctatatcgcctgcgtagtgattacttgggcggtatatggtcggcattctaaaaaataa

SEQ ID NO: 471486 - DNA, 3744 bp, Shigella flexneri
atgagtaaattcctggaccggtttcgctacttcaaacagaagggtgaaacctttgccgatgggcatggccagcttctcaataccaaccgtgactgggaggatggatatcgccagcgttggcagcatgacaaaatcgtccgctctacccacggggtaaactgcaccggctcctgcagctggaaaatctacgtcaaaaacggtctggtcacctgggaaacccagcagactgactatccgcgtacccgtccggatctgccaaaccatgaacctcgcggctgcccgcgcggtgccagctactcctggtatctttacagtgccaaccgcctgaaatacccgatgatgcgcaaacgcctgatgaaaatgtggcgtgaagcgaaggcgctgcatagcgatccggttgaggcatgggcttctatcattgaagacgccgataaagcgaaaagctttaagcaggcgcgtggacgcggtggatttgttcgttcttcttggcaggaggtgaatgaactgatcgccgcatctaacgtttacaccatcaaaaactacggcccggaccgtgttgctggtttctcgccaattccggcaatgtcgatggtttcttacgcatcgggtgcacgctatctctcgctgattggcggtacttgcttaagcttctacgactggtactgcgacctgcctcctgcgtctccgcaaacctggggcgagcaaactgacgtaccggaatctgctgactggtataactccagctacatcatcgcctggggttcaaacgtgccgcagacgcgtaccccggatgctcacttctttactgaagtgcgttacaaaggcaccaaaactgttgccgtcacaccagactacgctgaaatcgccaaactgtgcgatctgtggctggcaccgaaacagggcaccgatgcggcaatggcgctggcgatgggccacgtaatgctgcgtgaattccacctcgacaacccaagccagtatttcaccgactatgtgcgtcgctacaccgacatgccgatgctggtgatgctggaagaacgcgacggttactacgctgcaggtcgtatgctgcgcgctgctgatctggttgatgcgctgggccaggaaaacaatccggaatggaaaactgtcgcctttaataccaatggcgaaatggttgcgccgaacggttctattggcttccgctggggcgagaagggcaaatggaatcttgagcagcgcgacggcaaaactggcgaagaaaccgagctgcaactgagcctgctgggtagccaggatgagatcgctgaggtaggcttcccgtactttggtggcgacggcacggaacacttcaacaaagtggaactggaaaacgtgctgctgcacaaactgccggtgaaacgcctgcaactggctgatggcagcaccgccctggtgaccaccgtttatgatctgacgctggcaaactacggtctggaacgtggcctgaacgacgttaactgtgcaaccagctatgacgatgtgaaagcttataccccggcctgggccgagcagattaccggcgtttctcgcagccagattattcgcatcgcccgtgaatttgccgataacgctgataaaacgcacggtcgttcgatgattatcgtcggtgcggggctgaaccactggtatcacctcgatatgaactatcgtggtctgatcaacatgctgattttctgcggctgtgtcggtcagagcgggggcggctgggcgcactatgtaggtcaggaaaaactgcgtccgcaaaccggctggcagccgctggcgtttgcccttgactggcagcgtccggcgcgtcacatgaacagcacttcttatttctataaccactccagccagtggcgttatgaaaccgtcacggcggaagagttgctgtcaccgatggcggacaaatcccgctataccggacacttgatcgactttaacgtccgtgcggaacgcatgggctggctgccgtctgcaccgcagttaggcactaacccgctgactatcgctggcgaagcggaaaaagccgggatgaatccggtggactatacggtgaaatccctgaaagagggttccatccgttttgcggcagaacaaccagaaaacggtaaaaaccacccgcgcaacctgttcatctggcgttctaacctgctcggttcttccggtaaaggtcatgagtttatgctcaagtacctgctggggacggagcacggtatccagggtaaagatctggggcaacagggcggcgtgaagccggaagaagtggactggcaggacaatggtctggaaggcaagctggatctggtggttacgctggacttccgtctgtcgagcacctgcctctattccgacatcattttgccgacggcgacctggtacgaaaaagacgacatgaatacttcggatatgcatccgtttattcacccgctgtctgcggcggtcgatccggcctgggaagcgaaaagcgactgggaaatctacaaagccatcgcgaagaaattctccgaagtgtgcgtcggctatctgggtaaagaaaccgacatcgtcacgctgcctatccagcacgactctgccgctgaactggcgcagccgctggatgtgaaagactggaaaaaaggcgaatgcgacctgatcccaggcaaaactgcaccgcacattatggtcgtagagcgcgattatccggcaacttacgaacgctttacctctatcggcccgctgatggagaaaatcggtaacggcggtaaagggattgcctggaacacccagagcgagatggatctgctgcgtaagctcaactacaccaaagcggaaggtccggcaaaaggccagccgatgctgaacaccgcaattgatgcggcagagatgatcctgacgctggcaccggaaaccaacggtcaggtagccgtgaaagcctgggctgccctgagcgaatttaccggtcgtgaccatacgcatctggcgctgaataaagaagacgagaagatccgcttccgcgatattcaggcacagccgcgcaaaattatctccagcccgacttggtctggtctggaagatgaacacgtttcttacaacgccggttacaccaacgttcacgagctgatcccatggcgtacgctctctggtcgtcagcaactgtatcaggatcaccagtggatgcgtgatttcggtgaaagcctgctggtttatcgtccgccgatcgacacccgttcggtgaaagaagtgataggccagaaatccaacggcaacccggaaaaagcgctcaacttcctgacgccgcaccagaagtggggtatccactccacctacagcgacaacctgctgatgctgactttaggtcgcggtggtccggtggtctggttgagtgaagccgatgccaaagatctgggtatcgccgataacgactggattgaagtcttcaacagcaacggtgcactgactgcccgtgcggttgtcagccagcgtgttccggcagggatgaccatgatgtaccacgcgcaggaacgtatcgttaacctgcctggttcggaaattacccaacagcgtggtggtatccataactcggtcacccgtatcacgccgaaaccgacgcatatgatcggcggctatgcccatctggcatacggctttaactactacggcaccgtaggttctaaccgcgatgagtttgttgtagtgcgtaagatgaagaacattgactggttagatggcgaaggcaatgaccaggtacaggagagcgtaaaatga

SEQ ID NO: 471487 - DNA, 1539 bp, Shigella flexneri
atgaaaattcgttcacaagtcggcatggtgctgaatctcgataagtgcatcggctgccacacctgttcagttacctgtaaaaacgtctggaccagccgtgaaggcgtggaatacgcgtggttcaacaacgtggaaaccaagccgggccagggcttcccgactgactgggaaaaccaggaaaaatacaaaggcggctggatccgtaaaatcaatggcaaactgcaaccgcgcatgggtaaccgagccatgctgctgggtaaaatctttgctaacccgcatctgccggggatcgacgattattacgagccgttcgattttgattatcagaacctgcataccgcgccggaaggcagcaaatcgcagccgattgcccgtccgcgttcgctgattaccggggaacggatggcgaaaatcgaaaaagggccgaactgggaagatgacctgggcggtgagtttgataaactggcgaaagacaagaacttcgacaacatccagaaggcgatgtatagccagttcgaaaacacctttatgatgtatttgccgcgcctgtgcgaacactgcctgaacccggcatgtgtggcgacctgcccgagcggtgcgatttacaagcgtgaagaagatggcatcgtcctgatcgaccaggataaatgccgtggctggcgtatgtgcatcaccggatgcccgtacaaaaaaatctacttcaactggaagagcggtaagtctgagaagtgcatcttctgctatccgcgtattgaagcgggtcagccgaccgtgtgctcagaaacctgtgtcggtcgtatccgttatcttggcgtgctgctgtacgatgccgacgcgattgaacgtgcagccagcaccgagaacgagaaagatctctaccagcgtcagctggacgtgttcctcgatccgaacgatccgaaagtcatcgagcaggcgattaaagacggtattccgctgagcgttattgaagctgcacagcagtcgccggtttataaaatggcgatggaatggaaactggcgctgccgctgcatccagaatatcgcacactgccgatggtctggtacgtgccgcctctgtctccgattcagtctgcagcagacgcgggcgagctgggcagcaacggaattctgccagacgtcgaaagcttgcgtattccggtacagtatctggcgaatctgctgaccgccggtgataccaaaccggtactgcgtgcgctgaaacgtatgctggcgatgcgtcattacaaacgtgctgaaactgttgacggtaaagttgatacccgtgcgctggaagaggtcggtctgaccgaagcccaggcacaggagatgtaccgttatctggcgattgctaactacgaagatcgctttgtggtgccgagtagtcatcgtgaactggcacgggaagccttcccggagaaaaatggctgcggctttacctttggtgatggctgccacggctcagataccaaattcaatctgttcaacagccgtcgtatcgatgccatcgatgtgaccagcaaaacggagccgcatccatga

SEQ ID NO: 471488 - DNA, 711 bp, Shigella flexneri
atgatcgaactcgtgattgtatcgcgtctccttgaatatccggatgctgccttatggcagcatcaacaagagatgtttgaggcgattgctgcgtcgaaaaatctgtcgaaagaagatgcccatgcgctgggcatcttcctgcgcgatttaacggcgatggatccgctcgatgcccaggtccagtacagcgaactgttcgaccgtggccgcgccacgtcactgttgctatttgaacatgttcacggtgaatcccgtgaccgcggccaggcgatggtggacctgctggcgcagtacgagcagcacggcttgcagttaaacagccgcgaattaccggaccatctgccgctgtatctggagtacctgtcgcagctgccgcaaagcgaagccgtggaaggtttgaaagatatcgcgccgattctggcattgctgagcgcgcgtctgcaacagcgtgaaagccgttatgccgtgatgtttgatctgctgctgaaattggccaataccgctatcgacagcgacaaagtggcggaaaaaattaccgacgaagcgcgcgatgatacgccgcaggcgctggatgctgtctgggaagaagagcaggttaaattctttgctgacaaaggctgcggtgattcagcaatcactgctcatcagcgtcgctttgccggtgccgtcgcgccgcaatatctgaatatcaccaccggaggacagcactaa

SEQ ID NO: 471489 - DNA, 678 bp, Shigella flexneri
atgcaattcctgaatatgttcttctttgatatctacccgtacatagccggggcggtcttcctgattggtagctggctgcgttatgactacgggcagtacacctggcgcgcggcgtccagccagatgctggatcgcaaagggatgaacctggcgtcgaacctgttccatatcggtattctggggatttttgtcggtcacttcttcggtatgttgacgccgcactggatgtatgaagcctggctgccgattgaagtgaaacagaaaatggcgatgtttgctggtggtgccagcggcgtgctgtgtctgattggcggcgtgcttttgctgaaacgtcgtatgttcagcccacgcgtgcgtgcaaccactaccggagcggatatcctgatcctgtcgctgctcgttatccagtgcgcgctgggcctgctgaccattccgttctccgctcagcatatggacggtagcgagatgatgaaactggttggctgggcgcagtcggtggtgaccttccacggtggcgcttctcaacacctcgatggtgtggcgtttatcttccgtctgcacctggtgctggggatgacgttattcctgctgttcccgttctcgcgtctggtacacatctggagcgtaccggtggagtatctgacacgtaagtaccagctggtgcgcgctcgtcactaa

SEQ ID NO: 471490 - DNA, 843 bp, Shigella flexneri
atgcattcactccaacgtaaagttctgcgtactatttgtccggaccaaaaaggtctgatcgcacgtattaccaatatttgctacaagcacgagttaaatatcgtacagaacaatgaatttgttgatcaccgtaccgggcgcttttttatgcgcacggaactggaagggatttttaatgattccaccctgctggcggatctcgatagcgcattgccagaaggctccgtgcgtgagctgaatcctgccggtcgtcgccggatagtgattctggtcactaaagaagcgcattgccttggcgatttgttgatgaaagccaattacggcggtctggatgtcgaaatcgcggcagttattggtaaccacgatactttacgttctctggttgagcgttttgatattccgtttgagctggtaagccatgaagggttaagccgcaacgagcacgatcaaaagatggcggacgccattgatgcttatcaacctgactatgtggtgctggcgaagtatatgcgggtattaacgccggaatttgtggcacgcttcccgaataaaatcatcaatattcaccattcattcctgcctgcgtttatcggcgcacgtccttatcaccaggcctatgaacgtggtgtgaagattattggcgcaaccgctcactatgtgaatgacaatctggacgaaggcccaatcatcatgcaggacgttattcatgtcgatcatacctacacagctgaagatatgatgcgcgcaggtcgtgacgtcgagaaaaacgtcttaagtcgtgcgctatacaaagtactggcgcaacgcgtctttgtttacggtaatcggacgattattctttaa

SEQ ID NO: 471491 - DNA, 459 bp, Shigella flexneri
gtgtctcagctttgtccctgtggtagtgctgtcgagtatagcctatgttgccacccttatgtgtctggtgaaaaggttgcacctgatccagaacatctcatgcgttcgcgttactgcgcttttgtgatgcaagacgctgattatttaataaagacctggcatccctcttgtggagcagcggcgttacgtgccgaattgatgaccggatttgcgcatactgaatggttgggattgaccgtatttgaacattgttggcaggacgccgacaatatcggatttgtcagttttgttgctcgatttaccgaaggtggcaaaacaggtgcaataattgaacgttcgcgatttttgaaagaaaacggtcaatggtactatattgacggtacacgtccgcagtttggtcgcaacgatccctgcccttgtggttcaggtaaaaaatttaaaaagtgctgcggccaataa

SEQ ID NO: 471492 - DNA, 945 bp, Shigella flexneri
gtggctacgattgcattccaggggaatcttgcgggaataatgagaaagataaaaatagggctggcgctgggatctggcgcggcgagaggttggtcgcatattggcgttattaatgcgctaaaaaaagtgggtattgaaattgatatcgttgcaggatgttcaattggttcgctggtgggcgcggcctatgcatgcgatcgattatctgcgctggaagattgggtaacctctttcagttattgggacgttttacgcctgatggacctctcctggcagcgcggtgggttactgcgcggcgagcgtgtcttcaatcaatatcgcgaaataatgccggaaacagagatcgaaaattgttcccgtcgctttgcggctgttgccaccaatttaagtacggggcgtgaattatggtttactgaaggcgatctccatcttgctattcgcgcatcatgcagtattccaggactcatggcacccgttgcacataacggctactggctggttgatggggcagtagttaacccaattcctatttctcttacgcgtgcattgggggctgatattgtgatagcggtcgacctgcagcacgatgctcatttgatgcaacaagatctgctctcctttaatgtcagtgaagaaaatagcgagaatggtgattctctaccgtggcatgcgcgtctgaaagaaaggttaggcagcataacgacacgtcgggctgtgacagcgccaacggcaacagagattatgaccacgtctatccaggtgttggagaaccgccttaaaaggaaccgcatggcaggtgatccgcccgatattctgattcaacctgtttgcccgcaaatatctacgcttgatttccatcgcgcgcacgctgccattgcggccggacagctggcagtggaaaggaaaatggacgaacttttgccgttggtacgcaccaacatttga

SEQ ID NO: 471493 - DNA, 1014 bp, Shigella flexneri
atgacgcagccattggtcggaaaacagattctcattgttgaagatgagcaggtatttcgctcgcttctggattcatggttttcctcattgggagcgacaacggtactggcggctgatggggtggatgcccttgagttgctgggaggtttcactccagacctgatgatatgtgatatcgcgatgccacgaatgaacgggcttaaactgctggagcatatacgtaacagaggcgaccagaccccagttctggtgatatctgccactgaaaatatggcagatattgtcaaagcgttacgtctgggcgttgaagatgttttgctgaaaccagttaaagatctgaatcgcttgcgcgagatggtttttgcctgtctctatcccagcatgtttaattcgcgcgttgaggaagaggaaaggctttttcgcgactgggatgcaatggttgataaccctgccgcagcggcgaaattattacaggaactacaaccgccggttcagcaggtgatttcccattgccgggttaattaccgtcaattggttgccgcggacaaacccggcctggtgcttgatattgctgcactttcggaaaacgatctggcattttattgccttgatgtcacccgagctggacataatggcgtacttgctgccttgttattacgcgcattgtttaacggattattacaggaacagcttgcacaccaaaatcaacggttgccagagttgggcgcgttattgaagcaggtaaaccatttacttcgtcaggccaatctgccggggcagtttccgctattagttggctattatcatcgcgaactgaaaaatctcattctggtttctgcgggtctgaatgcgacgttaaataccggcgaacaccaggtgcaaatcagtaatggtgttccgttaggcactttaggtaacgcttatttgaatcaattgagccagcgatgcgatgcctggcaatgccaaatatggggaaccggtggtcgactgcgcttgatgttgtctgcagaatga

SEQ ID NO: 471494 - DNA, 909 bp, Shigella flexneri
atggctgccattaatacgaaagtcaaaaaagccgttatccccgttgcgggattaggaaccaggatgttgccggcgacgaaagccatcccgaaagagatgctgccacttgtcgataagccattaattcaatacgtcgtgaatgaatgtattgcggctggcattactgaaattgtgctggttacacactcatctaaaaactctattgaaaaccactttgataccagttttgaactggaagcaatgctggaaaaacgtgtaaaacgtcaactgcttgatgaagtgcagtctatttgtccaccgcacgtgactattatgcaagttcgtcagggtctggcgaaaggcctgggacacgcggtattgtgtgctcacccggtagtgggtgatgaaccggtagctgttattttgcctgatgttattctggatgaatatgaatccgatttgtcacaggataacctggcagagatgatccgccgctttgatgaaacgggtcatagccagatcatggttgaaccggttgctgatgtgaccgcatatggcgttgtggattgcaaaggcgttgaattagcgccgggtgaaagcgtaccgatggttggtgtggtagaaaaaccgaaagcggatgttgcgccgtctaatctcgctattgtgggtcgttacgtacttagcgcggatatttggccgttgctggcaaaaacccctccgggagctggtgatgaaattcagctcaccgacgcaattgatatgctgatcgaaaaagaaacggtggaagcctatcatatgaaagggaagagccatgactgcggtaataaattaggttacatgcaggccttcgttgaatacggtattcgtcataacacccttggcacggaatttaaagcctggcttgaagaagagatgggcattaagaagtaa

SEQ ID NO: 471495 - DNA, 414 bp, Shigella flexneri
atgagcgaagcacttaaaattctgaacaacatccgtactcttcgtgcgcaggcaagagaatgtacacttgaaacgctggaagaaatgctggaaaaattagaagttgttgttaacgaacgtcgcgaagaagaaagcgcggctgctgctgaagttgaagagcgcactcgtaagctgcagcaatatcgcgaaatgctgatcgctgacggtattgacccgaacgaactgctgaatagccttgctgccgttaaatctggcaccaaagctaaacgtgctcagcgtccggcaaaatatagctacgttgacgaaaacggcgaaactaaaacctggactggccaaggccgtactccagctgtaatcaaaaaagcaatggatgagcaaggtaaatccctcgacgatttcctgatcaagcaataa

SEQ ID NO: 471496 - DNA, 618 bp, Shigella flexneri
atggcacagctatatttctactattccgcaatgaatgcgggtaagtctacagcattgttgcaatcttcatacaattaccaggaacgcggcatgcgcactgtcgtatatacggcagaaattgatgatcgctttggtgccgggaaagtcagttcgcgtataggtttgtcatcgcctgcaaaattatttaaccaaaattcatcattatttgatgagattcgtgcggaacatgaacagcaggcaattcattgcgtactggttgatgaatgccagtttttaaccagacaacaagtatatgaattatcggaggttgtcgatcaactcgatatacccgtactttgttatggtttacgtaccgattttcgaggtgaattatttattggcagccaatacttactggcatggtccgacaaactggttgaattaaaaaccatctgtttttgtggccgtaaagcaagcatggtgctgcgtcttgatcaagcaggcagaccttataacgaaggtgagcaggtggtaattggtggtaatgaacgatacgtttctgtatgccgtaaacactataaagaggcgttacaagtcggctcattaacggctattcaggaaaggcatcgccacgattaa

SEQ ID NO: 471497 - DNA, 354 bp, Shigella flexneri
atgccactgctggataagctgcgtgagcagtacgggggcggaccgctatgcagtgaactgcatattgccccgtcaacgtattaccactgtcagcaacagcgacatcatccggataaacgcagtgcccgtgcgcagcgcgatgactggctgaagaaagagatacagcgcgtatacgatgaaaatcacaaggtatacggtgtaaagtctggcgtcagttgttacgggaaggtatcagagtggccagatgcactgtggcacgtctcatggcggttatgggacttgccggtgttctccggggtaaaaaggtccgtacgaccatcagccggaaagccgttgccgcaggcgaccgcgtaa

SEQ ID NO: 471498 - DNA, 327 bp, Shigella flexneri
atgactaaaaatactcgtttttcccccgaagtccgtcaacgggcagtccgtatggttctggaaagtcagggcgaatatgactcacaatgggcgacaatttgttccattgccccaaagattggctgtacgccggagactctgcgtgtctgggttcgccagcatgagcgggataccgggggcggtgatggagggctcaccaccgctgaacgtcagcgtctgaaagagccggagcgtgaaaatcgtgaactgcgccgcagtaacgatatccttcgccaggcttccgcttattttgcgaaggcggagttcgaccgcctctggaaaaaatga

SEQ ID NO: 471499 - DNA, 1116 bp, Shigella flexneri
atgttcccaaaaataatgaatgatgaaaactttttcaaaaaagcggcggcgcatggggaggaacctcctttaactcctcaaaacgaacatcagcggtccgggctgcgcttcgcccgtcgcgtcagactaccccgtgcggttggcctggctggcatgttcttaccgattgcttcaacgctggtttcgcacccgccgccgggctggtggtggctggtgttggtcggctgggcgttcgtctggccgcatttagcctggcagatagcgagcagggccgtcgatccgcttagccgggaaatttacaacttaaaaaccgatgcagtattagcgggaatgtgggtaggcgtaatgggcgtaaacgtgctgccttccaccgctatgttgatgattctgtgtctgaatttgatgggggcaggcggcccccgtctgtttgtcgcgggtctggtgttgatggtggtttcctgccttgtcaccctcgagcttacgggcattaccgtgtcgttcaatagtgctccgctggaatggtggctctcccttcccattattgtcgtttatcctctgatgtttggctgggtcagctaccagacggcaaccaaactggcggaacataaacgcaggttgcaggtcatgagtactcgcgacggcatgacgggcgtgtataaccgacgtcattgggaaactatgttacgcaatgaatttgataactgtcggcggcataatcgcgatgcaacgttactgattatcgatatcgaccatttcaagagcatcaacgatacctggggtcatgatgtgggcgatgaagcgattgtggcgcttacccgacagttacaaattaccctgcgcggtagcgatgtgattggtcggtttggcggcgatgagtttgcagtaatcatgtccggtacgccagttgagagcgccattaccgccatgttacgggtgcgtgaagggctaaacacgttacgcttgccgaatacgccacaggtaactttacggattagtgtgggggttgcgccgctgaacccacaaatgagtcactatcgtgagtggttgaaatcggcagatttggcgctttacaaagcaaagaaagccggacgtaaccgcaccgaagtggcggcctga

SEQ ID NO: 471500 - DNA, 810 bp, Shigella flexneri
atggaaaagaaaatcggttttattggctgcggcaatatgggaaaagccattctcggcggtctgattgccagcggtcaggtgcttccagggcaaatctgggtatacaccccctccccggataaagtcgccgccctgcatgaccagttcggcatcaacgccgcagaatcggcgcaagaagtggcgcaaatcgccgacatcatttttgctgccgttaaacctggcatcatgattaaagtgcttagcgaaatcacctccagcctgaataaagactctctggtcgtttctattgctgcaggtgtcacgctcgaccagcttgcccgcgcgctgggccatgaccggaaaattatccgcgccatgccgaacactcccgcgctggttaatgccgggatgacctccgtaacgccaaacgcgctggtaaccccagaagataccgctgatgtgctgaatattttccgctgctttggcgaagcggaagtaattgctgagccgatgatccacccggtggtcggtgtgagcggttcttcgccagcctacgtatttatgtttatcgaagcgatggccgacgccgccgtgctgggcgggatgccacgcgcccaggcgtataaatttgccgctcaggcggtaatgggttccgcaaaaatggtgctggaaacgggagaacatccgggggcactgaaagatatggtctgctcaccgggaggcaccaccattgaagcggtacgcgtactggaagagaaaggcttccgtgccgcagtgatcgaagcgatgacgaagtgtatggaaaaatcagaaaaactcagcaaatcctga

SEQ ID NO: 471501 - DNA, 459 bp, Shigella flexneri
atgacaatttgggtggatgccgacgcgtgtcccaatgtaattaaagagattttgtatcgcgcggcggaacgtatgcagatgccgctggtactggtagcaaaccagagtttacgcgtgccgccatcgcgatttattcgtacgctgcgcgtcgcggcaggtttcgacgttgccgataacgaaattgtccggcagtgtgaagcgggcgatttggtgatcaccgcagatatacctttggctgctgaagccatcgagaaaggcgcagcggcgcttaattcgcgcggcgaacgttacacgccagcgaccattcgtgagcgcctgacgatgcgcgattttatggataccttacgtgccagtgggatccagaccggcggaccagatagcctttcacaacgtgaccgccaggcctttgccgcggagctggagaagtggtggctggaagtgcaacgtagtcgtggctaa

SEQ ID NO: 471502 - DNA, 525 bp, Shigella flexneri; identical to SEQ ID NO: 459398

SEQ ID NO: 471503 - DNA, 189 bp, Shigella flexneri
atgccaacgaaaccgccttatcctcgtgaagcatatatagtgacgattgaaaaaggaaagccaggacagacggtaacctggtaccaactcagagccgatcatcctaaaccagactcgttgatcagtgaacatccgacggctcaggaagcgatggatgcgaaaaaacgctatgaggaccctgacaaatag

SEQ ID NO: 471504 - DNA, 678 bp, Shigella flexneri
atgagtgcgtcgttggcgatcctgaccatcggcattgtacctatgcaggaggttttgccgctcctgacggaatacattgacgaagataatatttcccatcatagcctgctggggaagttaagtcgtgaagaagtgatggcggagtacgcgccagaagcaggcgaagacaccattctcacattattaaatgacaaccagctggcccatgtttcgcgtcgtaaagtggagcgagatctgcaaggtgtggttgaagtgctcgataatcagggttatgacgtcattttattaatgagtacagcaaacattagtagtatgactgcgcgtaatacgatctttcttgagccgtcgcgaatattgcctccactggtttcctctattgttgaagatcatcaggtgggggttatcgttccggttgaggagatgctgcccgttcaggcgcaaaaatggcaaattttgcagaaatcgccggtattttcattgggtaaccccattcatgattcagaacaaaaaatcattgatgctgggaaagaattactggcaaaaggggctgatgtcatcatgctggattgtttaggatttcaccaacgtcatcgcgatttactgcaaaaacagctcgatgttcctgtcttgctctctaacgtattgattgcacggctggctgcggaattactggtgtaa

SEQ ID NO: 471505 - DNA, 285 bp, Shigella flexneri
atgcttcaaagtaatgagtacttttccggcaaagtgaaatcgatcggcttttccagcagcagcactggtcgcgccagcgtgggtgttatggttgaaggcgaatacaccttcagcaccgctgagccggaagagatgacggtaatcagtggcgcgctgaatgtgttactgcctgacgcgaccgactggcaagtgtatgaagccggttcggtgtttaatgttcccggtcacagtgagtttcatcttcaagttgccgaacctacctcttatctgtgccgctatctgtaa

SEQ ID NO: 471506 - DNA, 456 bp, Shigella flexneri
atgacacaacgtccatggagcaagttacagcgggagatctatgacttactgacgccaacgatcaacctgcaaattcactgtacccgttatcccatgcgcagccaaaatggtggaagtaccgatttaccgcgttattggatcacgttggataaaaacgtgatctgggattacccgaaagactttattgcaggtaacgctggagtgcgtaattttcacggtgaaacttgctggtatccttacctgacggatatttgttcaatttctgatttattgcgtgaatatattgataccccaaaagcggagctgttaacaaaacaatttaccagcgataaatgggggttagtgaatattctgcgtgctgctgacaggcgaatagggatgaggcgattagatcagttacggcgtaaaacgcataatattgctgcgctaaaaattattgctcgccgtagcgaataa

SEQ ID NO: 471507 - DNA, 978 bp, Shigella flexneri
atgcaaggccgccgacaattcgttatcatgcccgctaaatttaacgacaaggccgtggaaattatcatgctgtggttcaaaaatttaatggtttaccgtcttagccgcgagatttcgctgcgtgcagaagagatggaaaaacagctagcctcgatggcatttaccccatgcggcagccaggacatggcgaagatgggctgggttcctccgatgggatcgcacagcgatgcgttaacgcacgttgccaatggtcaaattgttatctgcgcgcgcaaagaagaaaaaatcctcccgtctccggtgattaaacaggcgctggaagcgaaaatcgccaaactggaagcggaacaggcgcgtaagctgaagaaaaccgaaaaagattcgctgaaagacgaagtgctgcactctctgctgccgcgtgctttcagccgttttagccagacaatgatgtggctcgacacggttaacggtttgattatggtggactgcgccagtgccaaaaaagcggaagatacgctggcattactgcgtaaaagcctggggtcgttaccggttgtaccattgagcatggaaaacccgattgaactgacgctgaccgaatgggttcgctccggtagtgcggcacagggcttccagctgcttgatgaagccgagctgaaatcgttgctggaagatggcggcgtgatccgcgcgaagaaacaagatctgaccagcgaagagatcaccaatcacattgaagccggaaaagtggtgactaaactggcgctcgactggcagcagcgcattcagtttgtgatgtgcgacgatggttcgctcaagcgtcttaagttctgcgacgagctgcgcgatcaaaacgaagatatcgaccgtgaagatttcgcccagcgttttgatgccgatttcatcctgatgactggtgaactggcagcgttaattcaaaacctgattgaaggattaggtggcgaagcacaacgttaa

SEQ ID NO: 471508 - DNA, 909 bp, Shigella flexneri
gtgcgtataggtatcgatttaggcggcaccaaaactgaagtgattgcactgggcgatgcaggggagcagttgtaccgccatcgtctgcccacgccgcgtgatgattaccggcagactattgaaacgatcgccacgttggttgatatggcggagcaggcgacagggcagcgcggaacggtaggtatgggcattccaggttcgatttcgccctacaccggtgtggtgaagaatgtcaattcaacctggctcaacggtcagccattcgataaagacttaagcgcgaggttgcagcgggaagtgcggctggcaaatgatgccaactgtctggcggtttcagaagcagtagatggcgcggcagcgggagcgcagacggtatttgccgtgattatcggcacgggatgcggcgcgggcgtggcattcaatgggcggacgcatatcggcggcaatggcacggcaggtgagtggggacacaatccgctaccgtggatggacgaagacgaactgcgttatcgcgaggaagtcccttgttattgcggtaaacaaggttgtattgaaacctttatttcgggcacgggattcgcgacggattatcgtcgtttgagcggacatgcgctgaaaggcagtgaaattatccgcctggttgaagaaagcgatccggtagcggaactggcattgcgtcgctacgagctgcggctggcaaaatcgctggcacatgtcgtgaatattctcgatccggatgtgattgtcctggggggcgggatgagcaatgtagaccgtttatatcaaacggttgggcagttgattaaacaatttgtcttcggcggcgaatgtgaaacgccggtgagtaaggcgaagcacggtgattccagcggcgtacgcggcgctgcgtggttatggccacaagagtaa

SEQ ID NO: 471509 - DNA, 1278 bp, Shigella flexneri
gtgaattatctcttggccttgctggtcgttatcctgcaagctatcactttattggctacggtgattggtagccgttctggtggttgtgatggtggtatgaaaaaagtcattttatctttggctctgggcacgtttggtttggggatggccgaatttggcattatgagcgtgctcacggagctggcgcataacgtaggaatttcgattcctgctgccgggcatatgatctcgtattatgcactggtggtggtggtcggtgcgccaatcatcgcactcttttccagccgctactcactcaaacatatcttgttgtttctggtggcgttgtgcgtcattggcaacgccatgttcacgctctcttcgtcttacctgatgctcgccattggtcggctggtatccggctttccgcatggcgcattttttggcgtcggagcgatcgtgttatcaaaaattatcaaacccggaaaagtcaccgccgccgtggcggggatggtttccgggatgacagtcgccaatttgctgggcattccgctgggaacgtatttaagtcaggaatgctggcgttacacctttttattgatcgctgtttttaatattgcggtgatggcatcggtctatttttgggtgccagatattcgcgacgaggcgaaaggaaatctgcgcgaacaatttcactttttgcgcagcccggccccgtggttaattttcgccgccacgatgtttggcaacgcaggtgtgtttgcctggttcagctacgtaaagccatacatgatgtttatttccggtttttcggaaacggcgatgacctttattatgatgttagttgggctagggatggtgctgggaaatatgctaagtggcaggatttcaggacgttattcaccactgcgcattgcagcagtgactgactttatcattgtactggcactgctgatgctctttttctgcggcggcatgaaaacaacgtcgcttatttttgcttttatttgttgcgcgggattatttgccctttcagcacctctgcaaatattgttactgcaaaatgccaaaggaggagagttattaggtgccgcaggtgggcaaatagcgtttaacctcggtagcgccgtcggcgcatattgcggaggtatgatgctgacgctggggctggcatataattacgtggcgctgcctgccgccctgctttcgtttgctgcgatgtcatcgttgctgctgtatggtcgctataagcgccagcaagcggcggatagtccggtgctggcgaaaccactggggtag

SEQ ID NO: 471510 - DNA, 3144 bp, Shigella flexneri
atgaaaattctcagcctgcgcctgaaaaacctgaactcattaaaaggcgaatggaagattgatttcacccgcgagccgttcgccagcaacgggctgtttgccattaccggcccaaccggtgcggggaaaaccaccctgctggacgccatttgtctggcgctgtatcacgaaactccgcgtctctctaacgtttcacaatcgcaaaatgatctcatgacccgcgataccgctgaatgtctggcggaggtggagtttgaagtgaaaggtgaagcgtatcgcgcgttctggagccagaatcgggcgcgtaaccagccggacggtaatttgcaggtgcctcgcgtagagctggcgcgctgcgccgacggcaaaattctcgccgacaaagtgaaagataagctggaactgacagcgacgttaaccgggctggattacgggcgcttcacccgttcgatgctgctttcgcaggggcaatttgctgccttcctgaatgccaaacccaaagaacgcgcggaattgctcgagaagttaaccggcactgaaatctacgggcaaatctcggcgatggtttttgagcagcacaaatcggcccgcactgagctggagaagctgcaagcgcaggccagcggcgtcacgttgctcacgccggaacaagtgcaatcgctgacagcgagtttgcaggtacttactgacgaagaaaaacagttaattaccgcgcagcagcaagaacaacaatcgctaaactggttaacgcgtcaggacgaattgcagcaagaagccagccgccgtcagcaggccttgcaacaggcgttagccgaagaagaaaaagcgcaacctcaactggcggcgcttagtctggcacaaccggcacgaaatcttcgtccacactgggaacgcatcgcagaacacagcgcggcgctggcgcatattcgccagcagattgaagaagtaaatactcgcttacagagcacaatggcgcttcgcgcgagcattcgccaccacgcggcgaagcagtcagcagaattacagcagcagcaacaaagcctgaatacctggttacaggaacacgaccgcttccgtcagtggaacaacgaactggcgggttggcgtgcgcagttctcccaacaaaccagcgatcgcgagcatctgcggcaatggcagcaacagttaacccatgctgagcaaaaacttaatgcgcttgcggcgatcacgttgacgttaaccgccgatgaagttgctaccgccctagcgcaacatgccgagcaacgcccactgcgtcagcgcctggtcgcgctgcatgggcagattgttccccaacaaaaacgtctggcgcagttaatggtcactatccagaatgtcactctggaacagacgcaacgtaatgtcgcacttaacgaaatgcgccagcgttataaagaaaagacgcagcaacttgccgatgtgaaaaccatttgcgagcaggaagcgcgcatcaaaacgctggaagcccagcgtgcacagttacaggcgggtcagccttgtccactttgtggttccaccagccacccggcggtcgaggcgtatcaggcgctggagcctggtgttaatcagtctcgattactggcgctggaaaacgaagttaaaaagctcggcgaagaaggtgcggcgctgcgcgggcaactggatgcattaacgaagcagcttcagcgcgatgaaaacgaagcgcaaagcctccgacaagatgagcaagcacttactcaacaatggcaagccgtcacggccagcctcaatatcaccttgcagccacaggacgatattcaaccgtggctggatgcacaagatgagcacgaacgccagctgcggttactcagccaacgacatgaattacaagggcagattgccgcgcataatcagcaaattatccagtatcaacagcaaattgaacaacgtcagcagcagctcttaacggcattggcgggttatgcactgacattgccacaggaagatgaagaagagagctggttggcgacacgtcagcaagaagcgcagagctggcagcaacgccagaacgaattaaccgcgctgcaaaaccgtattcagcagctgacaccgattctggaaacgttgccgcaaagtgatgatctcccgcacagcgaagaaactgtggcgctggataactggcggcaggttcatgaacaatgtctcgcattacacagccagcagcagacgttacagcaacaggatgttctggcggcgcaaagtctgcaaaaagcccaagcgcagtttgacaccgcgctacaggccagcgtctttgacgatcagcaggcgttccttgcggcgctaatggatgaacaaacactaacgcagctggaacagctcaagcagaatctggaaaaccagcgccgtcaggcgcaaacgctggtcactcagacagcagaaacgctggcacagcatcaacaacaccgacctgacgggttggctctcactgtgacggtggagcagattcagcaagagttagcgcaaactcaccaaaagttgcgtgaaaacaccacgagtcaaggcgagattcgccagcagctgaagcaggatgcagataaccgtcagcaacaacaaaccttaatgcagcaaattgctcaaatgacgcagcaggttgaggactggggatatctgaattcgctaataggttccaaagagggcgataaattccgcaagtttgcccaggggctgacgctggataatttagtccatctcgctaatcagcaacttacccggctgcacgggcgctatctgttacagcgcaaagccagcgaggcgctggaagtcgaggttgttgatacctggcaggcagatgcggtacgcgatacccgtaccctttccggcggcgaaagtttcctcgttagtctggcgctggcgctggcgctttcggatctggtcagccataaaacacgtattgactcgctgttccttgatgaaggttttggcacgctggatagcgaaacgctggataccgcccttgatgcgctggatgccctgaacgccagtggcaaaaccatcggtgtgattagccacgtagaagcgatgaaagagcgtattccggtgcagatcaaagtgaaaaagatcaacggcctgggctacagcaaactggaaagtacgtttgcagtgaaataa

SEQ ID NO: 471511 - DNA, 1203 bp, Shigella flexneri
atgcgcatccttcacacctcagactggcatctcggccagaacttctacagtaaaagccgcgaagctgaacatcaggcttttcttgactggctgctggagacagcacaaacccatcaggtggatgcgattattgttgctggtgatgttttcgataccggctcgccgcccagttacgcccgcacgttatacaaccgttttgttgtcaatttacagcaaactggctgtcatctggtggtactggcaggaaaccatgactcggtcgccacgctgaatgaatcgcgcgatatcatggcgttcctcaatacaaccgtggtcgccagcgccggacatgcgccgcaaatcttgcctcgtcgcgacgggacgccaggcgcagtgctgtgccccattccgtttttacgcccgcgtgacattatttccagccaggcggggcttaacggtattgaaaaacagcagcatttactggcagcgattaccgattattaccaacaacactatgccgatgcctgcaaactgcgcggcgatcagcctctgcccatcatcgccacgggacatttaacgaccgtgggttccagtaaaagtgacgccgtgcgtgacatttatattggcacgctggacgcgtttccggcacaaaactttccaccagccgactacatcgcgctcgggcatattcaccgcgcacagattattggcggcatggaacatgttcgctattgcggttcccccattccactgagttttgatgaatgcggtaagagtaaatatgtccatctggtgacattttcaaacggcaaattagagagcgtggaaaacctgaacgtaccggtaactcaacccatggcggtgctgaaaggcgatctggcgtcgattaccgcacagctggaacagtggcgcgatgtatcgcaggagccacctgtctggctggatatcgaaatcactactgatgagtatctgcatgatattcagcgcaaaatccaggcattaaccgaatcattgcctgtcgaagtattgctggtacgtcggagttgtgaacagcgcgagcgtgtgttagccagccaacagcgtgaaaccctcagcgaactcagcgtcgaagaggtgttcaatcgccgtctggcactggaagaactggatgaatcgcagcagcaacgtctgcagcatcttttcaccacgacgttgcgtaccctcgccggagaacacgaagcatga

SEQ ID NO: 471512 - DNA, 690 bp, Shigella flexneri
atggcgagacgtattctggtcgtagaagatgaagctccaattcgcgaaatggtctgcttcgtgctcgaacaaaatggctttcagccggtcgaagcggaagattatgacagtgctgtgaatcaactgaatgaaccctggccggatttaattctccttgactggatgttacctggcggctccggtatccagttcatcaaacacctcaagcgcgagtcgatgacccgggatattccagtggtgatgttgaccgccagaggggaagaagaagatcgcgtgcgcggccttgaaaccggcgcggatgactatatcaccaagccattttcgccgaaggagctggtggcgcgaatcaaagcggtaatgcgccgtatttcgccaatggcggtggaagaggtgattaagatgcagggattaagtctcgacccgacatctcaccgagtgatggcgggcgaagagccgctggagatggggccgacagaatttaaactgctgcacttttttatgacgcatcctgagcgcgtgtacagccgcgagcagctgttaaaccacgtctggggaactaacgtgtatgtggaagaccgcacggtcgatgtccacattcgtcgcctgcgtaaagcactggagcccggcgggcatgaccgcatggtgcagaccgtgcgcggtacaggatatcgtttttcaacccgcttttaa

SEQ ID NO: 471513 - DNA, 1296 bp, Shigella flexneri
gtgctggaacggctgtcgtggaaaaggctggtgctggagctgctactttgctgcctcccggctttcatcctgggtgcattttttggttacctgccctggtttttgctggcatcggtaacaggactgcttatctggcatttctggaatttattgcgcctttcatggtggctgtgggtggatcgcagtatgaccccgccaccggggcgtggtagctgggaaccgctactatacggcttacaccagatgcagctgcgaaataaaaaacgccgccgtgaactgggcaatctgattaaacgctttcgtagcggcgcggagtcgctgcccgacgcggtggtgctgaccacggaagagggcggtattttctggtgtaacggtctggcgcaacaaattcttggtttgcgctggccggaagataacgggcagaacatccttaacctactgcgttacccggagtttacgcaatatctgaaaacgcgtgatttttctcgcccgctcaatctggtgctcaacaccgggcggcatctggaaattcgcgtcatgccttatacccacaaacagttgctgatggtggcgcgtgatgtcacgcaaatgcatcaactggaaggggcgcggcgtaacttttttgccaacgtgagccatgagttacgtacgccattgaccgtgttacagggttacctggagatgatggatgagcagccgctggaaggcgcggtacgcgaaaaagcgttgcacaccatgcgcgagcagacccagcggatggaagggctggtgaagcagttgctaacgctgtcgaaaattgaagccgcgccgacgcaattgctcaatgaaaaggttgatgtgccgatgatgctgcgcgttgttgagcgcgaggctcagactctgagtcagaaaaaacagacatttacctttgagatagataacggcctcaaggtgtctggcaacgaagatcagctacgcagtgcgatttcgaacctggtctataacgccgtgaatcatacgccggaaggcacgcatatcaccgtacgctggcagcgagtgccgcacggtgccgaatttagcgttgaagataacggaccgggcattgcaccggagcatattccgcgcctgaccgagcgtttttatcgcgttgataaagcgcgttcccggcaaaccggcggtagcggattagggttagcgatcgtgaaacatgcggtgaatcatcacgaaagtcgcctgaatattgagagtacagtaggaaaaggaacacgtttcagttttgttatcccggaacgtttaattgccaaaaacagcgattaa

SEQ ID NO: 471514 - DNA, 1320 bp, Shigella flexneri
atgacccatcaattaagatcgcgcgatatcatcgctctgggctttatgacatttgcgttgttcgtcggcgcaggtaacattattttccctccaatggtcggcttacaggcaggcgaacacgtctggactgcggcattcggcttcctcattactgccgttggcctgccggtattaacggtagtggcgctggcaaaagttggcggcggtgttgacagcctcagcacgccaatcggtaaagtcgctggcgtactgctggcaacggtttgttacctggcggtggggccgcttttcgctacgccgcgtacagctaccgtttcctttgaagtggggattgcgccgctgacgggtgattccgcgctgccgctgtttatctacagcctggtctatttcgctatcgttattctggtttcgctctatccgggcaagctgctggataccgtgggcaacttccttgcgccgctgaaaattatcgcgctggtcatcctgtctgttgtcgcgattgtctggccggcgggttctatcagcacggcgactgaggcttatcaaaacgctgcattttctaacggcttcgttaacggctatctgaccatggatacgctgggcgcaatggtgtttggtatcgttattgttaacgcggcgcgttctcgtggcgttaccgaagcgcgtctgctgacccgttataccgtctgggctggcctgatggcgggtgttggtctgactttgctgtacctggcgctgttctgtctgggttcagacagcgcgtcgctggtcgatcagtctgcaaacggcgctgctattctgcatgcttacgttcagcacacctttggcggcggcggtagcttcctgctggcggcgttaatcttcatcgcctgtctggtcacggcggttggcctgacctgtgcttgtgcagaattctttgcccagtacgtaccgctctcttatcgtacgctggtgtttatcctcggcggcttctcgatggtggtgtctaacctcggcttaagccagctgatccagatctccgtaccggtgctgaccgctatttatccgccgtgtatcgcactggttgtattaagttttacacgctcatggtggcataattcgtcccgcgtgattgctccgccgatgtttatcagcctgctttttggtattctcgacgggatcaaagcatctgcattcagcgatatcttaccgtcctgggcgcagcgtttaccgctggccgaacaaggtctggcgtggttaatgccaacagtggtgatggtggttctggccattatctgggatcgcgcggcaggtcgtcaggtgacctccagcgctcactaa

SEQ ID NO: 471515 - DNA, 1374 bp, Shigella flexneri
atggaaagtaagaataagctaaagcgtgggctaagtacccgccacatacgctttatggcactgggttcagcaattggcaccgggctgttttacggttcggcagacgccatcaaaatggccggtccgagcgtgttgttggcctatattatcggtggtatcgcggcgtatatcattatgcgtgcgctgggggaaatgtcggtacataacccggccgccagctctttctcgcgttatgcgcaggaaaaccttggcccgctggcaggttacattaccggatggacctactgttttgaaatccttattgtcgccatcgccgatgtgaccgcttttggtatctatatgggtgtcttgttcccgacggtgccgcactggatttgggtactgagcgtggtgctgatcatttgcgccgtaaacctgatgagcgtgaaggtcttcggtgagctggaattctggttctcgttctttaaagtcgccaccatcatcatcatgattgtcgccggtttcggcatcatcatctgggggattggcaacggcgggcaaccgaccggtattcataacctgtggagcaacggcggcttcttcagtaacggctggcttggcatggtaatgtcgttgcaaatggtgatgtttgcttacggtgggatcgaaattatcgggattaccgccggtgaagcgaaagatcctgagaaatcgattccgcgtgcgattaactccgtgccgatgcgtattctggtgttctacgtcggtacgctgttcgtcattatgtctatctacccgtggaatcaggttggcactgccggtagcccgttcgtactgacgttccagcatatgggcattacctttgccgccagcattcttaactttgttgtgctgaccgcttcgctgtcggcaattaacagtgacgtatttggcgtaggccgtatgctccacggtatggcagagcagggcagcgcaccgaaaattttcagcaaaacgtcgcgtcgcggtattccgtgggttacggtgctggtgatgactaccgcgctgctgtttgcggtgtatctgaactacatcatgccggaaaacgtcttcctggtgatcgcttcgctggcaaccttcgccacggtatgggtgtggattatgatcctgctgtcgcaaatcgccttccgtcgccgtttgccgccagaagaagttaaggcgctgaaatttaaagtgccgggtggggtagcaacgaccatcggcgggctgattttcctgctctttattatcgggttgattggttatcacccggatacgcgtatctcgctgtatgtcggtttcgcgtggattgttgtgctgttgattggctggatgtttaaacgccgccacgatcgtcagctggctgaaaaccaataa

SEQ ID NO: 471516 - DNA, 1818 bp, Shigella flexneri
atgatgttaaatgcatggcacctgccggtgcccccatttgttaaacaaagcaaagatcaactgctcattacactgtggctgacgggcgaagacccaccgcagcgcattatgctgcgtacagaacacgataacgaagaaatgtcagtaccaatgcataagcagcgcagtcagccgcagccaggcgtcaccgcatggcgtgcggcgattgatctctccagcggacaaccccggcggcgttacagtttcaaactgctgtggcacgatcgccagcgttggtttacaccgcagggcttcagccgaatgccgccggcacgactggagcagtttgccgtcgatgtacctgatatcggcccacaatgggctgcggatcagattttttatcagatcttccctgatcgttttgcgcgtagtcttcctcgtgaagctgaacaggatcatgtctattaccatcatgcagccggacaagagatcatcttgcgtgactgggatgaaccggtcacggcgcaggcgggcggatcaacgttctatggcggcgatctggacgggataagcgaaaaactgccgtatctgaaaaagcttggcgtgacagcgctgtatctcaatccggtgtttaaagctcccagcgtacataaatacgataccgaggattatcgccatgtcgatccgcagtttggcggtgatggggcgttgctgcgtttgcgacacaatacgcagcagctgggaatgcggctggtgctggacggcgtgtttaaccacagtggcgattcccatgcctggtttgacaggcacaatcttggcacggggggagcttgtcacaactctgaatcgccctggcgcgactggtactcgtttagtgatgatggcacggcgctcgactggcttggctatgccagcttgacgaagctggattatcagtcggaaagtctggtgaatgaaatttatcgcggggaagacagtattgtccgccactggctgaaagcgccgtggaatatggacggctggcggctggatgtggtgcatatgctgggggaggcgggtggggcgcgcaataatatgcagcacgttgccgggatcaccgaagcggcgaaagaaacccagccggaagcgtatattgtcggcgaacattttggcgatgcacggcaatggttacaggccgatgtggaagatgctgccatgaactatcgtggcttcacattcccgttgtggggatttcttgccaataccgacatctcttatgatccgcagcaaattgacgcccaaacctgtatggcctggatggataattaccgcgcagggctttctcatcaacaacaattacgtatgtttaatcagctcgatagccacgatactgcgcgatttaaaacgctgctcggtcgggatattgcgcgcctgccgctggcggtggtctggctgttcacctggcctggtgtaccgtgcatttattacggtgatgaagtgggactggatggtaaaaacgatccgttttgccgtaaaccgttcccctggcaggtggaaaagcaggatacggcgttattcgcgctgtaccggcgaatgattgtgctgcgtaagaaaagtcaggcgctgcgtcgtggcggctgtcaggtgctgtatgcggaagataacgtagtggtatttgtccgcgtgctgaatcagcaacgtgtactggtggcaatcaaccgtggcgaggccagtgaagtggtgctacccgcgtcaccgtttctcaatgccgtgcaatggcaatgcaaagaagggcatgggcaactgactgacgggattctggctttgcctgccatttcggctacggtatggatgaactaa

SEQ ID NO: 471517 - DNA, 432 bp, Shigella flexneri
ttgactgacaatctgccggaagtccgcgaagcacaggagtggtttcgtagtgaaacgcgccgcgttgcgcctattacgctggatgtcatgtgggatcactttctttcccgccactggtcgcagctgtcgccggactttccgctacaggaatttgtctgttatgcccgcgagcaagtgatgacgattttgccggactcaccgccacgttttatcaatctgaacaattacttgtggtcagagcagtggctggtgcgctatcgcgatatggatttcatccagaacgtgttaaacggcatggcaagccgccgcccacgtctggatgccctgcgtgactcctggtacgatttagacgctcattatgacgccctcgaaacccgcttctggcagttttatccgcggatgatggcgcaggcgtcacacaaggcgttataa

SEQ ID NO: 471518 - DNA, 1071 bp, Shigella flexneri
atgcgcgttaccgatttctcctttgaattgcccgaatccctgattgcccactatcccatgcctgaacgcagtagctgtcgtttactgtcgctggacgggccgacgggcgcgctgacgcacggtactttcaccgatttactcgataagctcaaccccggcgatcttctggtttttaataatacccgcgtgatcccggcgcgtctgtttgggcgtaaagccagcggcggcaagattgaagtgctggttgagcggatgctcgacgacaaacgcattcttgcgcatattcgcgcctcgaaagcgccaaaacctggcgcagaactgttgctgggcgatgacgaaagtatcaacgcaacaatgaccgcgcgccacggcgcactgtttgaagtcgaatttaatgatgaacgctcggtactggatatcctcaacagcatcggccatatgccgctgccgccgtatatcgatcgtccggacgaagacgctgaccgcgaactttatcaaaccgtttatagcgaaaaaccgggcgcggttgcagccccgaccgctggtctgcattttgacgagcctttgctggaaaaattacgcgccaaaggcgtggagatggcgtttgtgacgttgcacgttggtgcgggcaccttccagccggtgcgcgtcgacaccattgaagatcacatcatgcactcggaatacgctgaagtaccgcaggatgtggtagacgcggtactggcggcgaaagcgcgcggtaaccgggtgattgcggttggcaccacttcagtacgttcgctggaaagcgcggcacaggcggcaaaaaacgatcttatcgaaccgttctttgacgatacccaaatctttatctatccgggcttccagtacaaagtggtcgatgcgctggtgacgaacttccacttgccagagtcgacgctgattatgctggtttcggcctttgccggttatcaacacaccatgaatgcctataaagcggcggtagaagagaaatatcgcttttttagttacggtgatgcgatgtttatcacgtacaatccgcaggcaattaatgagcgcgtcggggagtaa

SEQ ID NO: 471519 - DNA, 1128 bp, Shigella flexneri
atgaaatttgaactggacaccaccgacggtcgcgcacgccgtggccgcctggtctttgatcgtggcgtagtggaaacgccttgttttatgcctgttggcacctacggcaccgtaaaagggatgacgccggaagaagttgaagccactggcgcgcaaattatcctcggcaacaccttccacctgtggctgcgcccgggccaggaaatcatgaaactgcacggcgatctgcacgattttatgcagtggaaaggaccgattcttaccgactccggcggcttccaggtcttcagccttggtgatattcgtaaaatcaccgaacagggcgttcacttccgtaacccgatcaacggcgacccgattttcctcgacccggaaaagtcgatggagattcagtacgatcttggttcggatatcgtcatgatctttgatgagtgtacgccgtatcctgctgactgggattacgcaaaacgctctatggagatgtctctgcgttgggcgaagcgtagccgtgagcgttttgacagtcttggtaacaaaaatgcgttatttggtataattcagggcagtatttacgaagatttacgtgatatatctgttaaaggtctggtagatatcggctttgatggctacgctgtcggcggtctggctgtgggtgagccgaaagcagatatgcaccgtattctggagcatgtgtgtccgcaaattccggcagacaaaccgcgttacctgatgggcgttggtaaaccggaagacctggttgaaggcgtacgtcgcggtatcgatatgtttgactgcgtaatgccaacccgcaacgcccgaaatggtcatttgttcgtgaccgatggcgtggtgaaaatccgcaatgcgaaatataagagcgatactggcccactcgatcctgagtgtgattgctacacctgtcgcaattattcacgcgcttacttgcatcatctcgaccgttgcaacgaaatattaggcgcgcgactcaacaccattcataaccttcgttactaccagcgtttgatggcgggtttacgcaaggctattgaagagggtaaattagagagcttcgtaactgatttttaccagcgtcaggggcgagaagtaccacctttgaacgttgattaa

SEQ ID NO: 471520 - DNA, 333 bp, Shigella flexneri; identical to SEQ ID NO: 41008

SEQ ID NO: 471521 - DNA, 1815 bp, Shigella flexneri
atgctgatcgtggtgattgtcatcggtctgctgtatgcgcttcccaacctgtttggtgaggatccggctgttcagatcactggtgcgcgcggagtcgccgccagtgagcaaacgctgatccaggtccagaaaacgttacaagaagaaaaaataactgctaagtctgtggcactggaagagggcgctattcttgcgcgcttcgactccactgacacccagttgcgcgctcgtgaagcattaatgggcgttatgggtgacaaatacgtcgtggcgcttaaccttgccccggcaacgccgcgctggctggcagctattcatgctgagccgatgaagctcggccttgacctgcgtggcggcgttcacttcctgatggaagtggatatggacaccgcgcttggcaaactccaggaacaaaatatcgatagcctacgcagtgacctgcgcgaaaagggcatcccgtataccactgttcgtaaagaaaacaactacggcctgagcatcactttccgcgatgctaaagctcgtgatgaagccattgcgtatctgagcaagcgccatccggacctggtgattagcagccagggcagcaaccagctgcgtgcggtaatgagcgatgctcgtctgagtgaagcgcgtgaatatgcggtgcagcagaacattaatatcctgcgtaaccgtgtaaaccaacttggcgtggcggagccggtggttcagcgtcagggtgctgaccgtatcgttgttgaactgcccggtattcaggacactgcgcgtgcgaaagagattctgggcgcgacggcaacgctggaattccgtctggtaaacaccaatgttgatcaggccgctgcggcatccggtcgcgtaccgggcgactctgaagtgaaacagacccgcgaaggtcagccggttgtgctgtacaaacgcgtaattctgactggtgaccatatcaccgactccacttccagccaggacgaatacaaccagccgcaggttaacatctcgctcgatagcgctggtggcaacattatgtctaacttcaccaaggacaacatcggcaaaccgatggcaaccctgtttgtggagtacaaagacagcggtaagaaagatgcaaatggtcgtgcggttctggtgaaacaggaagaggtgattaacatcgccaacatccagtctcgtctgggtaacagcttccgtatcaccggcatcaacaacccgaacgaagcccgtcagctgtcactgctgctgcgtgccggtgcgttgatcgcgccgattcagattgttgaagaacgtacaattggcccgaccctgggtatgcagaacattgagcaggggctggaggcttgccttgccggtctgctggtttctattctgttcatgatcatcttctataagaagtttggtctgattgcgaccagtgctctgattgccaacttgatcttgatcgtcggtattatgtcgctgttgccaggcgcaacactgagtatgccaggtatcgcgggtatcgtcttaacccttgcggtagcggtcgatgcgaacgtactgatcaacgaacgtattaaagaagagttgagcaacggacgtactgttcaacaggcaattgatgaaggttatcgtggcgcattcagttctatcttcgatgcgaacatcaccacgctgattaaagtcatcatcctgtacgcagtgggtaccggggcaattaaagggttcgcgattactaccggtatcggtgtggcgacgtcgatgtttaccgcgattgtcggtacgcgtgccatcgtaaacctgctatatggcggcaagcgcgtcaagaagctgtcaatctga

SEQ ID NO: 471522 - DNA, 972 bp, Shigella flexneri
gtggcacaggaatatactgttgaacaactaaaccacggccgtaaagtctatgactttatgcgctgggactactgggctttcggcatctctggtctgctgttaatcgctgctatcgttattatgggcgtgcgcggctttaactgggggctggatttcaccggtggtacggttatcgaaattacgctcgaagaaccggctgaaattgacgtaatgcgtgatgcattgcaaaaagccggttttgaagagccaatgctgcaaaactttggtagcagccacgacatcatggtccgtatgccgcctgctgaaggcgaaaccggcggtcaggtgctgggcagccaagttctgaaggtgattaacgaatccaccaatcagaatgcagcagtgaagcgtattgagttcgtcggtccgagcgtgggggctgaccttgcgcaaaccggtgcgatggcgttgatggcagcgctgctgtctatcctcgtgtacgtaggtttccgctttgagtggcgactggcggcaggggtggttattgcgctgacgcacgacgttatcattacgctgggtattttgtcgttattccatatcgagattgacctgaccattgtggcatcgttgatgtcggttatcggttactcgcttaacgacagtatcgtggtatcggaccgaattcgtgaaaacttccgcaagatccgtcgcggtacgccttacgaaatctttaacgtgtccttgacccagacgctgcaccgtaccttgatcacatccggtactaccttgatggttatcctgatgctgtatctcttcggtggtccggtactggaaggcttctcgctgaccatgcttatcggtgtttccatcggcactgcatcttccatctacgtagcatctgcgttggctctgaaactgggtatgaagcgcgaacacatgttgcagcagaaagtggaaaaagaaggggcggatcagccgtcaattctgccttaa

SEQ ID NO: 471523 - DNA, 348 bp, Shigella flexneri
atggctatcatcccaaaaaactatgcacggttagaaagcggctatcgcgaaaaagcattaaaaatctatccgtgggtctgcggtcgctgttcccgcgagtttgtttattctaacctgcgtgaacttaccgttcaccacattgatcacgaccataccaataacccggaagatggcagtaactgggaattgttgtgtctctattgccacgatcatgagcattcgaaatataccgaagcggatcagtatggtacgaccgttatcgcaggggaagatgcgcagaaagatgtcggtgaagcgaagtacaacccattcgctgacctgaaagcgatgatgaacaagaagaagtga

SEQ ID NO: 471524 - DNA, 885 bp, Shigella flexneri
atgaaaaaaacattactggcagccggtgcggtactggcgctctcttcgtcttttactgtcaacgcagctgaaaacgacaaaccgcagtatctttccgactggtggcaccagagcgttaacgttgtcggaagctatcacacccgtttcggaccgcagatccgcaacgatacctaccttgagtacgaagcattcgctaaaaaagactggttcgacttctatggttatgcggatgcgccggtattcttcggcggtaactccgatgctaaaggtatctggaaccacggttctccgctgtttatggaaatcgaaccacgtttctccatcgacaagctgaccaatactgaccttagcttcggtccgttcaaagagtggtacttcgcgaacaactacatttacgacatgggtcgtaataaagatggtcgccagagcacctggtacatgggtctgggtaccgatatcgacactggcctgccgatgagcctgtccatgaacgtctatgcgaaataccagtggcagaactatggcgcagcgaacgaaaacgagtgggacggttaccgtttcaaaattaaatactttgtgccgattaccgatctgtggggcggtcagctgagctacatcggcttcaccaacttcgactggggttccgatttaggggatgacagcggtaacgcaatcaacggtattaagacccgtactaataactctatcgcttccagccatattctggctctgaactacgatcactggcactactctgtcgtagctcgttactggcacgacggtggtcagtggaacgacgatgcagaactgaacttcggcaacggcaacttcaacgttcgctctaccggctggggtggttacctggtagtaggttacaacttctga

SEQ ID NO: 471525 - DNA, 540 bp, Shigella flexneri
atgaatactaacgtttttcgactgctcctgctgggaagcctgttcagccttagcgcctgtgtgcagcaaagtgaagtgcgacagatgaaacacagcgtcagcacgctgaaccaggagatgacgcaactcaatcaagaaacagtcaaaatcactcagcaaaacaggctgaatgcaaaatccagcagtggggtttaccttctgcctggagcgaaaacaccggcaagactggaaagccagatcggtactttacgtatgtcgctggtgaatattacgcctgatacagatggcaccacccttacactacgtattcagggtgagtcgaatgatcccttgcccgcattcagcggaactgttgaatatgggcaaattcagggaacaatagacaattttcaggaaatcaatgtgcagaatcaattgattaatgcccctgccagcgtcctcgcccccagcgatgttgatattccgttacaattaaaggggatttctgtggatcagttaggctttgtacgtatccacgacattcaacctgttatgcagtaa

SEQ ID NO: 471526 - DNA, 450 bp, Shigella flexneri
atgcattgcccattctgtttcgccgtggacactaaggtaattgactctcgtctcgtgggcgagggttcatccgtacgccgccgtcggcagtgtctggtgtgtaatgaacgtttcaccacctttgaagtggcggagctggttatgccgcgtgttgtaaaaagcaacgacgtgcgtgaaccgtttaatgaagagaaattgcgtagcggaatgctgcgggcgctggaaaaacgtccggtgagttccgattacgttgaaatggcaatcaatcatattaaatcgcagctgcgcgccaccggtgagcgcgaagtaccgagcaagatgattggcaatctggtgatggagcaattgaaaaagctcgataaagtcgcctatatccgttttgcctctgtctaccgcagtttcgaagatatcaaagaatttggcgaagagatcgcgcgcctggaggactaa

SEQ ID NO: 471527 - DNA, 1104 bp, Shigella flexneri
gtgcaggacgagtattacatggcgcgggcgctaaagctggcgcaacgaggacgttttaccacccaccccaacccgaatgtcgggtgcgtcattgtcaaagatggcgaaattgtcggtgaaggttaccaccaacgagcgggtgaaccacatgccgaagtacacgcgttgcgtatggcgggtgaaaaagccaaaggcgcaacggcgtatgtgacactcgaaccctgtagccatcatggccgtacgccaccgtgctgtgacgcactcatcgccgctggcgtagcgcgcgtggtcgcagcgatgcaagatcctaacccgcaggtcgctgggcgtggactttaccgtctgcaacaggctggcattgacgtcagccacgggctgatgatgagtgaagccgagcaattgaataaaggctttctcaagcggatgcgcaccggctttccttatattcagttaaaacttggcgcatcgcttgatggccgcacggcgatggcgagcggcgaaagccagtggatcacttcgcctcaggcgcggcgcgacgtacaacgacagcgcgcacaaagtcatgccattttaaccagcagcgccacggtgctggcggatgatccagccttaacagtgcgttggtctgaactggatgaacaaactcaggcgctctacccgcaacaaaatctccgccagccagtacgtattgtgattgatagccaaaatcgcgtgacgccggaacatcgcattgtgcagcagcccggcgaaacctggttcgcgcgtacgcaggaagattctcgtgagtggccggaaacggtgcgtaccttgctgattccagagcataaaggtcatctggatctggttgtactgatgatgcaactgggtaaacagcagattaacagcatctgggtggaagcggggccaacgctcgctggcgtattgctacaggcgggtttagtcgatgagctgattgtctatatcgcacctaaactattaggcagcgacgcccgtggattatgctcgctgccagggcttgagaaattagccgacgccccccaatttaaattcaaagagatacgtcatgtaggcccggatgtttgcctgcatttagtgggtgcatga

SEQ ID NO: 471528 - DNA, 471 bp, Shigella flexneri
atgaacattattgaagctaacgttgctaccccggacgctcgcgtcgccatcaccatcgcgcgtttcaacaactttatcaatgacagcctgctggaaggtgcaattgacgcactgaaacgtatcggtcaggtaaaagatgaaaacattaccgttgtttgggtgcctggtgcctatgagctgccgctggcggcgggtgcactggctaaaaccggtaaatacgacgcggtgattgcgctgggtacggttattcgtggtggcactgcccactttgaatatgtcgctggtggtgcaagcaacggcctggcgcatgttgcccaggacagcgaaattccggttgcttttggggttctgaccactgaaagcattgaacaagcgatcgaacgtgctggcaccaaagctggcaacaaaggtgcagaagctgcactgaccgcgcttgaaatgattaatgtattgaaagccatcaaggcctga

SEQ ID NO: 471529 - DNA, 420 bp, Shigella flexneri
gtgaaacctgctgctcgtcgccgcgctcgtgagtgtgccgtccaggcgctctactcctggcagttgtcccagaacgacatcgctgatgttgaataccagttcctggctgaacaggatgtaaaagacgttgacgtcctgtacttccgtgagctgctggccggggtggcgactaacaccgcatacctcgacggactgatgaagccctacctgtcccgcctgctggaagaactgggccaggtagaaaaagcagtactgcgcattgcgctgtacgaactgtctaaacgtagtgatgtgccatacaaagtggccattaacgaagcgatcgaactggcgaaatcgttcggcgcagaagacagccataagttcgtcaacggcgtactcgataaagcagcacctgtgattcgccctaacaaaaagtaa

SEQ ID NO: 471530 - DNA, 978 bp, Shigella flexneri
atggcatgtggcgagttctccctgattgcccgttattttgaccgtgtaagaagttctcgtcttgatgtcgaactgggcatcggcgacgattgcgctcttctcaatatccccgagaaacagaccctggcgatcagcactgatacgctggtggcgggcaaccatttcctccctgatatcgatcctgctgatctggcttataaagcactggcggtgaacctaagcgatctggcagcgatgggggccgatccggcctggctgacgctggcattaaccttaccggacgtagacgaagcgtggcttgagtccttcagcgacagtttgtttgatcttctcaattattacgatatgcaactcattggcggcgataccacgcgtgggccattatcaatgacgttgggtatccacggctttgttccgatgggacgagccttaacgcgctctggggcgaaaccgggtgactggatctatgtgaccggtacaccgggcgatagcgccgccgggctggcgattttgcaaaaccgtttgcaggttgccgatgctaaagatgctgactacttgatcaaacgtcatctccgtccatcgccgcgtattttacaggggcaggcactgcgcgatctggcaaattcagctatcgatctctctgacggtctgatttccgatctcgggcatatcgtgaaagccagcgactgcggcgcacgtattgacctggcattgctgccgttttctgatgcgctttctcgccatgttgaaccggaacaggcgctgcgctgggcgctctctggcggtgaagattacgagttgtgtttcacggtgccggaactgaaccgtggcgcgctggatgttgctctcggacaccttggcgtaccgtttacctgtatcgggcaaatgaccgccgatatcgaagggctttgttttattcgtgacggcgaacctgtcacgtttgactggaaaggatatgaccattttgtcacgccataa

SEQ ID NO: 471531 - DNA, 519 bp, Shigella flexneri
atgaccattttgtcacgccataaagatgtcgcgaaaagtcgcctgaagatgagtaatccgtggcatctgcttgctgtcggattcggaagtggattaagcccaatcgttcctggcacgatgggatcgctggcggcgatccctttctggtatctgatgacctttttaccctggcagctctactcgctggtggtgatgttggggatctgtatcggcgtctatctttgtcatcaaacggcgaaagatatgggcgtgcacgatcacggcagcattgtctgggacgaatttattggtatgtggatcacgctcatggcgctgccgaccaatgactggcagtgggttgccgccgggtttgtgattttccgtattctggatatgtggaagccgtggccgatccgctggtttgatcgcaatgtacatggcggcatggggatcatgatcgacgatattgtcgccggggtgatttccgcaggcatcctgtactttatcggtcatcactggccgctgggtattctgtcgtag

SEQ ID NO: 471532 - DNA, 918 bp, Shigella flexneri
atgcaatacaaccccttaggaaaaaccgaccttcgcgtttcccgactttgcctcggctgtatgacctttggcgagccagatcgcggtaatcacgcatggacactgccggaagagagcagccgtcccataattaaacgcgcgctggaaggtggcataaatttctttgataccgccaatagctattccgatggtagcagcgaagagatcgttggtcgcgcactgcgggatttcgcccgtcgtgaagacgtagtcgttgccaccaaagtgttccatcgcgttggtgatttaccggaaggattatcccgtgcacaaattttgcgctctatcaacgacagcctgcgacgtctcggcatggattatgtcgatatcctgcaaattcatcgctgggattacaacacgccgatcgaagagacgctggaagccctgaacgacgtggtaaaagccgggaaagcgcgttatatcggcgcgtcatccatgcacgcttcgcagtttgctcaggcgctggaactacaaaaacagcactgctgggcgcagtttgtcagtatgcaggatcactataatctgatttatcgcgaagaagagcgcgagatgctgcctctgtgttatcaggagggcgtggcggtgattccgtggagcccgctggcgcgggggcgactgacgcgtccatggggagaaactaccgcacgactggtgtctgatgaggtggggaaaaatctctataaagaaagcgatgaaaatgacgcgcagatcgcagagcggttaacgggcgtcagtgaagaactcggtgcaacacgagcacaagttgcgctggcctggttgttaagtaaaccgggcattgccgcaccgattatcggaacttcgcgggaagaacagcttgatgagctgctgaacgcggtggatatcactttgaagccataa

SEQ ID NO: 471533 - DNA, 1863 bp, Shigella flexneri
atgagttttgatattgccaaatacccgaccctggcactggtcgactccacccaggagttacgactgttgccgaaagagagtttaccgaaactctgcgacgaactgcgccgctatttactcgacagcgtgagccgttccagcgggcacttcgcctccgggctgggcacggtcgaactgaccgtggcgctgcactatgtctacaacaccccatttgaccaattgatttgggatgtgggacatcaggcttatccgcataaaattttgaccggacgccgcgacaaaatcggcaccatccgtcagaaaggcggtctgcacccgttcccgtggcgcggcgaaagcgaatatgacgtattaagcgtcgggcattcatcaacctccatcagtgccggaattggtattgcggttgctgccgagaaagaaggcaaaaatcgccgcaccgtctgtgtgattggcgacggcgcgattaccgctggcatggcgtttgaagcgatgaatcacgcgggcgatattcgtcctgatatgctggtggtcctcaacgacaatgaaatgtcgatttccgaaaatgttggcgcgcttaacaaccatctggctcagctgctttccggtaagctttactcttcactgcgcgaaggcgggaaaaaagttttctctggcgtgccgcccattaaagagctgctcaaacgtaccgaagaacatattaaaggcatggtggtgcctggcacgttgtttgaagagctgggatttaactacatcggcccggtggacggtcacgatgtgctggggcttatcaccacgctaaagaacatgcgcgacctgaaaggcccgcagttcctgcatatcatgaccaaaaaaggtcgtggttatgaaccggcagaaaaagacccgatcactttccacgccgtgcctaaatttgatccctccagcggttgtttgccgaaaagtagcggcggtttgccgagctattcaaaaatctttggcgactggttgtgcgaaacggcagcgaaagacaacaagctgatggcgattactccggcgatgcgtgaaggttccggcatggtcgagttttcacgtaaattcccggatcgttacttcgacgtggctattgccgagcaacacgcagtgacctttgccgccggtctggcgattggtggatacaaacccattgtcgcgatctactccaccttcctgcaacgcgcctatgatcaggtgctgcatgacgtggcaattcaaaagctaccggtcctgttcgccattgaccgcgcgggcattgttggtgctgacggtcaaactcaccagggcgcttttgatctctcttacctgcgctgcataccagaaatggtcattatgaccccgagcgatgaaaacgaatgtcgccagatgctctataccggctatcactataacgatggcccgtccgcggtgcgctacccgcgcggcaacgcggttggcgtggaactgacgccgctggaaaaactaccaattggcaaaggcattgtgaagcgtcgtggcgagaaactggtgatccttaactttggtacgctgatgccagaaacggccaaagtcgccgaatcgctgaacgctacgctggtcgatatgcgttttgtgaaaccacttgatgaagcgttaattctggaaatggccgccagccatgaagcgctggtcaccgtagaagaaaacgccattatgggcggcgcaggtagcggagtgaacgaagtgctgatggcccatcgtaaaccagtacccgtgctgaacattggcctgccggacttctttattccgcaaggaactcaggaagaaatgcgcgccgaactcggcctcgatgccgccggtatggaagccaaaatcaaggcctggctggcataa

SEQ ID NO: 471534 - DNA, 900 bp, Shigella flexneri
atggactttccgcagcaactcgaagcctgcgttaagcaggccaaccaggcgctgagccgttttatcgccccactgccctttcagaacactcccgtggtcgaaaccatgcagtatggcgcattattaggtggtaagcgcctgcgacctttcctggtttatgccaccggtcatatgtttggcgttagcacaaacacgctggacgcacccgctgctgccgtagagtgtatccacgcttactcattaattcatgatgatttaccggcgatggatgatgacgatctgcgtcgcggtttgccgacctgccatgtgaagtttggcgaagcaaacgcgattctcgctggcgacgctttacaaacgctggcgttctcgattctaagcgatgccaatatgccggaagtgtcggatcgcgacagaatttcgatgatttctgaactggcgagcgccagcggtattgccggaatgtgcggtggtcaggcattagatttagacgcggaaggcaaacacgtacctctggacgcgcttgagcgtattcatcgtcataaaaccggcgcattgattcgcgccgccgttcgccttggtgcattaagcgccggagataaagggcgtcgtgctctgccagtactcgacaagtacgcagagagcatcggccttgccttccaggttcaggatgacatcctggatgtggtaggagatactgcaacgttgggaaaacgccagggtgccgaccagcaacttggtaaaagtacctaccctgcacttctgggtcttgagcaagcccggaagaaagcccgggatctgatcgacgatgcccgtcaggcgctgaaacaactggctgaacagtcactcgatacctcggcactggaagcgctagcggactacatcatccagcgtaataaataa

SEQ ID NO: 471535 - DNA, 243 bp, Shigella flexneri
atgccgaagaaaaatgaggcgcccgccagctttgaaaaggcgctgagcgagctggaacagattgtaacccgtctggaaagtggcgacctgccgctggaagaggcgctgaacgagttcgaacgcggcgtgcagctggcacgtcaggggcaggccaaattacaacaagccgaacagcgcgtacaaattctgctgtctgacaatgaagacgcctctctaaccccttttacaccggacaatgagtaa

SEQ ID NO: 471536 - DNA, 1449 bp, Shigella flexneri
atgaagtttatcattaaattgttcccggaaatcaccatcaaaagccaatctgtgcgcttgcgctttataaaaatccttaccgggaacattcgtaacgttttaaagcactatgatgagacgctcgctgtcgtccgccactgggataacatcgaagttcgcgcgaaagatgaaaaccagcgtctgactattcgcgacgccctgacccgtattccgggtatccaccatattctcgaagtcgaagacgtgccgtttaccgacatgcacgatatttttgagaaagcgttggttcagtatcgcgatcagctggaaggcaaaaccttctgcgtacgcgtgaagcgccgtggcaaacatgattttagctcgattgatgtggaacgttacgtcggcggcggtttaaatcagcatattgaatccgcgcgcgtgaagctgactaacccggatgtaactgttcatctggaagtggaagacgatcgcctcctgctgattaaaggtcgctacgaaggtattggtggtttcccgattggcacccaggaagatgtgctgtcgctcatttccggtggtttcgactccggtgtttccagttatatgttgatgcgtcgcggctgccgcgtgcattactgcttctttaacctcggcggcgcagcgcatgaaattggcgtgcgtcaggtggcgcattatctgtggaaccgctttggcagctcccaccgcgtgcgttttgtcgccattaatttcgaaccggttgtcggggaaattctcgagaaaatcgacgacggtcagatgggcgttatcctcaaacgtatgatggtgcgtgccgcatctaaagtggctgaacgttacggcgtacaggcgctggtcaccggcgaagcgctcggccaggtgtccagtcagacgctgaccaacctgcgcctgattgataacgtctctgacacgctgatcctgcgtccgctgatttcttacgacaaagagcacatcatcaacctggctcgccagattggcaccgaagactttgctcgcacgatgccggaatattgtggcgtgatctccaaaagcccgacggtgaaagcggttaaatcgaagattgaagcggaagaagagaagttcgacttcagtattctcgataaagtggttgaggaagcgaataacgttgatatccgcgaaatcgcccagcagaccgagcaggaagtggtggaagtggaaaccgtcaacggcttcggcccgaacgacgtgattctcgatatccgttctgtcgatgaacaggaagataagccactgaaagtcgaagggattgatgtggtttctctgccgttctataaactgagcaccaaatttggcgatctcgaccagaacaaaacctggctgctgtggtgtgagcgcggggtgatgagccgtctgcaggcgctctatctgcgcgagcaaggctttaacaatgtgaaggtatatcgcccgtaa

SEQ ID NO: 471537 - DNA, 591 bp, Shigella flexneri
atgagcgcatcggcactggtttgcctcgcccctggtagtgaagagactgaagccgtcaccacgatcaacctcttggttcgcggcggtatcaaagtcaccactgccagcgtcgacagcgatggcaacctggcaattacctgctcgcgcggcgtgaagctgctggcggatgcgccgctggtcgaagtggctgatggcgaatatgacgtgatcgtgctgcctggtggcattaaaggcacggagtgttttcgcgatagcactctgctggttgaaaccgttaaacagttccaccgttccgggcgtatcgtcgcggctatttgcgccgcgccagccaccgtgctggtgccgcacgatatctttccgattggcaatatgaccggcttcccgacgctgaaagacaaaattcccgctgaacaatggcaggacaagcgcgtcgtctgggatgcacgggtaaaattgctgaccagccaggggccgggtacagctatcgactttggtctgaaaattatcgacctgctggttgggcgcgagaaagcccatgaagtggcatcacaactggtgatggcggcagggatttataattattacgagtag

SEQ ID NO: 471538 - DNA, 912 bp, Shigella flexneri
atgaaaattaccgtattgggatgcggtgccttagggcaattatggcttacagcactttgtaaacagggtcatgaagttcagggctggctgcgtgtaccgcaaccttattgtagtgtgaatctggttgagacagatggttcgatatttaacgaatcgctgaccgccaacgatcccgattttctcgccaccagcgatctgctcctggtgacgctgaaagcatggcaggtttccgatgccgtcaaaagcctcgcatccacactgcctgtaactacgccaatactgttaattcacaacggcatgggcaccatcgaagaattgcaaaacattcagcagccattactgatgggcaccaccacccatgccgcccgccgcgacggcaatgtcattattcatgtggcaaacggaatcacgcatatcggtccggcacggcaacaggatggcgattacagttatctggcggatattttgcaaaccgtgttgcctgacgttgcctggcataacaatattcgcgccgagctgtggcgcaagctggccgtcaactgcgtgattaatccactgactgccatctggaattgcccgaacggtgaattacgtcatcatccgcaagaaattatgcaaatatgcgaagaagtcgcggcagtgatcgaacgcgaagggcatcatacttcagcggaagatttgcgtgattacgtgatgcaggtgattgatgccacagcagaaaatatctcgtcgatgttgcaggatatccgcgcgctgcgccacaccgaaatcgactatatcaatggttttctcttacgccgcgcccgcgcgcatgggattgccgtaccggaaaacacccgcctgtttgaaatggtaaaaagaaaggagagtgaatatgagcgcatcggcactggtttgcctcgcccctggtag

SEQ ID NO: 471539 - DNA, 492 bp, Shigella flexneri
atgccatctttcgatattgtctctgaagttgatcttcaggaagcacgtaacgcggtcgataacgcgagtcgcgaagtggagtcccgttttgacttccgtaacgttgaagcctcatttgagctgaacgacgccagcaaaaccatcaaagtgttgagcgagtccgacttccaggtcaatcagttgctggatattctgcgtgccaagctgctgaagcgcggcattgaaggcagttcactggatgtaccggaaaatatcgttcatagcggtaaaacctggtttgtggaagcgaaactgaaacagggcattgagagcgccactcagaaaaaaatcgtcaagatgatcaaagacagcaaactgaaagtgcaggcgcaaattcagggcgatgagatccgcgtgactggcaaatctcgtgatgatttgcaggctgtcatggcgatggtgcgcggtggcgatctcggtcagccgttccagttcaaaaacttccgcgattaa

SEQ ID NO: 471540 - DNA, 1731 bp, Shigella flexneri
atgaaagcgaaatctactttgttattaatgattttatctgttttttattctcatcaggttttatccagcgaacccactcagccggatgtttattctgtcgtcgagaaaaaactaaactctgctttacctctggaagaaaataccaccttcagatcgcaggctgaatggtttaatttgcaatatgaattattagtatctggctaccctgaacgtgcttacaatttactgagcaaacttgagacagaatcgaaaaacgctaaatattatctggatttaactgcctccagagtcgctgaagaagaagcaccagagacagccttaacttttttatcaaaaattgggttaaataaaccggctactcttacatcctttgagagctatatcaatagctggataaaaagcaaacaacccgaaaaggctatgcagcttctcagcctcgatgagaatgccctgaattattatttaccgactgtgttagtcgcatatcagatcgttcctgataaggcaataagtatttataattctgtatatggagataatgttgttataccctatcagcaagtcaccatgttacttacagttgcggagggttatcaaacaaaaggcgatataaaaaacgccattcattatgccgataaggcgctgaatatgtttgataaagctattgctgtagatagcagtcgtgaatcccattatagtgatgagtatttgaaactcatgaatatctacgccgccaatggcaacaaagaaaaagcggtggttttatctcaacgtctacacaaagccattaccgaatctcaatcgaattacttaagtactctggaaggaattttattgttttatagaaataatgatatgcagcaagactatcaaaacagcctttcaaattacatagtatttatcgataaaatttttgccttttccccatcaacaagaagtgaattaagcctcattaatttattaaattcattaaatgaggtggaattgatgagaaaacgtctggcgtttctgatgacagcaccagaatacgcttgttatgatagtcagtattgttatgaagacaaagtcagcgcattaaaaatcctgtatcgtcatcatgacaatgagctaatggacaaatatttcacgactcttcttaaagagatcagtaatcaaccattagaagactgggatataataataagtaatactggtgaaaaatttagtgaagtgggtctaaccaaatatgctcaacatctcgcatctttcgctgaagaattttatataaaagagcaaaaatcacattctgaaagtgaaatgagaggactattttcatcacttgccgaattatatagttttggtaatgatactgccagcgcaaaccgagtgttccatcagcatgtccctgccttcaatacagatcatatgattcaatattttataaatgccaaagaatggaacaatgccagggaattattgataaaagaggaaatgttgggtatgcataatctgatattgttggagaatatttgtatgcaaaaaaatgcagaatgcatggcacacattacctttacgcttaataaattaacaacacaaccagcaataacaaaaatagatagcgtgggtaatgagcaactttatcagattggcaaaatctaccataagttggaaattaaacctgagccagagcaacaggttttaattcagtcgctttatgaccgggcatcaggaagcgcctctgcaactcaataa

SEQ ID NO: 471541 - DNA, 2154 bp, Shigella flexneri
atgtacaaatcattatttactattatcattctactgtatagcgccagttcatatgcaaaaagcgaatcccctcccgcaagcactataactttcattgcacaaatcgatcatgttgagctaaataaaacagcattatctcatgatatgaaactcgttcttgccgatcgtttttatttcaaaaccagtaatccttgcgaaacaaattcaatttctgctcgaccagaatcaatggatattactgacaaagcctatgccgacaaattaaaaaaattagaaactccttttcttgatgatcgctatttctttatgaccatcaatcagtgtgacggtaatggcactcccatgctgacagacataaaagtatgtacaacagaattatgtggtgctgaatatacaaagaaaatgtctactgtatggctcgatgaaactttaaaaccaactgctaaacgtctggcaatttattttattcaatctcctttaccctatgacgaggagaaaaaacaatggaaagtcaccggatggtatatctcatcaactgataatcagtcttcaactaaacagattgcatttgaaggatatacagacacagataacctctccgattctaaatttatttcttcatttaaatcctggtttgaaagtggaaagataaaaaacattgctaactataatccaaaaggagaaagagatggaaaatacgaaagttattacaatagcaatggtaacgtctatgaatctctaagtttttctaatggtcttatcaacggtgagtttattacatattatgaaaatggggccattgaaagtaaacgtcattttaataacgacaaaattaaagatggtgaatgccctcatttttatgaagatgggaaaatcaaacagcaacatagctatctgaatagtaaactcgatggtcctgcatatgaatattatcctgatggcaaactcatgcaggaaaatttctatcagcaaagtgtgttgattggaaacgataccagttactaccaatccggaaaaataagctctatacacaatagaaattcccgtggtcagtatgatggagctaacgaacgttatagtgaagagggtaagttactgtctaaatccgtctataaagacggaaaacaaatttctgttcaaacctggtatgaaaatgggcagaaagaagaggagaaacattttgatgagcaaggccaattaaatggtctggttaagcaatggtataaaaatggtaatcttgcaaaatcacaaaactataaacatgacatactcgatggtaacagtgaagagtggtacgaaaatggcatccctgaaagtttgtacccttataagaatggaaaaaccgacggcattgccaaatcatggaataagtatggtaaattaacctattcaatcgaatacaaaaatggcgtagagaatggggcatatcgtaactggagcaaaaacacaggtaaactaaccaaagaaaccctgtacgtcaatggtatcagacagggagtggaaaaagagtttaacgatcgcacaggtaaactattaacctccacgcaatatgttaataataaaagacatggtacggaggaaacttatgatcaaaacggaataaaatatattacatgctatcaaaatgatcagaaattatcgtctttagacaatccaacacaaataaaagataatgcaacaacaggcgattccagtgctcaatttgcattagggaaatacgaattcatctgtgcaaatatagatgaagggattaaatggttaaccaaatctgcagagcaaaaaaacactgatgcgatatactttttagctacagcctacaaaggcaatggtatacctgcaaacaatgaaaaatacctagcatatctgcaacaagctgcaacactgggcagtagtaatgcccaggcggaaattggctatttatatctcatcggaaaagaactaccacagaatcttcctgatgctggtgtctggttcaaaaaagcagctgcacaaggtaattttgccgcacatttctatctgggaaggatgtatcagaatggtgacggcgttgagagaaatatggaaaaagccaggtttcatctatctaatgcggcagaaggtggaatagaacctgcgcttaaagcattaaatgaacttgaacatcaaacaaaataa

SEQ ID NO: 471542 - DNA, 537 bp, Shigella flexneri
atggccagcagaggcgtaaacaaggttattctcgttggtaatctgggtcaggacccggaagtacgctacatgccaaatggtggcgcagttgccaacattacgctggctacttccgaatcctggcgtgataaagcgaccggcgagatgaaagaacagactgaatggcaccgcgttgtgctgttcggcaaactggcagaagtggcgagcgaatatctgcgtaaaggttctcaggtttatatcgaaggtcagctgcgtacccgtaaatggaccgatcaatccggtcaggatcgctacaccacagaagtcgtggtgaacgttggcggcaccatgcagatgctgggtggtcgtcagggtggtggcgctccggcaggtggcaatatcggtggtggtcagccgcagggcggttggggtcagcctcagcagccgcagggtggcaatcagttcagcggcggcgcgcagtctcgcccgcagcagtccgctccggcagcgccgtctaacgagccgccgatggactttgatgatgacattccgttctga

SEQ ID NO: 471543 - DNA, 2823 bp, Shigella flexneri
atggataagatcgaagttcggggcgcccgcacccataatctcaaaaacatcaacctcgttatcccccgcgacaagctcattgtcgtgaccgggctttcgggttctggcaaatcctcgctcgctttcgacaccttatatgccgaagggcagcgccgttacgttgaatccctttccgcctacgcgcggcagtttctgtcactgatggaaaagccggacgtcgatcatattgaggggctttctcctgccatctcaattgagcagaaatcgacgtctcataacccgcgttctacggtggggacaatcaccgaaatccacgactatttgcgtttgttgttcgcccgcgtcggcgaaccgcgctgtccggaccacgacgtcccgctggcggcgcaaaccgtcagccagatggtggataacgtgctgtcgcagccggaaggcaagcgtctgatgctgctcgcgccaatcattaaagagcgcaaaggcgaacacaccaaaacgctggagaacctggcaagccagggttacatccgtgctcgtattgatggcgaagtctgcgatctttccgatccgccgaaactggaactgcaaaagaaacataccattgaagtggtggttgatcgcttcaaggtgcgtgacgatcttacccaacgtcttgcggagtcgtttgaaaccgcgctggaactttccggtggtacagcggtagtggcggatatggacgacccgaaagcggaagagctgctgttctccgccaacttcgcctgcccaatttgcggctacagtatgcgtgaactggagccgcgactgttttcgtttaacaacccggcaggtgcctgcccgacctgtgacggccttggcgtacagcaatatttcgatcctgaccgcgtgatccaaaaccccgagctgtcactggctggcggtgcgatccgtggctgggatcgccgcaacttctattacttccagatgctgaaatcgctggcagatcactataagttcgacgtcgaagcgccgtggggcagcctgagcgcgaacgtgcataaagtggtgttgtacggttctggcaaagaaaacattgaattcaaatacatgaacgatcgtggcgatacctccatccgtcgtcatccgttcgaaggcgtgctgcacaatatggagcgccgttataaagagacagaatccagtgcggtacgtgaagaattagccaagtttatcagcaatcgcccatgcgccagctgcgaagggacgcgtctgcgtcgggaagcgcgccacgtttatgtcgagaatacgccgctgcctgctatctccgacatgagcatcggtcatgcgatggaattcttcaacaatctcaaactcgctggtcagcgggcgaagattgcggaaaaaattcttaaagagatcggcgatcgcctgaaattcctcgtaaacgtcggcctgaattacctgacactttcccgctcggcagaaacactttccggcggtgaagcccagcgtatccgtctggcgagccagattggtgcgggcctggttggcgttatgtacgtgctggacgagccgtctatcggcctgcaccagcgcgataacgagcgcctgttgggtacgcttatccatctgcgcgatctcggtaataccgtgattgtggtggagcatgacgaagacgcaattcgcgccgctgaccatgtgatcgatatcggtcctggtgcgggtgttcacggcggtgaagtggtcgcagaaggtccgctggaagcgattatggcggtgcctgaatcgttgaccgggcagtacatgagcggtaaacgcaagattgaagtgccgaagaaacgcgttccggcgaatccagaaaaagtgctgaagctgacaggcgcacgcggcaacaacctgaaggacgtgacgctcacgctgccagtcggtctgtttacctgcatcacaggggtttcaggttccggtaaatcgacgctgattaacgacacactgttcccgattgcccaacgccagttgaatggtgcgaccatcgccgaaccggcaccgtatcgcgatattcagggactggagcatttcgataaagtgatcgatatcgaccaaagcccaattggtcgtactccacgttctaacccggcgacctataccggcgtgtttacgcctgtgcgcgaactgtttgcgggcgtaccggaatcccgtgcgcgtggttatacgccaggacgtttcagctttaacgtccgtggcgggcgctgcgaagcctgtcagggcgacggtgtgatcaaagtggagatgcacttcctgccggatatctacgtgccgtgcgatcagtgcaaaggtaaacgctataaccgtgaaacgctggaaattaagtacaaaggcaaaaccatccacgaagtgctggatatgaccatcgaagaggcgcgtgagttctttgatgcggtgccagctctggcgcgtaagctgcaaacgttgatggacgttggtctgacgtacattcgcctggggcagtccgcaaccacactttctggtggtgaagcccagcgcgtgaagctggcgcgtgagctgtcaaaacgcggcaccgggcagacgctgtatattctcgacgagccgaccaccggtctgcacttcgccgatattcagcaactcctcgacgtgctgcataaactgcgcgatcagggcaataccattgtggtgattgagcacaatctcgacgtgatcaaaaccgctgactggattgtcgacctgggaccagaaggcggcagtggcggcggcgaaatcctcgtctccggtacgccagaaaccgtcgcggagtgcgaagcttcgcatacggcacgcttcctcaagccgatgctgtaa

SEQ ID NO: 471544 - DNA, 357 bp, Shigella flexneri
atgaccatttcggagttgctacaatattgcatggcaaaaccaagcgcagaacagagcgtgcataacgactggaaagcgacgcagatcaaagtggaagatgtactgtttgcgatggtgaaagaagtagaaaatcgcccagctgtttcgctgaaaaccagcccggagctggcggagctgctacgtcagcagcacagcgatgtgcgtcctagccgccatctgaataaagcgcactggagcaccgtgtatctcgacggttcgctgccggattcgcaaatctattatctggtggatgcgtcttatcagcaggcagtgaatttactaccggaagaaaagcgtaaattgctggtacaactctga

SEQ ID NO: 471545 - DNA, 417 bp, Shigella flexneri
atgtggtatcaaaagacgctcacgcttagcgccaaatctcgtgggtttcatctggtaacggatgaaattctgaatcagctggctgatatgccgcgcgttaacatcggcttactgcatctgttgctgcaacatacctccgcctctctgacacttaatgagaactgcgatcccaccgtacgccacgacatggagtgttttttcctccgcaccgttcccgacaacggaaattatgagcatgactatgagggagcagacgatatgccttctcatatcaaatcctcaatgctgggaacatcgcttgtattgccggtacataaagggcgtattcagaccggcacttggcaaggcatctggctgggggaacatcgcatccacggcggatcgcgtcgcatcatcgcgacactacaaggggagtaa

SEQ ID NO: 471546 - DNA, 714 bp, Shigella flexneri
atgcgcaagatcacacaggcaatcagtgccgtttgcttattgttcgctctaaacagttccgctgttgccctggcctcatctccttcaccgcttaaccctgggactaacgttgccaggcttgctgaacaggcaccaattcattgggtttcggtcgcacaaattgaaaatagcctcgcagggcgtccgccaatggcggtggggtttgatatcgatgacacggtacttttttccagtccggggttctggcgcggcaaaaaaaccttctcgccagaaagcgaagattatctgaaaaatcctgtgttctgggaaaaaatgaataatggctgggatgaattcagcattccaaaagaggtcgctcgccagctgattgatatgcatgtacgccgcggtgacgcgatcttctttgtgactggtcgtagcccgacgaaaacagaaacggtttcaaaaacgctggcggataattttcatattcctgccaccaacatgaatccggtaatctttgcgggcgataaaccagggcaaaatacaaaatcgcaatggctgcaggataaaaatatccgaattttttatggcgattccgataacgatattaccgccgcacgcgatgtcggcgctcgtggtatccgcattctgcgcgcctccaactctacctacaaacccttgccacaagcgggtgcgtttggtgaagaggtgatcgtcaattcagaatactga

SEQ ID NO: 471547 - DNA, 369 bp, Shigella flexneri
atgaatatatcatatgtgaatagcaacaaaacgacatctttacctgttgagctagatgcactaaataataaagatatctcttatgccaaagatttctttttatacatagaaacacagttaaaaattgcaaaagatttttgtagacctggagaagaagtatcaagttctattgcaagtaaagtttttcacgcatttattgatttagttaacaaaatcaggggtaagaaagactttatgtatatttgcacgctttgctgttttgccgaggaggttaaaggtgattattctcattacaggacctttttatttgatattggtaatcaatataaggttaaacttacacaaagcggaaaaaagagttctctttaa

SEQ ID NO: 471548 - DNA, 1194 bp, Shigella flexneri
gtgtttcaaaaagttgacgcctacgctggcgacccgattcttacgcttatggaacgttttaaagaagaccctcgcagcgacaaagtgaatttaagtatcggtctgtactacaacgaagacggaattattccacaattgaaagccgtggcggaggcggaagcgcgcctgaatgcgcagccccatggcgcttcgctttatttaccgatggaagggcttaacagctatcgccatgccattgcgccgctgctgtttggtgcggaccatccggtactgcaacaacagcgcgtagcaaccattcaaacccttggcggctcaggggcattgaaagtgggcgcggatttcctgaaacgctacttcccggaatcaggcgtctgggtcagcgatcctacttgggaaaaccacgtagcaatattcgccggggctggattcgaagtgagtacttacccctggtatgacgaagtgactaacagcgtgcgctttaatgacctgttggcgacgctgaaaacattacctgcccgcagtattgtgttgctgcatccatgttgccacaacccaacgggtgccgatctcactaatgatcagtgggatgcggtgattgaaattctcaaagcccgcgagcttatcccattcctcgatattgcctatcaaggatttagtgccggtatggaagaggatgcctacgctattcgcgccattgccagcgctggattacccgctctggtgagcaattcgttctcgaaaattttctccctttacggcgagcgcgtcggcggactttctgttctgtgtgaagatgccgaagccgctggccgcgtactggggcaattgaaagcaacagttcgccgcaactactccagcccgccgaattttggtgcgcaggtggtggctgcagtgctgaatgacgaggcattgaaagccagctggctggcggaagtagaagagatgcgtactcgcattctggcaatgcgtcaggaattggtgaaggtattaagcacagagatgccagaacgcaatttcgattatctgcttaatcagcgcggcatgttcagttataccggtttaagtgccgctcaggttgaccgactacgtgaagaatttggtgtctatctcatcgccagcggtcgcatgtgtgtcgccgggttaaatacggcaaatgtacaacgtgtggcaaaggcgtttgctgcggtgatgtaa

SEQ ID NO: 471549 - DNA, 1080 bp, Shigella flexneri
atgcaagcggcaactgttgtgattaaccgccgcgctctgcgacacaacctgcaacgtcttcgtgaactggcacctgccagtaaaatggttgcggtggtgaaagcgaacgcttatggtcacggtcttcttgagaccgcgcgaacgctccccgatgctgacgcctttggcgtagcccgtctcgaagaagctctgcgactgcgtgcggggggaatcaccaaacctgtactgttactcgaaggcttttttgatgccagagatctgccgacgatttctgcgcaacattttcataccgccgtgcataacgaagaacagctggctgcgctggaagaggctagcttggacgagccggttaccgtctggatgaaactcgataccggtatgcaccgtctgggcgtaaggccggaacaggctgaggcgttttatcatcgcctgacccagtgcaaaaacgttcgtcagccggtgaatatcgtcagccattttgcgcgcgcggatgaaccaaaatgtggcgcaaccgagaaacaactcgctatctttaataccttttgcgaaggcaaacctggtcaacgttccattgccgcgtcgggtggcattctgctgtggccacagtcgcattttgactgggtgcgcccgggcatcattctttatggcgtctcgccgctggaagatcgctccaccggtgccgattttggctgtcagccagtgatgtcactaacctccagcctgattgccgtgcgtgagcataaagccggagagcctgttggttatggtggaacctgggtaagcgaacgtgatacccgtcttggcgtagtcgcgataggctatggcgatggttatccgcgcgccgcgccgtccggtacgccagtgctggtgaacggtcgcgaagtaccgattgtcgggcgcgtggcgatggatatgatctgcgtagacttaggtccacaggcgcaggacaaagccggggatccggtcattttatggggcgaaggtttgcccgtagaacgtatcgctgaaatgacgaaagtaagcgcttacgaacttattacgcgcctgacttcaagggtcgcgatgaaatacgtggattaa

SEQ ID NO: 471550 - DNA, 1416 bp, Shigella flexneri
atggcaggaaataaacccttcaacaaacagcaggctgaaccccgcgaacgcgatccacaagttgccgggctgaaagtgcctccgcactcgatcgaagcggagcagtcggtgttgggcggtttaatgctggataacgaacgctgggatgatgtagccgagcgtgtggtagcagacgatttttacacccgcccacaccgtcatatctttactgaaatggcgcgtttgcaggaaagcggtagtcctatcgatctgattacccttgcggaatcgttggaacgccaggggcaactcgatagcgtcggtggttttgcttatctggcagagctgtcaaaaaatacgccaagtgcggcgaacatcagtgcttatgcggacatcgtgcgtgaacgtgccgttgtccgtgagatgatctcggttgcgaatgagattgctgaagccggttttgatccgcaggggcgtaccagcgaagatctgctggaccttgctgaatcccgcgtctttaaaattgccgaaagtcgtgcaaacaaagacgaagggccgaagaacatcgccgatgtgctcgacgcaaccgtggcgcgtattgagcagttgtttcagcagccacacgatggcgttaccggggtaaacaccggttatgacgatctcaacaaaaaaaccgctggcttgcagccgtcggatttgatcatcgtcgccgcgcgtccgtcgatgggtaaaacaacatttgcgatgaacctcgtcgaaaacgcggcaatgttgcaggataaaccagtacttatcttctcgctggagatgccatcagaacagatcatgatgcgttctctggcgtcgctgtcgcgcgttgaccagactaaaatccgtaccgggcagctcgatgatgaagactgggcgcgcatttccggcaccatgggtattttgctcgaaaaacgcaatatctatatcgatgactcttccggcctgacgccaacggaagtgcgttcccgcgcacgccgtattgcccgtgaacacggcggcatcgggcttatcatgatcgactacctgcaactgatgcgcgtaccggcgctttccgataaccgtacgctggaaattgcagaaatctcccgctcgctgaaagcactggcgaaagaactgaacgtgccggtggtggcgctgtcccagttgaaccgttctctggaacaacgtgccgacaaacgtccggtcaactccgacctgcgtgaatctggctctatcgagcaggatgcggacttgatcatgtttatctatcgtgatgaggtgtatcacgaaaacagtgatttaaaaggcatcgcggaaattattatcggtaaacaacgtaacggcccaatcgggacggtacgcctgacctttaacggtcaatggtcgcgcttcgacaactatgcggggccgcagtacgacgacgaataa

SEQ ID NO: 471551 - DNA, 984 bp, Shigella flexneri
atggcaacacgaattgaatttcacaagcacggtggcccggaagtacttcaagccgtagagttcactcctgccgatccggcggagaatgaaatccaggtcgaaaataaagccattggcatcaattttatcgacacgtatatccgcagcggcctttacccgccgccatcgctacccagcggattaggtaccgaagcggcaggcatcgtgagtaaagtcggcagtggtgtaaagcatattaaggctggcgatcatgtagtctatgcgcagtcggcgttaggcgcttacagctctgtgcataacattaatgcggataaagcggcgattctgcctgcggcaatttcttttgagcaagctgcggcatccttcctgaaaggcttaacggtttattatctgctgcgcaaaacctatgaaattaaacccgatgaacagttcctgttccacgcagcggctggcggcattggcttaattgcctgccagtgggcaaaagccctgggcgcgaaactcatcggcaccgtaggaaccgcgcaaaaagcgcagagcgcgctaaaagccggcgcgtggcaggttattaactatcgtgaagagaatctggtcgagcgattgaaagagatcaccggcggtaagaaagtgcgcgtagtgtacgattccgtgggcagagacacctgggaacggtcgctggattgcctgcaacgccgcggcttaatggtcagttttggcaactcatcaggtgcggttaccggtgtgaacttaggcattctcaatcaaaaaggctcgttgtatgtgacacgcccttccctgcaaggctatatcaccacgcgggaggaattaaccgaggccagtaatgaactgttctctttgattgccagcggtgtgattaaggtcgatgtcgccgagcagcagaaatatccgctgaaggatgcgcagcgtgcgcatgagattctggaaagccgggcgacgcaaggttccagcctgctgattccataa

SEQ ID NO: 471552 - DNA, 243 bp, Shigella flexneri
atgctggaactactttttgtgattggcttttttgtcatgctgatggtcaccggcgtttcgttgctgggcattatcgccgcgctggttgtggcgacggccattatgttcctcggcggtatgctggcattgatgattaagttgctgccgtggttactactggcgattgcggtggtgtgggttattaaggcgattaaagcaccaaaaatgccgaaatatcagcgttatgaccgctggcgttactaa

SEQ ID NO: 471553 - DNA, 1038 bp, Shigella flexneri
atgcacggtaattctgaaatgcaaaaaatcaaccaaaccagcgcaatgcctgaaaaaactgacgttcactggagtggtcggtttagtgttgcaccaatgctcgactggacggacagacattgccgctatttcttgcgtctgctttcccgcaatacgttgctttataccgaaatggtgaccacaggggcgattattcacggtaaaggtgattatctggcgtacagtgaagaagaacatccggtagcgttgcaactgggcggtagcgatccggcggcgctggcgcagtgtgcaaagctggcagaagcgcgcggatatgatgagatcaacctgaatgtcggctgcccgtctgaccgggtgcagaacggcatgtttggtgcgtgtctgatgggtaatgcgcagctggttgccgactgcgtgaaagcgatgcgcgatgtggtgtcgattccggtgacggtgaaaacgcgtattggcatcgacgaccaggacagctatgaatttctctgcgatttcatcaataccgtttccggcaaaggcgagtgtgagatgttcatcatccacgcacgtaaagcctggctttcggggttaagcccgaaagaaaaccgtgaaatcccgccgctcgattatccgcgtgtgtatcaactgaagcgtgacttcccgcatctgacaatgtcgattaacggtggtatcaagtcgctggaagaagctaaagcgcatttgcaacatatggatggcgtgatggtcgggcgcgaggcgtatcagaatccgggtattctggcggcggtagaccgggagatctttggttcctcggataccgatgccgatccggtggcagtagtgcgtgccatgtatccgtacattgagcatgaactcagccaggggacgtatctcggccatattatccggcatatgctgggtttgttccagggtattcctggcgcgcggcagtggcggcgttatttaagtgaaaatgcccataaagcgggtgctgacattaacgtgctggaacacgcgctcaaactggtggcggataagcgttaa

SEQ ID NO: 471554 - DNA, 708 bp, Shigella flexneri
atgtgggtcaataagtatactgacgattgcactgatgaggatttaaacgatcgtgactttattgcatcagttgttgaccgggctatttttcatttcgcgattaatagtatatgtaatcctggggataataaagatgcaatgcccattgaacaatgtacttttgatgtagaaactaagaatggccttccctccacggttcagctattttatgaggaatctaaggataatgaacctttagcgaatatacattttcaagcaataggttctggttttttaacgtttgttaatgcctgccaggaacatgatgacaacagcttaaaattatttgcttcgctgttaatttcactttcatattctagtgcctacgcagatttatcagaaacagtgtatattaatgaaaataatgagagctacctgaaagctcagtttgaaaaattatatcaacgtgatatgaagaagtacctgggagagatgaagcgtctggcagatgggggagaaatgaattttgatggctatctggataagatgtcacatctggtgaatgaaggaacgctcgatcctgatattttaagcaaaatgcgagatgctgcaccacaattaattagcttcgcgaagtcgtttgacccaacctcaaaggaagagattaaaatacttacagacacttctaaattaatttatgacttgttcggggttaaatcggagaaataa

SEQ ID NO: 471555 - DNA, 255 bp, Shigella flexneri
atgttgaagataatacccggtgcaactggatactttaataaaacactcaattcaaatcaattcgaaaataaagatgcaaccaaagataaattggataatagaggttcaatcaaaggtaaattaaataatatatatggtaaatctattgattatgcagcgctgcgtcatcgggatataattattgcaaaaatagatttgtttattcaacgaatcacgcataatttatggcatgcacgtaaaaaaatgtgtttttaa

SEQ ID NO: 471556 - DNA, 516 bp, Shigella flexneri
atgggaaagaccacaacgcaggagttattagcgcaggctgaaaaaatctgcgcgcagcgtaatgtgcgcctgaccccacagcgcctggaagtgttgcgcctgatgagtctgcaggatggcgctatcagcgcttatgatctgcttgatttactgcgcgaagctgaaccgcaagccaagccgccaacggtttatcgcgcgctggattttctgcttgagcaaggttttgtgcataaggtggaatccaccaacagttatgtgctctgtcatctgttcgaccagcccacgcatacgtcagccatgtttatttgcgatcgctgcggcgcggtgaaagaagagtgtgcagaaggcgtggaagacattatgcatacgctggcggcaaaaatggggtttgccctgcggcataatgtgattgaagcacatgggctctgtgcggcatgcgtggaagtggaagcgtgtcgtcatcctgaacagtgccagcatgatcactctgtgcaggtgaaaaagaaaccgcgttaa

SEQ ID NO: 471557 - DNA, 210 bp, Shigella flexneri; identical to SEQ ID NO: 460705

SEQ ID NO: 471558 - DNA, 1326 bp, Shigella flexneri
atggcattcctcacttcatctgataaagcactctggcatctcgccttacccatgattttctccaatatcaccgttccgttgctgggactggtcgatacggcggtaattggtcatcttgatagtccggtttatttgggcggcgtggcggttggtgcaacggcgaccagctttctctttatgctgttgctgtttttacgcatgagcaccaccgggctgactgcgcaggcttatggtgccaaaaatcctcaggcattagcccgtgcgctggtgcaaccgttgctgttggcgttgggggccggggcgttaattgcgctgttgcgtacgccgattatcgatctggcgctgcatattgttggcggtagtgaagcggtcctggaacaggcgcggcgctttcttgaaatccgctggttaagcgctccggcgtcgctggcgaatctggtattactcggttggttactcggcgtgcaatatgcccgtgcgccagtaattttgttagtggtcggcaatatcctcaacattgtgctggatgtctggctggtgatggggctgcatatgaacgtgcagggcgcggcgctggcgacggttattgcggaatatgcaacattgctgattggtctgctaatggtgcgtaaaatcctcaaactacgcggaatttccggcgaaatgctgaaaactgcctggcgaggaaacttccgtcgcttgctggcgcttaaccgcgatatcatgctgcgttcgctgttgttgcaactctgtttcggcgcgatcaccgtacttggtgcgcgactggggagtgacattatcgctgttaacgcggttctgatgacgctactcacctttaccgcctatgcgcttgatggttttgcctacgcggttgaagcgcactccggtcaggcatacggtgcgcgcgacggtagccagttgctggatgtatggcgggcagcgtgccgccagtcggggattgtagcgttactgttttcggtggtttatttgctggcaggggaacacatcattgcgttgctgacgtcgttaacccagattcagcagctggctgaccgctatcttatctggcaggtgattttgccgttggttggcgtctggtgttatctgctggacggcatgtttataggcgcaacgcgtgccgccgaaatgcgtaacagtatagcggtggccgccgcaggttttgcgctgacgctccttacgctgccgtggctgggtaatcatggtttgtggctggcattaaccgtctttctggcgttgcgcgggctttctctggcggctatctggcggcgtcactggcgcaacggtacctggtttgccgcaacgtga

SEQ ID NO: 471559 - DNA, 609 bp, Shigella flexneri
atgaaagcgttaacggccaggcaacaagaggtgtttgatctcatccgtgatcacatcagccagacaggtatgccgccgacgcgtgcggaaatcgcgcagcgtttggggttccgttccccaaacgcggctgaagaacatctgaaggcgctggcacgcaaaggcgttattgaaattgtttccggcgcatcacgcgggattcgtctgttgcaggaagaggaagaagggttgccgctggtaggtcgtgtggctgccggtgaaccgcttctggcgcaacagcatattgaaggtcattatcaggtcgatccttccttgttcaagccgaatgctgatttcctgctgcgcgtcagcgggatgtcgatgaaagatatcggcattatggatggcgacttgctggcagtgcataaaactcaggatgtacgtaacggtcaggtcgttgtcgcacgtattgatgacgaagttaccgttaagcgcctgaaaaaacagggcaataaagtcgaactgttgccagaaaatagcgagtttaaaccaattgtcgttgaccttcgtcagcagagcttcaccattgaagggctggcggttggggttattcgcaacggcgactggctgtaa

SEQ ID NO: 471560 - DNA, 369 bp, Shigella flexneri
atggccaataatacaactggattcacccgaattatcaaagctgctggctattcctggaaaggtttacgcgctgcatggatcaacgaagcggcattccgtcaggaaggcgtagcggtattgttggcggtggtcatcgcctgctggctggatgtggacgcaattacccgcgtgctgcttatcagctccgtgatgctggtgatgattgtggaaatcctcaatagcgccatcgaagcagtggttgaccgaattggctctgaataccatgagctttccggacgcgcaaaagatatgggatccgccgcggtgctgattgccattatcgtcgccgtgattacctggtgcatcctgttatggtcgcattttggataa

SEQ ID NO: 471561 - DNA, 2424 bp, Shigella flexneri
atgtccggctggccacgaatttactacaaattactgaatttaccattaagcatcctggtaaaaagcaagtctattccggcagatcctgccccggaactggggctggatacctctcgtccaattatgtacgttttaccgtacaactcgaaagcagatttgctgacgttgcgcgcccagtgtctggcacatgatttgcctgacccgttagagccgctggaaatcgacggcacgctactgccgcgctatgtgttcattcacggcgggccgcgtgtattcacctattacacgccgaaagaagagtctattaagcttttccacgactatctcgatttgcaccgtagcaacccaaatctggatgtgcagatggtgccagtatcggtgatgtttggtcgcgcgccggggcgtgaaaaaggcgaagtgaacccgccgctgcgtatgcttaacggcgtacagaaatttttcgctgtactgtggctcggtcgcgacagttttgtgcgtttctcgccgtcagtgtcgctgcgccgtatggcggatgaacacggcacggataaaactatcgctcagaaactggcgcgcgtggcgcgtatgcactttgcccgtcaacgtctggctgccgtaggcccacgtctgcctgctcgtcaggatctgtttaataagctgctcgcctcccgcgccattgccaaagcggtagaagatgaagcgcgcagcaaaaaaatctcccatgaaaaagcgcagcagaacgcgattgcgctgatggaagagattgcggcgaatttctcttacgagatgatccgcctgactgaccgcattctgggcttcacctggaaccgattttatcagggcatcaacgtccataacgccgagcgcgttcgccagctggcccacgacggtcatgagctggtgtatgtgccttgccaccgcagtcacatggactacctgctactttcttacgtgctgtaccaccaggggctggtgccgccgcatatcgccgccgggatcaacctgaacttctggccggccgggccgattttccgccgtctgggggcgttctttattcgccgtacttttaaaggcaataaactttattccaccgttttccgtgagtatctcggcgaactgttcagccgtggttattccgtcgagtacttcgtggaaggcggtcgttcccgcacggggcgtttgctggatccgaaaaccggtacgctgtcgatgaccattcaggcgatgctgcgtggcggcacgcgtccgattacgctgattccgatctatatcggttatgagcacgtcatggaagtgggtacttacgccaaagaactgcgcggcgcgacgaaagagaaagagagcctgccgcagatgctgcgcggtttaagcaagctgcgtaatctcggtcagggttacgtcaacttcggtgaaccaatgccgttgatgacctaccttaaccagcacgtaccagactggcgtgaatctatcgatcccatcgaagcggtgcgtccggcctggttaacgccgacggtcaataatattgctgccgatctgatggtacgcattaacaacgcaggcgcggcaaacgccatgaacctgtgctgtactgcgctactggcatcacgtcagcgctcactcacccgcgagcagttaaccgagcaactcaactgctacctggatctgatgcgcaacgtaccttactccacggactctaccgttccttcagccagcgccagcgagcttatcgatcacgcgctgcaaatgaacaagtttgaagtcgagaaagacactatcggcgacatcatcattctgccacgcgagcaagcggtgctgatgacctactatcgcaacaacattgcgcatatgttggtgctgccttcgctgatggcggcaattgtcacccagcatcgccacatctcccgcgacgtattgatggagcacgtcaatgtgctttacccaatgctgaaagcggagctgttcctgcgctgggatcgcgacgagttgccggacgttattgatgcgctggcaaatgagatgcaacgtcaggggctgattaccctgcaagatgatgagttgcatatcaacccggcgcattctcgcaccctacagctgctggccgcaggcgcgcgcgaaacgctgcaacgttatgccatcaccttctggttgttgagtgccaacccgtcgatcaaccgcggtacgctggagaaagagagccgcaccgttgcgcaacgtctctccgtgctgcacggcatcaacgcgccggagttcttcgacaaggcggtgttcagttctctggtgctgacgctgcgtgatgaagggtatatcagcgatagcggcgatgccgaaccagcagaaacgatgaaggtttatcagttgctggcggagttgattacatcagacgtgcgtttgacgattgagagtgcgacgcagggcgaagggtaa

SEQ ID NO: 471562 - DNA, 873 bp, Shigella flexneri
atggagtggagtctgacgcagaataagctgctggcgtttcatcgcttaatgcgtacggataagccaattggcgcgttactgctgctctggccaacattatgggcgttgtgggtggcgacaccgggcgttcctcagctctggatcatggcggtgtttgtcgcgggtgtctggctgatgcgcgctgctggttgcgtggtgaatgattatgctgatcgcaagtttgatggtcatgttaagcgcacggcgaaccgaccacttcccagcggcgcggtaacagagaaagaggcgcgcgcgctgtttgtagtgctggtactgatttcgtttttactggttctgacgctgaatacgatgaccattctgttgtcgattgccgctctggcattggcgtgggtgtacccgtttatgaagcggtatacccatctcccgcaagtggtgctgggcgcggcgtttggctggtcgattccaatggcttttgccgctgtgagtgagtcggtgccattgagttgctggttaatgttcctcgccaatattctctgggcggtggcttacgacacgcagtatgcgatggttgaccgcgatgatgatgtgaagattggcattaaatccacggcaatcctgttcggccaatacgataaattgattattggtattttgcagattggcgtactggcactgatggcgatcatcggtgagttaaatggcttaggctggggatattactggtcaattgtggtggctggcgcgctgtttgtttatcaacaaaaactgattgccaaccgcgagcgtgaagcctgctttaaagcatttatgaataataactatgttggtctggtactgtttttaggactggcaatgagttactggcatttctga

SEQ ID NO: 471563 - DNA, 498 bp, Shigella flexneri
atgtcacaccccgcgttaacgcaactgcgtgcgctgcgctattttaaagagatccctgccctggatccgcaactgctcgactggctgttgctggaggattccatgacaaaacgttttgaacagcagggaaaaacggtgagtgtgacgatgatccgcgaggggtttgtcgagcagaatgaaatccccgaagaactgccgctgctgccgaaagagtctcgttactggttacgtgaaattttgttatgtgccgatggtgaaccgtggcttgccggtcgtaccgtcgttcctgtatcaacattaagcgggccggaactagcgttacaaaaattgggtaaaacgccgttaggacgctatctgttcacatcatcgacactaacccgggattttatcgagataggccgtgatgccggactgtgggggcgacgttcccgcctgcgattaagcggtaaaccgctgttgctaacagaactgtttttaccggcgtcaccgttgtactaa

SEQ ID NO: 471564 - DNA, 813 bp, Shigella flexneri
ttggaattaactattgattattcagatatatttgggaatgaagatctcgatggttatatcaataacattataaaaatgattgatacattgccagataatgcaatgatattgaaatccgttctggcagtaaaactggtgatgcaattaaaaattctcaatattgttaataaaaactttattaagaatatgaagaaaacatttagccattgtccttatataaaagatccaattatacgtagttatatacattctggggaagatgacaagttcgataattttatgcgtcaacatcgattcagtaaggtgaatttcgatacccaacagatgatccattttattaacagatttaatatgaataaagggctggttgataaaaataacaatttttttatccaacttatcgatcaggccttacgatcaacggatgatatgatcaaagcaaatgcctggtatctttataaagagtggattcgtagtgatgatgtttcacctatatttatagaaactgaagaaaagttaagaacctttaacactaataaattaacacgaaacgataatatatttatcctgttctcctctgtcgatgatgggcctgttatggtggtaagctcccagcgcttacatgatatgttgaatcctacaaaagataccaattggaattccacgtgtatctataaatccagacataagatgttgcctattaatcttactcaggaaacacttttcagctccaaatctcatggtaaatatgcgcttttcccaatttttactgcgagttggcgagctactcgtataaagaataaaggtatttaa

SEQ ID NO: 471565 - DNA, 750 bp, Shigella flexneri
atgataggtcatatcacaaattctggcggcaataactctttgatgaaacatgatgtggtgcaaggaaataatatagtagatcttgatttactacgtaatttcaatggggtgacaggtttaaacagagattactttatttatatcagtgatatatttttaaatataaaacaacggaacgaaaaaaatcatgcaataaatatgttacgtgaagtctcaattagtaatgatactataagtgtaaaattctacagaaatgaaaaaatagaatgcgcttgtaattttctgatggataaagatgcgcaggggtatatcgacctgtctgattttgatttaacaaattgtcattttaaaggtgacgttatttctaaggtgtcttttttatcatcaaatctacaacatgtaactttcgaatgtaaagaaattgagaattgcaattttactaaggcaacagttgataatgtcatatttaaatgtcgacgtttacacaatgtgatttttctcaaaacgagtggcgaatgtgttgattttagccaaaatattcttgatacagttgacttctcgcagagtcaacttggtcatagtaattttcgcgaatgtcagattagaaattcaaacttcgataattgttatctttacgcttcgcacttcaccagagcagagtttctgtctgccaaagaaatatcatttattaaatcgaatttgacagctgttatgtttgatcatgtgcgaatgtcgacagggaatttttaa

SEQ ID NO: 471566 - DNA, 921 bp, Shigella flexneri
atgaaaatgaataaaagtctcatcgccctctgtttatcagcagggttactggcaagcgcgcctggaattagccttgccgatgttaactacgtaccgcaaaacaccagcgacgcgccagccattccatctgccgcgctgcaacaactcacctggacaccggtcgatcaatctagaacccagaccacccaactggcgaccggcggccaacaactgaacgttcccggcatcagtggtccggttgctgcgtacagcgtcccggcaaacattggcgaactgcccctgacgctgaccagcgaagtgaacaaacaaaccagcgtttttgcgccgaacgtgctgattcttgatcagaacatgaccccatcagccttcttccccagcagttatttcacctaccaggaactaggcgtgatgagtgcagagcggctggaaggcgttatgcgcctgacaccggcgttggggcagcaaaaactttatgttctggtctttaccacggaaaaagatctccagcagacgacccaactgctcgacccggctaaagcctatgccaaaggcgtcggtaactcgatcccggatattcccgatccggttgctcgtcataccagcgatggcttactgaaactgaaagtcaaaacgaactccagctccagcgtgttggtaggaccactatttggttcttccgctccagctccggttacggtaggcaacacggcggcaccagctgtggctgcacctgctccggtgccggtgaagaaaagcgagccgatgctcaacgacacggaaagttattttaataccgcgatcaaaaacgctgtcgcgaaaggtgatgttgataaggcgttaaaactgcttgatgaagctgaacgcctgggatcgacatctgcccgttccacctttatcagcagtgtaaaaggcaaggggtaa

SEQ ID NO: 471567 - DNA, 1338 bp, Shigella flexneri
atgattactctgcgcaaacttcctctggcggttgccgtcgcagcgggcgtaatgtctgctcaggcaatggctgttgatttccacggctatgcacgttccggtattggctggacaggtagcggcggtgaacaacagtgtttccagactaccggtgctcaaagtaaataccgtcttggcaacgaatgtgaaacttatgctgaattaaaattgggtcaggaagtgtggaaagagggcgataagagcttctatttcgacactaacgtggcctattccgtcgcgcaacagaatgactgggaagctaccgatccggccttccgtgaagcaaacgtgcagggaaaaaacctgatcgaatggctgccaggttccaccatctgggcaggtaagcgcttctaccaacgtcatgacgttcatatgatcgacttctactactgggatatttctggtcctggtgccggtctggaaaacatcgatgttggcttcggtaaactctctctggcagcaacccgctcctctgaagctggtggttcttcctcttttgccagcaacaatatttatgactataccaacgaaaccgcgaacgacgttttcgatgtgcgtttagcgcagatggaaatcaacccgggcggcacattagaactgggtgtcgactacggtcgtgccaacctgcgtgataactatcgtctggttgatggcgcatcgaaagacggctggttattcactgctgaacatactcagagtgtcctgaagggctttaacaagtttgttgttcagtacgctactgactcgatgacctcgcagggtaaaggtctgtcgcagggttctggcgtcgcgtttgataacgaaaaatttgcctacaatatcaacaacaacggtcacatgctgcgtatcctcgaccacggtgcgatctccatgggcgacaactgggacatgatgtacgtgggtatgtaccaggatatcaactgggataacgacaacggcaccaagtggtggaccgttggtattcgcccgatgtacaagtggacgccaatcatgagcaccgtgatggaaatcggctacgacaacgtcgaatcccagcgcaccggcgacaagaacaatcagtacaaaattaccctcgcacaacaatggcaggctggcgacagcatctggtcacgcccggctattcgtgtcttcgcaacctacgccaagtgggatgagaaatggggttacgactacaacggcgatagcaaggttaacccgaactacggcaaagccgttcctgctgatttcaacggcggcagcttcggtcgtggcgacagcgacgagtggaccttcggtgcccagatggaaatctggtggtaa

SEQ ID NO: 471568 - DNA, 1116 bp, Shigella flexneri
atggcgagcgtacagctgcaaaatgtaacgaaagcctggggcgaggtcgtggtatcgaaagatatcaatctcgatatccatgaaggtgaattcgtggtgtttgtcggaccgtctggctgcggtaaatcgactttactgcgcatgattgccgggcttgagacgatcaccagcggcgacctgttcatcggtgagaaacggatgaatgacactccgccagcagaacgcggcgttggtatggtgtttcagtcttacgcgctctatccccacctgtcagtagcagaaaacatgtcatttggcctgaaactggctggcgcaaaaaaagaggtgattaaccaacgcgtcaaccaggtggcggaagtgctgcaactggcgcatttgctggatcgcaaaccgaaagcgctctccggtggtcagcgtcagcgcgtggcgattggccgtacgctggtggccgagccaagcgtatttttgctcgatgaaccgctctccaacctcgatgctgcactgcgtgtgcaaatgcgtatcgaaatctcccgtctgcataaacgcctgggccgcacaatgatttacgtcacccacgatcaggtcgaagcgatgacgctggccgacaaaatcgtggtgctggacgccggtcgcgtggcacaggttgggaaaccgctggaactgtaccactatccggcaaaccgttttgtcgccggatttatcggttcgccaaagatgaacttcctgccggtaaaagtgaccgccaccgcaatcgatcaagtgcaggtggagctgccgatgccaaatcgtcaacaagtctggctgcctgttgaaagccgtgatgtccaggttggagccaatatgtcgctgggtattcgcccggaacatctactgccgagtgatatcgctgacgtcatccttgagggtgaagttcaggtcgtcgagcaactcggcaacgaaacccaaatctatatccagatcccttccattcgtcaaaacctggtgtaccgccagaacgacgtggtgttggtagaagaaggtgccacattcgctatcggcctgccgccagagcgttgccatctgttccgtgaggatggcactgcatgtcgtcgactgcataaggagccgggcgtttaa

SEQ ID NO: 471569 - DNA, 1191 bp, Shigella flexneri
atgaaaataaaaacaggtgcacgcatcctcgcattatccgcattaacgacgatgatgttttccgcctcggctctcgccaaaatcgaagaaggtaaactggtaatctggattaacggcgataaaggctataacggtctcgctgaagtcggtaagaaattcgagaaagataccggaattaaagtcaccgttgagcatccggataaactggaagagaaattccctcaggttgcggcaactggcgatggccctgacattatcttctgggcgcacgaccgctttggtggctacgctcaatctggcctgttggctgaaatcaccccggacaaagcgttccaggacaagctgtatccgtttacatgggatgccgtacgttacaacggcaagctgattgcttacccaatcgctgttgaagcgttatcgctgatttataacaaagacctgctgccgaacccgccaaaaacctgggaagagatcccggcgctggataaagaactgaaagcgaaaggtaagagcgcgctgatgttcaacctgcaagaaccgtacttcacctggccgctgattgctgctgacgggggttatgcgttcaagtatgaaaacggcaagtacgacattaaagacgtgggcgtggataacgctggcgcgaaagcgggtctgaccttcctggttgacctgattaaaaacaaacacatgaatgcagacaccgattactccatcgcagaagctgcctttaataaaggcgaaacagcgatgaccatcaacggcccgtgggcatggtccaacatcgacaccagcaaagtgaattatggtgtaacggtactgccgaccttcaagggtcaaccatctaaaccgttcgttggcgtgctgagcaccggtattaacgccgccagtccgaacaaagagctggcgaaagagttcctcgaaaactatctgctgactgatgaaggtctggaagcggttaataaagacaaaccgctgggtgccgtagcgctgaagtcttacgaggaagagttggcgaaagatccacgtattgccgccaccatggaaaacgcccagaaaggtgaaatcatgccgaacatcccgcagatgtccgctttctggtatgccgtacgtactgcggtgatcaacgccgccagcggtcgtcagactgtcgatgaagccctgaaagacgcgcagactcgtatcaccaagtaa

SEQ ID NO: 471570 - DNA, 1545 bp, Shigella flexneri
atggatgtcattaaaaagaaacattggtggcaaagcgacgcgctgaaatggtcagtgctaggtctgctcggcctgctggtgggttaccttgttgttttaatgtacgcacaaggggaatacctgttcgccattaccacgctgatattgagttcagcggggctgtatattttcgccaatcgtaaagcctacgcctggcgctatgtttacccgggaatggctggaatgggattattcgtcctcttccctctggtctgcaccatcgccattgccttcaccaactacagcagcactaaccagctgacttttgaacgtgcgcaggaagtgttgttagatcgctcctggcaagcaggcaaaacctataactttggtctttacccggcgggcgatgagtggcaactggcgctcagcgacggcgaaaccggcaaaaattacctctccgacgcgtttaaatttggcggcgagcaaaaactgcaactgaaagaaacgaccgcccagcccgaaggcgaacgcgcgaatctgcgcgtgattacccagaatcgtcaggcgctgagtgacattaccgccattctgccggatggcaacaaagtgatgatgagctccctgcgccagttttctggcacgcagccgctctacacactcgacggtgacggcacgttgacgaataatcagagtggcgtgaaatatcgtccgaataaccaaattggcttttaccagtccattaccgccgacggcaactggggggatgaaaagctaagccccggttacaccgtgaccaccggctggaaaaactttacccgcgtctttaccgacgaaggcattcagaaaccgttcctcgccattttcgtctggaccgtggtgttctcgctgatcactgtctttttaacggtggcggtcggcatggttctggcatgtctggtgcagtgggaagcgttgcgcggcaaagcggtctatcgcgtcctgctgattctgccctacgcggtgccatcgttcatttcaatcttgattttcaaaggattgtttaaccagagcttcggtgaaatcaacatgatgttgagcgcgctgtttggcgtgaagcccgcctggttcagcgattcgaccaccgctcgcacgatgctgattatcgtcaatacctggctgggttatccgtacatgatgatcctctgcatgggcttgctgaaagcgattccggacgatttgtatgaagcctcagcaatggatggcgcaggtccgttccagaacttctttaagattacgctgccgctgctgattaaaccgctgacgccgctgatgatcgccagcttcgcctttaactttaacaacttcgtgctgattcagctgttaaccaacggcggcccggatcgtcttggcacgaccacgccagccggttataccgacctgcttgttaactacacctaccgtatcgcttttgaaggcggcgggggtcaggacttcggtctggcggcagcaattgccacgctgatcttcctgctggtgggtgcgctggcgatagtgaacctgaaagccacgcgaatgaagtttgattaa

SEQ ID NO: 471571 - DNA, 891 bp, Shigella flexneri
atggcaatggtccaaccgaaatcgcaaaaagcacgtttgtttattactcacctgctactgctactttttatcgcggcgattatgttcccgctgctgatggtcgtcgctatctcgctgcgtcagggaaacttcgcgaccggtagcctgatcccggagcaaatctcctgggatcactggaaactggcgttaggttttagcgttgaacaggctgatggtcgcattacgccaccgccattcccggtactgctgtggctgtggaactcggtaaaggtcgctgggatttccgcgattggcattgtggcgctctccaccacctgcgcctacgctttcgcccgtatgcgctttccaggcaaagcgacgctgctgaaaggaatgctgattttccagatgttcccggcagtactttcactggtcgcgttgtatgcgttgtttgatcgtctgggtgagtacattccattcattggcctgaatactcacggcggcgtaattttcgcgtatctgggtgggattgcgctgcatgtctggaccatcaaaggctatttcgaaaccatcgacagttcgctggaagaagcggctgcgctggatggtgcgacaccgtggcaggccttccgccttgtcctgttgccgctgtcagtaccgattctggcggtggtattcatcctgtcgtttatcgctgccattactgaagttccggtcgcgtcgctgttactgcgtgacgtaaacagctacaccctggccgtggggatgcagcaatacctcaacccgcaaaactacctgtggggtgactttgccgccgctgccgtgatgtctgcattaccgatcaccatcgtcttcttgctggctcaacgctggctggtcaacggcctgacggcaggtggtgtgaaaggttaa

SEQ ID NO: 471572 - DNA, 1476 bp, Shigella flexneri
atgaatacccagtataattccagttatatattttcgattaccttagtcgctacattaggtggtttattatttggctacgacaccgccgttatttccggtactgttgagtcactcaataccgtctttgttgctccacaaaacttaagtgaatccgctgccaactccctgttaggattttgcgtagccagcgctctgattggttgcatcatcggcggtgccctcggtggttattgcagtaaccgcttcggccgtcgtgattcacttaagatttctgctgtcctgttttttatttctggtgtaggttctgcctggccagaacttggttttacctctataaacccggacaacacagtacctatttatctggcaggttatgtcccggaatttgttatttatcgtattattggcggtattggcgttggtttagcctcaatgctttcaccaatgtatattgcggaactggctccagctcatattcgcggaaaactggtttcatttaaccagtttgcgattattttcgggcaacttttagtttactgcgtaaactattttattgcccgttccggtgatgccagctggctgaatactgacggcaggcgttatatgtttgcctcggaatgtatccctgcactgctgttcttaatgctgctgtataccgtgccagaaagtcctcgctggctgatgtcacgcggcaagcaagaacagacggaaagtatcctgcgcaaaattatgggcaacacgcttgcaactcaggcagtacaggaaattaaacactccctggatcatggccgcaaaaccggtggtcgtctgctgatgtttggcgtgggcgtgattgtaatcggcgttatgctctccatcttccagcaatttgtcggcatcaatgtggtgctgtactacgcgccggaagtgttcaaaacgctgggggccagcacggatatcgcgctgttgcagaccattattgtcggagttatcaacctcacctttaccgtactggcaattatgactgtggataaatttggtcgtaagccactgcaaattatcggcgcactcggaatggcaatcggtatgtttagcctcggtaccgcgttttacactcaggcatcgggtattgtggcgctactgtcgatgctgttctatgttgccgcctttgccatgtcctggggtccggtatgctgggtactgctgtcggaaatcttcccgaatgctattcgtggtaaagcgctggcaatcgcggtggcggcccagtggctggcgaactacttcgtctcctggaccttcccgatgatggacaaaaactcctggctggtggcccatttccacaacggtttctcctactggatttacggttgtatgggcgttctggcagcactgtttatgtggaaatttgtcccggaaaccaaaggtaaaacccttgaggagctggaagcgctctgggaaccggaaacgaagaaaacacaacaaactgctacgctgtaa

SEQ ID NO: 471573 - DNA, 411 bp, Shigella flexneri
atgacgtcactctctcgtccgcgcgtggagtttatctccaccattttgcagaccgtactcaatcttggcctgctgtgcctcggcctgattttggttgtcttcctcggcaaagaaacggtgcatctggctgatgtgctgttcgcgccagaacaaaccagcaaatatgagctggtagaaggactggtggtttactttctctatttcgaatttatcgcgctgattgtgaagtactttcagtccggttttcacttcccgctacgttactttgtctatattgggatcaccgccattgtgcgcttgatcatcgtcgatcataaatcgccactggatgtgttgatctactcggctgcgatcctgttactggtgatcaccctgtggctgtgtaattcgaaacggctgaagcgggagtaa

SEQ ID NO: 471574 - DNA, 2097 bp, Shigella flexneri
atgaaaaaaagacatctgcttagcttactggcgctgggcattagcacagcttgctacggcgaaacatatcctgcgcccattggtccgtcgcagtcggatttcggtggcgtaggattattacaaactcccaccgcgcgtatggcacgggaaggggagttgagtctgaactatcgcgataacgatcagtaccgttattactcagcttcagtgcaactcttcccgtggctggaaacaacgctgcgctacaccgacgtgcgcacccggcagtacagcagcgtcgaagcgttctctggcgatcaaacgtataaagataaagccttcgatctcaaactgcgtttgtgggaagagagttactggctgccgcaagtggcggttggtgcgcgggatatcggcggtacggggctgtttgatgcggaatatcttgttgccagcaaagcctgggggccgttcgattttacgctcggcctgggctggggatatctgggcaccagcggtaatgtaaaaaatccgctctgttcagccagtgataaatattgctatcgcgataacagctacaaacaggcgggatctatcgacggtagccagatgttccacggtcctgcctcactgtttggcggcgtggaataccagacgccctggcaaccgctgcgtctgaaactggagtatgaaggtaataattatcagcaggattttgccgggaagctggagcaaaaaagtaagtttaacgtcggggcgatttatcgcgttaccgattgggccgacgttaaccttagctatgaacgtggcaacacctttatgtttggcgtcacgctgcgcaccaactttaacgatctgcgcccgtcctacatcgataacgcccgcccgcaatatcaaccgcagccgcaggatgccattttgcagcattcggtggtggcgaatcagttaacgttgctgaaatacaacgccggacttgccgatccgcagatccaggcgaaaggcgatacgctgtatgttaccggcgagcaggtgaaatatcgtgattcgcgcgaagggatcatccgtgctaatcggatcgtgatgaacgatctgccggatgggatcaaaacgatccgcattacggaaaatcgccttaacatgccgcaagtgacgacggaaaccgatgtcgccagcctgaaaaatcatctcgccggagagccgttgggccacgaaacgacgctggcgcacaaacgcgtcgagccagtggttccgaagtccaccgagcagggctggtatatcgacaaatcacgctttgatttccatatcgatccggtgctgaaccagtcggtcggtggcccggaaaacttttacatgtatcagctgggcgtgatgggaacggcagatttgtggctgacggaccatctactgaccaccggcagcctgtttgcaaatcttgccaacaactacgacaagtttaactacaccaatccaccgcaggactcgcacttaccgcgcgttcgtacccatgtgcgcgagtatgtgcagaacgatgtctatgtgaataacctgcaagccaactacttccagcatctgggcaacggcttctacggtcaggtctatggaggttatctcgaaaccatgtttggcggtgcgggggccgaagtgttgtatcgtccgctggacagtaactgggcgtttggtctggatgccaactacgttaaacagcgcgactggcgtagtgcaaaagatatgatgaaattcaccgactacagcgtgaaaaccggacatctgaccgcctactggacgccatctttcgcccaggacgtgttggtgaaagccagcgtcgggcagtatctggcaggggataaaggcggcacgctggagatcgctaaacgctttgacagcggcgtggtggtgggtggctatgccacgatcaccaacgtttcgaaagaggagtacggcgaaggggacttcaccaaaggcgtgtatgtctcggtaccgttggatctcttctcgtctggcccgacacgcagccgtgcggcgattggctggacgccgctgacgcgtgacggtggtcagcaacttgggcgtaagttccagttgtatgacatgaccagcgaccgtagcgtaaatttccgctaa

SEQ ID NO: 471575 - DNA, 738 bp, Shigella flexneri
atgattaaacaaactattgtcgcgttgcttttgagtgtgggagcgtcatcggtcttcgcggcaggaaccgtcaaggtgttcagcaatggcagcagtgaggccaaaacgctaacgggcgcagagcatttaatcgatctggtagggcaacctcgactggcaaacagctggtggcctggtgcggtgattagcgaagagctggcaacggcggcagcattgcgtcagcagcaggcgttgctgacacggctggcagaacagggcgcagattccagcaccgacgatgccgccgccattaacgccttacgccagcaaatccaggcattgaaagtgacaggcaggcaaaaaatcaatcttgatcccgatatcgtccgcgttgccgaacgcggtaacccgccgttgcagggcaactacacgctgtgggtcggaccaccgccgtccacggtcacgttgttcgggcttatcagccatcctggcaatcagccattcactccaggtcgcgacgtggcgagctatctctctgaccagagcctgctcagcggtgcggatcgcagctacgcgtgggtcgtttacccggacggacgcacgcaaaaagcgccggtggcttactggaacaagcgtcacgtagagccgatgcccggcagcattatttatgttggcctcgcagattccgtctggagtgagacgcctgatgcccttaacgccgacattcttcagactctgacgcagcggataccccaataa

SEQ ID NO: 471576 - DNA, 639 bp, Shigella flexneri
gtgaagcgacctgcactcattcttatctgcctgctattacaggcctgttcagccacgactaaagagctgggcaattcactgtgggacagtctgttcggcacgccaggcgtacagctgacggacgatgatattcaaaatatgccctacgccagccagtacatgcagcttaatggcgggccgcaattgtttgtggtgctggccttcgctgaagacggacaacaaaaatgggtcactcaggatcaagccactcttgtcacacaacatggtcgtctggtgaagactttgcttggcggcgacaacctgattgaagtgaataaccttgccgccgacccgctgattaaacccgcacaaattgttgatggtgcaacatggacgcgcacgatgggctggaccgagtaccagcaggtacgctacgccaccgcacgctcagtcttcaaatgggatggcaccgataccgtcaaggtcggcagcgatgaaaccctggttcgcgtgctggacgaagaagtctccaccgaccaggcgcgctggcataaccgctactggatcgacagcgaagggcaaattcgccagtcggaacagtatctcggcgcggattatttcccggtgaaaaccactctcatcaaggcggcaaaacaatga

SEQ ID NO: 471577 - DNA, 243 bp, Shigella flexneri
atgaaaaaagttctgtatggcatttttgccatatctgcgcttgcggcgacttctgcgtgggctgcacctgtacaggtgggcgaagcggcagagtcggcagcaacgtcggtttcggcggggagttcctccgcgaccagcgtcagcaccgtaagctcggcggtgggtgtcgcgctcgcggcaaccggtggcggtgatggttctaataccgggaccatcacaaccacgaccaccagtacccagtaa

SEQ ID NO: 471578 - DNA, 1650 bp, Shigella flexneri
atgaaaaacatcaatccaacgcagaccgctgcctggcaggcactacagaaacacttcgatgaaatgaaagacgttacgatcgccgatctttttgctaaagacggcgatcgtttttctaagttctccgcaaccttcgacgatcagatgctggtggattactccaaaaaccgcatcactgaagagacgctggcgaaattacaggatctggcgaaagagtgcgatctggcgggcgcgattaagtcgatgttctctggcgagaagatcaaccgcactgaaaaccgcgccgtgctgcacgtagcgctgcgtaatcgtagcaataccccgattctggttgatggcaaagatgttatgccagaagtcaacgcggtgctggagaagatgaaaatcttctcggaagcgattatctccggtgagtggaagggttataccggcaaagcaatcactgacgtagtgaacatcgggatcggcggttctgacctcggcccgtacatggtgaccgaagcactgcgtccgtacaaaaaccacctgaacatgcactttgtttctaacgtcgatgggactcacatctcggaagtgctgaaaaaagtaaacccggaaaccacgctgttcctggtagcatctaaaaccttcaccactcaggaaaccatgaccaacgcccatagcgcgcgtgactggttcctgaaagcggcaggtgatgaaaaacacgttgcgaaacattttgcggcgctctcaaccaatgccaaagccgttggcgagtttggtattgatactgccaacatgttcgagttctgggactgggtcggcggccgttactctttgtggtcagcgattggcctgtcgattgttctctccatcggctttgataacttcgttgaactgctttctggcgcacacgcaatggacaagcatttctccaccacgcctgccgagaaaaacctgcctgtcctgctggcgctgattggcatctggtacaacaatttctttggtgcggaaactgaagcgattctgccgtatgaccagtatatgcaccgtttcgcggcgtacttccagcagggcaatatggagtccaacggtaagtatgttgaccgtaacggtaacgttgtggattaccagactggcccgattatctggggtgaaccaggcactaacggtcagcacgcgttctaccagctgatccaccagggaaccaaaatggtaccgtgcgatttcatcgccccggctatcacccataacccgctctctgatcaccaccagaaactgctgtctaacttcttcgcccagaccgaagcgctggcgtttggtaaatcccgcgaagtggttgagcaggaatatcgcgatcagggtaaagatccggcaacgcttgactacgtggtgccgttcaaagtgttcgaaggtaaccgcccgaccaactccatcctgctgcgcgaaatcactccgttcagcctgggtgcgttgattgcgctgtatgagcacaaaatctttactcagggcgtgatcctgaacatcttcaccttcgaccagtggggcgtggagctgggtaaacaactggcaaaccgtattctgccagagctgaaagatgataaagaaatcagcagccacgatagctcgaccaatggtctgattaaccgctataaagcgtggcgcggttaa

SEQ ID NO: 471579 - DNA, 1350 bp, Shigella flexneri
atgtctgaaattgttgtctccaaatttggcggtaccagcgtagctgattttgacgccatgaaccgcagcgctgatattgtgctttctgatgccaacgtgcgtttagtagtcctctcggcttctgctggtatcactaatctgctggtcgctttagcggaagggctggaacctggcgagcgattcgaaaaactcgacgctattcgcaacatccagtttgccattctggaacgtctgcgttacccgaacgttatccgtgaagagattgaacgtctgctggagaacattactgttctggcagaagcggcggcgctggcaacgtctccggcgctgacagatgagctggtcagccacggcgagctgatgtcgaccctgctgtttgtcgaaatcctgcgcgaacgcgatgttcaggcacagtggtttgatgtacgtaaagtgatgcgtaccaacgaccgatttggtcgtgcagagccagatgtagccgcgctggcggaactggccgcgctgcagctgctcccacgcctcaatgaaggcttagtgatcacccagggatttatcggtagcgaaaataaaggtcgtacaacgacgcttggccgtggaggcagcgattatacggcagccttgctggcggaggctttacacgcatctcgtgttgatatctggaccgacgtcccgggcatctacaccaccgatccacgcgtagtttccgcagcaaaacgcattgatgaaatcgcgtttgccgaagcggcagagatggcaacttttggtgcaaaagtactgcatccggcaacgttgctacccgcagtacgcagcgatatcccggtctttgtcggctccagcaaagacccacgcgcaggtggtacgctggtgtgcaataaaactgaaaatccgccgctgttccgcgcgctggcgcttcgtcgcaatcagactctgctcactttgcacagcctgaatatgctgcattctcgcggcttcctcgcggaagttttcggcatcctcgcgcggcataatatttcggtagacttaatcaccacgtcagaagtgagcgtggcattaacccttgataccaccggttcaacctccactggcgatacgttgctgacgcaatctctgctgatggagctttccgcactgtgccgggtggaggtggaagaaggtctggcgctggtcgcgttgattggcaatgacctgtcaaaagcctgcggcgttggcaaagaggtattcggcgtactggaaccgttcaacattcgcatgatttgttacggcgcatccagccataacctgtgcttcctggtgcccggcgaagatgccgagcaggtggtgcaaaaactgcatagtaatttgtttgagtaa

SEQ ID NO: 471580 - DNA, 1416 bp, Shigella flexneri
atgaaaatcaaaactcgcttcgcgccaagcccaacaggctatctgcacgttggcggcgcgcgtactgctctttactcctggctttttgcacgtaaccacggcggtgagttcgtgctgcgtattgaagacaccgatcttgagcgttccacgccggaagctatcgaagccattatggatggcatgaactggctgagcctggagtgggatgaaggtccgtactaccagaccaaacgttttgatcgctacaacgcggtgatcgatcagatgctggaagagggcactgcttataaatgctattgctctaaagagcgcctggaagcgctgcgcgaagagcaaatggcgaaaggtgagaagccgcgttatgacggtcgctgccgccacagccatgagcatcatgctgatgatgaaccgtgtgttgtacgttttgctaacccgcaggaaggttctgttgtttttgacgatcagatccgtggtccgatcgagttcagcaaccaggaactggacgatcttattatccgccgtaccgatggttccccaacctataacttctgtgtggttgtcgatgactgggatatggaaatcacccacgttatccgtggcgaagaccatatcaacaacacgccgcgccagatcaacattcttaaggccctgaaagcgccggtgccggtttacgcgcacgtttctatgatcaatggcgatgacggtaaaaaactgtccaaacgtcacggggcagtcagcgtaatgcagtatcgtgatgacggttatttgccagaagcactgctgaactatctggtgcgtctgggctggtcccacggcgatcaggaaatcttcactcgtgaagagatgatcaaatacttcactttgaatgccgtcagcaaatctgccagtgcgttcaacaccgacaagctgctgtggctgaaccatcactacattaacgcgctgccgccggagtatgttgctactcacttacagtggcacattgagcaggaaaatatcgatacccgtaacggcccgcagctggctgatctggtgaaactgctgggcgaacgctgcaagacgctgaaagagatggcacagagctgccgttatttctacgaagattttgctgagttcgatgccgatgcggcgaaaaaacatctgcgtccggtagcgcgtcagccgctggaagtggttcgtgacaaactggccgcgattactgactggaccgctgaaaacgttcatcacgctattcaggcgacggcggatgagctggaagtgggtatgggtaaagttggtatgccgctgcgtgtcgccgtaaccggtgcggggcagtctccagcactggatgttaccgttcacgcaattggtaagacccgcagtatcgagcgtatcaacaaagcgctggattttattgctgaacgcgaaaatcagcagtaa

SEQ ID NO: 471581 - DNA, 372 bp, Shigella flexneri
atgaccaccgaagaactggctgaatgcctcggtgtggctaaacaaactgttaaccgttggaccagagaaaaaggctggaaaacggaaaaatttcccggcgtgaaaggcggtcgtgccagacttattctggtcgatacgcaagtttgcgagtttattcagaacacgccagccttccataacacaccaatgttgatggaagctgaagagagaattgctgaatacgctcctggagcacgcgccccggcgtatcgacaaatcatcaacgcgatagataatatgacagacattgagcaggaaaaagtcgcgcaatttttgtcacgtgaaggaattcgcaatttcctcgcccgtctcgatattgacgaatcagcataa

SEQ ID NO: 471582 - DNA, 360 bp, Shigella flexneri
atgttcaaggagaggatgacaccagatgaacttgccagactgaccggctatagccgccagaccattaataaatgggtacgcaaggaaggctggacaacgtcaccaaaacctggcgtccagggtggcaaagcccgactggttcacgtcaatgaacaggttcgtgaatatattcgcaatgctgaacgtccagaaggtcagggagaagcgcctgccctttctggtgatgcgccgcttgaagtattgctggtgacactggcgaaagagatgacgccagttgaacaaaaacagtttacatccttgcttctgcgggaagggattatcggattgttacaacgcttagggattcgcgatagcaaataa

SEQ ID NO: 471583 - DNA, 627 bp, Shigella flexneri
atgtttgtggagcataacctgataaaaaatatcaagatattcacactagcgtttacgctcaccgtggtacttattcagctatcccgttttatttcgccacttgccattatccattccagttatatctttctggcgtggatgccactgtgcgtaatgctgtcaatcttgtttatctttggctggcgcggtgtcgttcccgttttatgcgggatgttttgcaccaatctgtggaactttcatctctcttttttacagactgcggtcatgctcggcagccagacgtttgtcgtgttgtgtgcctgcgcaatattacgctggcagctggggacgcgttggcgttatggattgaccagccgatatgtctggcaacgtctgttctggcttggtttggtgacgccgatcggcatcaaatgcagcatgtatcttgtggggagcttctttgatttcccgctaaagatatccacctttttcggcgatgcggatgccattttcacggtcgttgatttactaagccttttcaccgcagtgctgatttacaacatgcttttctactatctcactcgcatttaccttaagctggctggcagcgttaagcgtgctgctacttctgttgtgcacaccttatga

SEQ ID NO: 471584 - DNA, 456 bp, Shigella flexneri
gtgctgctacttctgttgtgcacaccttatgaaaacgactttattgccggttacctggtacccgttttcttcatcatctttaccctcggggtcggtaatcttcgctatccgtttttaaatctcacctgggctgtttcaacgctttgccttctgaattacaaccagaactttttgcaaggggtggaaaccgaatattcgctggcatttattctcgcggtgctgatttcctttagcgtttgcctgctctatatggtgcgcatttatcatcgcagtgaatggcttaatcgccgctggcatttgcaggcgctaacagatccgttaacgctcctacccaactttcgtgcgttggaacaagcgccggagcaagaggcgggcaagagtttttgctgcctgcgcattgataatcttgagtttatgagtcgtcattacggctttgccgtacgctgctgccgttga

SEQ ID NO: 471585 - DNA, 1032 bp, Shigella flexneri
atgcaggaaaacgaaaagttgtatcaattgccgggtagtgaactgctgttagtgctgagcgggccggaaacggaagggcgactccagcatatggttaacatcctgaatagtcggcaaattcactggaacaataccgggctggatatgggctatggtgctgcctgggggcgttttgatggaaatcaggaaaccctgcaacccttgttggggcagttaagctggctggcggagcaatcctgcgcacatcatcatgtgctggcgctggatagcagagaggagatggtttccgggcagaccactaaacaggtgctattgctgaataccattcgcacggcgttagatcagggtgatttgctgctctacgcccagccaattcgcaacaaagagggtgaaggttatgatgagatcctcgcgcgactgaaatatgacggcggcattatgaccccggataagtttctgccccttattgctcagtttaaccttagcgcgcgttttgatttgcaagtgctggaatccttgttgaagtggctggcaacacacccttgcgacaaaaaaggaccgcgcttttcagtcaatttaatgccgctcacgctgctgcaaaagaatattgccgggcggattattcgtctgtttaagcgttatcacatctccccgcaggcggtcattcttgagatcaccgaggagcaggcgttttctaacgcagaaagcagcatgtacaacatcgagcagctgcataagtttggtttccggattgcgattgatgactttggcaccggatatgccaactacgaacggttaaagcgtttgcaggctgatatcatcaaaattgatggcgtctttgtgaaagatattgtcacgaatacgctggatgcgatgattgtgagatcaattaccgatctggcgaaagcgaagtcattgagtgtggtcgcggagtttgtcgagacgcaacagcagcaggcgctattgcataagctcggggtgcaatatctgcaagggtatttgattggtcgcccgcagccattagctgattaa

SEQ ID NO: 471586 - DNA, 1203 bp, Shigella flexneri
atggaccgcgtccttcattttgtactggcacttgccgttgttgtgattctcgcactgctggtaagcagcgaccgcaaaaaaattcgtatccgttatgttattcaactgcttgttatcgaagtgttactggcgtggttcttcctgaactccgacgttggtttaggcttcgtgaaaggcttctccgaaatgttcgaaaaactgctcggatttgccaacgaagggactaacttcgtctttggtagcatgaatgatcaaggcctggcattcttcttcctgaaagtgctgtgcccaatcgtctttatctctgcactgatcggtattctccagcacattcgcgtgttgccggtgattatccgcgcaattggtttcctgctctccaaagtcaacggtatgggcaaactggaatcctttaacgccgtcagctccctgattctgggtcagtcagaaaactttattgcctataaagatatcctcggcaaaatctcccgtaatcgtatgtacaccatggctgccacggcaatgtccaccgtgtcgatgtccatcgttggtgcatacatgaccatgctggaaccgaaatacgtcgttgctgcgctggtactgaacatgttcagcacctttatcgtgctgtcgctgatcaatccttaccgtgttgatgccagtgaagaaaacatccagatgtccaacctgcacgaaggtcagagcttcttcgaaatgctgggtgaatacattctggcaggtttcaaagttgccattatcgttgccgcgatgctgatcggctttatcgccctgatcgccgcgctgaacgcactgtttgccaccgttactggctggtttggctacagcatctccttccagggcatcctaggctacatcttctatccgattgcatgggtgatgggtgttccttccagtgaagcactgcaagtgggcagtatcatggcgaccaaactggtttccaacgagttcgttgcgatgatggatctgcagaaaattgcttccacgctctctccgcgtgctgaaggcatcatctctgtgttcctagtttccttcgctaacttctcttcaatcgggattatcgcaggtgcagttaaaggcctgaatgaagagcaaggtaacgtggtttctcgcttcggtctgaaactggtttacggctctaccctggtgagtgtgctgtctgcgtcaatcgcagcactggtgctgtaa

SEQ ID NO: 471587 - DNA, 1239 bp, Shigella flexneri
atgacgaactatcgcgttgagagtagcagcggacgggcggcgcgcaagatgaggctcgcattaatgggacctgcgttcattgcggcgattggttatatcgatcccggtaactttgcgaccaatattcaggcgggtgctagcttcggctatcagctactgtgggttgtcgtttgggccaacctgatggcgatgctgattcagatcctctctgccaaactagggattgccaccggtaaaaatctggcggagcagattcgtgatcactatccgcgtcccgtagtgtggttctattgggttcaggcagaaattattgcgatggcaaccgacctggcggaatttattggtgcggcgatcggttttaaactcattcttggtgtttcgttgttgcagggcgcggtgctgacggggatcgcgactttcctgattttaatgctgcaacgtcgcgggcaaaaaccgctggagaaagtgattggcgggttactgttgtttgttgccgcggcttacattgtcgagttgattttctcccagcctaacctggcgcagctgggtaaaggaatggtgatcccgagtttacctacttcggaggcggtcttcctggcagcaggcgtgttaggggcgacgattatgccgcatgtgatttatttgcactcttcgctcactcagcatttacatggcggttcgcgtcaacaacgttattccgccaccaaatgggatgtggctatcgccatgacgattgccggttttgtcaatctggtgatgatggctacagctgcggcggcgttccacttttctggtcatactggtgttgccgatcttgatgaggcttatctgacgctgcaaccgctgttaagccatgctgcggcaacggtctttgggttaagtctggttgctgccggactgtcctcaacggtggtggggacactggcggggcaggtggtgatgcagggattcattcgcttccatatcccgctgtgggtgcgtcgtacagtcaccatgttgccgtcatttattgtcattctgatgggattagatccgacacggattctggttatgagtcaggtgctgttaagttttggtatcgccctggcgctggttccactgctgattttcaccagtgacagcaagttgatgggcgatctggtgaacagcaaacgcgtaaaacagacaggctgggtgattgtagtgctggtcgtggcgctgaatatctggttgttggtggggacggcgctgggattgtag

SEQ ID NO: 471588 - DNA, 327 bp, Shigella flexneri
atgttcaggtcactgtttctggcggccgccctgatggcatttaccccgcttgcagcaaatgcaggtgaaatcaccctactgccatcgatcaaattacaaattggcgatcgcgatcattacggtaattactgggacggtggtcactggcgagatcgtgattactggcatcgcaattatgaatggcgcaaaaaccgctggtggcgtcatgataatggctatcatcgtggctgggataagcgtaaagcatatgagcgtggctatcgtgaaggctggcgcgatcgtgacgatcatcgcggaaaaggccgcggacatgggcaccgccattaa

SEQ ID NO: 471589 - DNA, 1257 bp, Shigella flexneri
atgctccatccgcgagccagaaccatgttgttattatcgctccccgccgtggcaattgggattgcgtccagtcttattctgattgtggtgatgaaaatcgcctcggtattacagaatttgctctggcaacgactgccgggaactctggggatagcccaggattcacccctctggatcatcggtgtattaacgctaacgggtattgcggtggggttggttatccgtttcagccagggtcatgccggaccagaccccgcctgtgaaccgctgatcggcgcaccggttccgccctctgcgctacctggacttatcgtagcattaattctcggtcttgctggcggcgtcagcctggggccggaacatccgatcatgaccgtcaatatcgcccttgccgtcgccattggcgctcgtctgttaccgcgcgtcaaccgaatggagtggactattttagcctctgccggaaccatcggcgcgctgtttggtacacctgttgcggcggcgttgatattttcgcaaaccttaaatggcagtagtgaagttccgctatgggatcgtctttttgcgccgttaatggcggcagcagctggtgcacttactaccggattatttttccatccccatttttcactgcccattgcgcattacggacagatggaaatgaccgatattctcagcggtgcaattgtcgcggcgattgccatcgcagcagggatggtcgccgtatggtgcttaccacggttgcacgcgatgatgaatcaaatgaaaaatccggtgctcgtgctgggtattggcggatttattctcggaattctgggggttattggtggaccagtttcgctgtttaaagggctggatgagatgcagcagatggtggcaaatcaggctttcagcaccagcgattactttttgctggcggtaattaaacttgccgccctggtcgttgctgccgccagtggctttcgcggtgggcgaatcttcccggcagtgtttgtcggcgtggcattagggttgatgctgcatgagcacgttcccgccgttccagcggcaataaccgtttcctgcgctattctcggcatcgtgctggtggtaacacgcgatggctggttaagtctttttatggcggcagtcgttgtacccaataccacattgctaccgctgctctgtatcgtcatgcttccggcatggctgttattagcaggtaagccgatgatgatggtcaatcgtccgaagcaacagccaccccacgataatgtttag

SEQ ID NO: 471590 - DNA, 966 bp, Shigella flexneri
atgacaaagtatgcattagtcggtgatgtgggcggcaccaacgcacgtcttgctctgtgtgatattgccagtggtgaaatctcgcaggctaagacctattcagggcttgattaccccagcctcgaagcggtcattcgcgtttatcttgaagaacataaggtcgaggtgaaagacggctgtattgccatcgcttgcccaattaccggtgactgggtggcaatgaccaaccatacttgggcgttctcaattgccgaaatgaaaaagaatctcggttttagccatctggaaattattaacgattttaccgctgtatcgatggcgatcccgatgctgaaaaaagagcatctgattcagtttggtggcgcagaaccggtcgaaggtaagcctattgcggtttacggtgccggaacggggcttggggttgcgcatctggtccatgtcgataagcgttgggtaagcttgccgggcgaaggcggtcacgttgattttgcgccgaatagtgaagaagaggccattatcctcgaaatattgcgtgcggaaattggtcatgtttcggcggagcgcgtgctttctggccctgggctggtgaatttgtatcgcgcaattgtgaaagctgacaaccgcctgccagaaaatctcaagccaaaagatattaccgaacgcgcgctggctgacagctgcaccgattgccgccgcgcattgtcgctgttttgcgtcattatgggccgttttggcggcaatctggcgctcaatctcgggacatttggcggcgtgtttattgcgggcggtatcgtgccgcgcttccttgagttcttcaaagcctccggtttccgtgccgcatttgaagataaagggcgctttaaagaatatgtccatgatattccggtgtatctcatcgtccatgactatccgggtcttctcggttccggtgcacatttacgccagaccttaggtcacattctgtaa

SEQ ID NO: 471591 - DNA, 327 bp, Shigella flexneri
atgagtaagaaactgattgccttatgtgcctgcccaatgggcctagctcacacttttatggccgctcaggtgctggaagaagcggcggtagaagccggttatgaagtgaaaattgaaacccagggcgcggacggcatccagaatcgcctgacggcgcaggatatcgccgaagcgaccatcatcatccattccgtggcagttaccccggaagataacgaacgtttcgaatcacgcgacgtttatgaaatcactttgcaggacgcaattaaaaacgctgcgggcatcatcaaagaaatcgaagagatgattgcctctgaacaacagtaa

SEQ ID NO: 471592 - DNA, 1248 bp, Shigella flexneri
atggccattaaaaaacgcagtgcaaccgttgtgcctggcgcatccggtgcggcagcggcagttaagaatccgcaggcctctaaaagcagcttctggggtgaactcccgcagcatgtgatgtcagggatttcacgcatggtgccgaccttaattatgggcggtgtgatcctcgctttcagccagctgattgcttatagctggcttaaaattcctgctgagatcggcatcatggatgctcttaatagcgggaaattctccggtttcgacctctccttacttaaatttgcctggctgtcgcagtccttcggcggcgtgttgtttggttttgccattccgatgtttgctgcatttgtggcgaactctatcggtggcaaactggcgttcccggctggttttatcggcgggttgatgtctacccagccgacgcaactgctgaacttcgatcccagcactatgcaatgggcgacctcttcgccggtgccgtccaccttcattggtgcgctgattatttctatcgttgccggttaccttgtgaaatggatgaaccagaaaatccagttactggatttcctgttagcgttcaaaaccacatttttgctaccgattctttccgccatttttgtcatgctggcgatgtactacgtcatcactccctttggtggctggatcaacggcggtatccgtactgtgctgactgccgcaggtgagaagggcgcgctgatgtacgcaatggggatcgccgcggcgacagcaatcgaccttggtggcccgatcaacaaagccgcaggtttcgttgccttcagctttaccactgaccacgtattaccggtcaccgctcgttctatcgctatcgttattccgccgattggtctgggtctggcgaccattattgaccgtcgtttaaccggcaaacgcctgttcaacgctcaactttatccgcagggtaagaccgcgatgttcctggcctttatggggattagtgagggtgcgattccgtttgcgctggaaagccccatcaccgctattccgtcatatatggtcggcgcgattgtcggctcaaccgcagctgtctggctgggcgcagtgcaatggttcccggaatccgctatctgggcatggccgctggtcactaacctgggcgtttatatggcggggatcgcgctgggggcaatcattactgcgctgatggtggtgttcctgcgtctgatgatgttccgcaaaggcaaattgttaatcgatagcctgtaa

SEQ ID NO: 471593 - DNA, 666 bp, Shigella flexneri
atgacattactcgcttcgctgcgcaactggcttaaggtgcaacaactggatgcggtgcttctctcctcacggcagaacaaacagccgcatctggggatctccaccggatcaggctatgtggttattagccgtgaaagtgcgcacattctggtagattcgcgctatttcgttgaggtggaagcccgtgcgcaaggctaccagctgcatttgcttgacgcgacgaacacgcttaccactatcgtcaatcaaatcattgccgatgagcagttgcaaacgctcggttttgaaggccagcaggtgagttgggaaaccgcgcaccgctggaagtctgaactcaatgcgaaactggttagcgccacgccggatgtgctgcggcaaatcaaaacgccagaggaggtggagataatccgcctcgcctgtgggattgccgatcgcggagcggagcatattcgccgctttattcaggcggggatgagcgagcgcgagatagccgctgaactggagtggtttatgcgccagcagggcgcagaaaaagcctcttttgacaccattgtcgccagcggctggcgcggggcgctgccgcacggcaaagccagcgacaagattgttgcagcgggcgagtttgtcactctcgattttggtgcgctgtatcagggctactgctga

SEQ ID NO: 471594 - DNA, 417 bp, Shigella flexneri
atgacgcgcaccttgctggtgaatggcgaaggggtgagcgccgaatctcacccgctgtttgacgtctatcagattgtcctgcaggcacagctcgcggcaatctctgcaattcgccccggcgtgcgctgccagcagattgacgacgccgcgcgccgggtcattaccgaggctggatttggcgactatttcggtcataacactggtcacgctatcggcattgaagtccatgaagatccgcgtttttcaccgcgggacaccacgacgctacagccaggcatgttgctgaccgtggagccggggatttatttgctagggcaagggggcgtgcgcatcgaagatgttgtgctggttaccccgcaaggcgcagaagtgctctacgccatgccgaaaacagtgttgctcacgggagaggcataa

SEQ ID NO: 471595 - DNA, 1038 bp, Shigella flexneri
atggatttatcgctattaaaagcgttgagcgaggcagatgcgatcgcctcctcggaacaggaagtgcggcagatcctgctggaagaagcggctcgcctgcaaaaagaagtgcgatttgatggtctgggatcggtgctgatccgcctcaatgaatcgacaggtccgaaggtgatgatctgcgcccatatggacgaagtgggatttatggtgcgcagcatctcccgcgaaggcgctattgacgtgctgccggttggcaacgtgcgcatggctgcccgccagctgcagccggtgcgcatcaccacccgtgaagagtgcaaaattccaggcctgcttgacggcgaccggcaggggaatgacgttagcgccatgcgcgtggacattggcgcgcgcacctatgacgaagtgatgcaggcgggaattcgtccaggcgatcgcgtcaccttcgataccacttttcaggtcctccctcaccagcgggtgatgggcaaagcctttgatgatcgcctcagttgctatctgctggtgacgttactacgtgagctgcacgacgccgaactgcctgcggaagtgtggctggtggcaagttccagcgaagaggtgggattacgcggcgggcaaactgctacccgcgcggtgtcgccggacgtcgccattgtgcttgataccgcctgctgggcgaaaaactttgattatggcgcggctaaccatcgtcagattggtaacgggccgatgctggtgttaagcgataaatcgctgattgcgccgccaaaacttaccgcgtggattgaaaccgtggcggcagaaattggcgttccgttgcaggcggatatgttcagtaacggcggcacggacggtggagcggtgcacttaaccggtactggcgtacccacattggtaatggggcctgccacccgccacggacattgcgcggcatcgattgccgattgccgcgacattttgcagatggagcaacttttatctgcccttattcaacgtcttacgcgtgagacggttgttcaactgacggatttcagatga

SEQ ID NO: 471596 - DNA, 2496 bp, Shigella flexneri
atgttaacgattcaatttctctgtcctttgcctaacggtctacatgctcgtccggcgtgggaacttaaagaacagtgcagccagtggcaaagcgaaatcacctttatcaaccatcgccagaacgcaaaggctgatgctaaaagctcgctggcgttgattggaactggcaccttatttaatgacagttgcagcctgaacattagcggcagcgatgaagagcaggcgcggcgcgtgctggaagagtacatcctggtgcgctttatcgacagcgacagcgttcagccgacgcaggcagaactgacggcgcatccgctgccgcgttcattaagccgccttaacccggatttactgtacggcaatgtgctggcaagcggcgtcggcgtgggtacgctgaccctgttacaaagcgacagcctcgacagttatcgggcaatccccgccagtgcgcaagattccacccggctggagcacagcctggcaacgcttgccgagcaactgaatcagcaattgcgtgagcgtgacggcgaaagcaaaactatcctcagcgctcatttgtcgctgattcaggatgatgaatttgcaggcaatatccgtcgcctgatgacagaacagcatcagggactgggggcggcgatcatcagcaatatggagcaggtttgcgccaaactatctgcttctgccagcgattatctgcgcgagcgggtcagcgacattcgcgatatcagcgaacagttgctgcatatcacctggccggaactgaagccgcgcaacaatctggtgctggaaaaaccgaccattctggtggctgaagatttaaccccaagccagtttttgagccttgatttgaaaaatcttgcgggtatgattctggagaaaaccgggcgcacctcgcatacactgattctggcccgtgcctcggcgatcccggtactgagtggcttgccgctggatgcgattgcccgttatgccgggcaacctgcagtgcttgacgcccagtgcggcgtgctggcgattaacccgaatgacgcggtgagcggttattatcaggtcgcgcagacgctggcggataaacgccaaaaacaacaggcgcaggctgccgcgcagctggcctattcccgtgataacaagcgtattgatattgcggcgaatatcggcaccgctctggaagcgccaggcgcgtttgccaacggcgcggaaggtgtcgggctgttccgtaccgaaatgctctatatggatcgcgacagcgcgccggacgagcaggagcaatttgaagcctaccagcaggtgctactggcggcgggcgacaagccgattatcttccgcacgatggacatcggcggcgataaaagcattccttatctgaatattccccaggaagagaacccgttcctcggctatcgcgcggtacgtatttacccggaatttgctggcctgttccgcactcaactgcgggccattttgcgcgccgccagtttcggcaacgcccagttgatgatcccgatggttcacagcctcgatcagatcttatgggtgaaaggcgagatccaaaaagcgatcgttgagcttaagcgcgatggcctgcgtcatgcagagacgattacgcttgggatcatggtggaagtgccgtcggtgtgctacatcatcgaccacttctgcgatgaggtcgatttcttcagtatcggctccaacgatatgacccagtatctgtatgcggtcgatcgtaataacccgcgcgtatcgccgctatataacccgattacgccatcgttcctgcgcatgttgcagcaaatagttaccactgcgcatcagcggggcaaatgggtaggcatttgcggtgaactgggcggtgaaagccgttatctgccgctactgcttgggctgggcctggatgagctgagtatgagtagcccgcgtattccggcggtgaaaagccagcttcgtcaactggatagcgaggcgtgtcgggaactggcgcgtcaggcatgtgaatgccgcagtgcgcaggaaattgaagcgttactcaccgcctttacgccggaagaagacgttcgcccactgctggcgctggagaatatctttgttgatcaggattttagcaataaagagcaggcgatccagttcctgtgcggcaacctcggcgttaacgggcgcactgaacatccgtttgagctggaagaagatgtctggcagcgggaagagattgttaccaccggcgttggttttggcgtagcgatcccgcacaccaaatctcagtggatccgtcattccagtatcagcattgcccggctggcgaaaccggttgactggcagtcagaaatgggcgaagtcgaactggtgatcatgctgacgctgggtgctaacgaagggatgaatcatgtgaaagtcttctcgcagctggcgcgtaaactggtgaataaaaacttccgccagtcgttgtttgccgcgcaagatgcacaaagtatcctgacgctgctggaaacagaattaaccttctga

SEQ ID NO: 471597 - DNA, 858 bp, Shigella flexneri
atgaaagcaccaggcttgcccgccgatcaacaatttttcgccgatctgttcagcggcctagtgcttaacccgcaactactggggcgcgtctggtttgccagccagcctgcctcgttaccggtgggcagtttatgtattgattttccccgtctggatatcgtgctgcgcggcgaatacggcaacctgctggaagcaaagcagcagcgaatggtggaaggagaaatgctgtttattccggcacgcgcggctaatttaccgatcaacaacaaaccggtgatgctgttaagcctggtgttcgcaccgacctggcttgggttatcgttttacgatagccgcaccacgtcgttgttgcatcctgctcgccagacccagcttcccagcctgcaacgcggtgaaggtgaagcgatgcttaccgccctcacccatcttagccgttcgccgctggagcagaatatcattcagccactggtgttaagtttgctgcatctttgccgcaacgtggtgaatatgccgccgggtaattcacaaccgcgcggcgattttctctatcacagcatttgtaactgggttcaggataattatgcccagccgctcacccgcgagagcgtggcgcagttttttaatatcacgcccaatcatctgtcaaaactgtttgctcagcatggaacgatgcgttttatcgagtatgtgcgttgggtgcgaatggcgaaggcgaggatgattttgcagaaatatcatctgtcaattcatgaagtggcacagcgttgcggttttccggatagcgactatttttgtcgcgttttccggcgtcagtttagtctgacgccgggagagtacagcgcccgttttcagggctaa

SEQ ID NO: 471598 - DNA, 735 bp, Shigella flexneri
gtgaaagtcatcattgttgaagacgaattcctggcacaacaggaactgagctggctaattaaagagcacagccagatggagattgtcggcacctttgacgacggtctggacgtgttgaagtttttgcagcataaccgcgtcgacgccatttttctggatatcaatattccgtcgctggatggcgtgttgctggcgcaaaacatcagccagttcgcccataaaccgtttattgtgttcatcaccgcgtggaaagaacatgcggtagaagcgtttgaactggaggcgtttgactacattctcaaaccgtatcaggagtcacgtattaccgggatgctgcaaaaactggaagcggcctggcaacaacagcagaccagcagtacgcctgccgcgacggtaacgcgtgagaatgacaccattaatctggtgaaagatgagcgaataatcgtcacgccaattaacgatatctattacgccgaagcgcacgagaaaatgacctttgtctatacgcggcgtgaatcctacgtaatgccgatgaacattaccgaattttgcagcaaactgccgccgtcgcattttttccgctgtcatcgctcattttgtgtcaatctgaacaaaatacgcgaaatcgaaccgtggtttaataacacctacattctgcgactgaaagatctggattttgaagtgccggtcagccgcagcaaagtgaaagaatttcgccagttaatgcatctttaa

SEQ ID NO: 471599 - DNA, 1122 bp, Shigella flexneri
ttgtatatcaggctggataaacctgaaaatccccaaagcacagcgctggcgctggatatcgccaacaaaacgctaccgctgtttcgccatgtcaatagcgagtcattacgcaaggtctgcgaaattatccgcgatgacattcacgccgatgcggtggcgattactaataccgatcatgtgctggcctatgttggcgtgggtgaacataactatcagaatggcgatgacttcattagcccgactacccgtcaggcgatgaattacggaaaaatcatcattaaaaacaatgatgaagcccaccgcacaccagagattcattccatgctggtgatcccattgtgggagaaaggggtcgtgaccggaacgctgaaaatttactactgccacgcgcatcagatcacctcgtcattacaggaaatggcggtcggtctgtcgcaaatcatctccacgcaactggaggtttcacgcgccgagcagctacgtgaaatggcaaataaggcagagcttcgcgccctgcaaagcaaaattaatccccattttctgtttaacgctctgaacgctatttcatcgtcaatccgtctgaatccggataccgctcgccagttgatctttaatctgtcgcgttatctgcgctataacattgaattaaaagacgatgagcaaatcgatatcaaaaaagagctgtatcaaattaaagactatattgccattgagcaggcccgctttggcgacaagctgacggttatctatgatattgatgaagaggtgaattgctgcattcccagcctgctgatccagccgttggtggagaacgccattgtccacggtattcagccttgcaaaggtaaaggcgttgtcaccatcagcgttgcagagtgcggaaatcgggtacgcattgcggtgcgagataccgggcacggcatcgttccaaaggtgattgagcgggtcgaagcgaatgaaatgccgggcaataaaattggcctgctgaatgtccatcatcgcgtgaagttattgtatggcgaggggctgcatatccgccgcctggagccggggacggaaattgcgttttacattcctaaccaacgcaccccagtcgcctcacaggctacgttattgctttga

SEQ ID NO: 471600 - DNA, 1239 bp, Shigella flexneri
atggctgacactcgccctgaacgtcgctttacgcgcattgatcgtctcccgccctacgtttttaacatcaccgctgaactgaaaatggctgcgcgtcggcgcggcgaagatattatcgatttcagcatgggtaacccggacggtgcgactccgccgcatatcgtcgaaaaattatgtactgtggcccagcgcccggacacgcatggttactccacttcacgcggcattccgcggttacgtcgcgccatttcccgctggtatcaggatcgctacgacgttgaaatcgacccggaatcagaagccatcgtcactattggttcgaaagagggcctggcgcatctgatgctggcgacgctggatcatggtgacacggtgctggtgccgaatccaagttacccgatccatatttatggcgcggtgattgccggggcgcaggtacgctcagtgccgctggtggaaggtgtcgatttcttcaacgaactggagcgcgccattcgtgaaagttatccgaaaccgaagatgatgatcctcggcttcccgtcgaacccaaccgcgcaatgcgtggaactggagttcttcgaaaaggttgtggcgctggcgaaatgctacgatgtgctggtggtccatgacctggcctatgccgatatcgtctacgatggctggaaagcgccgtcaattatgcaggtgccgggtgcacgcgatgtggcggtcgagttctttacgctgtcgaaaagctacaacatggcgggctggcgtatcggctttatggtcggcaacaaaacgctggtcagtgccctggcgcgaatcaaaagctatcacgattacggcacttttacgccgttgcaggtggcggcgattgcggcactcgagggcgatcaacagtgcgtgcgcgacattgccgaacagtacaaacgccgtcgtgatgtattggttaaagggctgcatgaagcgggctggatggtcgaaatgccgaaggcttcgatgtatgtctgggcgaaaatcccggaaccatatgcggccatgggatcgctggaatttgccaagaagctccttaacgaagcgaaggtttgtgtctcgccggggattggctttggcgactatggtgatacgcatgttcgctttgcactgattgaaaaccacgaccgtattcgtcaggccatcagagggattaaagcgatgttccgtgccgacggtttactacccgtcagcagcaaacatattcacgaaaacgcggaataa

SEQ ID NO: 471601 - DNA, 921 bp, Shigella flexneri
atgtttccacaatgcaaattttcccgcgagtttctacatcctcgctactggctcacatggtttgggcttggtgtactctggctttgggtacagcttccttatcctgttctctgctttctcggcacgcgtattggcgcaatggcgcgaccattcctgaaacgtcgtgaatctatcgcccgtaaaaacctggaactttgtttcccgcagcattctgcggaagaacgcgagaagatgattgccgaaaactttcgttcactcggcatggcgctggtagaaaccggcatggcatggttctggcccgacagtcgcgtacgtaaatggtttgatgttgaagggttggataaccttaaacgcgcacaaatgcaaaatcgcggcgtaatggttgtcggcgtccattttatgtcgctggaactgggcggccgcgtgatgggactgtgccaaccaatgatggctacctatcgtccacataataatcagctgatggaatgggtgcagacccgtgggcgcatgcgctctaacaaagcgatgatcggcagaaataatctgcgcggcattgtcggtgcactgaagaaaggtgaagcggtatggtttgctcccgatcaggattatggtcgtaaaggcagctccttcgcgccgttctttgcggtggaaaatgtcgccacaaccaatggcacctatgttctctcccgtctctctggcgcagccatgttgaccgtaacgatggtaagaaaagcggattacagcggatatcgtttgttcatcaccccagagatggaaggctacccgacagatgaaaatcaagccgctgcttatatgaacaagattatcgagaaagagatcatgcgcgcaccggagcagtacctctggatccaccgtcgctttaaaacgcgcccggtgggagaatcgtcgttgtacatttaa

SEQ ID NO: 471602 - DNA, 243 bp, Shigella flexneri
atgatttatttatggatgtttctcgccctgtgtattgtctgcgtaagcggctacatcggtcaggtactgaacgtggtatcggcggtctcttctttcttcggcatggtgatcctcgctgcactcatttattacttcaccatgtggttaactggcggtaatgaactggtgacggggatatttatgtttcttgccccggcttgtggcttgatgattcgctttatggtggggtatggcaggcgatag

SEQ ID NO: 471603 - DNA, 276 bp, Shigella flexneri
atgaaagtaaacttaatacttttcagcttatttttattggtctctattatggcatgcaatgtttttgcattttccatttctggtggtgtaagtgagaggagctataaagagactgaaaaaacatcagcgatgacgaccacacactctacaaaacttcagccatcacaggcgattttgtttaagatgagagaagatgtgccaccattaaacctcacagaagaaatcacgcctacttatccgacaaaggcgaattatcttattcatcctgtgcgatag

SEQ ID NO: 471604 - DNA, 624 bp, Shigella flexneri
atgaaacgtttaattatggctacgatggtcacagcaattctggcatcttcaactgtatgggctgctgataatgcaccggtagcggcacaacagcaaactcagcaaacccagaaaacggcagcagcagagcgtatctctgaacaaggtttatatgcgatgcgtgacgtgcaggtagcgcgcctggctctgtttcatggcgatccggaaaaggcaaaagaactgaccaatgaagcttccgctttgctgtcagatgacagtaccgaatgggcaaagttcgctaagccaggtaaaaagaccaatctcaatgatgaccaatatattgtcattaatgcatctgtcggaatttctgagagttatgtagcaacacccgaaaaagaagccgcgataaaaattgccaatgaaaaaatggcgaaaggggataaaaagggcgcaatggaagagcttcgcctggccggtgttggcgtaatggaaaaccaatatctgatgccgcttaaacagactcgtaatgcacttgctgatgcgcagaaactgcttgataaaaagcaatactacgaggcaaacctggcgcttaaaggtgcggaagatggaatcatcgtcgatagcgaagcactgtttgtgaactaa

SEQ ID NO: 471605 - DNA, 1251 bp, Shigella flexneri
atgtcaactccacttcaaggaattaaagttctcgatttcaccggtgtgcaatctggcccatcttgtactcaaatgctggcctggtttggcgctgacgttattaaaattgaacgtcccggcgttggtgacgtaacgcgtcaccaactgcgagatattcctgatatcgatgcgctttacttcaccatgcttaacagtaacaaacgttctattgagttaaataccaaaacagcggaaggcaaagaggtaatggaaaagctgatccgcgaagctgatatcttagtcgagaactttcatccaggggccattgatcacatgggcttcacctgggagcatattcaagaaatcaatccacgtctgatttttggttcgatcaaagggtttgatgagtgttcgccttatgtgaatgtaaaagcctatgaaaacgttgctcaggcagcgggtggcgcggcatccactacgggtttttgggatggtccgccgctggtaagcgctgcagcgttgggtgacagcaacaccggaatgcatttgctgatcggtttacttgctgctttgctgcatcgcgaaaaaacggggcgtgggcaacgagtcaccatgtcaatgcaggatgccgtattgaacctttgccgcgtgaaattacgtgaccagcagcgtctcgataaattgggttatctggaagaatacccgcagtatccgaatggtacatttggtgatgcagttccccgcggtggtaatgcaggtggtggcggtcagcctggctggatcctgaaatgtaaaggctgggaaaccgatcctaacgcctatatttatttcactattcaggagcaaaactgggaaaacacctgtaaagccatcggcaaaccagaatggattaccgatccggcatacagtacagcccatgcccgacagccacatattttcgatatttttgctgaaatcgaaaaatacactgtcactattgataaacatgaagcggtggcctatttgactcagtttgatattccttgtgcaccggttttaagtatgaaagaaatttcacttgatccctctttgcgccaaagtggcagtgttgttgaagtggaacaaccgttgcgtggaaaatatctgaccgttggttgtccaatgaaattctctgcctttacgccggatattaaagctgcgccgctattaggtgaacataccgctgctgtattgcaggagctgggttatagcgacgatgaaattgctgcaatgaagcaaaaccacgccatctga

SEQ ID NO: 471606 - DNA, 1695 bp, Shigella flexneri
atgtcagatcaacttcaaatgacagatggtatgcatatcatcgttgaagcattaaaacagaataatattgacactatttatggtgttgtaggtattcctgtgacggatatggcacgccatgcccaggcggaaggcattcgttatattggttttcgtcatgagcagtcggcaggctatgccgctgcggcaagcggttttcttacccaaaaaccggggatctgcctgacagtttctgcgccaggattcctcaatggtttgaccgcattggccaacgcaacggtaaatggttttccgattatcatgattagcggctccagcgaccgcgcgatcgtcgacctacagcaaggtgattatgaagagctggaccaaatgaatgcggcaaaaccgtatgccaaagcagcatttcgcgttaatcagccgcaggatcttggcattgcattggcacgcgctatccgggtctctgtatcgggtcgccctggcggagtttatcttgatttgccagcaaatgtcctggccgcgacgatggaaaaagacgaagcgttaaccacgattgttaaagttgaaaatccgtcgccagcattattgccatgcccgaagtcagtcactagcgcaatttcgcttttagcaaaagctgaacggccattaattatccttggcaaaggcgcggcgtattcacaagctgatgaacagcttcgtgaatttattgaaagtgctcagattccattcctgccaatgtctatggcgaaagggatccttgaagatacgcatccactttctgcggcagctgcgcgttcgtttgccctggcaaatgctgacgttgtcatgcttgttggtgcacgactgaattggttattggcacacggtaaaaaaggatgggcggcagatacacagtttattcaactggatattgaaccgcaggaaattgacagcaaccgccccattgctgtgccagtcgttggtgatattgcatccagtatgcaaggtatgctggcagaactgaaacaaaacacatttacgactccactggtatggcgcgatattttaaatatccacaagcagcaaaatgcacaaaaaatgcatgaaaaattaagtacagatactcaaccattaaattactttaatgcattaagtgctgtgcgcgacgtattgcgcgagaaccaggatatttatttagttaatgaaggtgcaaataccctggataatgcacgaaatattattgatatgtataaaccacgtcgtcgtctggattgtggtacctggggtgtcatgggcatcggtatgggctatgccatcggtgctagcgtgacttctggttctccggttgtcgccattgaaggtgatagtgcttttggtttcagtgggatggaaattgaaacgatttgtcgatataacctgccggtgacgatcgttatttttaataatggcggcatctacagaggagacggtgttgatctcagtggcgctggtgcaccatcaccaacggatctgttgcaccatgcaaggtatgacaaattaatggatgcgtttcgtggcgttggctataacgtcaccacgacagatgaacttcgtcatgctttaaccaccggtattcagtcgcgcaaaccgaccattattaatgtggttatcgaccctgcagcaggaactgaaagtggccatattaccaaacttaacccaaaacaagtcgctggtaattaa

SEQ ID NO: 471607 - DNA, 945 bp, Shigella flexneri
atgctaacattttttattggcgatttattgcctattatcgtaatcatgctgttgggttattttagcggcagacgagaaactttttcagaagatcaagcccgcgcatttaataaactggtattaaactacgctcttcctgcggctctatttgtttctattacccgggcaaacagggaaatgatttttgcggacactcgtctgacccttgtatcacttgtggttattgtcggatgtttctttttctcctggtttggttgctacaaattttttaaacgtacccatgcagaagcagctgtatgtgcattaattgcgggttcacctaccattggattcctggggtttgcagttctcgatcctatttatggtgattccgtatcaacaggtttagtggtagcaattatttctattattgttaacgcaattactattcctattggtctgtatttgctgaatccttcctcaggagcggatggtaagaagaatagtaatctgagcgcattaatttctgcggcaaaggagccagtagtatgggcacctgttctggcaacgatcctggtgctggttggggtaaaaattccggcagcatgggacccaacctttaatctgattgcgaaggctaactcaggggtagcggtattcgctgcggggttgactctggctgcacataaattcgagttcagtgccgaaattgcttataacaccttcctgaagttgattctgatgccactggcgctgcttctcgttggtatggcatgtcatttgaacagcgaacatttgcagatgatggtactggcaggcgcattaccgccggcattctccggaatcattattgccagccggtttaatgtctacacccgtactggtacagcgtcattggctgtgagcgtactgggctttgtcgtcacggctcccttgtggatttatgtcagtcgactggtttcataa

SEQ ID NO: 471608 - DNA, 1146 bp, Shigella flexneri
atgacaaataatgaaagcaaagggccgtttgaaggcttattagttatcgatatgacacatgtccttaatggacctttcggaactcaacttctttataatatgggcgcaagggtaattaaagttgagccaccaggtcatggtgatgatacccgcacatttggtccctatgtggatggacagtcactctattacagttttattaatcatggcaaagagagtgtggttcttgatttaaagaatgatcacgataaaagtatatttataaatatgctcaaacaagctgatgtattagctgagaattttcgcctaggtacaatggaaaaactggggttttcatgggaaaggttacaagaaatcaacccgcgcctcatatatgcttcatcgtcaggtttcggacataccggtccgctaaaagatgctcctgcctacgataccatcattcaggcaatgagtgggataatgatggaaacagggtaccctgatgctccgccagtgcgtgttggtacctctcttgcggatctatgcggcggtgtctatttattcagcggaatagtgagtgcactttatggccgcgaaaagagccagagaggggcgcatgtcgatatagcgatgtttgatgccacgctgagttttctggagcatggtctgatggcatatattgcgacagggaagtcaccacaacgcctgggaaatcgccatccctacatggcaccttttgatgttttcgatactcaggataagccgattacgatttgttgtggtaatgacaagcttttttctgcgttatgccaggcactggagcttacggaactggttaatgatccccgatttagcagcaatattttacgcgtacaaaaccaggctattcttaaacaatatattgagcgaacgttaaaaacgcaggcagctgaagtttggttagccaaaatacatgaagttggtgtgcccgtcgcgccgttattaagtgtggctgaggccattaatttgccacaaactcaggcgagaaatatgttgattgaagccggaggaataatgatgccgggtaatccgataaaaatcagcggctgcgcggacccgcatgttatgccgggagcggcaacgctcgaccagcatggggaacaaattcgccaggagttctcatcataa

SEQ ID NO: 471609 - DNA, 3594 bp, Shigella flexneri
atgaagtttttaccctatttttttcttctctgttgtggtctttggtcgaccataagtttcgcagacgaagattacatcgaatatcgtggcatcagtagtaacaaccgtgtcacacttgatccagtacgtctgagcaacaaggaattacgttggttagcgagcaaaaaaaatcttgtgattgcagtacacaagtcccaaacggctaccttgttgcataccgattcgcagcaacaggttcgtggtattaatgctgattatttaaatcttttaaaaagagcgttaaatatcaaattaacactccgggaatacgcagatcatcaaaaagcaatggacgcgcttgcagaaggtgaagtcgatatagtgttatcacatttagttacttcgccgcctcttaataatgacattgctgcaaccaaaccattgataattacctttccggcgctggtaaccacccttcacgactcaatgcgaccgcttacctcaccaaaaccagtaaatattgctcgggtagcaaattaccccccagacgaggtaattcatcaatcatttccaaaagcaacaattatctcttttacaaatttatatcaggcattagcatccgtctcagctgggcacaatgattactttattggtagtaacatcattaccagcagtatgatttcccgctatttcactcactccttaaatgtagtgaaatattataactcgccgcgtcaatataattttttcttgaccagaaaagaatctgtcattcttaatgaagtactcaatagatttgttgatgctttaacaaatgaagttcgctatgaagtatcacaaaattggcttgatacaggaaacctggcctttctgaacaaaccattagaactcactgaacatgaaaaacagtggattaagcagcatcccaatttaaaggtgctggaaaatccttactcgcccccctattctatgacggatgaaaatggctcggttcggggcgttatgggggacattcttaatattattaccttgcaaacaggtttaaatttttctccgatcaccgtttcacacaatatccatgctggaacacaacttagccccggaggatgggatataatacctggcgctatttatagtgaagatcgagaaaataatgttttatttgctgaagccttcataacaacgccttacgtttttgtcatgcaaaaagcgcctgacagtgaacaaacattaaaaaaaggaatgaaagttgccattccatattattatgagctgcattcgcaattaaaagagatgtatccggaggttgaatggatacaggtcgataatgccagcgctgcatttcacaaggttaaggaaggtgaacttgatgctctggtcgcgacacagctaaattcgcgttacatgatcgatcattactatcctaatgaactttatcattttcttattcctggcgttccgaatgcatcgctttcgttcgcttttcctcgcggagaaccggaacttaaggatattattaataaagcactgaatgcaattcccccaagcgaagttctgcgcctgacggaaaaatggattaaaatgcccaatgtgaccattgacacatgggacctatatagcgagcaattttatattgttacgacattatccgttttattagttggcagtagccttttatggggattctacctgttacgctcagttcgtcgtcgtaaagtcattcagggtgatttagaaaaccaaatatcattccgaaaagcactctcggattccttaccgaatccaacttatgttgtaaactggcaaggtaatgtcattagtcataatagtgcttttgaacattatttcactgcggattactacaaaaatgcaatgttaccattagaaaacagtgattcaccctttaaagatgttttttctaatgcgcatgaagtcacagcagaaacgaaagaaaatcgaacaatatacacacaggtatttgaaattgataatggcatcgagaaaagatgcattaatcactggcatacattatgcaatcttcctgcaagtgacaatgcagtatatatttgtggttggcaagatattactgaaacgcgtgatctaattaatgcactcgaggtagaaaaaaataaagcgataaaggctaccgtagcaaaaagtcagtttctggcaacgatgagtcacgaaataagaacaccaataagctctattatgggcttcctggaacttctgtcgggttctggtcttagcaaggagcaacgggtggaggcgatttcacttgcctacgccaccggacaatcactcctcggcttaattggtgaaatccttgatgtcgacaaaattgaatcgggtaactatcaacttcaaccacaatgggtcgatatccctactttagtccagaacacttgtcactctttcggtgcgattgctgcaagcaaatcgatcgcattaagttgcagcagtacatttcctgatcattacctggttaagatcgaccctcaggcgtttaagcaggtcttatcaaatttactgagtaatgctctcaaatttaccaccgagggggcagtaaaaattacgacctccctgggtcacattgatgacaaccacgctgttatcaaaatgacgattatggattctggaagtggattatcgcaggaagaacaacaacaactgtttaagcgctacagccaaacaagtgcaggtcgtcagcaaacaggttctggtttaggcttaatgatctgcaaagaattaattaaaaatatgcagggcgatttatcattagaaagtcatccaggcataggaacaacatttacgatcacaatcccggtagaaattagccagcaagtggcgactgtcgaggcaaaagcagaacaacccatcacactacctgaaaagttgagcatattaatcgcggatgatcatccgaccaacaggctattactcaaacgccagctaaatctattaggatatgatgttgatgaagccactgatggtgtgcaagcgctacacaaagtcagtatgcaacattatgatctgcttattactgacgttaatatgccgaatatggatggttttgagttgactcgcaaactccgtgagcaaaattcttccttacccatctgggggcttacagccaacgcacaggctaacgaacgtgaaaaagggttaagttgcggcatgaacttatgtttgttcaaaccgttgaccctggatgtactgaaaacacatttaagtcagttacaccaggttgcgcatattgcacctcagtatcgccaccttgatatcgaagccctgaaaaataatacggcgaatgatctacaactgatgcaggagattctcatgactttccagcatgaaacgcataaagatctacccgctgcgtttcatgcactagaagctggcgataacagaactttccatcagtgtattcatcgcatccacggtgcggctaacatcctgaatttgcaaaagttgattaatattagccatcagttagaaataacacctgcttcagatgacagtaagcctgaaattcttcagctgctgaactctgttaaagaacacattgcagagctggaccaggagattgctgttttctgtcagaaaaatgactaa

SEQ ID NO: 471610 - DNA, 615 bp, Shigella flexneri
atgaacgcaataattattgatgaccatcctcttgctatcgcagcaattcgtaatttattgatcaaaaacgatattgaaatcttagcggagttaactgaaggcggaagcgccgttcagcgggtggaaacacttaagcctgatatcgtcatcattgatgtcgatatccccggagttaacggtatccaggtgttagaaacgctgaggaagcgccaatatagcggaattattattatcgtctccgctaaaaatgaccatttttacgggaaacattgtgctgatgctggcgctaatggtttcgtgagtaaaaaagaaggcatgaacaatatcattgcggctattgaagctgcaaaaaatggctactgctatttccccttctctctcaaccggtttgttggaagtttaacgtccgaccagcaaaaactcgactccttatcgaaacaagaaattagtgtcatgcggtatattcttgatggcaaggataataatgacattgcggaaaaaatgttcatcagcaacaaaactgtcagcacgtataaaagtcgcctgatggaaaaattagaatgtaaatcactgatggatctttacacattcgcgcaacgtaacaaaatcggctaa

SEQ ID NO: 471611 - DNA, 1164 bp, Shigella flexneri
gtggaacagattaattcaaataaaaaacagtctaacagaaaaaaatacttttctttattggtgatagttttatttattgcgttttcaggtgcctatgcctattggtcaatggaattagaagacatgattagtacagatgacgcctatgtcacggggaatgcagatccaatttctgcacaagtctcaggtagtgtcactgtagttaatcataaagatacgaactacgttcgacagggtgacattttagtttcactggataaaactgatgccactatcgcactcaataaagctaaaaataatctggcaaatattgttcggcaaacgaataaactgtacttacaggataaacaatacagtgccgaagtcgcttcagcacgtattcagtatcaacaatctttagaagattataaccgtcgtgtgcctttagcgaagcagggggttatttcaaaagaaacgctggagcataccaaagatacgttaataagtagcaaagcggcactgaatgccgctatccaggcttataaagcgaataaagctttagtaatgaacacaccattaaaccgtcagccacaagtagttgaagcggcggatgcaaccaaagaagcctggttggtgcttaaacgtacggatataaggagtccggttactggctatattgcccagcgaagtgttcaggtcggcgaaacagtgagttccggacaatcgttaatggctgtcgtaccggcacgtcaaatgtgggttaatgccaactttaaagaaacacaactcacggatgtacggattggtcaatcagtcaatattatcagcgatctttatggtgaaaatgttgtgtttcatggtcgggtgacagggatcaatatgggaaccggcaatgcgttctccttattacctgcacaaaatgcgacagggaactggatcaaaatcgttcagcgtgtaccggttgaagtttctcttgatccaaaagaactcatggaacaccccttgcgcattggtttatcgatgactgcaactattgatacgaaggacgaagacattgctgagatgcctgatctggcttcaaccgtgacctccatgcctgcttataccagtaaggctttagttatcgataccagtccgatagaaaaagaaattagcaacattatttcgcataatggacaactttaa

SEQ ID NO: 471612 - DNA, 1539 bp, Shigella flexneri
atggcaatcactaaatcaactccggcaccattaaccggtgggacgttatggtgcgttactattgcattgtcattagcgacgtttatgcaaatgttggattccactatttctaacgtcgcaataccgacaatatctggctttctgggagcatcaacagacgaaggcacctgggttatcacctcgtttggcgtagcaaatgccattgcgatccctgttaccggcaggctggcacaaagaataggcgaattaaggttatttttactttcagtcacttttttttcgctgtcttccttaatgtgtagtttatcgaccaatcttgatgtgctgatattttttagagtcgttcagggattaatggcggggccgttaattccactgtcacagagtttattattaaggaattatccaccagaaaaaagaacatttgctctggcattatggtcaatgaccgtgattatcgctccgatatgtgggccgatattgggcggctatatttgcgataactttagctggggttggatatttttaatcaatgtccctatggggattatcgtcctgacattatgcttaaccttacttaaaggaagagaaactgaaacttcaccggtaaaaatgaatctaccaagactgaccctgttagtgctcggtgttggtggcttgcaaattatgcttgataaagggcgcgatctggattggttcaactcgagtacaataataatattaacagtagtatcagttatttctctgatctctttagtcatttgggaatcgacctcagagaacccgattcttgatctcagtttgtttaagtcccgtaatttcaccattggtattgtgagtatcacctgcgcgtatttattttactctggagcgatcgtccttatgccgcagttactccagaaaacgatggggtataatgcgatatgggccgggcttgcttatgcgcccatcggcatcatgccactattgatttcacctttgataggacgttatggcaataaaatagacatgcgggtgttagtgacattcagttttttgatgtatgcggtttgctattactggcgttctgtgacatttatgccaacgattgattttacaggcatcattttgccacagtttttccagggattcgccgttgcctgtttctttttacccttaacaacgatttcgttttcaggcttgccagataataaatttgccaatgcctcgagtatgagtaatttttttcgtaccttgtcaggatcagttggtacgtcgttgacaatgacgctgtggggacgacgcgaatcgttacaccatagtcagttgacagcaaccatcgatcaatttaaccccgtgtttaattcatcgtcacaaattatggataaatactatggttcgctttcaggagttcttaatgaaattaataatgaaataacccagcagtcactttctatttctgcaaatgagattttccgtatggcggctattgcttttatcttacttacggttttggtttggtttgcgaaaccgccgtttacagcgaaaggcgttgggtga

SEQ ID NO: 471613 - DNA, 1329 bp, Shigella flexneri
atggaaaacgctaaaatgaactcgctcatcgcccagtatccgttggtaaaggatctggttgctcttaaagaaaccacctggtttaatcctagcacgacctcattggctgaaggtttaccttatgttggcctgaccgaacaggatgttcaggacgcccatgcgcgcttatcccgttttgcaccctatctggcaaaagcatttgctgaaacagctgccactggggggattattgaatcagaactggttgccattccggctatgcaaaaacggctggaaaaggaatatcaacaaccgatcagcgggcaactcctactgaaaaaagatagccatttgcccatttccggctctataaaagcacgcggcgggatttatgaagtcctggcacatgcagaaaaactggctctggaagcggggttgctgacgcttgatgatgactacagcaaactgctttctccggagtttaaacagttctttagccaatacagcattgctgtgggctcaaccggaaatctggggttatcaatcggcattatgagcgcccgcattggctttaaggtgacagttcatatgtctgctgatgcccgggcatggaaaaaagcgaaactgcgcagccatggcgttacggtcgtggaatatgagcaagattatggtgttgccgtcgaggaaggacgtaaagcagcgcagtctgacccgaactgtttctttattgatgacgaaaattcccgcacgttgttccttgggtattccgttgctggccagcgtcttaaagcgcaatttgcccagcaaggccgtatcgtcgatgctgataaccctctgtttgtctatctgccgtgtggtgttggcggtggtcctggtggcgtcgcattcgggcttaaactggcgtttggcgatcatgttcactgcttttttgccgaaccaacgcactccccttgtatgttgttaggcgtccatacaggattacacgatcagatttctgttcaggatattggtatcgacaaccttaccgcagcggatggccttgcagttggtcgcgcatcatgctttgtcgggcgggcaatggagcgtctgctggatggcttctatacccttagcgatcaaaccatgtatgacatgcttggctggctggcgcaggaagaaggtattcgtcttgaaccttcagcactggcgggtatggccggacctcagcgcgtgtgtgcatcagtaagttaccaacagatgcacggtttcagcgcagaacaattgcgtaatgccactcatctggtgtgggcgacgggaggtggaatggtgccggaagaagagatgaatcaatatctggcaaaaggccgttaa

SEQ ID NO: 471614 - DNA, 219 bp, Shigella flexneri
gtgctgccactgtatcccgacatcagcccggaaattattgcgattgctatcggttcaggtgcaattggctgcacgatcgttacggactcgcttttctggctggtgaagcaatattgcggcgctacgctcaatgaaacatttaaatactatacgacagcgacatttatcgcttcagtcgtcgctctggcgggcacattcctgctgtcatttatcatctaa

SEQ ID NO: 471615 - DNA, 954 bp, Shigella flexneri
atgatgacagtctcccgggtgatgcataatgcagaatctgtgcgtcctgcaacgcgtgaccgcgtattgcaggcaatccagaccctgaattatgttcctgatctttccgcccgtaagatgcgcgctcaaggacgtaagccgtcgactctcgccgtgctggcgcaggacacggctaccactcctttctctgttgatattctgcttgccattgagcaaaccgccagcgagttcggctggaatagttttttaatcaatattttttctgaagatgacgctgcccgcgcggcacgtcagctgcttgcccaccgtccggatggcattatctatactacaatggggctgcgacatatcacgctgcctgagtctctgtatggtgaaaatattgtattggcgaactgtgtggcggatgacccagcgttacccagttatatccctgatgattacactgcacaatatgaatcaacacagcatttgctcgcggcgggctatcgtcaaccattatgcttctggctaccggaaagtgcgttggcaacagggtatcgtcggcagggatttgagcaggcttggcgtgatgctggacgagatctggctgaggtgaaacaatttcacatggcaacaggtgatgatcactacaccgatctcgcaagtttactcaatgctcacttcaaatcgggcaaaccagattttgatgttctgatatgtggtaacgatcgcgcagcctttgtggcttatcaggttcttttggcgaagggggtacgtatcccgcaggatgtcgctgtaatgggctttgataatctggttggcgtcgggcatctgtttttaccgccgctgaccacaattcagcttccacatgacattatcgggcgggaagctgcattgcatattattgaaggtcgtgaagggggaagagtgacgcggatcccttgcccgctgttgatccgttgttccacctga

SEQ ID NO: 471616 - DNA, 1434 bp, Shigella flexneri
atgacgcaatctcgattgcatgcggcgcaaaacgcactagcaaaacttcatgagcaccggggtaacactttctatccccattttcacctcgcgcctcctgccggatggatgaacgatccaaacggcctgatctggtttaacgatcgttatcacgcgttttatcaacatcacccgatgagcgaacactggggaccaatgcactggggacatgccaccagtgacgatatgatccactggcagcatgagcctattgcgctagcgccaggagacgataatgacaaagacgggtgtttttcaggtagtgctgtcgatgacaatggtgtcctctcacttatctacaccggacacgtctggctcgatggtgcaggtaatgacgatgcaattcgcgaagtacaatgtctggctaccagtcgggatggtattcatttcgagaaacagggtgtgatcctcactccaccagaaggaatcatgcacttccgcgatcctaaagtgtggcgtgaagccgacacatggtggatggtagtcggggcgaaagatccaggcaacacggggcagatcctgctttatcacggcagttcattgcgtgaatgggccttcgatcgcgtactggcccacgctgatgcgggtgaaagctatatgtgggaatgtccggactttttcagccttggcgatcagcattatctgatgttttccccgcagggaatgaatgccgagggatacagttaccgaaatcgctttcaaagtggcgtaatacccggaatgtggtcgccaggacgactttttgcacaatccgggcattttactgaacttgataacgggcatgacttttatgcaccacaaagctttttagcgaaggatggtcggcgtattgttatcggctggatggatatgtgggaatcgccaatgccctcaaaacgtgaaggatgggcaggctgcatgacgctggcgcgcgagctatcagagagcaatggcaaacttctacaacgcccggttcacgaagctgagtcgttacgccagcagcatcaatctgtctctccccgcagaatcagcaataaatatgttttgcaggaaaacgcgcaagcagttgagattcagttgcagtgggcgctgaagaacagtgatgccgaacattacggattacagctcggcactggaatgcggctgtatattgataaccaatctgagcgacttattttgtggcggtattacccacacgagaatttagacggctaccgtagtattcccctcccgcagcgtgacacgctcgccctaaggatatttatcgatacatcatccgtggaagtatttattaacgacggggaagcggtgatgagtagtcgaatctatccgcagccagaagaacgggaactgtcgctttatgcctcccacggagtggctgtgctgcaacatggagcactctggctactgggttaa

SEQ ID NO: 471617 - DNA, 966 bp, Shigella flexneri
atgacgcaatactcctctctccttcgtggtcttgcagcgggttctgcatttttattcctttttgccccaacggcattcgcggccgaacaaaccgttgaagcgccgagcgtggatgcgcgtgcatggattttaatggattacgccagcggtaaagtgctggcagaaggcaatgcggatgagaaactggatcctgcgagcctgactaaaatcatgaccagctatgtggttgggcaggcgcttaaggccgataagattaaactcaccgatatggtgacggtcggtaaagatgcctgggcgacgggaaatccggcactgcgtggttcatcggtaatgttcctcaaaccgggcgatcaggtttcggtggcagacttgaacaaaggtgtgattatccagtccggtaatgacgcctgtattgcgctggcagattacgttgccgggagccaggagtcctttattggtctgatgaatggttatgccaaaaaactggggctgaccaacactaccttccagacggtgcacggcctggatgcgccggggcagttcagtaccgcgcgcgatatggcattgctgggtaaagcattgatccacgatgtgccggaagagtacgccattcataaagagaaagagttcaccttcaacaaaattcgtcagcctaaccgtaaccgtctgctgtggagcagtaatctgaatgttgatggcatgaagacaggaaccacggcaggtgcgggatataatctggttgcttcggctacccagggtgatatgcgtttaatctccgtagtgctgggggcgaaaactgaccgtatccgttttaatgagtctgagaaattattgacctggggtttccgcttctttgaaactgtgacgccaattaaacctgatgccacctttgtgactcagcgcgtctggtttggtgataagatcgaagtgaatctcggggcaggcgaagcgggctccgtgaggtag

SEQ ID NO: 471618 - DNA, 627 bp, Shigella flexneri
atgattacgctgtggggtcggaataattcaactaacgtaaaaaaagtattgctgacgctcgaagaactggaactaccttatgagcaaattctcgcgggccgtgagtttgggataaatcacgatgctgattttctggcgatgaaccctaacgggctggtgccgttgttgcgtgacgacgaaagtgatctcattctttgggaatcaaacgccattgtccgctatctggcggcacagtacgggcaaaaacgcctgtggatcgactcaccggcacgtcgtgcggaagcggaaaaatggatggactgggcaaaccagacgctcagtaatgctcatcgcgggatcctgatgggattagtcagaacaccaccggaagagcgcgatcaggccgccattgatgccagttgcaaagagtgcgacgccctgtttgccctgctcgatgcggaactggcaaaagtaaaatggttctctggcgacgagtttggtgtgggcgatatcgctatcgcaccgttcatctacaatttgtttaacgttggcctgacctggacaccgcgtccaaatctgcaacgctggtatcagcaactcactgaacgccccgcagtgcgcaaagtggtgatgattcccgttagctaa

SEQ ID NO: 471619 - DNA, 939 bp, Shigella flexneri
atgcatcgacaatcctttttccttgtgccccttatttgtctttcttccgctctctgggcggctcctgcaacggtaaatgtcgaagtactgcaagacaaactcgaccatccctgggcactggcctttttacccgataatcacggtatgttaatcactctgcgcggcggcgagttgcgtcactggcaagcaggaaaaggattatctgcgccgctttccggagttccggacgtttgggcgcacgggcagggcggcctgctggacgtggttttagcgcctgattttgctcagtctcgccgcatctggttaagttattccgaagttggcgatgatggcaaagccggaactgctgtgggttatggccgcttaagtgatgatctctcaaaagtgaccgacttccgcaccgtcttccgccagatgccaaaactgtctaccggcaaccattttggcgggcggctggtattcgacggtaaaggttatctttttattgctctgggcgaaaacaatcagcgcccgacggcgcaggatctggataaattacagggcaaactggtgcgtctgaccgaccagggcgaaatcccggatgataatccttttataaaggaatctggtgcgcgcgccgagatctggtcttatggcattcgtaatccgcaaggaatggcgatgaatccgtggagtaatgcactgtggctgaatgaacatggcccgcgcggtggtgatgaaattaatatcccgcaaaaaggcaaaaactacggctggccgctggcaacctggggaatcaactattcaggctttaagataccggaagcgaaaggggagatcgtcgccgggaccgagcaacctgttttttactggaaagattcgcccgctgtgagcggcatggccttctataacagcgataaattcccccagtggcagcaaaaattatttattgggagctga

SEQ ID NO: 471620 - DNA, 384 bp, Shigella flexneri
atgttcgttgacagacagcgaatcgatctgctgaaccggttgatcgacgcacgtgttgacctcgctgcatacgtgcaactgaggaaggcaaaaggatacatgtccgtcagcgaaagcaatcatctacgagataacttttttaaactgaatcgcgaactgcacgataaatcgctgcggttgaatcttcatctggatcaggaagagtggagtgctcttcatcatgctgaagaagcattagcgacagccgcagtatgtttgatgagtgggcaccatgattgcccgactgttattaccgtcaacgccgataagcttgaaaattgtctgatgagcttaacgctgagtatccagagcctgcagaagcacgccatgcttgagaaggcctga

SEQ ID NO: 471621 - DNA, 1326 bp, Shigella flexneri
atgagcaaagtaactccccagccgaaaatcggctttgtttcccttggctgtccgaaaaaccttgtcgattcagagcgtattctcaccgaactccgcactgaaggttatgacgtggtaccgagctatgacgatgcgaacatggtgatcgtcaacacctgcggctttattgacagcgcggtacaagaatcactggaagccattggtgaagcgttgaatgaaaacggcaaggtaattgtgaccggttgtctgggggcaaaagaagatcagatccgcgaagtccacccgaaagtgctggaaatcaccgggcctcatagctatgagcaggttctggagcacgttcatcactacgtgccaaaaccgaaacacaacccattcctgagcctagtgccagaacaaggtgtgaaactgacgccgcgtcattatgcctatctgaaaatttcggaaggctgtaatcaccgctgcaccttctgcattattccgtctatgcgcggcgacctggtgagccgtccgattggcgaagtgttaagtgaagcgaaacgtctggtagatgcgggcgttaaagagattctggtgatctcgcaggatacttccgcctatggcgttgatgttaaacatcgtactggcttccacaacggcgagccggtaaaaaccagcatggtcagcctgtgcgaacagttatcgaaactggggatctggacacgtctgcactacgtttacccttatccgcatgtggacgacgtcatcccactgatggcagaaggcaaaatcctgccgtatctggacattccgttgcagcacgccagcccgcgcattctcaaactgatgaagcgtccgggttctgtagatcgccaactggcgcgcatcaaacagtggcgcgaaatctgcccggaactgaccctacgctcaacctttattgtcggcttccctggcgagacggaagaagatttccagatgctactcgacttcctgaaagaagcacgtctggatcgcgttggctgctttaaatacagcccggttgaaggtgcagacgccaatgccctgcctgaccaggttccggaagaagtgaaagaagaacgctggaaccgtttcatgcagctgcagcagcagatttccgccgagcgcctgcaagagaaagtgggccgtgaaattctggtgattatcgacgaagtggacgaagaaggcgcgattggtcgcagcatggcagatgcaccggaaatcgacggcgcggtttatctcaatggtgaaaccaacgttaagccgggtgatatcctgcgtgtgaaagtcgagcacgccgatgagtacgatttgtggggtagccgggtttaa

SEQ ID NO: 471622 - DNA, 1329 bp, Shigella flexneri
atgtccagaatcaataagttcgtacttacagtcagtctgctgatttttatcatgatttcagcagttgcctgcgggatctacactcaaatggtaaaggaacgggtgtatagcctgaaacagtccgttattgatactgcttttgcggtggcaaatattgctgaatatcggcgtagcgtggcaattgatcttatcaacacgctaaatcccacggaggaacagctgttggttggtttgcgcacagcttacgccgactcggtttccccctcttatttgtacgatgtcggtccttatctgatttccagtgacgaatgtattcaggtaaaggagttcgagaaaaattattgtgcagatattatgcaggttgtgaagtatcgacatgtcaaaaatacagggtttatctcttttgacggtaaaaccttcgtctattacctctatccggtaactcacaatcgtagtctgatatttttgcttggtctggagcgtttttctttactgtcaaaatcgctggtgatggacagcgagaacctgatgttctctctatttaagaacggtaaaccggtgaccggtgatgaatataatgctaaaaacgccatcttcaccgtttcggaagcgatggagcacttcgcctatttgccgaccggattgtacgtatttgcgtataaaaaagatgtttatttgcgggtttgtacattgattattttctttgccgcattggtggcagtgatattgggtgccagttgcctctatctggtacgcagagtgattaatcgtggtattgtggagaaagaagccatcattaataaccattttgaacgcgtactggatggcgggcttttcttttcggctgccgatgtcaaaaaactctacagtatgtataactcggcgttcctggacgacctgaccaaagcaatgggcagaaaatcctttgatgaagatttaaaagcgctgccggaaaaaggcggttatttgtgtctgtttgacgtcgataaattcaaaaacattaacgacaccttcggtcatttgctgggcgatgaagtgttgatgaaagtggtgaaaatccttaaatcacagatcccggtagataaaggtaaagtctaccgcttcggaggtgacgaatttgcggtgatttatactggcggcacgctggaagagttgctatcgatactaaaagaaatcgttcatttccaggtgggaagcattaatttaagcaccagtatcggtgtagcgcattcaaatgaatgtactaccgtcgaacgcttgaaaatgctggcggatgagcggctgtataagagtaagaaaaacggcagggcacagattagctggcagtaa

SEQ ID NO: 471623 - DNA, 2265 bp, Shigella flexneri
atgattaactatcaactggtatcggaacgcgcggtaaaacgtgccgatagccgctttgaacttattcagaaaaacgttggctatttctttaaagatattgaacgttcggccctgacattaaaggactcactgtatttattaaaaaatacagaggagattcaacgcgccgtgattctgaaaatggaaatgatgccatttttagattcggtgggactggtacttgatgataataaatattatctcttttcgcggagggcgaatgataaaatcgttgtttatcatcaggaacaagtaaatggaccgcttgtcgacgagtcagggcgggttatttttgccgattttaacccatcgaaacgaccgtggtcggtggcttcagatgactctaacaacagctggaatccggcatacaattgctttgatcgtccgggtaaaaaatgtatctcttttacgctacgtatcaacggcaaagatcacgatttgttagcggtagataaaattcatgtcgatttaaactggcggtatctgaacgagtatcttgatcaaatcagcgctaatgatgaagttctatttttgaaacaaggtcatgagatcattgccaagaatcaactcgctcgtgaaaaactgattatttataatagcgaaggtaattataatattattgattctgtcgatacggagtatattgcaaagacatcagcagtgccaaataatgcattgttcgaaatctatttttattatcctggcggtaatttattgaacgcatcagataaacttttttatctaccgtttgcgttcattattatcgtgttgctggtggtatatttcatgaccactcgtgtgttccgtcggcaattttctgaaatgaccgagctggttaatacgctggcgtttttgcccgactcaacggatcagatcgaggctctgaaaattcgcgaaggcgatgcgaaagagattatcagcatcaaaaattcgatcgcggaaatgaaagatgccgaaattgaacggtcaaataaattgctctcactgatctcttacgatcaggaaagcggttttattaaaaatatggcgattattgagtccaacaataatcagtatctggctgtggggatcatcaaactgtgtggtctggaagccgtggaggcggtgtttggtgttgatgaacgcaataaaatcgtcaggaaattgtgtcagcgaattgccgagaaatatgcgcaatgctgcgatatcgtgacattcaatgccgatctctatttacttctgtgtcgggaaaatgtacagacatttacccgtaaaatagcgatggtaaacgattttgacagcagctttggctaccgcaatctgcgcatccataagtctgccatttgtgaacctttgcagggggaaaacgcctggagttacgcagaaaaactgaaactggcgatttccagtatccgtgaccatatgttctccgagtttattttctgtgatgacgcgaaactcaacgaaatagaagagaatatctggattgcgcgtaatattcgccatgcaatggaaattggcgaactattcctcgtctatcaaccgatcgttgatattaacacccgcgtcattctgagcgcggaggcgttgtgccgttgggtttctgcggaacgggggatcatttcaccgctgaagttcattaccattgctgaagatatcgggtttatcaatgagctgggttatcagattattaaaacggcaatgggtgaattcagacattttagtcaacgtgcgtcgctgaaggatgatttcttactgcatattaatgtttcgccctggcagttaaacgaaccgcactttcatgagcgttttaccaccatcatgaaagaaaatggcctgaaggcgaacagcctctgtgttgagatcactgaaaccgtgatcgagcgaattaatgaacatttttatctcaatattgaacaactgcgtaaacaaggggtacggatatcgattgatgactttggcaccggtttgtcaaacctgaaacgtttttatgaaattaatccagacagcataaaggtggactcgcaatttaccggcgatattttcggtactgcgggaaaaattgtgcgcattattttcgatctggcacgctataaccggatcccggtgattgcggaaggcgtagagagcgaagacgttgcgcgcgaattaattaaattaggatgtgttcaggctcaggggtatctgtaccagaaacccatgccattctccgcttgggataaaagtggaaaattagtaaaagagtag

SEQ ID NO: 471624 - DNA, 912 bp, Shigella flexneri
atgcgactatttaactggcgacgtcaggcggtgttaaacgccatgccactggtcaaacctgaccaggtacgtacaccgtggcatgaattctggcgacgatttcgccgtcagcatatggcgatgaccgccgcattattcgttattttattgattgtggtggccatttttgcacgctggatcgctccctatgacgccgaaaattattttgattatgacaatctgaataacggaccttctttgcagcactggtttggcgtcgattcactggggcgcgacattttcagccgtgtcctggttggtgcgcaaatctcgctggcggcgggcgtgtttgccgtgtttatcggtgtggcgatagggacgttgctgggcttgttggctggatattatgaaggctggtgggatcggctgatcatgcgcatttgcgatgtgctgtttgccttcccgggtattttactggcgatcgctgttgttgcggtgttgggaagcggcattgctaacgtgattatcgcagtcgccattttttccatccccgcgtttgcccgcctggtgcgcggcaacacgctggtgttgaaacagcaaacctttattgagtcagcacgcagtattggtgccagcgatatgaccattttattgcgtcatatcctgcctgggaccgtctcttctatcgtggtgtttttcaccatgcgcattggcacctcgattatctctgccgccagcctgtcatttctcggcctcggtgcgcagccgccgacaccagagtggggagcaatgctcaatgaggcacgagcggatatggttatcgcgccgcatgtcgctgtttttccggccctggctatttttctgaccgtactggcgttcaatttgttgggcgatggtttacgcgatgcgctggatccgaaaattaaaggatag

SEQ ID NO: 471625 - DNA, 921 bp, Shigella flexneri
atgcttaattacgttatcaaacgattactggggttgattccgacgctgtttatcgtctcggtgctggtgtttttatttgtccacatgctgcccggcgatccggcgcgattgattgccgggcccgaagctgatgcgcaggttatagaactggtgcgtcagcagctggggttggatcagccgctgtatcaccagttctggcactatatcagcaatgctgtgcagggggattttggcctgtcgatggtgtcgcgtcgtccggttgccgatgagattgccagccgctttatgccaacgctgtggctgaccataaccagtatggtctgggcggtgatatttggtatggcggcgggaattatcgccgccgtctggcgtaatcgttggccggatcgattgagtatgaccattgcggtgtcggggatctcgtttccggcatttgcgctggggatgtttttaattcaggtattctccgttgaactgggctggctgcctactgtgggagcagacagttggcagcactacattttaccctccctgacgctcggcgcggcagtggccgccgtgatggcgcgctttacccgtgcgtcatttgtcgacgttttaagcgaagattatatgcgtaccgcgagggcgaaaggggtgagcgaaacctgggttgtcctcaaacacgggctacgcaacgcgatgatcccggtagtgaccatgatgggcttacagtttggctttttgctcggtggttctatcgtggtggagaaagttttcaactggcccggacttggacgcttactcgttgactctgtagaaatgcgcgattacccggtgattcaggcggaaattctgcttttctcgctggaatttattcttatcaacttagtggtggatgtgctttacgccgccattaacccggctatcaggtacaagtaa

SEQ ID NO: 471626 - DNA, 1539 bp, Shigella flexneri
atggcaagagctgtacaccgtagtgggttagtggcgctgggcattgcgacagcgttgatggcatcttgtgcattcgctgccaaagatgtggtggtggcggtaggatcgaatttcaccacgctcgatccgtatgacgcgaatgacacgttatctcaggccgtagcgaaatcgttttaccaggggctgttcggtctggataaagagatgaaactgaaaaacgtgctggcggagagttataccgtttccgatgacggcattacttacaccgtgaaattgcgggaaggaattaaattccaggatggcaccgatttcaacgcagtggcggtaaaagcgaatctggaccgggccagcgatccggcgaatcatcttaaacgctataacctgtataagaatattgccaaaacggaggcgatcgatccgacaacggtaaagattaccctcaaacagccgttctcagcgtttattaatattcttgcccatccggcgaccgcgatgatttcaccgacagcgctggaaaaatatggcaaggagattggttttcatccggtgggaaccggaccgtatgaactggatacctggaatcagaccgattttgtgaaggtgaaaaaattcgcgggttactggcagccaggattgcccaaactggacagcataacctggcgtccggtggcggataacaacacccgcgcggcaatgctgcaaaccggtgaagcgcagtttgctttccccattccctacgagcaggccacactgctggagaaaaacaaaaatatcgagttgatggccagtccgtcaattatgcagcgttatatcagtatgaacgtgacgcaaaagccgttcgataacccgaaggtccgtgaggcgctgaattacgccattaaccgtccggcgctggtgaaagttgcctttgcgggctatgcaacgccagctactggtgtggtaccgccaagtatcgcctacgcgcaaagttataaaccgtggccttacgatccagtgaaagcgcgcgaattactgaaagaggcgggatatcccaacggtttcagtaccacgctgtggtcgtcacataaccacagcaccgcgcagaaagtgctgcaatttacccagcagcagttagcgcaggtcgggattaaagcccaggtgaccgcgatggatgccggacagcgggcggcagaagttgaaggtaaagggcaaaaagagagtggcgtgcggatgttctacactggctggtcggcttcaaccggcgaagccgactgggcactatcgccgctgtttgcctcgcaaaactggccaccgacgctgtttaataccgcgttttacagcaataaacaggtggatgacttcctggctcaggcactgaaaacgaatgatccggcggaaaagacccgcttatataaggcggcgcaggatatcatctggcaagaatcgccgtggatcccgctggtggtagaaaaactggtgtcggcacacagtaaaaacctgaccggtttttggatcatgccagataccggcttcagctttgaagacgcggatttgcaataa

SEQ ID NO: 471627 - DNA, 1872 bp, Shigella flexneri
ttgccacacagtgatgaacttgatgccggtaatgtgctggcggttgaaaatcttaatattgcctttatgcaggaccagcagaaaatagctgcggtccgcaatctctcttttagtctgcaacgcggtgagacgctggcaattgtaggcgaatccggctccggtaagtcagtgactgcgctggcattgatgcgtctgttggaacaggcgggcggtttagtacagtgcgataaaatgctgttgcggcggcgcagtcgtgatgtgattgaacttagcgagcagagcgctgcacaaatgcgccatgtgcgcggtgcggatatggcgatgatatttcaggagccgatgacatcgctgaacccagtatttactgtgggtgaacagattgccgaatcaattcgtctgcatcagaacgccagtcgtgaagaagcgatggtcgaggcgaagcggatgctggatcaggtacgcattccggaggcacaaaccattctttcacgttattcgcatcaactctctggcgggatgcgccagcgagtgatgattgcgatggcgctgtcatgccgcccggcggtgctgattgccgatgagccaaccaccgcgctggatgtcactattcaggcgcagatcctgcaattaatcaaagtattgcaaaaagagatgtcgatgggcgttatctttatcactcacgatatgggcgtggtggcagagattgccgatcgggtactggtgatgtatcagggcgaggcggtggaaacgggtaccgtcgaacagatttttcatgcaccgcaacatccttacacccgtgcgctgttagctgctgttccgcaacttggtgcgatgaaagggttagattatccccgacgtttcccattgatatcgcttgaacatccagcgaaacaggaaccccccatcgagcagaaaacggtggtggatggcgaacctgttttacgggtgcgtaatcttgtcacccgtttccctttgcgcagcggtttgttgaatcgcgtaacgcgggaagtgcatgccgttgagaaagtcagttttgatctctggcctggcgaaacgctatcgctggtgggcgagtctggcagcggtaaatccactaccgggcgggcgttgctgcgcctggtcgaatcgcagggcggcgaaattatctttaacggtcagcgaatcgataccttgtcacctggcaaacttcaggcattgcgccgggatattcagtttatttttcaggacccttacgcttcgctggacccacgtcagaccatcggtgattcgattatcgaaccgctgcgtgtacacggtttattgccaggtaaagacgcggctgcacgcgttgcgtggttgctggagcgcgtgggcctgttacctgaacatgcctggcgttacccgcatgagttttccggcggtcagcgccagcgcatctgcattgctcgcgcgttggcattgaatccaaaagtgatcattgccgacgaagccgtttcggcgctggatgtttctattcgcgggcagattatcaacttgttgctcgatctccagcgtgatttcggcattgcgtatctgtttatctcccacgatatggctgtggtagagcggattagtcatcgtgtggcggtgatgtatctcgggcaaattgttgaaattggttcacggtgcgcggtcttcgaaaacccgcagcatccttatacgcgtaaattactggcggcagttccggtcgctgaaccgtcccgacaacgaccgcagcgtgtactgctgtcggacgatcttcccagcaatattcatctgcgtggcgaagaggtggcagccgtctcgttgcaatgcgtcgggccggggcattacgtcgcacaaccacaatcagaatacgcattcatgcgtagataa

SEQ ID NO: 471628 - DNA, 966 bp, Shigella flexneri
atgggcaaagcagtcattgcaattcatggtggcgcaggtgcaattagccgcgcgcagatgagtctgcaacaggaattacgctacatcgaggcgttgtctgccattgttgaaaccgggcagaaaatgctggaagccggcgaaagtgcgctggatgtggtgacggaagcggtgcgtctgctggaagagtgtccactgtttaacgccggaattggcgctgtctttacgcgtgatgaaacccatgaactggacgcctgtgtgatggatggtaacaccctgaaagccggtgcggtggcgggcgttagtcatctgcgtaatccggttcttgccgcccggctggtgatggagcaaagcccgcatgtgatgatgattggcgaaggggcagaaaattttgcgtttgctcatggcatggagcgcgtctcaccggagattttctccacgcctttgcgttatgaacaactactggcagcgcgcgaggaaggggcaacagtcctcgaccatagcggtgcgccactggatgaaaaacagaaaatgggcaccgtgggggccgtggcgttggatttagacggcaatctggcggcagccacgtccacaggcggaatgaccaataaattacccggacgagttggcgatagtcccttagtgggtgccggatgctacgccaataacgccagtgtggcggtttcttgtaccggcacaggcgaagtcttcatccgcgcgctggcggcatatgacatcgccgcgttaatggattacggcggattaagtctcgcggaagcctgcgagcgggtagtaatggaaaaactccctgcgcttggcggtagcggtggcttaatcgctatcgaccatgaagggaatgtcgcgctaccgtttaacaccgaaggaatgtatcgcgcctggggctacgcaggcgatacgccaaccaccggtatctaccgtgaaaaaggggacaccgttgccacacagtga

SEQ ID NO: 471629 - DNA, 1236 bp, Shigella flexneri
atggaatttaccaccggattgatgtcgctcgacaccgcgcttaatgagatgctttctcgcgttaccccactgaccacccaggaaacgctgccactggttcagtgttttggtcgtattctggcgagcgatgtcgtttcgccactggatgtcccggggtttgataactccgctatggacggctacgcggtgcgtttagccgatattgcctccgggcaaccgctgcccgttgccggtaaatcctttgccggtcagccataccatggtgaatggcctgcgggtacctgcattcgtattatgaccggtgcgccggtgccggaaggctgcgaagcggtggtgatgcaggagcagactgaacaaacggacaatggcgtgcgttttactgctgaagtgcgtagcgggcaaaatattcgccgtcgcggtgaagatatctctgcaggtgcggttgttttcccggcgggaactcgcctgactaccgcagagctgccagtaattgcttcactggggattgccgaagttccggtgattcgtaaagtgcgtgtagcgcttttttctaccggtgatgaactccagttgcccggtcagccgctgggcgacggccaaatctacgacaccaaccgtctcgccgtacacctgatgttagaacagctgggttgcgaggtaatcaacttagggattatccgcgacgatccacatgccctgcgcgccgcatttattgaagccgacagccaggcggatgtagtgatcagttccggcggtgtttcagtgggtgaagcggattacaccaaaatgattcttgaagagctgggggagatcgccttctggaagctggcgattaaaccaggtaaaccgttcgcgttcggtaaactcagcaatagctggttctgcggcctgccgggcaacccggtttcagcgacgctgaccttctatcaactggtacagcctttgctggcaaaactaagcggcaacaccgccagcggcctgcccgcgcgccagcgcgtacgcacagcgtcccgcctgaaaaaaacgccaggacgtcttgatttccagcgcggcgtgctgcaacgcaacgccgacggtgaacttgaagtgacgaccaccggacatcagggttcacatatatttagctcctttagtctcggcaactgctttatcgtgctggaacgcgatcgcggcaatgtggacgtgggcgaatgggtggaagtagaaccgtttaacgcgttgttcggaggcctgtaa

SEQ ID NO: 471630 - DNA, 750 bp, Shigella flexneri
atggcggaactcagcgatcaggagatgctgcgctacaaccggcaaatcattctgcgcggttttgattttgacggtcaggaggcgctaaaagattctcgtgtgctggtagtcggcctcggtggactcggctgcgcagcttcgcagtatctggcaagcgccggtgtcggcaacctgacgctgctcgacttcgacacggtttcgctctcgaatctgcaacgccagacactgcacagtgatgccacggtcgggcaaccgaaggtggaatccgcccgtgacgccctgacgcggatcaacccacatatcgcgattacgccagtcaatgcactgctagatgacgcagaacttgcagcattgattgctgaacacgatctggtgctcgactgtacggataacgttgcggtacgtaatcaactgaacgcaggctgttttgccgcgaaggtgccgctggtttccggcgcggcaattcgtatggaagggcaaatcacggtcttcacttatcaggacggcgaaccgtgctatcgctgccttagccgtttgtttggcgagaacgcgttaacctgcgtagaagcaggcgtgatggcaccgttgataggcgtaattggttcgttgcaggcaatggaagcgatcaaactgctggcaggttatggcaaaccggccagcgggaaaatcgtcatgtacgatgcgatgacctgtcagtttcgcgaaatgaaactgatgcgcaatccggggtgtgaggtgtgcgggcagtaa

SEQ ID NO: 471631 - DNA, 663 bp, Shigella flexneri
atggaactgtatctggatacttcagacgttgttgcggtgaaggcgctgtcacgtatttttccgctggcgggtgtgaccactaacccaagcattatcgccgcgggtaaaaaaccgctggatgttgtgcttccgcaacttcatgaagcgatgggcggtcaggggcgtctgtttgcccaggtaatggctaccactgctgaagggatggtgaatgacgcgcttaagctgcgttctattattgcggatatcgtggtgaaagttccggtgacagccgaggggctggcagcgattaagatgttaaaagcggaagggattccgacgctgggaaccgcggtatatggcgcggcacaagggctgctgtcggcgctggcaggtgcggaatatgttgcgccttacgttaatcgtattgatgctcagggcggtagcggcattcagactgtgaccgacttacaccagttattgaaaatgcatgcgccgcaggcgaaagtgctggcagcgagtttcaaaaccccgcgtcaggcgctggactgcttactggccggatgtgaatcaattactctgccactggatgtggcacaacagatgattagctatccggcggtggaagccgctgtgacgaagtttgagcaggactggcagggagcgtttggcagaacgtcgatttaa

SEQ ID NO: 471632 - DNA, 900 bp, Shigella flexneri
atgattttcaatattcagcgctactcgacccatgatggccccggtatccgcacggtcgtatttcttaaaggctgttcgctgggctgccgctggtgtcagaacccggaaagccgcgcccgtacgcaggatctgctgtatgacgcacgactgtgtctggaaggctgcgagctgtgcgctaaggccgcgccggaagtgattgagcgcgcgctgaatggtttgcttattcatcgggaaaagttaaccccggagcatctgacggcgttaaccgactgctgtccgacacaggcgttaaccgtgtgtggtgaagtgaaaagcgttgaggagatcatggcgaccgttctgcgcgataaaccgttttacgatcgcagcggcggcggcttaacgctttcgggtggtgaacccttcatgcagccggaaatggcgacggcgctgctgcaagcctgccacgaggcaggcattcatactgcggtagaaacctgtctgcatgtgccgtggaaatatatcgccccttctctgccctatatcgatctgtttcttgccgatttaaaacacgttgccgacgcgccgtttaaacagtggaccgacggtaacgccgccagggtactggataacctgaaaaaactcgccgcagcgggcaaaaaaatcattatccgcgtgccgctgattcagggctttaatgccgacgaaacctctgtaaaagccattaccgattttgccgccgacgagctgcacgttggcgaaattcattttctgccctaccacacgctgggcatcaacaaatatcacttacttaatctgccctatgacgccccggaaaaaccgcttgatgcgccagagctgctcgattttgcccagcagtatgcctgccagaaagggttaaccgcgaccttacgaggataa

SEQ ID NO: 471633 - DNA, 2433 bp, Shigella flexneri
atgaccacactgaaactggacacgctcagcgaccgcattaaagcgcacaaaaatgcgctggtgcatattgtgaagccgccagtctgtaccgagcgcgcgcagcactataccgagatgtatcaacaacatctcgataagccgatcccggtacgtcgcgcgctggcactggcgcatcacctggcgaatcgcaccatctggatcaaacacgatgagttgatcattggcaaccaggcaagcgaagttcgcgccgcgccgatcttcccggaatatactgtctcgtggatcgaaaaagagattgatgatctggcagatcgtcccggtgctggctttgcggtgagcgaagagaacaaacgtgttctgcatgaagtgtgcccgtggtggcgcggtcagacggtacaggatcgctgctatggcatgtttaccgatgagcaaaaaggtctgctggcgaccggcatcattaaagcggaaggcaatatgacctccggcgatgcgcacctggcggtcaatttcccgctgctgctggaaaaagggcttgatggtctgcgtgagaaagtagcggaacgtcgctcgcgcatcaatctgacggtgctggaagatttgcacggcgaacagttcctgaaagcgattgatatcgtgctggtggcagtcagtgaacacattgaacgtttcgctgccctggcgcgtgcaatggccgcgaccgaaacccgcgaaagccgtcgcgatgaactgctggcgatggcagaaaactgcgatcttatcgcccaccagccgccgcagactttctggcaggcgctgcaactgtgttacttcatccagttgattttgcagattgaatctaacggtcactcggtgtcgtttggtcgtatggatcagtatctctacccgtactatcgccgcgacgttgaactgaaccagacgctggatcgcgaacacgccatcgaattgctgcatagctgctggttgaaattgctggaagtgaacaaaatccgctccggctcccactcaaaagcctctgcgggaagtccgctgtatcagaacgtcaccattggcggacaaaatctggttgatggtcaaccaatggacgcggtgaatccactctcttacgcgatcctcgaatcctgcggtcgcctgcgttccactcagcctaacctcagcgtgcgttaccatgcaggaatgagtaacgatttcctcgacgcctgcgtacatgtgatccgctgcggcttcgggatgccggcattcaacaacgacgaaatcgtgatcccggaatttattaaactcggtattgaaccgcaggacgcttatgactacgcagcgattggttgtatagaaaccgccgtcggtggcaaatggggctatcgctgtaccggcatgagctttatcaacttcgcccgcgtgatgctggcggcgctggaaggcgggcgtgatgccaccagcggcaaagtgttcctgccacaagaaaaagcgttgtcggcaggtaacttcaacaacttcgatgaagtgatggacgcgtgggatacgcaaatccgttactacacgcgtaaatcaatcgaaatcgaatatgtcgtcgacaccatgctggaagagaacgtgcacgatattctctgctcggcgctggtggatgactgtattgagcgagcgaaaagtatcaagcaaggcggcgcgaaatatgactgggtttctggcctgcaggtcggtattgccaacctcggcaacagcctggcggcagtgaagaaactggtgtttgaacagggcgcgattggtcagcaacagctggctgccgcactggcggatgacttcgatggcctgactcatgagcaactgcgtcagcggctgattaacggtgcgccgaagtacggcaacgacgatgataccgtcgatacgctgctggctcgcgcttatcagacctatatcgacgaactgaaacagtaccataacccacgctacggtcgtggtccggttggcggcaactattacgcgggtacgtcgtctatctccgctaacgtaccgtttggcgcgcaaactatggcaacgccggacgggcgtaaagcccacaccccgctggcagaaggcgctagtccggcctctggtactgaccatctcggccctactgcggtcattggctcagtgggtaaactgcctacggcagcgattctcggcggcgtgttgctcaaccagaaactgaatccggcaacgctggagaacgaatctgacaagcagaaactgatgatcctgctgcgtaccttctttgaagtgcataaaggctggcatattcagtacaacatcgtttcccgcgaaacgctgctggaggcgaaaaaacatccggatcagtaccgcgatctggtagtgcgtgtcgcgggttattccgccttcttcaccgcgctctctccagacgctcaggacgatatcatcgcccgtactgaacatatgctgtaa

SEQ ID NO: 471634 - DNA, 816 bp, Shigella flexneri
atgagcgtaaaagttatcgtcacagatatggacggtacttttcttaacgacgccaaaacgtacaaccaaccacgttttatggcgcaatatcaggaactgaaaaagcgcggcattaagttcgttgtcgccagcggtaatcagtattaccagcttatttcgttctttcctgagctaaaggatgagatctcttttgtcgcggaaaacggcgcactggtttacgaacatggcaagcaactgttccacggcgaactgacccgacatgaatcgcggattgttattggcgagttgctaaaagataagcaactcaattttgtcgcctgcggtctgcaaagtgcatatgtcagcgaaaatgcccccgaagcatttgtcgcactgatggcaaaacactaccatcgcctgaaacctgtaaaagattatcaggagattgacgacgtactgttcaagttttcgctcaacctgccggatgaacaaatcccgttagtgatcgacaaactacacatagcgctggatggcattatgaaacccgtcaccagtggttttggctttatcgacctgattattcccggtctacataaagcaaacggtatttcgcggttactgaaacgctgggatctgtcaccgcaaaatgtggtagcgattggcgacagcggtaacgatgcggagatgctgaaaatggcgcgttattcctttgcgatgggcaatgctgcggaaaacattaaacaaatcgcccgttacgctaccgatgataataatcatgaaggcgcgctgaatgtgattcaggctgtgctggataacacatccccttttaacagctga

SEQ ID NO: 471635 - DNA, 1266 bp, Shigella flexneri
atggcttctacttttaccagcgacacattgcctgccgatcacaaagcagctatccgtcagatgaagcacgcgctgcgggcgcagcttggcgatgtccagcagatctttaatcagctaagcgatgacattgccacgcgagtggctgaaatcaacgcactcaaagcacagggcgatgccgtctggccggtgctgtcttatgccgatatcaaagcaggtcatgttactgcagagcagcgcgaacagattaaacgtcgcggttgtgcggtgataaaaggccatttcccccgcgaacaagcgctaggctgggatcagtcgatgctggactatctgaaccgcaaccgctttgacgaggtctacaaaggccccggcgataatttcttcgggacgctcagcgcttcacgtcccgagatttaccccatctactggtcgcaggcgcaaatgcaggcccgccagagtgaagaaatggcgaatgcgcagtcgtttctcaatcgtctgtggacatttgaaagtgatggaaagcaatggtttaacccggatgtgagcgtcatctaccctgaccgtatccgccgccttccgcccggaacgacctccaaaggtcttggagcgcataccgactccggggcgctggaacgctggctgcttccagcgtatcagcacgttttcgccaacgtctttaatggcaatctggcgaaatacgatccctggcatgcggcacatcgtacggaagttgaagagtacacggtggacaacaccaccaaatgttccgtgtttcggacattccagggctggactgcgctctcggatatgctgcctggtcaggggttgctgcacgtcgtgcccattcctgaagccatggcgtacgtactgttacgtccgctgcttgatgatgtgccggaggatgaactgtgcggcgtagcgcccggaagagtgttgccggtatcagagcaatggcatccactgttaattgaggcgttaaccagcattccaaaactcgaggccggagactccgtctggtggcactgcgacgtcatccattccgttgcccccgttgaaaatcaacagggttggggcaacgtgatgtacattcctgcggcaccgatgtgcgagaaaaatcttgcctacgcgcacaaggtgaaggccgcactggaaaaaggcgcatcgccgggcgacttcccgcgcgaggactatgaaacaaactgggaaggacgctttacgcttgccgacctcaacattcacggtaagcgagcgttgggcatggatgtttga

SEQ ID NO: 471636 - DNA, 1593 bp, Shigella flexneri
gtgttagtttccagtaacgtcaccatgcagttcggcagtaagccgttgtttgaaaacatttccgtcaaattcggcggcggcaaccgttacggcctgattggcgcgaacggtagtggtaaatccacctttatgaagattctcggcggcgaccttgagccgacgctgggtaacgtttccctcgatcccaacgagcgcattggtaagctgcgtcaggatcagtttgcctttgaagagttcactgtgctggatacggtgatcatggggcataaagagttgtgggaagtgaagcaggagcgcgaccgcatctatgctttgccggaaatgagtgaagaagacggctataaagtggccgatctggaagtgaaatacggcgaaatggacggttactctgcggaagctcgcgccggtgaactgttgcttggcgtgggaattccagtggaacagcactacggcccgatgagtgaagttgctcctggctggaagctgcgtgtgcttctggcgcaggcgctgtttgctgagccggatattctcctgctcgacgaaccgaccaacaacctcgacatcgacaccattcgctggctggaacaggtgctgaacgagcgtgacagcaccatgatcatcatctcgcacgaccgtcacttccttaacatggtctgtacccacatggcggatctggattacggcgagctgcgcgtttatccgggtaactacgatgagtatatgacggcggcgacccaggcgcgtgaacgtctgctggccgataacgccaagaagaaagcgcagattgctgagttgcaatctttcgttagccgctttagcgccaacgcctcgaaatctcgccaggcaacttcgcgcgcgcgccagattgataaaatcaaactggaagaggtgaaagcctccagccgtcagaacccgtttatccgttttgaacaggataagaaactgttccgtaacgcgctggaagtggaaggtctgaccaaagggtttgataacggtccactgtttaaaaatctcaacctgctgctggaggtcggtgaaaaacttgcggtactgggtaccaacggcgtcggtaaatcaacgttgctgaaaacgctggtgggcgatctgcaaccggacagcggcaccgtaaaatggtctgaaaacgcgcgcattggttactacgcccaggaccacgaatatgagtttgaaaatgatctgaccgtgttcgaatggatgagtcagtggaagcaggaaggcgatgacgagcaggcggtacgcagcattctcggtcgtttgctgttcagccaggacgacatcaaaaagccagctaaagtgctttccggtggggaaaaagggcggatgctgtttggtaagttaatgatgcagaagccgaacattctgatcatggacgaaccgaccaaccacctggatatggaatccatcgagtcactgaacatggcgctggaactgtatcagggcacgctgatctttgtttcacacgaccgtgagttcgtaagctccctggcgacccgcattctggaaatcaccccggaacgcgtgatcgactttagcggtaattacgaagattacctgcgtagtaaagggatcgagtaa

SEQ ID NO: 471637 - DNA, 921 bp, Shigella flexneri
atgaatatgaaattgaaaacattattcgcagcggccttcgctgttgtcggcttttgcagtaccgcctctgcggtaacttatcctctgccaaccgacgggagtcgcctggttggtcagaatcaggtgatcaccattcctgaaggtaacactcagccgctggagtattttgccgcggagtaccagatggggctttccaatatgatggaagcgaacccgggtgtggataccttcctgccgaaaggcggtactgtactgaacattccgcagcagctgatcctgccggataccgttcatgaaggcatcgtcattaacagtgcagagatgcgtctgtattactatccgaaagggaccaacaccgttatcgtgctgccgatcggcattggtcagttaggcaaagatacgcctatcaactggaccaccaaagttgagcataagaaagcaggcccgacctggacgccgaccgccaaaatgcacgcagagtaccgcgctgcgggcgaaccgctaccggctgtcgttccggcaggtccggataacccgatgggtctgtatgcactctacatcggtcgcctgtatgctatccatggcaccaacgccaacttcggtatcggcctgcgtgtaagtcatggttgtgtgcgtctgcgtaacgaagacatcaaattcctgttcgagaaagtaccggtcggtacccgcgtacagtttattgatgagccggtaaaagcgaccaccgagccagacggcagccgttatattgaagtccataacccgctgtctaccaccgaagcccagtttgaaggtcaggaaatcgtgccaattaccctgacgaagagcgtgcagacagtgaccggtcagccagatgttgaccaggttgttcttgatgaagcgatcaaaaatcgttccgggatgccggttcgcctgaattaa

SEQ ID NO: 471638 - DNA, 1119 bp, Shigella flexneri
atgagcctgccttttttacgcacgctgcaaggcgatcgtttttttcagttattaattcttgttggtatcggattaagctttttcgtgccctttgcaccgaaatcctggcctgctgctatcgactggcacaccatcatcaccttaagcggcctgatgctgctgaccaaaggtgtggagttaagcggttattttgatgtgctggggcgcaaaatggtgcgccgctttgctacggagcgtcggctggcgatgtttatggtgctggcggcggcgctgctttctacctttctgaccaacgatgtcgcgctgtttattgttgttccgctgactatcacgctaaaaagactgtgtgagatcccggttaatcggctgattatttttgaggcgctggcagtcaacgctggttcgctactgacgccaattggcaacccacaaaatattcttatctggggacgttctggtctttcgtttgccggatttattgcccaaatggcaccgatggctggcgcaatgatgctgacactcctgctgttgtgctggtgttgtttccctggaaaggcgctgcaataccatacgggggtgcaaacaccggagtggaaaccgcggctggtgtggaattgtctggggctgtatatcgtctttctgacggcgctggagttcaaacaagagctgtggggactggtgattgtggcggcgggctttgtgctgctggcgcgtcgcgtggtgttgagtgtggactggacgttgctgctggtgtttatggcgatgtttatcgacgtccatttactgacccagcttccagcgttgcaaggcgtgttgggtaacgtgagtcatttatctgaacccgggttatggttaacggcagtcggtttatcgcaggtgatcagtaacgtgccgagtaccattttgctgctcaattatgtacctccgtctttattactggcatgggcggtaaacgtggggggctttggtttattaccaggatcgctggcaaatttgattgcgctacgtatggcgaacgatcgccgcatctggtggcgtttccatctctattcaataccgatgctgttgtgggcggcgctggtgggatacgttttgttagttatgatcccggcctggtaa

SEQ ID NO: 471639 - DNA, 468 bp, Shigella flexneri
atgagtcgtcgcgcaggtacgccaatagcaaaaaaagtgacgcagttagtgaacgtggaagagcacgttgaagggttccgccaggtcagagaggcgcatcggcgcgagcttattgatgattacgttgagctgatttctgacttgatcagggaagtgggggaagctcgtcaggtggacatggctgctcgtctgggagtttcgcaaccgacggtggctaaaatgcttaagcggctggcaaccatggggctgattgaaatgatcccctggcgtggcgtgtttttaacggcagaaggagagaagctggcgcaggaaagccgcgagcgacatcagatagtcgaaaatttcttgttggtgttgggcgtcagtccggaaatcgcccgtcgcgacgcggaaggcatggagcaccatgttagtgaagagacgctcgacgcttttcgtttgtttacccagaaacacggtgccaaatga

SEQ ID NO: 471640 - DNA, 129 bp, Shigella flexneri
atgaatgagttcaagaggtgtatgcgcgtgtttagtcattctccctttaaagtacggttaatgctgctctctatgttgtgcgatatggtcaacaacaaaccgcagcaagataaaccttcagataaatag

SEQ ID NO: 471641 - DNA, 1584 bp, Shigella flexneri
atgaatttaaccctcaaagaatcgcttgttacccgtagccgggtatttagcccgtggactgcgttctactttttacagtcgctattaattaacctcggcttaggttaccccttcagtttgctctacaccgctgcgtttacggctattttgcttttgctatggcgaacattgcctcgcgtacaaaaagttctggtcggtgtcagttcgctggtggcggcttgttatttcccttttgctcaggcctacggcgcgcctaatttcaatacattgctggcattgcactccaccaatatggaagagtcgaccgaaatcctgacgatttttccgtggtacagctacctggtcggcttatttatttttgcgctcggcgtaatagcaatcaggcgaaaaaaagagaatgaaaaagcgcgctggaataccttcgacagcctgtgtctggtattcagtgtggcgacattttttgttgctcccgtgcaaaacctggcctggggtggcgtatttaaactgaaagatactggctatccggtatttcgttttgctaaggatgtcatcgtcaataataacgaggtgattgaagagcaagaacggatggcaaaactttccggaatgaaagatacctggacggtcactgccgttaagccgaagtatcagacctatgtggtagtgatcggtgaaagcgcgcgtcgcgatgccctcggtgcctttggcggtcactgggacaataccccgtttgccagcagcgttaacggtttgatatttgctgactacattgctgccagtggctccacgcagaaatcgcttggcttaacgctcaatcgcgtagtcgatggcaaaccacagtttcaggataactttgtcaccctggcaaatcgcgcgggcttccagacctggtggttttccaaccagggccaaatcggcgaatacgatactgctatcgccagcatcgccaaacgtgcagatgaagtgtacttcctgaaagaaggtaattttgaagcagataaaaacacgaaagacgaagcgttactggatatgaccgctcaagtgctggcgcaagagcactcgcaaccgcagctgattgttctgcatctgatgggctcgcatccgcaggcctgcgacaggacacaaggcaaatacgaaacctttgtgcaatcgaaagaaacgtcgtgctatctctataccatgacgcaaacggacgatttactgcgcaagctgtacgatcagttacgcaacagcggcagcagcttctctctggtttacttttctgaccacggtctggcctttaaagagcgcggcaaagacgtgcaataccttgcccatgatgataaatatcagcaaaatttccaggtgccttttatggtcatttccagcggcgataaagcgcatcgggtgattaaagcccgccgctcagccaatgacttcttaggctttttctcgcagtggacgggaattaaagcgaaggaaataaatatcaaatacccgtttatatctgagaagaaagccgggccgatatacatcaccaacttccagttacagaaggtggattacaaccatctcggaaccgatattttcgacccgaaaccttaa

SEQ ID NO: 471642 - DNA, 516 bp, Shigella flexneri
atgaaaaaaattgcatgtctttcagcactggccgcagttctggctttcaccgcaggtacttccgtagctgcgacttctaccgtaactggcggttacgcacagagcgacgctcagggccaaatgaacaaaatgggcggtttcaacctgaaataccgctatgaagaagacaacagcccgctgggtgtgatcggttctttcacttacaccgagaaaagccgtactgcaagctctggtgactacaacaaaaaccagtactacggcatcactgctggtccggcttaccgcattaacgactgggcaagcatctacggtgtagtgggtgtgggttatggtaaattccagaccactgaatacccgacctacaaacacgacaccagcgactacggtttctcctacggtgctggtctgcagttcaacccgatggaaaacgttgctctggacttctcttacgagcagagccgtattcgtagcgttgacgtaggcacctggattgccggtgttggttaccgcttctaa

SEQ ID NO: 471643 - DNA, 888 bp, Shigella flexneri
atgcctggttcattacgtaaaatgccggtctggttaccaatagtcatattgctcgttgccatggcgtctattcagggtggagcctcgttagctaagtcactttttcctctggtgagcgcaccgggtgtcactgcgctgcgtctggcattaggaacgctgatcctcatcgcgttctttaagccatggcgactgcgctttgccaaagagcaacggttaccgctgttgttttacggcgtttcgctgggtgggatgaattatcttttttatctttctattcagacagtaccgctgggtattgcggtggcgctggagttcaccggaccactggcggtggcactgttctcttctcgtcgcccggtagatttcgtctgggttgtgctggcggttcttggtctgtggttcctgctaccgctggggcaagacgtttcccatgtcgatttaaccggctgtgcgctggcactgggggccggggcttgttgggctatttacattttaagtgggcaacgcgcaggagcggaacatggccctgcgacggtagcaattggttcgttgattgcagcgttaattttcgtgccaattggagcgcttcaggctggtgaagcactctggcactggtcggttattccattgggtctggctgtcgctattctctcgaccgctctgccttattcgctggaaatgattgccctcacccgtttgccaacacggacatttggtacgctgatgagcatggaaccggcgctggctgccgtttccgggatgattttcctcggagaaacactgacacccatacagctgctggcgctcggcgctatcatcgccgcttcaatggggtctacgctgacagtacgcaaagagagcaaaataaaagaattagacattaattaa

SEQ ID NO: 471644 - DNA, 504 bp, Shigella flexneri
atgagtaccgctaaattagttaaatcaaaagcgaccaatctgctttatacccgcaacgatgtctccgacagcgagaaaaaagcaacagtagagttgctgaatcgccaggttatccagtttattgatctttctttgattaccaaacaagcgcactggaacatgcgcggcgctaacttcattgccgtacatgaaatgctggatggcttccgcaccgcactgatcgatcatctggataccatggcagaacgtgccgtgcagctgggcggtgtagctctggggaccactcaagttatcaacagcaaaaccccgctgaaaagttacccgctggacatccacaacgttcaggatcacctgaaagaactggctgaccgttacgcaatcgtcgctaatgacgtacgcaaagcgattggcgaagcgaaagatgacgacaccgcagatatcctgaccgccgcgtctcgcgacctggataaattcctgtggtttatcgagtctaacatcgaataa

SEQ ID NO: 471645 - DNA, 747 bp, Shigella flexneri
atgaagtctgtattaaaagtttcactggctgcactgaccctggcttttgcggtttcttctcatgccgcggataaaaaattagttgtcgcgacggataccgccttcgttccgtttgaatttaaacagggcgataaatatgtgggctttgacgttgatctgtgggctgccatcgctaaagagctgaagctggattacgaactgaagccgatggatttcagtgggatcattccggcactgcaaaccaaaaacgtcgatctggcgctggcgggcattaccatcaccgacgagcgtaaaaaagcgatcgatttctctgacggctactacaaaagcggcctgttagtgatggtgaaagctaacaataacgatgtgaaaagcgtgaaagatctcgacgggaaagtggttgctgtgaagagcggtactggctccgttgattacgcgaaagcaaacatcaaaactaaagatctgcgtcagttcccgaacatcgataacgcctatatggaactgggcaccaaccgcgcagacgccgttctgcacgatacgccaaacattctgtacttcatcaaaaccgccggtaacggtcagttcaaagcggtaggtgactctctggaagcgcagcaatacggtattgcgttcccgaaaggtagcgacgagctgcgtgacaaagtcaacggcgcgttgaaaaccctgcgcgagaacggaacttacaacgaaatctacaaaaaatggttcagtactgaaccgaaataa

SEQ ID NO: 471646 - DNA, 660 bp, Shigella flexneri
atgcagtttgactggagtgccatctggcctgccattccgcttctgattgaaggtgccaaaatgaccctgtggatttcggtcctcggtctggctggcggtctggtaatcggattgctggcaggttttgcacgcaccttcggtggttggatagccaaccacgtcgcgctggtctttattgaagtgatccgcggcacacctatcgtcgtccaggtgatgtttatctatttcgccctgccgatggcgtttaacgacttacgcatcgacccatttactgcggcggtggtcaccatcatgatcaactccggcgcgtacattgcggaaatcacgcgtggtgcggtgctgtctatccacaaaggttttcgtgaagcaggactggcgctcggtctttcacgttgggaaaccattcgctacgtcattttaccgctggcactgcgtcgtatgctgccgccgctgggtaaccagtggatcatcagcattaaagacacctcgctgtttattgttatcggcgtggcggaactgacccgtcaggggcaagaaattattgccggtaacttccgcgcccttgagatctggagcgccgtggcggtgttctatctgattattaccctggtgctgagctttattctgcgtcgtctggaaagaaggatgaaaatcctgtga

SEQ ID NO: 471647 - DNA, 723 bp, Shigella flexneri
gtgattgaatttaaaaacgtctccaagcactttggcccaacccaggtgctgcacaatatcgatttgaacattgcccagggcgaagtcgtggtgattatcgggccgtccggttccggtaaatcgaccctgctgcgctgcatcaacaaactggaagaaatcacctccggcgatctgattgtcgatggcctgaaggtcaacgatccgaaagttgacgagcgcctgattcgccaggaagcaggtatggtgttccagcagttttacctcttcccgcatctgacggcgctgggaaacgtcatgtttggtccgctacgcgtgcgtggcgcgaacaaagaagaggcggaaaaactggcgcgtgagctgctggcgaaagtcggtctggcagaacgtgcacatcactacccttccgaactttctggtggtcaacagcagcgtgtggcgattgcccgcgcgctggcggtgaagccgaaaatgatgctgtttgatgaaccgacttccgctcttgacccggaactgcgccatgaagtgctgaaggttatgcaggatctggctgaagaagggatgacgatggtgatcgtgacccacgaaatcggttttgccgagaaagtagcttcgcggctgatctttatcgacaaaggccggattgcggaagatggcaatccgcaggtgttgatcaagaacccgccgagccagcgcttgcaggaatttttgcagcacgtctcttaa

SEQ ID NO: 471648 - DNA, 195 bp, Shigella flexneri
atgcggtggatcctgttcatcctcttctgcctgctgggcgcacctgcccacgcggtatccatacccggcgttacaaccacaacgacaacggactcaacgactgaaccggccccggaaccggatatcgaacaaaaaaagcggcctatggcgcactggcggatgtgctggataacgacacctcgcgtaaagagttga

SEQ ID NO: 471649 - DNA, 927 bp, Shigella flexneri
atgtccgcccagaaaccggggttgcatccgcgcaaccgtcatcacagccgctacgatctcgccacgctttgtcaggtcaatcctgaactcaggcaattcctcacgcttacacccgcaggggagcaaagcgtagactttgccaatccgctggcggtgaaggcgctcaataaggcgttgctggcccatttttacgccgtagcgaactgggatatccccgacggttttctctgcccaccagtaccgggccgggcggattatattcatcaccttgccgatttactggctgaagcaagcggaacaattccagcgaatgccagcattctggatatcggcgttggtgcgaactgtatttatccgctgattggcgtacatgaatatggctggcgttttaccggtagtgaaaccagcagccaggcgttaagcagtgcgcaggcgattatcagtgctaatccggggcttaaccgcgccattcgtctgcgtcggcaaaaagagagtggggcgatttttaacggcatcatccacaaaaacgagcaatacgacgcgaccttgtgtaacccgccattccacgattccgccgctgcggcgcgggcaggtagtgagcgtaaacgccgtaacctggggctgaacaaagacgatgcactgaactttggtggtcagcaacaggagttgtggtgtgaaggcggtgaagtcaactttatcaaaaagatgattgaagagagcaaaggcttcgcgaagcaggtgatgtggtttacctcgctggtatctcgtggtgaaaacttaccgccgttgtatcgtgctccgaccgacgtgggcgcggtgaaggtggtaaaaaaagagatggcccaggggcaaaagcagagtcgctttattgcctggacctttatgaacgacgagcagcgccgccgttttgttaatcgccaacgttaa

SEQ ID NO: 471650 - DNA, 261 bp, Shigella flexneri
atgaaaaagtgcctcacactactgattgccaccgtcctgagcggaatctctctcacggcttatgccgcgcaaccgatgagtaacctggacagcggtcagctacggcccgccggtaccgtttcggcaactggcgcatcaaacctaagcgatctggaggataaactggcagaaaaagcgcgcgaacaaggcgcgaaaggttatgtcattaattccgcaggcggaaatgaccagatgttaggtactgcaaccatctacaaataa

SEQ ID NO: 471651 - DNA, 330 bp, Shigella flexneri
atggaaaacaatcgcaatttccctgccagacaatttcattcgctcacgttctttgccggtctttgtattggtattacgcctgtggcacaggcactcgccgccgaagggcaagctaacgcggatgacacgctggttgtcgaagcatcaacgccttcgctttatgcgccacaacaatctgccgatccgaaattctcgcgtccggtagcggatactacccgcacgatgacggtgatttctgaacaagtgattaaagatcagggcgcaaccaaccttaccgacgcgctcaaaaacgtccccggcgtgggtaatgccagtcagttaagcaactga

SEQ ID NO: 471652 - DNA, 1053 bp, Shigella flexneri
atgcttgacaacttaataggggcacgttacctcaccgggcttggcaccattaccgccgctaatactgttacggtgcgcagccgcgtggacggtcaactgatggcgttacatttccaggaaggccagcaggtcaaagcaggcgatttactggcagaaattgaccccagccagttcaaagttgcattagcacaaacccagggccaactggcaaaagataaagccacgcttgctaacgcccgccgtgatctggcgcgttatcagcaactggcaaaaaccaatctcgtctcccgtcaggagctggatgcccaacaggcgctggtcagtgaaaccgaaggcaccattaaggctgatgaagcaagcgtcgccagcgcgcagttgcaactcgactggagccgcatcaccgcaccagtcgatggtcgcgttggtctcaagcaagttgatgttggtaaccaaatctccagtggtgataccaccggaattgtggtgatcacccagacgcatcctatcgatttagtctttaccctgccggaaagcgatatcgctactgtagtgcaggcgcaaaaagccggaaaaccgctgatggtagaagcctgggatcgcaccaattcgaagaaattaagtgaaggcacgctgttaagcctcgataaccaaatcgatgccacaaccggtacgattaaagtgaaagcacgctttaataatcaggatgatgcgctgtttcccaatcagtttgttaacgcgcgcatgttagtcgacaccgaacaaaacgccgtagtgatcccaacagccgccctgcaaatgggcaatgaaggccattttgtctgggtgctgaatagcgaaaacaaggtcagcaaacatctggtgacgccgggcattcaggacagtcagaaagtggtgatccgtgcaggtatttctgcgggcgatcgcgtggtgacagacggcattgatcgcctgaccgaaggggcgaaagtggaagtggtggaagcccagagcgccaccactccggaagagaaagccaccagccgcgaatacgcgaaaaaaggagcacgctcctga

SEQ ID NO: 471653 - DNA, 2559 bp, Shigella flexneri
atgcaggtgttacccccgagcagcacaggcggcccgtcgcgcctgtttattatgcgtcctgtcgccaccacgctgctgatggtggcgatcttactcgccgggattatcggttatcgcgccctgcccgtttcggcgctgccggaagtggactatccgaccattcaggtggtcacgctctacccaggtgccagcccggatgtcatgacctctgccgttaccgcgccgctcgaacgccagttcgggcagatgtctggcctgaaacagatgtcgtcgcaaagttccggcggtgcgtcagttatcactttgcagttccagctaacattaccgctcaatgtcgccgagcaggaagtgcaggccgcgattaacgctgcgaccaacttgttgccgagcgatctgcctaacccgccggtttacagcaaagtgaacccggcagatccgccgatcatgacgctcgccgtcacctcaaccgccatgccgatgacgcaagtggaagatatggtggaaacccgcgtcgcgcagaaaatctcgcagatttccggcgtcggcctggtgacgctttccggcggtcagcgtccggctgttcgcgtcaaacttaacgctcaggcgattgccgccctcggcctgaccagcgaaaccgtgcgcaccgccattaccggcgctaacgttaactcggcaaaaggtagcctcgacggcccttcccgtgcggtcacgctttccgcgaacgaccagatgcaatccgccgaagagtatcgccagctaatcatcgcctaccagaacggcgcgccaattcgtctgggcgatgtcgcaactgtagagcaaggtgcagaaaacagctggctcggcgcgtgggcgaacaaagaacaggccattgtgatgaatgttcagcgccagcccggtgctaacattatctccaccgccgacagcattcggcagatgctgccacagctcactgagagtctgccgaaatcggtgaaggtgacagtgctttccgatcgcaccaccaatatccgcgcatccgtcgatgatactcagtttgaattgatgatggctatcgcgctggtagtcatgattatctacctgtttttgcgcaatattccggcgaccatcattcccggtgttgctgtaccgctgtcgttaatcggcactttcgcggttatggtgtttctcgatttttcaatcaataacctgacactgatggcgttaactatcgccaccggattcgtggtcgatgacgccatcgtggtgatcgaaaacatttcccgctatatcgaaaaaggcgaaaaaccgttggcggcggcgctcaagggcgcaggtgaaatcggctttaccattatctcgctgaccttctcactgattgcggtgttgatcccactgctgtttatgggcgatatcgtcgggcgactgttccgcgaatttgctattaccctggcggtagcgattttgatctcagcggtggtgtcgctgaccctgacaccgatgatgtgcgcgcggatgctcagccaggagtcgttgcgtaaacagaaccgcttctcccgtgcctcggaaaaaatgttcgacaggataatcgccgcctatggtcgtggactggcgaaagtgctgaatcatccgtggctgaccttaagcgtggcactcagcacgctgctgcttagcgtgctgctgtgggtgttcattccgaaaggtttcttcccggtacaggacaacggcattattcagggcactttgcaggcaccgcaatccagctcctttgccaatatggcccagcgacaacgccaggtcgcggacgtgattttgcaggatccggcagtgcaaagcctgacctcatttgttggcgttgatggcactaacccgtcgctgaatagtgcacgtttacaaatcaacctcaaaccgttggatgaacgtgatgatcgggtgcaaaaagtcatcgcccgtctgcaaacggcggtagataaagtgccgggcgtcgatctcttcctgcaaccaacgcaggacctgaccatcgatactcaggtcagccgcacccagtaccagtttaccttgcaggccacgtcactggatgcgctcagtacctgggtgccacagttgatggaaaaactccagcaactgccacagctttctgatgtctccagcgactggcaggacaaagggctggtggcgtatgtcaatgttgatcgcgacagcgccagccgtctggggatcagcatggcggacgtcgataacgccctgtacaacgcgtttggtcagcgactgatttccactatttatactcaggctaaccagtatcgcgtggtgctggagcacaataccgaaaataccccaggcctcgcggcgctggataccattcgcctgaccagcagcgacggtggcgtggtgccgttaagctcaattgccaaaattgagcagcgttttgcgccgctttccatcaaccatctggatcagttcccggtaacaaccatctcctttaacgtgccggataactattcgctgggcgatgcggtgcaggcgattatggacaccgaaaagacgctgaatctgccggtggatatcaccacgcaattctag

SEQ ID NO: 471654 - DNA, 495 bp, Shigella flexneri
atgtatatcgtgctcggcattctgtacgagagctttattcacccgatcaccattctctcgacgctacccaccgcaggggtcggcgcgctgctggcattaatgattgccggtagcgaactggatgtgattgcgattatcggcattattttgctgatcggtattgtgaagaagaacgccatcatgatgatcgacttcgcgctggctgctgagcgcgagcaaggcatgtcgccgcgcgatgcaatctaccaggcttgtctgttgcgttttcgtccgatcctgatgaccaccctggcggctctgcttggcgcgctgccgctgatgttgagtaccggggtcggcgcggaactgcgtcgtccgttaggtatcggcatggtcggcggtctgattgtcagccaggtgctgacgctgttcaccacgccggtgatttatctgctgttcgaccgcctggcattgtggaccaaaagtcgctttgctcgccatgaagaggaggcgtaa

SEQ ID NO: 471655 - DNA, 3066 bp, Shigella flexneri
gtgaagttttttgccctcttcatttaccgcccggtggcgacgattttactgtcggtcgccattaccctgtgcggcatactgggtttccgtatgctgccggtcgccccgctgccgcaggtcgattttccggtgattatggtcagcgcctcgctgcccggtgcgtcgccggagacaatggcgtcttccgttgccacgccgctggagcgctcacttgggcgcattgccggggttagtgaaatgacctccagcagttcgctcggcagcacgcgcattattttgcagtttgattttgaccgggatatcaacggcgcagcgcgtgatgtgcaggcggcgatcaacgctgcacaaagtttgctgcccagcgggatgcccagccgcccgacctatcgcaaagcgaacccgtcggatgcgccaattatgatcctcacgctgacatccgatacttattcgcagggtgaactgtacgatttcgcctcgacgcagctggctccgacgatttcgcaaatcgacggtgtcggtgatgtcgatgtcggtggcagctcgctgcccgccgtgcgcgtcgggctgaccccgcaggcgctgtttaatcagggcgtgtcgctggacgacgtacgcactgccatcagcaatgccaacgtgcgtaaaccgcagggggcgctggaagatggcactcaccgctggcagatccagaccaacgatgaactgaaaaccgccgctgaatatcagccgctgattattcactacaacaacggcggcgcggttcgtctgggcgatgtggcgacggtgactgactcagtacaggatgtgcgcaacgccgggatgaccaacgccaaaccggctattttactgatgatccgcaaactgccggaagccaatattatccagacggtagacagcatccgggcaaaattaccagagttgcaggagaccattccggcggcgattgatctgcaaattgcccaggatcgctcccccaccattcgcgcctcgctggaagaagtcgagcaaacgctgattatctcggtggcgctggtgattctggtggtctttttattcctgcgctcgggtcgcgccactattattcccgccgttgcggtgccggtttcgctgattggtacgtttgcggcgatgtacctgtgcggattcagtctcaataatctttcgctgatggcgctcaccattgctactggtttcgtggtggatgacgccattgtggtgctggaaaacattgcccgtcatctggaagcggggatgaaaccactacaggccgcgctgcaaggtactcgcgaagtcggctttacggtgctgtcgatgagtctgtcactggtggcggtgttcctgccgctgctgttgatgggcggattgccgggccgactgttacgcgagtttgccgtgacgctttctgtcgccattggtatttcgttgctggtttccctgacgctaacgccaatgatgtgcggctggatgctaaaagccagcaagccgcgtgagcaaaagcgactgcgtggttttggccgcatgttggtagccctgcaacaaggctacggcaagtcgctgaaatgggtgctcaatcatacccgtctggtgggcgtggtgctgcttggcaccattgcgctgaatatctcgatcccgaaaaccttcttcccggagcaggacaccggcgtactgatgggtgggatacaggcggatcagagtatttcgtttcaggcgatgcgcggcaaattgcaggatttcatgaaaattatccgtgacgatccggcagtggataatgtcaccggctttaccggcggttcacgagttaacagtgggatgatgtttatcaccctcaagccacgcgacgaacgcagcgaaacggcgcagcaaattatcgaccatctgcgcgtgaagctggcgaaagaaccgggggcgaatctgttcctgatggcggtacaagatattcgcgttggtgggcgtcagtcgaacgccagctaccagtacacgttgttatccgacgacctggcggcactgcgcgaatgggagccgaaaatccgcaaaaaactggcgacgttgccggaactggcggacgtgaactccgatcagcaggataacggcgcggagatgaatctggtttacgaccgcgacaccatggcacggctgggaatcgacgtacaggccgccaacagtctgttaaataacgccttcggtcagcggcaaatctcgaccatttaccagccgatgaaccagtataaagtggtgatggaagtggatccgcgctatacccaggacatcagtgcgctggaaaaaatgttcgttatcaataacgaaggcaaagcgatcccgctgtcgtatttcgctaaatggcaaccggcgaatgccccactatcggtgaatcatcagggattatcggcggcctcgaccatctcgttcaacctgccgaccggaaaatcgctctcggacgccagtgcggcgatcgatcgcgcaatgacccagcttggtgtgccttcgacggtgcgcggcagttttgccggcacggcgcaggttttccaggagacgatgaactcgcaggtgatcctgattatcgccgccatcgccacggtgtatatcgtgctgggtatcctttacgagagttacgtacatccgctgacgattctctccaccctgccctcggcgggcgttggagcgctgttggcgctggagctgttcaatgccccgttcagcctaatcgccctgatagggatcatgctattaatcggcatcgtgaagaaaaacgccattatgatggtcgattttgcgcttgaagcccaacggcacggtaacctgacgccgcaggaagctattttccaggcctgtctgctgcgttttcgcccgattatgatgaccaccctggcggcgctgtttggcgcgctgccgctggtattgtcgggcggtgacggctcggagctgcggcaacccctggagatcaccattgtcggcggtctggtgatgagccagctcctgacgctgtataccacgccggtggtgtatctctttttcgaccgtctgcggctgcgtttttcgcgtaaacctaaacaaacggtaaccgagtaa

SEQ ID NO: 471656 - DNA, 1416 bp, Shigella flexneri
atgacagatcttcccgacagcacccgctggcaattatggattgtggctttcggcttctttatgcagtcgctggacaccaccatcgtaaacaccgcccttccctcaatggcgcaaagcctcggggaaagtccgttgcatatgcacatggtcattgtctcttatgtgctgaccgtggcggtgatgctgcccgccagcggctggctggcggacaaagtcggcgtgcgcaatattttctttaccgccatcgtgctgtttactctcggttcactgttttgcgcgctttccggcacgctgaacgaactgttgctggcacgcgcgttacagggcgttggcggtgcgatgatggtgccggtcggcaggttgacggtgatgaaaatcgtaccgcgcgagcaatatatggcggcgatgacctttgtcacgttacccggtcaggtcggtccgctgctcggtccggcgctcggcggtctgctggtagaatacgcgtcgtggcactggatctttttgatcaacattccggtggggattatcggtgcgatcgccacattgatgttaatgccgaactacaccatgcagacgcggcgctttgatctttccggctttttattgctggcggttggcatggcggtattaaccctggcgctggacggcagtaaaggtacaggtttatcgccgctggcgattgctggcctggtcgcagttggcgtggtggcactggtgctttatctgctgcacgccagaaataacaaccgcgccctgttcagtctgaaactgttccgcactcgtaccttttcgctgggcctggcggggagctttgccggacgtattggcagtggcatgttgccctttatgacaccggttttcctgcaaattggcctcggtttctcgccgtttcatgccggactgatgatgatcccgatggtgcttggcagcatgggaatgaagcgaattgtggtacaggtggtgaatcgctttggttatcgtcgggtactggtagcgaccacgctgggtctgtcgctggtcaccctgttgtttatgactaccgctctgttgggctggtactacgttttgccgttcgtcctgtttttacaagggatggtcaactcgacccgtttctcctccatgaacaccctgacgctgaaagatctcccggacaatctggcgagcagcggaaacagcctgctgtcgatgattatgcaattgtcgatgagtatcggcgtcaccatcgccgggctgttgctggggctttttggttcgcagcatatcagcgtcgacagcggcaccacacaaaccgtctttatgtacacctggcttagcatggcgtttatcatcgcccttccggcgttcatctttgccagagtgccgaacgatacgcatcaaaatgtagctatttcgcggcgaaaaaggagcgcgcaatga

SEQ ID NO: 471657 - DNA, 1404 bp, Shigella flexneri
atgaagttctggcgacccggtattaccggcaaactgtttctggcgattttcgccacctgcattgtcttgctgatcagtatgcactgggcggtgcgtatcagttttgagcgtggctttattgattacatcaaacacggcaatgaacagcgattacagctgttaagtgatgcgcttggcgagcagtatgcgcagcatggtaactggcgcttcctgcgcaacaacgatcgctttgtctttcagatcctgcgttcatttgaacacgataattcggaagataaacccggcccgggtatgccgccgcacggctggcgtacccagttctgggtggtcgatcaaaacaacaaagtactggttggtccgcgagcgccgattccacctgacggtacacggcgacccattctggtcaacggtgcggaagtgggcgcggtgattgcctcccctgttgagcggctgacccgcaatactgatatcaatttcgataaacaacagcggcaaaccagctggctgatcgtcgccctggcaacgttactcgcggcgctcgccacctttctgctggcgcgcggtttgctggcaccggtaaaacgacttgtcgatggcacgcacaaactggcggcgggcgatttcactacccgcgtaacgcccaccagtgaagatgaactgggcaaactggcgcaagacttcaaccagctcgccagcacgctggagaaaaaccagcaaatgcggcgcgattttatggccgatatttctcacgaactgcgtacgccattagcggtgctgcgcggtgaactggaagccattcaggatggcgtgcgcaaattcacgccggagacggtggcgtctttacaggcggaggtcggtacactgaccaaactggttgacgatcttcatcagttgtcgatgtctgatgaaggcgctctcgcctatcaaaaagcaccggtagatttgatcccactgctggaagtggcgggcggcgcatttcgcgaacgattcgccagccgtggcctgaaactgcaattttccctgccagacagtatcaccgtatttggcgatcgcgaccgtttaatgcagttattcaataacttactggaaaacagcctgcgctacactgacagcggcggcagcctgaaaatctctgccgagcagcacgacaaaacggtgcgcctgacctttgccgacagtgcgccaggtgtcagtgacgatcagctacaaaaattgtttgaacgtttttatcgcaccgaaggttcccgcaaccgcgccagcggcggttccgggctggggctggcgatttgcctgaacattgttgaagcccataatggccgcattattgccgcccattcgccttttggcggggtaagcattacagtagagttaccgctggaacgggatttacagagagaagtatga

SEQ ID NO: 471658 - DNA, 723 bp, Shigella flexneri
atgaccgagttaccaatcgacgaaaacacaccgcgtattttgatcgtggaagatgaaccgaagctggggcagttgctcattgattatctgcgtgctgcgagctatgcgccgacgcttatcagccacggcgatcaggtactggcgtatgtgcgccagacaccaccggatctgatcctgttggatctgatgctccctggcaccgatggcctgacattatgccgggaaattcgtcgtttttccgatgttccgatcgtgatggtgacggcaaaaatcgaagagatcgaccgcctgctggggctggagattggcgccgatgactacatctgcaagccgtacagcccacgggaagtggtagcgcgtgtcaaaaccattttgcgccgttgtaaaccgcaacgcgaacttcagcaacaggatgccgaaagcccgttgattatcgacgaaggtcgttttcaggcttcatggcgcggtaaaatgcttgacctgacgcctgcggaatttcgtctgcttaaaacgctctctcacgaaccaggaaaagtgttctcccgcgagcaattgctcaatcatctttatgacgactaccgcgtagtaaccgaccgcaccattgacagccacattaaaaatctgcgccgcaagctggaatctctcgacgccgaacagtcatttatccgcgccgtttacggcgttggttaccgctgggaagccgacgcctgccgcatcgtttag

SEQ ID NO: 471659 - DNA, 210 bp, Shigella flexneri
atggctggttggtttgaactcagtaagagcagtgataatcagttccggtttgtgctaaaagcgggcaatggtgagactatcctcaccagcgagctgtatacctcaaaagcctctgcggaaaagggcatcgcgtcggtgcgtagcaacagcccgcaagaagagcgctatgagaaaaaacggcaagcaacggcaaattctatttcaatctga

SEQ ID NO: 471660 - DNA, 1362 bp, Shigella flexneri
atgtttaaaccggaactcctttccccggcgggaacgctgaaaaatatgcgttacgctttcgcttatggcgcagatgctgtttatgcgggccagccgcgttactccctacgtgtgcgcaacaacgaattcaaccacgaaaatcttcagctcggcatcaatgaagcccacgcgctggggaaaaagttttatgtcgtggtcaacattgcaccgcacaacgccaagctgaaaacctttatccgtgacctgaaaccggtggtggaaatggggccggatgcgctgattatgtccgatccagggctgattatgctggtgcgtgagcacttccctgaaatgccgatccacctctcggtgcaggctaacgccgtgaactgggcgacggtgaaattctggcagcaaatgggactgacccgcgtgatcctctctcgcgagctgtcgctggaagagattgaagagatccataatcaggtgccggatatggagatcgagatcttcgttcacggcgcactgtgcatggcctactccggtcgctgcctgctctctggctatatcaacaagcgcgacccgaaccagggcacctgcaccaacgcctgccgctgggagtacaacgtccaggaagggaaagaagatgacgttggcaacatcgtacacaagtacgagccgattccggtgcaaaatgttgagccgacgctgggtatcggcgcgccaaccgacaaagtgtttatgatcgaagaagcccagcgtccgggcgagtatatgaccgcgtttgaagatgagcacggcacttacatcatgaactcgaaagatctgcgcgccatcgcccatgtagaacgcctgaccaaaatgggcgtgcattcgctgaaaatcgaaggtcgtaccaaatctttctactattgcgcacgcaccgcacaggtttaccgcaaagctatcgatgacgccgctgcgggaaaaccgttcgataccagcctgctggaaactctggaaggtctggcgcatcgtggctataccgaaggtttcctgcgtcgtcatactcacgacgattatcagaactacgaatacggttattcagtttctgaccgccagcagtttgttggtgagtttaccggtgagcgcaagggggacctcgcagcggtagcggtgaaaaataaattctccgttggcgacagtcttgagctgatgacgccgcaaggcaacattaactttacccttgagcacatggaaaacgccaaaggcgaagctatgccggtcgcaccaggcgatggttatactgtgtggctcccggtcccgcaggatcttgagctaaattacgcgctgctaatgcgtaatttctccggggaaaccacgcgtaacccccacggtaagtga

SEQ ID NO: 471661 - DNA, 378 bp, Shigella flexneri
atgccattattatatttaaacactagagagtgtcgttggtatttaatgggggaaggtgagatgaaaaagatagctgctatatcattaattagtatttttcttatatctggttgtgctgtgcataatgatgaaacaagtatcggtaaatttggtcttgcatataaaagtaatattcagcgtaaactcgataaccaatactacaccgaagccgaagcttctttagccaggggcagaatatctggtgcagaaaatatagtaaaaaatgatgcagcccatttctgtgttactcagggcaaaaaaatgcagatagttgacctgaagacagaaggtgcaggattacatggcgtcgctcgtctgacattcaaatgtggagagtga

SEQ ID NO: 471662 - DNA, 900 bp, Shigella flexneri
atggcagaatttcccgccagcttactgattcttaatggtaaaagtactgacaatctacccttgcgcgaagcaattatgctgttgcgtgaggaaggaatgacgatccatgtgcgggtcacctgggagaaaggtgatgccgcacgatttgtagaggaggcccggaagttgggcgtcgcaacggtgattgccggtggtggcgatggcaccattaatgaagtttctacggcgttgattcagtgtgagggggatgacatacccgcgctgggaattttgccattaggaactgccaatgattttgccaccagtgtagggattcctgaggcactggataaggcgctgaaactggcaattgccggtaatgccattgcgatagatatggcgcaggtcaacaaacaaacctgttttattaatatggcgacaggcggatttgggacgcgtattaccacagaaacgccggaaaaattaaaagccgcgctgggtggcgtctcttacatcattcatggcttaatgcgcatggatactctgcaaccggaccgttgtgaaatccgcggtgaaaactttcactggcaaggtgacgccctggtcattggtattggtaacgggcgtcaggccggtggcggtcaacaattgtgcccgaacgcgttaattaacgatggcttgctgcaactgcgcatttttaccggcgatgaaattcttccggctctcgtatcaaccttaaaatctgacgaagataacccgaatattatcgaaggcgcttcgtcgtggtttgatatacaagccccacacgaaatcacttttaatcttgatggcgaaccgttgagtgggcaaaacttccatattgaaatacttccggcggcgttgcgttgtcgattaccaccagattgtccattattgcgttaa

SEQ ID NO: 471663 - DNA, 780 bp, Shigella flexneri
atgacgatgaattcattcgagcgaaggaataagatcatccaattagtgaatgaacagggaaccgtgcttgttcaggatctggcgggagtatttgctgcctcggaagcgacaatccgtgccgatttgcgctttctcgaacaaaaaggcgtggttacgcgctttcatggcggtgcggcgaaaataatgtccggtaatagtgaaaccgagacccaggaagtcgggtttaaagagcgatttcagctcgccagcgcgccaaaaaacagaatagcgcaggcggcagtcaaaatgatccatgaagggatgaccgttattctcgacagcggaagtaccacaatgcttatcgccgaaggattaatgaccgctaaaaatatcacggtgattaccaacagtctcccggcagcgtttgccctttccgaaaataaagacattactctggtcgtctgtggtggcacggtccgccataaaacgcgctcgatgcatggttccattgccgagcgttcattgcaggatattaatgccgatttaatgtttgtcggtgctgatggtattgatgcggttaatggtattacgacctttaatgaaggttattcgattagcggggcgatggtcaccgccgcaaataaagtgattgccgttctcgattcatcgaaatttaatcgtcgcggttttaatcaggtactgccaatcgaaaaaattgacattattgttaccgatgatgctgtgtcagaggtggataaattggcattgcagaagacacgggtaaaattaattacggtgtag

SEQ ID NO: 471664 - DNA, 1041 bp, Shigella flexneri
atgaaatcagtagtgaatgatactgatggtatcgtgcgcgttgcaaaaagcgtcattcctgaaattaaacatcaggatgaggtgcgggtaaaaattgccagctcgggcttatgtggttccgatttacccaggatatttaaaaatggtgcacattattatccaataacgttaggccatgaatttagcggctatattgatgcggtgggatccggtgttgatgatttacaccctggcgatgcggttgcctgtgtgccgttattaccctgttttacttgtccagagtgtttgaaagggttttattcccagtgcgcaaaatatgattttattggctcgcggcgtgatggtggatttgctgaatatattgtcgttaagcgaaaaaatgtctttgctctacccacggatatgcctattgaggatggggcttttattgagccgattaccgttggcctgcatgcttttcatttagcgcaaggttgtgagaataaaaacgttattattattggtgccggaaccattggcctgctggctattcagtgcgctgtcgcgctgggagcaaagagtgtgacggcgatcgacattagctcagaaaaactggcactggcaaaatctttcggtgcgatgcaaacatttaacagtagcgaaatgagcgcgccgcaaatgcagagcgttttacgcgaactgcgctttaatcagcttatcctcgagacggctggcgtaccgcaaactgtcgaactggcggtagagattgccggtcctcatgcccaactggcgctggtgggcacgttgcatcaggatctgcatttaacatcggcaacgtttggcaaaatattgcgtaaagagctgacggttatcggcagttggatgaactattccagcccttggccggggcaggagtgggaaacggcgagccggttgctgacagaacgtaagttaagcctggagccattaatcgctcaccgtggaagctttgaaagcttcacccaggcggtgcgtgacatcgctcgtaatgccatgccgggcaaagtgttgctcattccatga

SEQ ID NO: 471665 - DNA, 1356 bp, Shigella flexneri
atgttttcagaagtcatgcgttatattctcgacctcggccctacagtgatgctgccggttgtcatcattattttttctaaaatattaggcatgaaggcaggcgattgctttaaagcgggtctgcatatcgggattggctttgttggcattggccttgtgattggcttaatgctggattccattggtccggcggcgaaagcgatggcggaaaatttcgacctgaatctgcatgtggtcgatgtcggctggccgggctcttcaccaatgacctgggcgtcgcaaattgcgctggtggcgattccgattgcgatattggttaacgtggcgatgttactgacccgtatgacgcgggtggtaaatgttgatatctggaatatctggcatatgaccttcaccggcgcgttgctgcacctggcaaccggttcatggatgatagggatggcgggtgtggtaattcacgcggcgtttgtttataagctctgcgactggtttgcccgcgatacccgaaatttctttgagctggaaggtattgctattccgcacggtacgtcggcgtatatggggccgattgcggtgctggtcgatgctatcatcgagaaaatcccaggcgttaaccgaattaaatttagcgccgacgatattcagcgcaaatttggcccttttggcgaacctgtcaccgtgggttttgtgatggggctgattatcggcatcctcgcgggttacgatgtcaaaggtgtattgcagctggcggtaaaaacggcggcagttatgctgctgatgccacggatgattaaacccatcatggatggtttaacgcccatcgctaagcaggcccgtagtcgtttacaggcgaagttcggcggtcaggagttcctgattggcctggatcccgcattactgctggggcatacggcggtggtatcggcaagcctgatttttattccgctcaccattttaattgctgtttgtgttccgggtaatcaggtactgccgtttggcgatcttgccactatcggcttcttcgtggcgatggcggtcgcggtgcatcgtggaaatctgttccgcaccttaatctcgggtgtcatcattatgagcatcaccctgtggatcgcgacgcaaactattggtttgcacacccaaccggcggctaatgctggggcgttaaaagccgggggtatggtggcttcaatggatcagggcggttctcccattacctggttactgattcaggttttctccccgcaaaatattcccggtttcattattatcggcgcaatttatctgaccggtattttcatgacctggcgtagagcgcgtggttttactaaacaagagaaagccgttctcgcagaataa

SEQ ID NO: 471666 - DNA, 285 bp, Shigella flexneri
atgaaacgcaagattattgtcgcttgcggaggcgcggttgcgacctctacgatggcggcggaagaaattaaagagttgtgtcagagtcataatattcctgttgaattaatccagtgtcgggttaatgaaatagaaacctatatggatggtgtgcatttgatatgtaccactgccagggtggatcgtagttttggcgatattccgttagttcacggcatgccttttgtttctggtgtcggtatcgaagcattacaaaataaaattctgactatcttacaggggtga

SEQ ID NO: 471667 - DNA, 453 bp, Shigella flexneri
atgactaacctgtttgttcgtagcggaatttcttttgtcgatcgtagcgaagttttaacctatatcggtaatgagatgctcgcgaaaggtgtggttcatgatacctggccacaggcattaattgccagagaagcagaattccctaccgggataatgcttgagcagcacgccattgcaataccgcattgtgaggcgattcatgctaagtcgtcagccatttatctgttaaggccaacaaataaagttcattttcagcaagcggatgatgataacgacgtggcggtatcgttggttattgcgttgattgtggaaaatccgcagcagcaattgaaacttttacgctgtttatttggcaagttacaacagcccgatatcgtcgagacactaattactcttcctgaaactcagttaaaggaatacttcacaaagtatgttttagattcagacgaataa

SEQ ID NO: 471668 - DNA, 1263 bp, Shigella flexneri
atgaaaacgttaattgcccggcataaagctggtgaacatatcggcatatgttcagtctgttctgcccatccgttggttatcgaagcggcgctggcatttgatcgcaacagcacgcgcaaagtgctgattgaagcaacgtcaaaccaggtcaatcaatttggcggttataccggaatgacaccggcagactttcgcgaatttgtttttacgattgccgataaagttgggtttgcacgcgaacgcattattctcggcggcgatcatctgggaccaaactgctggcagcaagaaaatgcggatgcggcgatggaaaaatccgtcgagctggtaaaagcatatgttcgtgctggcttcagtaaaattcatcttgatgcgtcaatgtcctgcgcgggggataccataccgttagcaccagaaacggttgcggaacgagctgctgtgctttgctttgctgcggaaagtgtggcgacagattgccagcgtgagcaactgagctatgtcattggcactgaagttccggttccgggcggtgaggccagcgccattcagtcagtacacatcacccatgttgaagatgccgccaatactttacgtacgcatcaaaaggcctttattgcccgtgggctgacagaggcgttaacacgtgtgattgccatcgtggtgcagccgggtgtggaatttgatcacagcaatattatccattatcagccgcaggaagcgcaggcgctggcgcaatggatagaaaacacccgaatggtttatgaagcacattctaccgattaccagacccggacggcttattgggaattagtccgcgatcactttgcaatattgaaagtcggtcccgcattaacctttgctttacgcgaggcgatatttgcactggcacaaattgagcaggaacttatcgcccccgaaaatcgcagcggttgcctggcggtaattgaagaagtgatgctcgacgaaccgcaatactggaaaaaatattatcgcacgggttttaacgattcattactggatattcgttacagcctgtcggatcgtattcgttattactggccgcatagtcggattaaaaatagcgttgaaacgatgatggtgaatctgcaaggcgtggacatcccactgggcatgattagtcagtatcttcccaaacaatttgaacgcattcagtccggggaattatcagcaatgccgcatcagcttattatgaataaaatttatgatgttttgcgcgcctatcgctacggctgtgcggaataa

SEQ ID NO: 471669 - DNA, 861 bp, Shigella flexneri
atgaaaatgtacgtggtatcgacaaagcagatgctgaacaacgcacagcgcggcggttatgcggttccggcattcaatattcacaatctcgaaacgatgcaagtggtggtggaaaccgctgccaacctgcatgcgccggtcatcatcgccggaacgcctggcacatttactcatgctggtacagaaaatctgttggcgctggtcagcgcgatggcgaagcaatatcaccatccactggcaattcatctcgaccatcacacgaaatttgacgatatcgctcagaaggttcgttctggcgtgcgctcagtcatgattgacgcctcgcatttgccttttgcgcaaaatatttcacgggtcaaagaggtggtggatttttgccatcgctttgatgtcagcgtcgaggcggagctggggcaacttggcggccaggaagatgatgtgcaagtcaatgaagtcgatgcgttgtacaccaaccccgcacaggcgcgtgaatttgccgaggcaaccgggattgattccctggcggtcgccatcggcacggctcacggtatgtatgccagcgcaccggtgcttgatttttctcgactggagaacattcgccagtgggtgaacttaccgctggtgctgcatggcgcgtcaggattatcgactaaggatattcagcaaaccatcaaactggggatatgcaaaatcaacgttgcaacggagctgaaaaatgccttcttgcagtcgttaaaaaattacctgaccgagcaccccgaagcgaccgatccccgggattatttgcagtcggctaaatccgcaatgcgcgatgtggtgagcaaagtgattgccgattgtggctgcgagggcagggcataa

SEQ ID NO: 471670 - DNA, 1053 bp, Shigella flexneri
atgacagatattgcgcagttgcttggcaaagacgccgacaaccttttacagcaccgttgtatgactattccttctgaccagctttatctccccggacatgactacgtagaccgcgtgatgattgacaataatcgcccgccagcggtgttacgtaatatgcagacgttgtacaacaccgggcgtctggctggcacaggatatctttctattctgccggttgaccagggcgttgagcactctgccggagcttcatttgctgctaacccgctctactttgacccgaaaaacattgttgaactggcgatcgaagcgggctgtaactgtgtggcatcaacttacggcgtgttggtgtcggtatcgcggcgctatgcgcatcgcattccatttctcgtcaaacttaatcacaacgagacgctaagttacccgaatacctacgatcaaacgctgtatgccagcgtggagcaggccttcaacatgggcgcggtggcggttggtgcgactatctattttggctcggaagagtcacgtcgccagattgaagaaatttctgcggcctttgaacgcgcgcacgagctgggcatggtgacagtgctgtgggcctatttgcgaaactccgcctttaagaaagatggcgttgattaccatgtttccgccgacctgactggtcaggcgaaccatctggcggcaaccataggtgcagatatcgtcaaacaaaaaatggcggaaaataacggcggctataaagcgattaattacggttataccgacgatcgcgtgtacagcaagttaaccagcgaaaacccgattgatctggtgcgttatcagttagctaactgctatatgggccgggctgggttgataaactccggcggtgctgcaggcggtgaaactgacctcagcgatgcagtgcgtactgcggttatcaacaaacgcgcaggcggaatggggctgattcttggacgtaaggcgttcaagaaatcgatggctgacggcgtgaaactgattaatgccgtgcaggacgtttatctcgatagcaaaattactattgcctga

SEQ ID NO: 471671 - DNA, 1278 bp, Shigella flexneri
atgaaaacaacagcaaagctgtcgttcatgatgtttgttgaatggtttatctggggcgcgtggtttgtgccattgtggttgtggttaagtaaaagcggttttagtgccggagaaattggctggtcgtatgcctgcacagccattgcggcgatcctgtcgccaattctggttggctccatcactgaccgctttttctcggcgcagaaagtgctggcggtattgatgttcgctggtgctgtgctgatgtatttcgctgcgcaacagaccacttttgccgggttctttccgttactgctggcctactcgctaacctatatgccgaccattgcgctgactaacagcatcgcttttgccaacgtgccggatgtggagcgtgatttcccacgcattcgtgtgatgggcactatcggctggattgcctccggtctggcatgtggtttcttgccgcaaatgctggggtatgccgatatctcaccgactaacatcccgctgctgattaccgccggaagttctgctctgctcggtgtgtttgcgtttttcctgcccgacacgccgccaaaaagcaccggcaaaatggacattaaagtcatgctcggcctggatgcgctgatcctgctgcgcgataaaaacttcctcgtctttttcttctgttcattcctgtttgcgatgccactggcgttctattacatctttgccaacggttatctgaccgaagttggcatgaaaaacgccaccggctggatgacgctcggccagttctctgaaatcttctttatgctggcattgccgtttttcactaaacgctttggtatcaaaaaggtattattgcttggtctggtcaccgctgcgatctgctatggcttctttatttacggtagtgcggatgaatatttcacctacgcgttactgttcctcggtattttgcttcacggcgtaagttacgatttttactacgttaccgcttacatctatgtcgataaaaaagcccccgtgcatatgcgtaccgctgcgcaggggctgatcacgctctgctgccagggcttcggcagtttgctcggctatcgtcttggcggtgtgatgatggaaaagatgttcgcttatcaggaaccggtaaacggactgactttcaactggtccgggatgtggactttcggcgcggtgatgattgccattatcgccgtgctgttcatgatttttttccgcgaatccgacaacgaaattacggctatcaaggtcgatgatcgagatattgcgttgacacaaggggaagttaaatga

SEQ ID NO: 471672 - DNA, 252 bp, Shigella flexneri
atgaaaacagaacgtattctcggtgctctttatgggcaggcgttaggggatgcgatggggatgccctccgagctttggccacgcagccgcgttaaagcacactttggctggattgaccgttttctgcctggaccaaaggagaataacgcggcctgttattttaaccgcgccgaattcaccgacgatacctcgatggcctgtgtctggcggatgcgttactggaatgtgaaggcaagatcgatccgaatctga

SEQ ID NO: 471673 - DNA, 726 bp, Shigella flexneri
ttgcgtttcgacgcctttaacaaaaacgtactaggtccgacctcgaagattgcgcttaacgccattcgcgacggtaaacccgttgctgaactggaaaacaacggcgtaaccaacggcgcagcgatgcgcgtctcgccattaggttgtttgcttccagcgcgtgatgttgattcctttattgatgatgtggcgctggcgtccagcccgacccataaatccgatctggcggttgcaggcgcggtagtcatcgcatgggcgatttctcgtgccattgacggagaacgctggtcagcgattgttgattcattgccttcaattgcgcgacatgcacagcaaaaacgcaccaccacgttcagcgcctcactggcggcacgtctggagattgcgctgaaaattgtgcgtaatgccgacggcaccgaatccgccagcgaacagctttaccaggtcgttggcgcaggcaccagcactattgagtccgttccgtgcgccattgcgctagttgaactggcacaaaccgacccaaaccgctgcgccgtcctgtgcgccaatcttggcggcgacacagacaccataggtgctatggcgacggcgatttgcggcgcgttgcatggcattaacgctgtcgatcctgcgttaaaggcggagctggatgcggtaaatcagcttgatttcaaccgctatgccacagcgctggcgaaatatcgtcaacaacgggaggcggtatga

SEQ ID NO: 471674 - DNA, 966 bp, Shigella flexneri
atgagcggcgctcgattacacacactgctgcctgaattaaccacgcgtcagccggtgatggtcgtcggcgcggcggtcattgacgtgatcgccgacgcttatgccctcccctggcgtgggtgcgatatcgaactgaaacagcagagcgttaacgttggcggctgcgcactgaatattgccgtggcgttaaagcgcctcggcatcgaagcgggtaatgccttgccgctcggtcagggcgtgtgggcggagattattcgcaaccggatagcgaaagaggggttaatcagcctgatcgataacgccgaaagcgataacggctggtgtctggcactggttgagccggatggcgaacgcacttttatgtcattcagcggtgtggaaaatcaatggaatcgccaatggttggcacgattaaccgttgcgcctggcaacctgctctatttttccggttatcaactggcctcgccctgcggcgaattgttagtggaatggctggaaaagctgcaagacgtgacgccgtttatcgatttttgcccacgtattggcgatatcccggacgcattactggcgcggatcatggcctgtcgacctttagtgtcactcaatcgtcaagaggctgagattgccgccgaacgttttgctttatccgcagagataacaacacttggcaagcaatggcaggagaaatttgccgcgccgttgatcgttcgtctcgataaagaaggcgcatggtatttcagcaacgacgcttctggctgcattccggcatttccaacgcaagttgtagacaccattggggcgggcgacagtcatgcaggtggcgtacttgccgggctggcctctggtctgccactggcggatgccgtattactgggcaatgcagtggcgtcgtgggttgtcgggcatcggggcggtgattgtgcgccaacgcgcgaggaactactcctcgcacacaaaaacgtatag

SEQ ID NO: 471675 - DNA, 747 bp, Shigella flexneri
atggaacaagcgcatacccagctgattgcccaactgaacgagcgtattttagcggcggataacacgccgctttatattaagtttgccgaaacggtaaaaaatgccgtgcgcagcggggtgctggagcatggcaatattttgcccggtgagcgtgatttaagtcagttaaccggcgtttcgcgcattacggtgcgcaaggcgatgcaggcgctggaagaagagggcgtggtgacgcgttcgcgcggttacggcacgcagatcaacaacatcttcgaatactcgttgaaagaagcgagaggtttttctcagcaggtggtattgcgcgggaaaaagcccgatacgctatgggttaataagcgtgtcgtgaaatgtcccgaagaagttgcgcagcagctggcggtcgaagcgggaagtgatgtctttttgcttaagcgtattcgctatgtcgatgaagaagcggtatcgattgaggaatcgtgggttccggcgcatttaattcatgatgttgatgccatcggaatttctctttatgactatttccgcagccagcacatttacccacaacgtacgcgttcccgcgttagcgcccggatgccggatgccgagtttcagtcacatattcagttagatagcaaaataccggtgctggtgatcaagcaagtggcgcttgaccaacagcaacggcctattgagtacagcattagccactgtcgcagcgatctatacgtttttgtgtgcgaggagtag

SEQ ID NO: 471676 - DNA, 822 bp, Shigella flexneri
atgcagctaagaattaccagtcgaaaaaaactcaccgctctattatgcgctcttgggctaatttccatcgttgcaatttatccgcgtcagacggtgaattttttctattcgacagcagttcagattacagactacatccacttctacggttatcgcccggttaaatctttcgctattcgcattcctgccagttacaccattcacggattagatgtttcgcgctggcaggagcgtatcgactggcagcgggtggcaaaaatgcgcgacaacgatatccgcttacagtttgcttttattaaggctacggaaggcgaaaagctggtggacccctatttttcgcgtaactggcaattaagccgcgaaaatggcctgctgcgcggggcgtatcattatttctccccgtcggtatccgcttcagttcaggcgcgattatttctgcaaacggtggatttctcacaaggcgatttccctgccgtgctggacgtagaagaacggggaaaattatcggcaaaagaattacgcaagcgggtaagtcagtggctaaaaatggtcgaaaaacgcacgggaaaaaagccgattatttactcaggagccgttttttatcacaccaatctggcgggctatttcaatgaatatccgtggtgggtggctcactattatcaacgtcgtccggacaatgacggcatggcctggcgcttctggcagcattccgaccgtggacaggtagatggcatcaatggtccggtggattttaatgtgtttaatggcacggggatgagttgcaggcattcgttgatgggattaaagaaacgccttaaataa

SEQ ID NO: 471677 - DNA, 801 bp, Shigella flexneri
atgaaacgaattaacgctctgacgattgccggtactgatccgagtggtggtgcggggattcaggccgatcttaaaaccttctcggcacttggcgcttatggttgctcagttattactgcactggtggcgcaaaatacccgtggcgtacagtcggtgtatcgcattgagcctgattttgtcgccgcccagctcgattcggtgttcagcgatgtgcgaatcgataccactaaaatcggtatgttggcggaaaccgatattgttgaagcggtggcagaacggttgcaacgttatcagatccaaaacgtggtactcgacaccgttatgctggcaaaaagcggcgacccgctgctttcaccttcggcggttgctacgctgcgcagtcgattattgccacaggtttcattaataacgccaaacttgcccgaagctgccgccttgctcgacgcgccacacgcgcgcaccgaacaggaaatgctggaacaagggcgatcgctgttggcgatgggctgtggcgcagtgctaatgaaaggtggtcatctggatgatgagcaaagcccggactggctgtttacccgcgagggtgaacaacggtttaccgcaccgcgcattatgaccaaaaacacccacggcactggttgtacactctctgcggcgttggctgcactacgcccgcgccatacaaactgggctgacaccgtacaggaggcaaaaatctggctttcatcggcgttagcccaggccgacacgctggaagttggtcacggtattggtccggttcaccacttccacgcctggtggtga

SEQ ID NO: 471678 - DNA, 789 bp, Shigella flexneri
atgcaagtcgacctgctgagttcagcgcaatctgcgcacgcgttacacctttttcaccaacattcccctcttgtgcactgcatgaccaatgatgtggtgcaaacctttaccgccaataccttgctggcgctcggtgcatcgccagcgatggttatcgaaaccgaagaggccagtcagtttgcggctatcgccagtgccttgttgattaacgttggcacactgacgcagccacgcgcacaggcgatgcgtgctgccgttgagcaagcaaaaagctctcaaacacgctggacgcttgatccagtagcggttggtgcgctcgattatcgccgccatttttgtcatgaacttttatcttttaaaccggcagcgatacgtggtaatgcttcggaaatcatggcattagctggcattgctaatggcggacggggagtggataccactgacgccgcagctaacgcgatacccgctgcacaaacactggcacgggaaactggcgcaatcgtcgtggtcactggcgaggtggattatgttaccgatggacatcgtatcattggtattcacggtggcgatccgttaatgaccaaagtggtaggaactggctgtgcattatcggcggttgtcgctgcctgctgtgcgttaccaggcgatacgctggaaaatgtcgcatctgcctgtcactggatgaaacaagccggagaacgcgcagtcgccagaagcgaggggccaggcagttttgttccacatttccttgatgcgctctggcaattgacgcaggaggtgcaggcatga

SEQ ID NO: 471679 - DNA, 204 bp, Shigella flexneri
atgtctcatacaatccgtgataaacagaaactgaaagcgcgtgccagtaagattcagggccaggtcgtggcgctcaagaaaatgctcgacgagccgcacgaatgcgctgcagttttacaacagattgctgctatccgtggagcggtaaacggtctgatgcgggaagtgattaaaggtcatctgacggaacacatcgttcactag

SEQ ID NO: 471680 - DNA, 330 bp, Shigella flexneri
atgaccgaatttacaactcttcttcagcaaggaaacgcctggttcttcatccccagcgccatcttacttggtgcgcttcatggcctggaaccagggcactcaaaaacgatgatggcggcgtttatcatcgccatcaaaggcaccattaaacaggcggtgatgctcggactggcagcaaccatttcgcataccgcggtggtctggttgattgcctttggcgggatggtgatcagtaagcgctttactgctcaatcagcagaaccgtggctccagctgatttccgcagtgatcattattggcaccgcgttctggatgttctggcgtacctag

SEQ ID NO: 471681 - DNA, 483 bp, Shigella flexneri
atgcacgggcatgattatgagcatcatcacgatcacgaacatcatcaagaccacgaacatcaccacgaccaaggacatcatcaccatcacgaacatggcgagtatcaggatgcccatgcacgagcccatgccaatgacattaaacgacgctttgatggtagagaggtcatcaactggcaaattttgttatttggcttaaccggtggctttatcccctgcccggcagcaattaccgtgctgttgatatgcattcagttgaaagccctgacactgggcgcaacactggtcgtcagtttcagcattggcctggcgttaacgcttgtcaccgtaggcgttggcgcagcaatcagcgttcagcaggtcgcaaaacgctggagcggatttaacactctcgctaaacgcgccccctatttttccagtctgttgattggcttagtcggtgtgtatatgggcgtacatggcttcatgggcataatgcgataa

SEQ ID NO: 471682 - DNA, 339 bp, Shigella flexneri
atgaccattaaaaataagatgttgctgggtgtgcttttgctggttaccagtgccgcctgggccgcaccagccaccgcgggttcgaccaatacctcgggaatttctaagtatgagttaagtagtttcattgctgactttaagcatttcaaaccaggtgataccgtcccagagatgtaccgcaccgatgagtacaacattaagcagtggcagttacgtaacctgcccgcgcctgatgccgggacgcactggacctatatgggtggcgcgtacgtgttgatcagcgacaccgacggtaaaatcattaaagcctacgacggtgagattttttatcatcgctaa

SEQ ID NO: 471683 - DNA, 816 bp, Shigella flexneri
atggaaattcgcataatgctatttatattaatgatgatggttatgcctgtgagctatgcggcatgttatagtgagttatctgttcagcacaatttggttgttcaggggaattttgcacttactcaaacacaaatagcgacatatgagcataattttaatgattcgtcatgcgtgagtacaaatactatcacccctatgagcccatcggatattattgttggactttataacgataccattaaattaaatttacattttgaatggaccaataaaaacaacatcacgttgtcaaataatcagagcagtttcaccagtggttattcggtaacggtgacacctgcggccagtaatgcaaaagtgaatatttctgcggggggcggtggttcagtgatgattaatggtgttgcgacattatccagtgcttcatcatcgacacgcgggagtgccgcagtacaatttctactgtgtttattaggtggcaagtcatggggtgcatgtgtaaatagctacagaaatgcattggcacaaaatgcaggtgtctattccttcaatctgacattgtcatacaacccgataaccacaacctgcaaacaggacgatttattaattactttagacagtattcccgtttcacaattaccagccacaggtaacaaagcaacaataaatagtaaaaaaagggatattattctgcgttgtaaaaatttattaggtcaacaaaatcaaacatcacggaaaatgcaggtgtatttatcaagttctgacttgttaaccaacagcaacacaatactgaaaggtgcggaagataatgcgtag

SEQ ID NO: 471684 - DNA, 2481 bp, Shigella flexneri
atgttgagaatgaccccacttgcatcagcaatcgtagcgttattgctcggcattgaagcttatgcagctgaagaaacctttgatacccattttatgataggtggaatgaaagaccagcaggttgcaaatattcgtcttgatgataatcaacccttaccggggcagtatgacatcgatatttatgtcaataagcaatggcgcgggaaatatgagattattgttaaagacaacccgcaagaaacatgtttatcaagagaagttatcaagcggttaggcattaatagcgataacttcgccagcggtaagcaatgtttaacatttgagcaacttgttcagggtgggagctatagctgggatatcggggtttttcgtctcgatttcagtgtcccgcaggcttgggtggaagaactggaaagtggctatgttccaccggaaaactgggagcggggtattaatgcgttttatacttcttattatgtgagtcagtattacagcgactataaagcgtcgggtaacaacaagagtacatatgtacgttttaacagcgggttaaatttactggagtggcaactgcattctgatgccagtttcagtaaaacaaataacaatccaggggtgtggaaaagcaataccctgtatctggaacgtggatttgcccaatttctcggcacgcttcgcgtgggtgatatgtacacatcaagcgatatttttgattctgttcgcttcagcggtgtgcggttgtttcgtgatatgcagatgttgcctaactcgaaacaaaattttacgccacgggtgcaggggattgctcagagtaacgcgctggtaactattgaacagaatggttttgtggtttatcagaaagaggttcctcctggcccgtttgcgattacagatttgcagttggccggtggtggagcagatcttgatgttagcgtgaaagaggcggacggctcggtaaccacctatctggtgccttatgcagcggtgccaaatatgctgcaacccggcgtgtcgaaatatgattttgcggcgggccgtagccatattgaaggggcgagcaagcaaagtgattttgtccaggcaggttatcagtatggttttaataacttattgacgctgtatggcggcacgatggttgctaataattactatgcgtttaccctcggaacgggttggaacacgcgcattggcgcaatttccgtcgatgccacgaagtcgcatagtaaacaagacaacggcgatgtgtttgacgggcaaagttatcaaattgcctacaacaaatttgtgagccaaacgtcgacgcgttttggtctggcggcctggcgttattcgtcgcgtgattaccggacatttaacgatcacgtttgggcaaacaataaagataattatcgccgtgatgaaaacgatatctatgacattgccgattattaccagaacgattttggccgtaaaaatagcttttctgccaatatgagccagtcattgccagaaggctggggttctgtgtccttaagtacgttatggcgagattactgggggcgtagcggcagcagtaaggattatcagttgagttattccaataactggcggcggataagctataccctcgcggcaagccaggcgtatggcgagaatcatcatgaagagaaacgttttaatatttttatatcaattccctgtgattggggtgatgacgttacgacgcctcgtcggcaaatatatatgtctaactcaacgacgtttgatgatcagggttttgcctcaaataatacgggattatcaggaacagtagggagtcgggatcagttcaattatggtgtcaacctgagtcatcaacatcagggaaatgaaacgacagctggggcgaatttgacctggaacgcgccggttgcgacagtgaatggcagttatagtcagtcgagtacttatcgacagactggagccagtgtttcagggggcattgtcgcctggtcgggtggcgttaatctggcgaaccgtctttccgaaacgtttgctgtgatgaatgcgccaggaattaaagatgcttatgtcaatgggcaaaaatatcgcacaacaaaccgtaatggagtggtggtatacgacggaatgacaccttatcgggaaaatcacctgatgctggatgtgtcgcaaagcgatagcgaagcagaattacgtggcaaccggaaaattgccgccccttatcgcggcgcggttgtactggttaattttgataccgatcagcgcaagccctggtttataaaagcgttaagagcggatggtcaaccattaacgtttggttatgaagtcaatgatatccatggtcataatattggcgttgtcggccagggaagccagttatttattcgcaccaatgaaataccgccatcggttaatgtagcaattgataagcaacaaggactttcatgcacaatcaccttcggtaaagagattgatgaaagtagaaattatatttgccagtaa

SEQ ID NO: 471685 - DNA, 675 bp, Shigella flexneri
atgaaaggattattatctttactcattttttctatggtccttcctgcacatgccggaattgttatctacgggacgcgcattatttacccggcagaaaataaagaagttatggtgcagttgatgaaccagggaaatcgttcttcgctgctgcaggcgtggattgatgatggcgatacgtcgttaccaccagaaaaaattcaggttcctttcatgttaacgccaccagtggcaaaaataggggcaaattccgggcagcaagtaaaaatcaaaattatgccgaataaactgcccactaataaagaaagcattttttatctgaatgttctgtatattccaccaaatagtccagagcaagaaggcaagaatgcactgaagtttgcgatgcaaaacagaattaagttgttttaccggccagcgggtattgctccggtaaataaagcgacctttaaaaagttactggtaaatcgcagtggcaatggattggtgataaaaaatgactcagctaattgggtgacgatttcggatgtcaaagctaataatgttaaagtcaattatgaaactattatgattgcccccttagaaagtcagagtgttaatatcaaaagtaataatgcaaataactggtatctgaccattatcaatgaccacggcaactatattagtgacaaaatttaa

SEQ ID NO: 471686 - DNA, 525 bp, Shigella flexneri
atgaaacgttcaattattgctgccgctgtcttttcttctttttttatgagcgctggagtatttgctgcagacgttgataccggaacattaaccattaaaggaaatattgcagaatctccgtgtaaattcgaagcgggtggtgattcagtaagtattaatatgccgactgtaccaaccactgtctttgaaggtaaagctaaatattctacctatgatgatgcagtcggtgtaaccagcagcatgttaaaaattagctgcccgaaagaagttgctggtgtaaaactctcgttgatcacaaacgacaaaataaccggtaacgataaggcgatagccagtagcaacgataccgtaggtgataacagcgatgtcctagatgtttctgcaccttttaacattgagagttataaaacagcggaaggtcaatatgctattccgtttaaagcaaaatacctgaaactgacagataactcagtgcaatcaggtgatgtgttatcttctctggttatgcgtgtggcgcaggattaa

SEQ ID NO: 471687 - DNA, 282 bp, Shigella flexneri
atgaataagtattggctgtcaggaattatttttcttgcctatggattggcttctcccgcagtctcttcagagactgccacattaacgattaatggcaggatcagtcccccaacatgcagtatggctatggttaatagtcaaccacaacagcattgtggtcagttaacgtataatgttgacacccgtcatcaggtttcttcgcccgtcaaaggtgttacgacagaagtggttgttgcaggtagcgatagcaaacgtcgaatcgtgttaaatcgctacgattaa

SEQ ID NO: 471688 - DNA, 1110 bp, Shigella flexneri
atgaacgaacaatcccaggccaaatcaccagaagccttgcgcgcaatggtcgccgggacactggccaattttcagcacccaaccctgaagcataacctcaccacgctgaaagcgttgcaccatgtcgcctggatggacgacacgttgcatgtggaactggttatgccgtttgtctggcatagcgcgttcgaagagttaaaagagcaatgtagcgccgaactgctgcgcatcaccggggcgaaagctatcgactggaaactgtcgcataacatagccactctgaaacgcgtgaagaatcagccgggaattaacggtgtgaagaacattatcgcggtgagttccggtaaaggcggcgtgggtaaatcgtccacggcggtaaacctggcgctggcactggcggcggaaggggcgaaagtcggcattctggacgccgatatctacggcccatcaattcccaccatgctgggcgcagaaaatcagcgtccaacttcgccggacggtacccacatggcaccgattatgtctcatggcctggcaaccaattcaattggttatctggtcactgacgacaatgcgatggtgtggcgtggaccgatggcgagcaaggcgttaatgcagatgttgcaggaaaccttgtggccggatctcgactatctggtgcttgatatgccgccaggcaccggtgacattcaattgacgctggcgcaaaacattccagtaactggtgcagtcgtggtcaccaccccgcaggacatcgcgttgatcgatgcgaaaaaaggcattgtgatgttcgagaaagtcgaggttccggtgctcggtattgtcgagaacatgagtgtgcatatttgcagtaactgtggtcaccatgaaccgattttcggtaccggtggtgcagagaaactggctgaaaaataccatacacagctgctggggcagatgccgttacacatctccttacgtgaggatctcgataaaggcacgccaacggttatcagccgtccggagagcgaatttaccgctatctaccgccagctggctgaccgcgttgcagctcagctctactggcagggtgaagtcattcctggcgagatttccttccgcgcggtctaa

SEQ ID NO: 471689 - DNA, 2034 bp, Shigella flexneri
atgactcaagtcgcgaagaaaattctggtgacgtgcgcactgccgtacgctaacggctcaatccacctcggccatatgctggagcacatccaggctgatgtctgggtccgttaccagcgaatgcgcggccacgaggtcaacttcatctgcgccgacgatgcccacggtacaccgatcatgctgaaagctcagcagctcggtatcaccccggagcagatgattggcgaaatgagtcaggagcatcagactgatttcgcaggctttaacatcagctatgacaactatcactcgacgcacagcgaagagaaccgccagttgtcagaacttatctactctcgcctgaaagaaaacggttttattaaaaaccgcaccatctctcagctgtacgatccggaaaaaggcatgttcctgccggaccgttttgtgaaaggcacctgcccgaaatgtaaatccccggatcaatacggcgataactgcgaagtctgcggcgcgacctacagcccgactgaattgatcgagccgaaatcggtggtttctggtgctacaccagtgatgcgtgattctgaacacttcttctttgatctgccctctttcagcgaaatgctgcaggcatggacccgcagcggtgcgttgcaggagcaggtggcaaacaaaatgcaggagtggtttgaatccggcctgcaacagtgggatatctcccgcgacgcgccatactttggttttgaaattccgaacgcaccgggcaaatatttctacgtctggctggacgcaccgattggctacatgggttctttcaagaatctgtgcgacaagcgcggcgacagcgtaagcttcgatgaatactggaagaaagactccaccgccgagctgtaccacttcatcggtaaagatatcgtttacttccacagcctgttctggcctgccatgctggaaggcagcaacttccgcaagccgaccaacctgtttgttcatggctatgtgacggtgaacggcgcgaagatgtccaagtctcgcggcacctttattaaagccagcacctggctgaatcattttgacgctgacagcctgcgttactactacactgcgaaactctcttcgcgcattgatgatatcgatctcaacctggaagatttcgttcagcgtgtgaatgccgatatcgtgaacaaagtggttaacctggcctcccgtaatgcgggctttatcaacaagcgttttgacggtgtgctggcaagcgagctggctgaccctgagctgtacaaaacctttaccgatgccgctgaagtgattggtgaagcgtgggaaagccgtgaatttggtaaagcagtgcgcgaaatcatggcactggctgacctggctaaccgctatgtcgacgagcaggctccgtgggtagtcgcaaaacaggaaggtcgcgatgctgacctgcaggcgatttgctcaatgggcatcaacctgttccgcgtgctgatgacttacctgaagccggtactgccgaaactgaccgagcgtgcagaagccttcctcaatacggaactgacctgggatggtatccagcaaccgctgctgggccacaaagtgaatccgttcaaggcgctgtataaccgcatcgatatgaaacaggttgaagctctggtggaagcctctaaagaagaagtgaaagccactaccgcgccagttactggcccactggcagatgatccgattcaggaaaccatcacctttgacgacttcgccaaagttgacctgcgcgtggcgctgatcgaaaacgcagagtttgttgaaggttctgacaaactgctgcgcctgacgctggatctcggcggtgaaaaacgcaatgtcttctccggtattcgttctgcttacccggatccgcaggcactgattggtcgtcacaccattatggtggctaacctggcaccacgtaaaatgcgcttcggtatctctgaaggcatggtgatggctgccggtcctggcgggaaagatattttcctgctaagcccggatgccggtgctaaaccgggtcatcaggtgaaataa

SEQ ID NO: 471690 - DNA, 204 bp, Shigella flexneri
atgagacactttatctatcaggacgaaaaatcacataaattctggacggtggagcaacagggaaacgagttgcatatcagttggggaaaagttggcaccaaagggcaaagtcagataaaaagtttttcagatgctgcggcggcggaaaaagcggaactgaagctgattgcggagaaggtgaagaaggggtatgaggtagcctga

SEQ ID NO: 471691 - DNA, 189 bp, Shigella flexneri
atgagcagaaaaacccaacgttactctaaagagttcaaagccgaagctgtcagaacggttcttgaaaatcaactttcgatcagtgaaggcgcctcccgattatctcttcctgaaggcactttaggacaatgggttaccgcacgctggctgaactggaatctgaaattctgcaactgcgtaaggcgttaa

SEQ ID NO: 471692 - DNA, 1134 bp, Shigella flexneri
ttgcgaaatcagtgggaacctggaataaaagcagttgccgcagttaattttctgcgcttagatgttaatgaatttaacccataccagtacaatggctatggttttttacattttacgcaaggggcaattgtgaaactggatgaaatcgctcggctggcgggagtgtcgcggaccactgcaagctatgttattaacggcaaagcgaagcaataccgtgtgagcgacaaaaccgttgaaaaagtcatggctgtggtgcgtgagcacaattaccacccgaacgccgtggcagctgggcttcgtgctggacgcacacgttctattggtcttgtgatccccgatctggagaacaccagctatacccgcatcgctaactatcttgaacgccaggcgcggcaacggggttatcaactgctgattgcctgctcagaagatcagccagacaacgaaatgcgctgcattgagcaccttttacagcgtcaggttgatgccattattgtttcgacgtcgttgccacctgagcatcctttttatcaacgctgggctaacgacccgttcccgattgtcgcgctggaccgcgccctcgatcgtgaacatttcaccagcgtggttggtgccgatcaggatgatgccgaaatgctggcggaagagttacgtaagtttcccgccgagacggtgctttatcttggcgcgctgccggagctttctgtcagcttcctgcgtgaacaaggtttccgtactgcttggaaagatgatccgcgcgaagtgcatttcctgtatgccaacagctatgagcgggaggcggctgcccagttattcgaaaaatggctggaaacgcatccgatgccgcaggcgctgttcacaacgtcgtttgcgttgttgcaaggagtgatggatgtcacgctgcgtcgcgacggcaaactgccttctgacctggcaattgccacctttggcgataacgaactgctcgacttcttacagtgtccggtgctggcagtggctcaacgtcaccgcgatgtcgcagagcgtgtgctggagattgtcctggcaagcctggacgaaccgcgtaagccaaaacctggtttaacgcgcattaaacgtaatctctatcgccgcggcgtgctcagccgtagctaa

SEQ ID NO: 471693 - DNA, 492 bp, Shigella flexneri
atgcgccggatattatcagtcttactcgaaaatgaatcaggcgcgttatcccgcgtgattggccttttttcccagcgaggctacaacattgaaagcctgaccgttgcgccaaccgacgatccgacattatcgcgtatgaccatccagaccgtgggcgatgaaaaagtacttgagcagatcgaaaagcaattacacaagctggtcgatgtcttgcgcgtgagtgagttggggcagggcgcgcatgttgagcgggaaatcatgctggtgaaaattcaggccagcggttacgggcgtgacgaagtgaaacgtaatacggaaatattccgtgggcaaattatcgatgtcaccccctcgctttataccgttcaattagcaggcaccagcgataagcttgatgcatttttagcatcgattcgcgatgtggcgaaaattgtggaagttgctcgctctggtgtggtcggactttcgcgcggcgataaaataatgcgttga

SEQ ID NO: 471694 - DNA, 1725 bp, Shigella flexneri
atggagatgttgtctggagccgagatggtcgtccgatcgcttatcgatcagggcgttaaacaagtattcggttatcccggaggcgcagtccttgatatttacgatgcattgcataccgtgggtggtattgatcatgtattagttcgtcatgagcaggcggcggtgcatatggccgatggcctggcgcgtgcgaccggggaagtcggcgtcgtgctggtaacgtcgggtccaggggcgaccaatgcgattaccggcatcgccaccgcttatatggattccattccattagttgtcctttccgggcaggtagcgacctcgttgataggttacgatgcctttcaggagtgcgacatggtggggatttcgcgaccggtggttaaacacagttttctggttaagcaaacggaagacattccgcaggtgctgaaaaaggctttctggctggcggcaagtggtcgcccaggaccagtggtcgttgatttaccgaaagatatttttaatccggcgaacaaattaccctatgtctgccctgagtcggtcagtatgcgttcttacaatcccactactaccggacataaagggcaaattaagcgtgctctgcaaacgctggtagcggcaaaaaaaccggttgtctacgtaggcggtggggcaatcatggcgggctgccatcagcagttgaaagaaacggtggaggcgttgaatctgcccgttgtttcctcattgatggggctgggggcgtttccggcaacgcatcgtcaggcactgggcatgctgggaatgcacggtacctacgaagccaatatgacgatgcataacgcggatgtgattttcgccgtcggggtacgatttgatgaccgaacgacgaacaatctggcaaagtactgcccaaatgccactgttctgcatatcgatattgatcctacttccatttctaaaaccgtgactgcggatatcccgattgtgggggatgctcgccaggtcctcgaacaaatgcttgaactcctgtcgcaagaatccgcccatcaaccgctggatgagatccgcgactggtggcagcagattgaacagtggcgcgctcttcagtgcctgaaatatgacactcacagtgaaaagattaaaccgcaggcggtgatcgagactctttggcggttgactaatggggacgcttacgtgacgtccgatgtcgggcagcaccagatgtttgctgcgctttattatccattcgacaaaccgcgtcgctggatcaattccggcggtctcggcacgatgggttttggtttacctgcggcactgggcgtcaaaatggcgttgccagaagaaaccgtggtttgcgtcactggcgacggcagtattcagatgaacatccaggaactgtctaccgcgttgcaatacgagttgcccgtactggtggtgaatctcaataaccgctatctggggatggtgaaacagtggcaggacatgatctattccggccgtcattcacaatcttatatgcaatcactacccgatttcgtccgtctggcggaagcctatggtcacgtcgggatccagatctctcatccgcatgagctggaaagcaaacttagcgaggcgctggaacaggtgcgcaataatcgcctggtgtttgttgatgttaccgtcgatggcagtgagcacgtctacccgatgcagattcgcgggggcggaatggatgaaatgtggttaagcaaaacggagagaacctga

SEQ ID NO: 471695 - DNA, 945 bp, Shigella flexneri
atgccagaggtacaaacagatcattcagagacggcggagttaagcaagccacagctacgcatggtcgatctcaacttattaaccgttttcgatgccgtgatgcaggagcaaaatattacccgtgccgctcatgttctgggtatgtcgcaacctgcggtcagtaacgctgttgcacgcctgaaggtgatgtttaatgacgagctttttgttcgttatggccgtggtattcaaccgactgctcgcgcatttcaactttttggttcagttcgccaggcattgcaactagtacaaaatgaattgcctggttcaggttttgaacccgcgagcagtgaacgtgtatttcatctttgtgtttgcagcccgttagacagcattctgacctcgcagatttataatcacattgagcagattgcgccaaatatacatgttatgttcaagtcttcattaaatcagaacactgaacatcagctgcgttatcaggaaacggagtttgtgattagttatgaagacttccatcgtcttgaatttaccagcgtgccattatttaaagatgaaatggtgctggtagccagcaaaaatcatccaacaattaaaggcccgttactgaaacatgatgtttataacgaacaacatgcggcggtttcgctcgatcgtttcgcgtcatttagtcaaccttggtatgacacggtagataagcaagccagtatcgcgtatcagggcatggcaatgatgagcgtacttagcgtggtgtcgcaaacgcatttggtcgctattgcgccgcgttggctggctgaagagttcgctgaatccttagaattacaggtattaccgctgccgttaaaacaaaacagcagaacctgttatctctcttggcatgaagctgccgggcgcgataaaggccatcagtggatggaagaacaattagtctcaatttgcaaacgctaa

SEQ ID NO: 471696 - DNA, 1572 bp, Shigella flexneri
atgagccagcaagtcattattttcgataccacattgcgcgacggtgaacaggcgttacaggcaagcttgagtgtgaaagaaaaactgcaaattgcgctggcccttgagcgtatgggtgttgacgtgatggaagtcggtttccccgtctcttcgccgggcgattttgaatcggtgcaaaccatcgcccgccaggttaaaaacagccgcgtatgtgcgttagctcgctgcgtggaaaaagatatcgacgtggcggccgaatccctgaaagtcgccgaagccttccgtattcatacctttattgctacctccccaatgcacatcgccaccaagctgcgcagcaccctagacgaggtgatcgaacgcgctatctatatggtgaaacgcgcccgtaattacaccgatgatgttgaattttcttgcgaagatgccgggcgtacacccattgccgatctggcgcgagtggtcgaagcggcgattaatgccggtgccaccaccatcaacattccggacaccgtgggctacaccatgccgtttgagttcgccggaatcatcagcggcctgtatgaacgcgtacctaacatcgacaaagccattatttccgtacatacccacgacgatttaggcctggcggtcggcaactcactggcggcggtacatgccggtgcacgccaggtggaaggtgcaatgaacgggatcggcgagcgtgccggtaactgttcgctggaagaagtcatcatggcgattaaagttcgtaaggatattctcaacgtccacaccgccattaatcaccaagagatatggcgcaccagccagttagttagccagatttgtaatatgccgatcccggcaaacaaagccattgttggcagcggcgcattcgctcactcctccggtatccaccaggatggcgtgctgaaaaaccgcgaaaactacgaaatcatgacaccagaatctattggtctgaaccaaatccagctgaatctgacctctcgttcggggcgtgcggcggtgaaacatcgcatggatgagatggggtataaagaaagtgaatataatttagacaatttgtacgatgctttcctgaagctggcggacaaaaaaggtcaggtgtttgattacgatctggaggcgctggccttcatcggtaagcagcaagaagagccggagcatttccgtctggattacttcagcgtgcagtctggctctaacgatatcgccaccgccgccgtcaaactggcctgtggcgaagaagtcaaagcagaagccgccaacggtaacggtccggtcgatgccgtctatcaggcaattaaccgcatcactgactataacgtcgaactggtgaaatacagcctgaccgccaaaggtcacggtaaagatgcgctgggtcaggtggatattgtcaccaactacaacggtcgccgcttccacggcgtcggcctggccaccgatattgtcgagtcctccgccaaagccatggtgcacgtactgaacaatatctggcgtgccgcagaagtcgaaaaagagttgcaacgcaaaactcaacacaacgaaaacaacaaggaaaccgtgtga

SEQ ID NO: 471697 - DNA, 1092 bp, Shigella flexneri
atgtcgaagaattaccatattgccgtattgccgggagacggtattggtccggaagtgatgacccaggcgctgaaagtgctgaatgccgtgcgcaaccgctttgcgatgcgcatcaccaccagccattacgatgtaggcggcgcagccattgataaccacgggcaaccactgccgcctgcaacggttgaaggttgtgagcaagccgatgccgtgctgtttggctcggtaggcggcccgaagtgggaacatttaccaccagaccagcaaccagaacgcggcgcgctgctgccgctgcgtaagcacttcaaattattcagcaacctgcgcccggcaaaactgtatcaggggctggaagcattctgtccgctgcgtgcagacattgccgctaacggcttcgacatccagtgcgtgcgcgaactgaccggcggcatctatttcggtcagccaaaaggccgcgaaggtagcggacaatatgaaaaagcgtttgataccgaggtgtatcaccgttttgagatcgagcgtattgcccgcatcgcgtttgaatctgctcgtaaacgtcgccacaaagtcacctcaatcgacaaagctaacgtgctgcaatcctctattttatggcgtgaaatcgtcaacgagatcgccacggaatacccggatgtcgaactggcgcatatgtacatcgacaacgccaccatgcagctgattaaagatccatcacagtttgacgttctgctgtgctccaacctgtttggcgacattctgtctgacgagtgcgcaatgatcactggctcgatgggcatgttgccttccgccagcctgaacgagcaaggttttggactgtatgaaccggcgggcggctcggcaccagatatcgcaggcaaaaacatcgccaacccgattgcacaaatcctgtcgctggcactgctgctgcgttacagcctggatgccgatgatgcggcttccgccattgaacgcgccattaaccgtgcattagaagaaggcattcgcaccggggatttagcccgtggcgctgccgccgttagtaccgatgaaatgggcgatatcattgcccgctatgtggcagaaggggtgtaa

SEQ ID NO: 471698 - DNA, 1401 bp, Shigella flexneri
atggctaaaacgttatacgaaaaattattcgacgctcacgtagtgtacgaagccgaaaacgaaaccccgctgttatatatcgaccgccacctggtgcatgaagtgacctcaccgcaggcgttcgatggcctgcgcgcccacggtcgcccggtacgtcagccgggcaaaaccttcgccactatggatcacaacgtctctacccagaccaaagacattaatgcctgtggtgaaatggcgcgcatccagatgcaggagctgattaaaaactgcaaagaatttggcgtcgagctgtatgacctgaatcacccgtatcaggggatcgtccacgtaatggggccggaacagggcgtcaccttgccggggatgaccattgtctgcggcgactcgcataccgccacccacggcgcgtttggcgcactggcctttggtatcggcacttccgaagttgaacacgtactggcaacacaaaccctgaaacagggccgtgcgaagaccatgaaaattgaagtccagggcaaagccgcgccgggcattaccgcaaaagatatcgtgctggcaattatcggtaaaactggcagcgcaggcggcaccgggcatgtggtggagttttgcggcgaagcaattcgtgatttaagcatggaaggtcgtatgaccctgtgcaatatggcgatcgaaatgggcgcaaaagccggtctggttgctcctgacgaaaccacctttaactatgtcaaaggccgtctgcatgcgccgaaaggcaaagatttcgacgacgccgttgcctactggaaaaccctgcaaaccgacgaaggcgcaactttcgataccgttgtcactctgcaagcagaagaaatttcaccgcaggtcacctggggcaccaatcccggccaggtgatttctgtgaacgacaatattcccgatccggcttcgtttgccgatccggttgaacgtgcgtcggcagaaaaagcgctggcctatatggggctgaaaccgggtattccgctgaccgaagtggctatcgacaaagtgtttatcggttcctgtaccaactcgcgcattgaagatttacgcgcggcagcggagatcgccaaagggcgaaaagtcgcgccaggcgtgcaggcactggtggttcccggctctggcccggtaaaagcccaggcggaagcggaaggtctggataaaatatttattgaagccggttttgaatggcgcttgcctggctgctcaatgtgtctggcgatgaacaacgaccgtctgaatccgggcgaacgttgtgcatccaccagcaaccgtaactttgaaggccgccaggggcgcggcgggcgcacgcatctggtcagcccggcaatggctgccgctgctgctgtgaccggacatttcgccgacattcgcaacattaaataa

SEQ ID NO: 471699 - DNA, 606 bp, Shigella flexneri
atggcagagaaatttatcaaacacacaggcctggtggttccgctggatgccgccaatgtcgataccgatgcaatcatcccgaaacagtttttgcagaaagtgacccgtacgggttttggcgcgcatctgtttaacgactggcgttttctcgatgaaaaaggccaacagccaaacccggacttcgtgctgaacttcccgcagtatcagggcgcttccattttgctggcacgagaaaacttcggctgtggctcctcgcgtgagcacgcgccctgggcattgaccgactacggttttaaagtggtgattgcgccgagttttgctgacatcttctacggcaatagctttaacaaccagctgctgccggtgaaattaagcgatgcagaagtggacgaactgtttgcgctggtgaaagccaatccggggatccatttcgacgtggatctggaagcgcaagaggtgaaagcgggagagaaaacctatcgctttaccatcgatgccttccgccgccactgcatgatgaatggtctggacagcatcggcctgaccctgcagcacgacgacgctattgcgtcttatgaagcaaaacaacctgcgtttatgaattag

SEQ ID NO: 471700 - DNA, 975 bp, Shigella flexneri
atgatctggataatgacgatggctcgccgtatgaacggtgtttacgcggcatttatgctggtcgcttttatgatgggggtggccggggcgctacaggctcctacattgagcttatttctgagtcgtgaggttggcgcgcaacctttctggatcggactcttttatacggtgaatgctattgctgggatcggcgtaagcctctggttggcaaaacgttctgacagtcagggcgatcggcgaaaactgattatattttgctgtttgatggctattggcaatgcgctactgtttgcatttaatcgtcattatctgacgcttatcacctgtggtgtgcttctggcatctctggccaatacggcaatgccacagttatttgctctggcgcgggtagaactgccgtcggaaaatgctttatcaatgcaaggtgactggcaggatagtaacgtacggatgttatttgtcgcctcgacgttaatgtggacctgcaacactatgtacattattgatatgccattgtggatcagtagcgatttaggattgccagacaaactggcgggtttcctgatggggacggcagctggactggaaataccagcaatgattctggctggctactatgtcaaacgttatggtaagcggcgaatgatggtcattgcagtggtggcaggagtgctgttttacactggattgattttctttcatagccgtatggcgttgatgacgctgcaactttttaacgctgtatttatcggcattgttgcgggtattgggatgctatggtttcaggatttaatgcctggaagagcgggggcagctaccaccttatttaccaacactatctctaccggggtaattctggctggtgttattcagggagcaattgcacaaagttgggggcactttgctgtctactgggtaattgcgattatttctgttgtcgcattatttttaaccgcaaaggttaaagacgtttga

SEQ ID NO: 471701 - DNA, 132 bp, Shigella flexneri; identical to SEQ ID NO: 457666

SEQ ID NO: 471702 - DNA, 1656 bp, Shigella flexneri
atgccatctgctcgtctgcaacaacagttcatccgcctgtggcaatgctgcgagggtaaatcgcaggacacaacgctcaacgaactggcagcgttattgagctgctcgcgtcgtcatatgcgtaccctgctcaacaccatgcaggatcgcggctggctgacgtgggaagcggaagtcgggcgcggtaaacgctcgcgtctgacattcctctataccgggctggcgcttcagcaacagcgggcggaagacctgctggagcaggatcgtatcgaccaactagtgcagttggttggcgacaaagcgactgtgcggcaaatgctggtttctcatctgggccgcagcttccgccaggggcggcacatcctgcgcgtgctctactatcgtccgttgcgtaatctgctacctggcagcgcattgcgccgttccgaaacccatattgcccggcaaatcttcagttcgctaacgcgcataaatgaggaaaatggggaactggaagcagacatcgcccaccactggcagcaaatatcaccgcttcactggcgtttctttttgcgtccaggagtccattttcatcatggtcgtgaactggaaatggacgacgtgatcgcctctttaaaacgaatcaatacgctgccgctctattcgcatattacggacattgtgtcgccgacgccctggacgctggatatccatctcacgcagccggaccgctggttgccgttactgctggggcaagttccggcgatgatcctgccgtgcgaatgggaaaccctcagtaactttgccagccatcctattggcaccggtccgtatgcggtgattcgcaacagcaccaatcaactgaaaattcaggcattcgatgacttcttcggttaccgggcattaatcgacgaagttaacgtctgggttctgccggaaattgccgacgagccagccggtggtctgatgctaaaaggtccacagggcgagaaaaaagagattgaaagccgcctggaggaaggttgctactatttactgttcgacagccgcacccatcgcggggcgaatcagcaagtcagggactgggtaagctatgtgctttctccaactaatctggtctatttcgctgaggaacagtaccagcaactgtggttcccggcttatggactgctcccccgttggcaccatgcccgcaccataaagagcgaaaaaccggctggcctggaaagcctcaccctgaccttttatcaggatcacagtgagcatcgggtgattgccgggatcatgcagcagattctggcaagtcaccaggtcacgctggaaatcaaagagatcagctacgatcagtggcatgaaggagagatcgagagcgatatctggcttaatagcgccaactttacgctgccgctggatttttcgctgttcgcgcacttgtgcgaggtgccgctgctccaacactgtattccgatcgactggcaagccgacgccgcccgctggcgcaatggcgaaatgaacctggcgaactggtgccagcaactggtcgccagtaaagcaatggtgccgcttatccaccactggctgatcattcagggacaacgcagtatgcgcggcctgcgtatgaataccctcggctggttcgattttaaatcagcgtggtttgcgccaccggatccatga

SEQ ID NO: 471703 - DNA, 984 bp, Shigella flexneri
gtgttaaaaaaatgtcttcccctgctgttgctgtgcacagcgcccgttttcgctaaacccgttctgactgtttatacctacgattccttcgccgccgactgggggcctggtccaaagatcaaaaaagcttttgaagccgactgtaactgcgaactgaaactggtggcgctggaagatggcgtttcgcttctcaaccgtctacggatggaaggcaaaaatagtaaagccgatgtggtgctggggctggataacaatctgttagacgccgccagtaaaaccggactatttgccaaaagcggtgtggcagcggatgccgttaacgttcccggcggctggaataatgacactttcgtcccgtttgattacggctatttcgccttcgtctatgacaagaacaaactgaaaaacccgccgcaaagcctgaaagaattggttgagagcgatcagaactggcgggtgatttatcaggatccgcgtaccagcacgccggggctgggtctgctgttgtggatgcaaaaagtctatggcgatgacgccccacaagcctggcaaaaactggcgaagaaaaccgtcacggtcaccaaaggctggagcgaagcctacggcctgtttttaaaaggtgaaagcgatctggtactgagttacaccacctctccggcttatcacattctcgaagagaaaaaagataactacgccgccgcgaactttagcgaaggtcactatctgcaggtggaagtcgccgcccgcaccgctgccagcaagcagccggagctggcgcaaaaattcctccagtttatggtttctccggcttttcagaatgcgatcccaaccggtaactggatgtatccggtggcaaatgtcacgctgcctgccgggtttgaacaattgaccaaaccggccaccacgctggagttcacaccagctgaagtggcggcacaacgtcaggcatggattagcgaatggcaacgcgccgtcagccgttaa

SEQ ID NO: 471704 - DNA, 1611 bp, Shigella flexneri
atggcaacgcgccgtcagccgttaattcccggctggttaattccaggtgtaagcgccgccacgctggtggtatcggttgcgctcgcggcgtttctcgccctgtggtggaacgcgccgcagggtaactgggtggcagtctggcaggacagctacctgtggcatgtggtgcgcttctccttctggcaggcgtttctctcggcgctactctctgtcgtacccgcgatattcctcgcccgcgccctctatcgcaggcgctttccgggtcggctggcgctgttgcgtctgtgcgcaatgaccttgatcctcccggtgctagttgctgttttcggcattcttagcgtctatggtcgtcagggctggctggcatcgctctgccaatcgctcggtctggagtggaccttttcgccctacggcctgcaaggcattttgctggcgcacgtattttttaatctgccgatggcgagccgcttattactccaggcactggaaaacattcccggcgaacaacgtcagcttgccgcccagcttgggatgcgcggctggcattttttccgcttcgtcgaatggccgtggctacggcgacaaatcccgccggttgccgcgcttatctttatgctctgtttcgccagcttcgccaccgtgctatcgctgggcggcggtccgcaggcaaccactatcgagctggctatttatcaggcgctgagttacgactacgatcctgcccgcgcggcgatgctggcgctgctccagatggtgtgttgccttgggctggtgctgttgagtcagcgactaagtaaggccattgcgcccggcaccacgctgctgcaaggctggcgcgatccggacgatcgtctgcatagccgcatttgcgacacggtgttaatagtgctggcgctgctgctgttgctgccaccgttgctggcggtgatcgtcgatggggtaaatcgccagttgccggaagtgctggcacaaccggtgctgtggcaggcgctgtggacctcgttgcgtattgcgctggcggcaggtgtattgtgcgtagtgctgaccatgatgctgctatggagcagtcgcgaactgcgggcgcggcagaaaatgctggcgggtcaggcgctggagatgagcggcatgttgatcctcgccatgccggggattgtgctggctaccggcttctttttactgctcaacaacactatcggcctgccacaatctgctgacggcattgtgattttcaccaatgcgttaatggcgatcccttatgcgctgaaagtactggaaaacccgatgcgcgatatcaccgcccgctacagtatgttgtgtcagtcgctgggcattgaaggctggtcgcgcttaaaagtggtcgagctgcgcgccctgaaacgtccactggcgcaggcgctggcttttgcctgcgtgctgtcgattggtgattttggcgtagtggcgttgttcggtaacgatgatttccgtaccctgccgttttatctctaccagcaaattggctcctatcgcagccaggacggcgcggtcaccgcgttaattctgctactactctgttttctgctgtttaccgtgattgaaaaactaccggggcgaaatgttaaaactgactga

SEQ ID NO: 471705 - DNA, 699 bp, Shigella flexneri
atgttaaaactgactgatatcacctggctttatcaccatttgccgatgcgttttagcttaacggtagaacgcggcgagcaggtggcaatcctcgggccaagcggcgcgggtaaaagtaccctgctgaatttgattgccggttttctgacgccagccagcggttcgctgactatcgatggtgttgatcacaccacgacgccgccgtcacgccgtccggtgtcgatgctgtttcaggagaacaacctgttcagccatctgacggtcgcgcagaacatcgggctggggctaaatccggggttgaaactgaacgcggcacagcaggagaaaatgcacgcgattgcccgtcagatggggattgataatttaatggcgcggttaccgggcgagctttccggcggtcagcgacagcgcgtggcgttagcgcgttgtctggtgcgcgaacagccgattttattgctcgatgaaccgttctctgcgctcgatccggcgttacgtcaggagatgctgacgctggtgagcacgagctgccagcagcaaaaaatgacgctattgatggtgtcgcacagtgtggaagatgcggcgcggatcgccacacgctcggtggtggtcgccgacgggcgcatcgcctggcagggtaagactgaagaattgttgagcggtaaggcgagtgcttcggcaatattggggattacgggttag

SEQ ID NO: 471706 - DNA, 765 bp, Shigella flexneri
atgcaagcattgctggaacactttattacccaatctaccgtgtattcattgatggcggtggtgttggtggcctttctggagtcgctggcgctggtcggtttgattctacccggtacggtgctgatggcggggctgggagcgctgattggcagcggcgagttaagtttctggcacgcttggctggcagggattgtcggttgtctgctgggcgactggatctccttctggctgggctggcgttttaaaaagccgttgcatcgctggtcatttctgaagaaaaacaaagcattactcgataaaactgaacatgcgttgcatcaacacagcatgttcaccattctggtcggtcgctttgttggcccgacgcgtccgctggtgccaatggtggcgggaatgctggatctgccggtggcaaaattcattacgccgaatattatcggctgcctgctgtggccaccgttttacttcctgcctgggattctggcgggcgcggcgatcgatattccagccggaatgcagagcggcgagtttaaatggttgctgctggcgacggcggtatttttgtgggttggtggctggctgtgctggcggttatggcgcagcggtaaagcaaccgatcgtttaagtcattatttgtcgcgcggccgtttgttgtggctgacgccgttgatttctgccatcggcgtggtggcgctggtggtgttaattcgccacccgttgatgccggtgtatatcgatattttgcgtaaagtggttggggtttag

SEQ ID NO: 471707 - DNA, 879 bp, Shigella flexneri
atggctgaagcgcaaaatgatcccctgctgccgggatactcgtttaatgcccatctggtggcgggtttaacgccgattgaggccaacggttatctcgatttttttatcgaccgaccgctgggaatgaaaggttatattctcaatctcaccattcgcggtcagggggtggtgaaaaatcagggacgagaatttgtctgccgaccgggtgatattttgctgttcccgccaggagagattcatcactacggttgtcatccggaggctcgcgaatggtatcaccagtgggtttactttcgtccgcgcgcctactggcatgaatggcttaactggccgtcaatatttgccaatacgggtttctttcgcccggatgaagcgcaccagccgtatttcagcgacctgtttgggcaaatcattaacgccgggcaaggggaagggcgctattcggagctgctggcgataaatctgcttgagcaattgttactgcggcgcatggaagcgattaacgagtcgctccatccaccgatggataatcgtgtacgcgaggcttgtcagtacatcagcgatcacctggcagacagcaattttgatatcgccagcgtcgcacagcatgtttgcttgtcgccgtcgcgtctgtcacatcttttccgccagcagttagggattagcgtcttaagctggcgcgaggaccaacgtatcagccaggcgaagctgcttttgagcaccacccggatgcctatcgccaccgtcggtcgcaatgttggttttgacgatcaactctatttctcgcgggtatttaaaaaatgcaccggggccagcccgagcgagttccgtgccggttgtgaagaaaaagtgaatgatgtagccgtcaagttgtcataa

SEQ ID NO: 471708 - DNA, 126 bp, Shigella flexneri
atgacaaaaacgcgtaacaaaagtgtctataatcacggcagaaaagtccacattgattatttgcacggcgtcacactttgctatgccatagcatttttatccataagattagcggatcctacctga

SEQ ID NO: 471709 - DNA, 1701 bp, Shigella flexneri
atggcgattgcaattggcctcgattttggcagtgattctgtgcgagctttggcggtggactgcgccagcggtgaagagatcgccaccagcgtagagtggtatccccgttggcaaaaagggcaattttgtgatgccccgaataaccagttccgtcatcatccgcgtgactacattgagtcaatggaagcggcactgaaaaccgtgcttgcagagcttagcgtcgaacagcgcgcagctgtggtcgggattggcgttgacagtaccggctcgacgcccgcaccgattgatgccgacggtaacgtgctggcgctgcgcccggagtttgccgaaaacccgaacgcgatgttcgtattgtggaaagaccacactgcggttgaagaagcggaagagattacccgtttgtgccacgcgccgggcaacgttgactactcccgctatattggcggtatttattccagcgaatggttctgggcaaaaatcctgcatgtgactcgccaagacagcgccgtggcgcaatctgccgcatcgtggattgagctgtgcgactgggtgccagctctgctttccggtaccacccgcccgcaggatattcgtcgcggacgttgcagcgccgggcataaatctctgtggcacgaaagctggggcggcttgccgccagccagtttctttgatgagctggacccgatcctcaatcgccatttgccttccccgctgttcactgacacctggactgccgatattccggtgggcaccttatgcccggaatgggcgcagcgtctcggcctgcctgaaagcgtggtgatttccggcggcgcgtttgactgccatatgggcgcagttggcgcaggcgcacagcctaacgcactggtaaaagttatcggtacttccacctgcgacattctgattgccgacaaacagagcgttggcgagcgggcagttaaaggtatttgcggtcaggttgatggcagcatggtgcctggatttatcggtctggaagcaggccaatcggcgtttggtgatatctacgcctggtttggtcgcgtactcggctggccgctggaacagcttgccgcccagcatccggaactgaaagcgcaaatcaacgccagccagaaacaactgcttccggcgctgaccgaagcatgggccaaaaatccgtctctggatcacctgccggtggtgctcgactggtttaacggtcgtcgcacgccaaacgctaaccaacgcctgaaaggggtgattaccgatcttaacctcgctaccgacactccgctgctgttcggcggtttgattgctgccaccgcctttggcgcacgcgcaatcatggagtgctttaccgatcaggggatcgccgtcaataacgtgatggcgctgggcggcatcgcgcggaaaaaccaggtcattatgcaggcctgctgcgacgtgctgaatcgcccgctgcaaattgttgcctctgaccagtgctgtgcgctcggtgcggcgatttttgctgccgtcgccgcgaaagtgcacgcagacatcccatcagcccagcaaaaaatggccagtgcggtagagaaaaccctgcaaccgcgcagcgaacaggcacaacgctttgaacagctttatcgccgctatcagcaatgggcgatgagcgccgaacaacactatcttccaacttccgccccggcacaggctgcccaggccgttgcgactctataa

SEQ ID NO: 471710 - DNA, 1503 bp, Shigella flexneri
atggcgatttttgataattatgaagtgtggtttgtcattggcagccagcatctgtatggcccggaaaccctgcgtcaggtcacccaacatgccgagcacgttgttaatgcgctgaatacggaagcgaaactgccctacaaactggtgttgaaaccgctgggcaccacgccggatgaaatcaccgctatttgccgcgacgcgaattacgacgatcgttgcgctggtctggtggtgtggctgcacaccttctccccggccaaaatgtggatcaacggcctgaccatgctcaacaaaccgttgctgcaattccacacccagttcaacgcggcgctgccgtgggacagtatcgatatggactttatgaacctgaaccagactgcacatggcggtcgcgagttcggcttcattggcgcgcgtatgcgtcagcaacatgccgtcgttaccggtcactggcaggataaacaagcccatgagcgtatcggctcctggatgcgtcaggcggtctctaaacaggatacccgtcatctgaaagtctgccgatttggcgataacatgcgtgaagtggcggtcaccgatggcgataaagttgccgcacagatcaagttcggtttctccgtcaatacctgggcggttggcgatctggtgcaggtggtgaactccatcagcgacggcgatgttaacgcgctggtcgatgagtacgaaagctgctacaccatgacgcctgccacacaaatccacggcgaaaaacgacagaacgtgctggaagcggcgcgtattgagctggggatgaagcgtttcctggaacaaggtggcttccacgcgttcaccaccacctttgaagatttgcacggtctgaaacagcttccaggtctgcccgtacagcgtctgatgcagcagggttacggctttgcgggcgaaggcgactggaaaaccgccgccctgcttcgcatcatgaaggtgatgtcaaccggtctgcagggcggcacctcctttatggaggactacacctatcacttcgagaaaggtaatgacctggtgctcggctcccatatgctggaagtctgcccgtcgattgccgtagaagagaaaccgatcctcgacgttcagcatctcggtattggtggtaaggacgatcctgcccgactgatcttcaatacccaaaccggtccagcgattgtcgccagcctgattgatctcggcgatcgttaccgtctgctggttaactgtatcgacacggtgaaaacaccgcactccctgccgaaactgccggtggcgaatgcactgtggaaagcgcaaccggatctgccaactgcttccgaagcgtggatcctcgctggtggcgcgcaccataccgtcttcagccatgcgctgaacctcaacgatatgcgccagttcgccgagatgcacgacattgaaatcacggtgattgataacgacacccgcctgccagcgtttaaagacgcactgcgctggaacgaagtgtattacggatttcgtcgctaa

SEQ ID NO: 471711 - DNA, 696 bp, Shigella flexneri
atgttaaaagatctcaaacgccaggtattagaagccaacctggcgctgccaaaacacaacctggtcacgctcacatggggcaacgtcagcgccgttgatcgcgagcgcggcgtctttgtgatcaaaccttccggcgtcgattacagcgtcatgaccgctgacgatatggtcgtggttagcatcgaaaccggtgaagtggttgaaggtacgaaaaagccctcctccgacacgccaactcaccggctgctctatcaggcattcccctccattggcggcattgtgcatacgcactcgcgccacgccaccatctgggcgcaggcgggtcagtcgattccagcaaccggcaccacccacgccgactatttctacggcaccattccctgcacccgcaaaatgaccgacgcagaaatcaacggcgaatatgagtgggaaaccggtaacgtcatcgtagaaacctttgaaaaacagggtatcgatgcagcgcaaatgcccggcgttctggtccattcccacggcccgtttgcatggggcaaaaatgccgaagatgcggtgcataacgccatcgtgctggaagaggtcgcttatatggggatattctgccgtcagttagcgccgcagttaccggatatgcagcaaacgctgctggataaacactatctgcgtaagcatggcgcgaaggcatattacgggcagtaa

SEQ ID NO: 471712 - DNA, 2352 bp, Shigella flexneri
gtggcgcaggcaggttttatcttaacccgacactggcgggacaccccgcaagggacagaagtctccttctggctggcgacggacaacgggccgttgcaggttacgcttgcaccgcaagagtccgtggcgtttattcacgccgatcaggttccccgcgctcagcatattttgcagggtgaacaaggctttcgtctgacaccgctggcgttaaaggattttcaccgccagccggtgtatggcctttactgtcgcgcccatcgccaattgatgaattacgaaaagcgtctgcgtgaaggtggcgttaccgtctacgaggccgatgtgcgcccgccagaacgctatctgatggagcggtttatcacctcaccggtgtgggtcgagggtgatatgcacaatggcactatcgttaatgcccgtctgaaaccgcatcccgactatcgtccgccgctcaagtgggtttctatagatattgaaaccacccgccacggtgagctgtactgcatcggcctggaaggctgcgggcagcgcatcgtttatatgctggggccggagaatggcgacgcctcctcgcttgatttcgaactggaatacgtcgccagccgcccgctgctgctggaaaaactcaacgcctggtttgcaaaccacgatcccgatgtgatcatcggctggaacgtggtgcagttcgatctgcgaatgctgcaaaaacatgccgagcgttaccgtcttccgctgcgtcttgggcacgataatagcgagctggagtggcgcgagcacggctttaaaaacggcgtcttttttgcccaggctaaaggtcggctaattatcgacggtatcgaggcgctgaaatccgcgttctggaatttctcttcattctcgctggaaactgtcgctcaggagctattaggcgaaggaaaatctatcgataacccgtgggatcgaatggacgaaattgaccgccgtttcgccgaagataaacctgcgctggcaacttataacctgaaagattgcgagctggtgacgcagatcttccacaaaactgaaatcatgccatttttactcgaacgagcaacggtgaacggcctgccggtggatcggcacggcggttcggtggcagcgtttggtcatctctattttccgcgaatgcatcgcgctggttatgtcgcgcctaatctcggcgaagtgccgccgcacgccagccctggcggctacgtgatggattcacggccagggctttatgattcagtgctggtgctggactataaaagcctgtacccgtcgatcatccgcacctttctgattgatcccgtcgggctggttgaaggcatggcgcaacctgatccagagcacagtaccgaaggttttctcgatgcctggttctcacgggagaaacattgcctgccggagattgtgactaacatctggcacgggcgcgatgaagccaaacgtcagggtaataagccgctttcgcaggcgctgaagatcattatgaatgccttttatggcgtgctcggcaccaccgcctgccgcttcttcgatccgcgcctggcatcgtcgatcaccatgcgtggtcatcagatcatgcggcagaccaaagcattgattgaagcgcagggctacgacattatctacggagataccgactcgacttttgtctggctaaaaggtgcacattcggaagaagaggcggcgaaaatcggtcgtgcactggtgcagcacgttaacgcctggtgggcggaaacgctgcaaaaacaacggctgaccagcgcattagaactggagtatgaaactcatttctgccgttttcttatgccaaccattcgcggagctgataccggcagtaaaaagcgctacgccgggctgattcaggagggcgacaagcagcggatggtgtttaaagggctggaaaccgtgcgcaccgactggacgccgctggcccagcagtttcagcaggagctgtacctgcgtatcttccgcaacgagccatatcaggagtacgtccgccaaaccatcgacaaactgatggcgggtgaactggatgcgcggctggtttaccgtaaacgccttcgccgtccgctgagcgaatatcagcgtaatgttccgcctcatgtacgcgccgctcgccttgccgatgaagaaaatcaaaagcgcggtcgccccttgcaatatcagaatcgcggcaccattaagtacgtatggaccaccaacggcccggagccgctggactaccaacgttcaccactggattacgaacactatctgacccgccagctacaacccgtggcggagggaatactcccttttattgaggataattttgctacacttatgaccgggcaacttgggctattttga

SEQ ID NO: 471713 - DNA, 2907 bp, Shigella flexneri
atgccttttacacttggtcaacgctggatcagcgatacagaaagcgaattgggacttggaaccgttgtcgcggtggatgcgcgaactgtcactttacttttcccatctactggtgaaaaccgtctgtacgcacgcagtgattcccccgtgacccgcgtgatgttcaaccctggtgataccattaccagccatgacggctggcagatgcaagtcgaagaagtaaaagaagaaaatggcttgctgacctatatcggtactcgcctggatactgaagagtccggcgtagccctgcgtgaagttttccttgatagcaaactggtgttcagcaaaccgcaggaccgtctgtttgccgggcagattgaccgtatggaccgctttgcgctgcgttatcgcgcgcgtaagtattccagcgaacagttccgtatgccgtacagcggcctgcgcggtcagcgtaccagcctgatcccgcatcagctcaacatcgctcatgatgttggtcgccgccacgcgccgcgcgtcctgctggctgacgaagtgggtttagggaaaaccattgaagccgggatgatcctgcatcagcaactgctctctggcgctgctgaacgtgtgctgattatcgtcccggaaaccttacagcatcagtggctggtagaaatgctgcgccgtttcaacctgcgctttgctctgtttgatgatgagcgttatgccgaagctcagcacgatgcttacaacccgtttgacaccgaacagctggtgatttgctcgctggattttgcccgtcgtagcaaacagcgcttggaacatctctgtgaagccgaatgggacctgctggtggtcgatgaagcgcatcacctggtgtggagcgaagatgcgccaagccgtgaatatcaggccattgaacaactggcagagcacgtgccgggcgttctgctgctgaccgcgaccccggaacagctggggatggaaagccacttcgcccgtctgcgtctgctggacccgaaccgtttccacgattttgcgcagttcgttgaagagcagaaaaattatcgtccggttgcggacgccgttgccatgctgctggcaggtaacaaactgagcaatgacgaactgaacatgctcggcgagatgatcggcgagcaggatatcgagccgctgttgcaggcagcaaacagcgacagcgaagatgcccagagcgcccgtcaggagctggtttcgatgctgatggatcgccacggcaccagccgcgtgctgttccgtaacacgcgtaacggtgtgaaaggattcccgaaacgcgagctgcacaccattaagctgccgctaccgacgcagtatcagacggctattaaagtctccggcattatgggcgcacgtaaaagtgcggaagatcgtgctcgcgatatgctctacccggagcgtatttatcaggaatttgaaggtgataacgccacctggtggaacttcgatccgcgcgttgagtggctgatgggctacctgaccagccatcgctctcagaaagtgctggtgatctgcgccaaagctgccactgcgctgcaactggagcaggtactgcgcgaacgtgaaggtattcgcgctgcggtgttccacgaaggtatgtcgattatcgaacgtgaccgcgctgccgcctggtttgccgaagaagacaccggcgcacaggtactgctgtgctcagaaatcggttctgaaggacgtaactttcagttcgccagccacatggtgatgtttgacctgccattcaacccggatctactggagcagcgtattggtcgtctggatcgtatcggccaggcgcacgatattcagatccatgtgccttatctggagaaaaccgctcagtcggtgctggtgcgctggtatcacgaaggtctggatgcatttgagcacacctgcccgaccggacgcactatttacgatagcgtatacaacgatctgattaactatctggcttcaccggatcaaaccgaaggctttgacgatctgatcaaaagctgccgcgagcaacatgaagcgctgaaagcacagctggaacagggtcgtgaccgcctgctggaaatccactccaacggtggcgaaaaagcccaggaactggcagaaagcattgaagagcaggatgacgataccaacctgatcgccttcgccatgaacctgttcgatattatcggtatcaatcaggacgatcgcggcgacaacatgatcgtgctgacgccgtccgatcatatgctggtgccggacttccctggcctgtcggaagatggcatcaccatcacctttgatcgtgaagtggcgctggcgcgtgaagatgcacagtttattacctgggagcatccgctgatccgcaacggtctggatctgatcctttctggcgataccggtagcagcacgatttcactgttaaaaaacaaagcgttgccggtaggtacgctgttggtggaactgatttatgtggttgaagcccaggctccgaagcagttgcagctcaaccgcttcctgccaccgacgccggtacgtatgctgctggataaaaacggcaacaacctggcggcgcaggtagagtttgaaacctttaaccgccagcttaacgcggttaaccgtcacaccggcagcaaactggttaacgccgtgcagcaggatgttcacgctatccttcaactgggtgaagcgcagatcgagaaatctgcccgtgcattgattgatgcagcgcgtaacgaagccgacgaaaaactgtctgccgagctgtctcgtctggaagctctgcgtgcagtgaacccgaacattcgtgacgacgaactgaccgccattgagagcaaccgtcagcaggtaatggaaagcctggatcaggcaggttggcgtctggatgccctgcgtttgatcgttgtaacgcatcagtaa

SEQ ID NO: 471714 - DNA, 660 bp, Shigella flexneri
atggggatggaaaactacaatccaccgcaggaaccctggttggttatcctgtatcaggatgaccatattatggtggtcaacaagccgagcggtttgttgtcagtgccgggtcgtctggaagagcacaaagacagcgtgatgacgcgcattcagcgtgattatccgcaggcagaatcggtgcatcgtctggatatggctaccagcggcgtgattgtagtggcgctgaccaaagccgcggagcgggagttaaaacgccagttccgcgagcgcgagccgaaaaagcagtatgtggcccgcgtctgggggcatccatcccccgcagaaggtctggtggatctgccgctgatttgcgactggccaaaccgcccgaaacagaaagtctgttacgaaacgggtaaacctgcgcagacggaatatgaagtggtggagtatgcggcggataacacggcaagagtggtgttaaaaccgattaccgggcgttcgcatcaattgcgtgtgcatatgctggcgctggggcatccgattctcggcgatcgtttttatgcatcaccagaagcgagagcgatggcaccgcgtttgttgctacatgcagagatgttgacgattacccatccggcgtatggcaatagtatgacgtttaaagcgccagcggatttttaa

SEQ ID NO: 471715 - DNA, 816 bp, Shigella flexneri
atgcagtattggggaaaaatcattggcgtggccgtggccttactgatgggcggcggcttttggggcgtagtgttaggcctgttaattggccatatgtttgataaagcccgtagccgtaaaatggcgtggttcgccaaccagcgtgagcgtcaggcgctgttttttgccaccacttttgaagtgatggggcatttaaccaaatccaaaggtcgcgtcacggaggctgatattcatatcgccagccagttgatggaccgaatgaaccttcatggcgcttcccgtactgcggcgcaaaacgcgttccgggtgggaaaatcagataattacccgctgcgcgaaaagatgcgccagtttcgcagtgtctgctttggtcgttttgacttaattcgtatgtttctggagatccagattcaggcggcgtttgctgatggttcactgcacccgaatgaacgggcggtgctgtatgtcattgctgaagaattagggatctcccgcgcccagtttgaccagtttttgcgcatgatgcagggcggtgcacagtttggcggcggttatcagcagcaatctggcggtggtaactggcagcaagcgcagcgtggcccgacgctggaagatgcctgtaatgtgctgggcgtgaagccgacggatgatgcgaccaccatcaaacgtgcctaccgtaagctgatgagtgaacaccatcccgataagctggtggcgaaaggtttgccgcctgagatgatggagatggcgaagcagaaagcgcaggaaattcagcaggcatatgagctgataaagcagcagaaagggtttaaataa

SEQ ID NO: 471716 - DNA, 2355 bp, Shigella flexneri
atgaaaaaacgtatccccactctcctggccaccatgattgccaccgccctttatagtcaacagggactggcagccgacctcgcctcacagtgcatgttgggcgtgccaagctatgaccgtcctctggtacagggcgataccaatgacttacccgtgactatcaatgctgaccacgcgaaaggggactacccggatgacgccgtgtttactggcagcgtggatatcatgcagggtaacagccgtctgcaggccgacgaagtgcagctccatcaaaaagaggcaccaggacaaccggagccggtacgtaccgttgatgcgctcggtaatgtccattacgacgataaccaggtgatcctcaaagggccgaaaggctgggcgaatctgaacaccaaagataccaacgtctgggaaggtgattaccagatggtgggtcgccagggtcgcggtaaagcggacctgatgaaacaacgtggcgaaaaccgctataccattctggataacggtagctttacctcctgtctgccgggttctgacacctggagcgtggtaggtagcgaaattattcatgaccgcgaagaacaagttgcggagatctggaacgcccgctttaaggtgggtccggtaccgatcttttatagcccctatttgcagttgccggtgggtgacaaacgtcgctctggtttcttgatcccgaacgccaagtacaccaccaccaactactttgagttctacctgccatattactggaacatcgcgccaaatatggatgccaccatcacgccgcattatatgcatcgtcgtggcaacatcatgtgggagaacgaattccgctacctctcccaggcgggcgctggcttgatggaactggactatctgccttcagataaagtctatgaagatgaacacccgaacgatgacagttcacgtcgttggttattctactggaaccactccggggtcatggatcaggtgtggcgtttcaacgtcgactacaccaaggtcagcgatcctagctacttcaatgatttcgataacaagtacggttccagtactgacggctacgcaacgcaaaaattcagcgttggctatgcggtgcaaaacttcaatgccaccgtttcaaccaagcagttccaggttttcagcgaacagaacaccagtagctactcggcagagccgcagttagacgttaattactaccagaatgatgttggtccgtttgatacgcgtatttacggccaggcagtgcactttgttaacaccagagacgacatgcctgaagcaacccgtgttcacctggaaccgaccatcaatttgccgctctctaataactggggcagcatcaataccgaagcgaagtttctggcaacccattatcagcaaaccaatcttgactggtataactccagaaacacgaccaagctggacgaatccgttaaccgcgtaatgccgcaattcaaagttgacggcaaaatggtctttgaacgcgatatggaaatgctggctccgggttatacccaaacgctggaaccgcgcgcgcagtatttgtacgtgccgtatcgcgatcagagcgacatctataactacgactcgtctctgctgcaatctgactactctggcctgttccgggaccggacttacggcggtcttgaccgtattgcctccgctaaccaggtgacgaccggtgtcacatctcgcatatatgatgatgctgccgttgaacgttttaatatttccgttggtcaaatctactatttcacggagtctcgcactggcgatgacaacataacatgggagaatgacgacaaaacgggctcactggtgtgggcaggcgacacctactggcgtatctccgagcgttggggattgcgtggcgggattcagtacgatacacgtctggataacgtagcgaccagtaactccagcattgaataccgtcgggatgaagaccgtctggtacagctgaattaccattacgccagcccggaatatattcaggctacgctgcctaagtactattccactgctgagcaatataagaatggtatttcgcaggtaggtgctgtcgccagcaggccaattgccgatcgttggtccattgttggggcctactactacgacaccaatgcgaacaagcaagccgactctatgttaggtgtgcaatacagctcctgctgctatgcaattcgcgtcggttacgagcggaagctgaacggttgggataacgataaacaacatgcggtatatgacaacgcaatcggctttaacatcgaacttcgcggcctgagctccaactacggtctgggtacgcaagagatgctgcgttcgaacattctgccgtatcaaaacactttgtga

SEQ ID NO: 471717 - DNA, 1287 bp, Shigella flexneri
atgaagaactggaaaacgctgcttctcggtatcgccatgatcgcgaataccagtttcgctgccccccaggtagtcgataaagtcgcagccgtcgtcaataacggcgtcgtgctggaaagcgacgttgatggattaatgcagtcggtaaaactgaacgctgcgcaggcaaggcagcagcttcctgatgacgcgacgctgcgccaccaaatcatggaacgtttgatcatggatcaaatcatcctgcagatggggcagaaaatgggagtgaaaatctccgatgagcagctggatcaggcgattgctaacatcgcgaaacagaacaacatgacgctggatcagatgcgcagccgtctggcttacgatggtctgaactacaacacttatcgtaaccagatccgcaaagagatgattatctctgaagtgcgtaacaacgaggtgcgtcgtcgcatcaccatcctgccacaggaagtcgaatccctggcgcagcaggtgggtaaccaaaacgacgccagcactgagctgaacctgagccacatcctgatcccgctgccggaaaacccgacctctgatcaggtgaacgaagcggaaagccaggcgcgcgccattgtcgatcaggcgcgtaacggcgctgatttcggtaagctggcgattgctcattctgccgaccagcaggcgctgaacggcggccagatggggtggggccgtattcaggagttgccggggatcttcgcccaggcattaagcaccgcgaagaaaggcgacattgttggcccgattcgttccggcgttggcttccatattctgaaagttaacgacctgcgcggcgaaagcaaaaatatctcggtgaccgaagttcatgctcgccatattctgctgaaaccgtcgccgatcatgactgacgaacaggcccgcgtgaaactggagcaaattgctgctgatatcaagagtggtaaaacgacttttgctgccgcagcgaaagagttctcgcaggatccaggttctgctaaccagggcggtgatctcggctgggctacaccagatattttcgatccagccttccgtgacgccctgacccgcctgaacaaaggtcaaatgagtgcaccggttcactcttcattcggctggcatttaatcgaactgctggatacccgtaatgtcgataaaaccgacgctgcgcagaaagatcgtgcataccgcatgctgatgaaccgtaagttctcggaagaagcagcaagctggatgcaggaacaacgtgccagcgcctacgttaaaatcctgagcaactaa

SEQ ID NO: 471718 - DNA, 990 bp, Shigella flexneri
atggttaaaacccaacgtgttgtgatcactcccggcgagcccgccgggattggcccggacttagttgtccagcttgcacagcgtgagtggccggtcgaactggttgtttgtgccgatgccactctccttaccgaccgggcagcgatgctcggtttgccgctcaccctccgcccttattcccccaactcccctgcacaaccgcaaactacgggcacattaacgctacttcctgtcgcgctacgtgaatctgtcactgcggggcagttagcgattgaaaatgggcattacgtggtggagacgctggcgcgagcgtgtgatggctgtctgaacggtgaatttgctgcgctgatcacaggccccgtgcataaaggcgtcattaacgacgcaagcattccgtttaccggtcataccgagtttttcgaagagcgttcgcaggcgaaaaaagtggtgatgatgctggcgaccgaagaacttcgcgtggcgctggcaacgacgcatttaccgctgcgcgatatcgcagatgctatcacccctgcacttttgcacgaagtgattgctattttgcatcacgatttgcgtacaaaatttggtattgccgaaccgcgcattctggtctgcgggctgaatccgcacgcgggcgaaggcggtcatatgggtacggaagagatagacaccattattccggtgctcgacgagctgcgggcgcaggggatgaaactcaacgggccgctgcctgccgataccctgtttcagccgaaatatctcgataacgccgacgccgtgctggcgatgtaccacgatcagggtcttcccgtgctaaaataccagggcttcgggcgcggtgtgaacattacgctgggcctgccctttattcgcacatcagtggaccacggcaccgcgcttgaactggcgggacgtggcgaagccgatgtcggcagttttattacggcgcttaatctcgccatcaaaatgattgttaacacccaatga

SEQ ID NO: 471719 - DNA, 822 bp, Shigella flexneri
atgaataatcgagtccaccagggccacttagcccgtaaacgcttcgggcaaaactttctcaacgatcagttcgtgatcgacagcattgtttctgccattaacccgcaaaagggccaggcaatggtcgaaatcggccccggtctggcggcattgaccgagccggtcggcgaacgtctggaccagctgacggtcatcgaacttgaccgcgatctggcggcacgtctgcaaacgcatccattcttaggcccgaaactgacgatttatcagcaggatgcgatgacctttaactttggcgaactggccgagaaaatgggtcagccgctgcgtgttttcggcaacctgccttataacatctccacgccgttgatgttccatctgtttagctatactgatgccattgccgacatgcactttatgttgcaaaaagaggtggtgaatcgtctggttgcaggaccgaacagcaaagcgtatggtcgattaagcgtcatggcgcaatactattgcaacgtgatcccggtactggaagttccgccgtcagcctttacaccaccacccaaagtggattccgccgtcgtgcgcctggtccctcatgcaacgatgcctcacccggttaaagatgttcgcgtgttgagccgcatcaccaccgaagcctttaaccagcgtcgtaaaaccattcgtaacagcctcggcaacctgtttagcgtcgaggtgttaaccggaatggggatcgacccggcgatgcgagcggaaaatatctctgtcgcgcaatattgccagatggcgaactatctggcggagaacgcgcctttgcaggagagttaa

SEQ ID NO: 471720 - DNA, 378 bp, Shigella flexneri; identical to SEQ ID NO: 263724

SEQ ID NO: 471721 - DNA, 843 bp, Shigella flexneri
atggcgacataccttattggcgacgttcatggttgttacgatgaactgatcgcattgctgcataaagtagaatttacccccgggaaagataccctctggctgacgggcgatctggtcgcgcgcggcccgggttcgctggatgttctgcgctatgtgaaatccttaggcgacagcgtacgtctggtgctgggcaatcacgatctgcatctgctggcggtatttgccgggatcagccgcaataaaccgaaagatcgcctgacaccgctgctggaagcgccggatgccgacgagctgcttaactggctgcgtcgccagcctctgctgcaaatcgacgaagagaaaaagctggtgatggcccacgcagggatcacgccgcagtgggatctgcagaccgccaaagagtgcgcgcgcgatgtagaagcggtgctgtcgagtgactcctatcccttctttcttgacgctatgtacggcgatatgccaaataactggtcaccggaattgcgggggctgggaagactgcgttttatcaccaacgcctttacccgtatgcgtttttgcttcccgaacggtcaactggatatgtacagcaaagaatcgccggaagaagcccctgccccactgaaaccgtggtttgcgattcctagccctgtcgctgaagaatacagcatcgcctttggtcactgggcatcgctggaaggcaaaggtacgccggaaggtatttacgcgctggataccggctgctgctggggtgggtcattaacctgcctgcgctgggaagataaacagtattttgtccagccgtcgaaccggcataaggatttgggcgaagcggcggcgtcttaa

SEQ ID NO: 471722 - DNA, 480 bp, Shigella flexneri
atgatcagtctgattgcggcgttagcggtagatcgcgttatcggcatggaaaacgccatgccgtggaacctgcctgccgatctcgcctggtttaaacgcaacaccttaaataaacccgtgattatgggccgccatacttgggaatcaatcggtcgtccgttgccaggacgcaaaaatattatcctcagcagtcaaccgggtacggacgatcgcgtaacgtgggtgaaatcggtggatgaagccattgcggcgtgtggtgacgtaccagaaatcatggtgattggcggcggtcgcgtttatgagcagttcctgccaaaagcgcaaaaactgtatctgacgcatatcgacgcagaagtggaaggcgacacccatttcccggattacgagccggatgactgggaatcggtattcagcgaattccacgacgccgatgcgcagaactctcacagctattgctttgagattctggagcggcggtaa

SEQ ID NO: 471723 - DNA, 1863 bp, Shigella flexneri
atggatagtcatacgctggttcaggcgctgatctacctcggatcggcggcgctgattgtacccattgcggtacgtcttggtctgggatcggtacttggctacctgatcgccggctgcattattggcccgtgggggctgcgactggtgaccgatgccgaatctattctgcactttgccgagattggggtggtgctgatgctgtttattatcggcctcgaactcgatccacaaaggctgtggaagctgcgtgcggcagtgttcggcggtggcgcattgcagatggtgatttgcggtggcctgctggggctgttctgtatgttacttgggctgcgctggcaggtcgcggaattgatcggtatgacgctggcgctctcatcaacggcgattgccatgcaggcgatgaatgaacgcaatctgatggtgacgcaaatgggccgcagtgcctttgcagtgctgctgttccaggatatcgcggcaatcccgctggtggcgatgatcccgctactggcggcgagcagtgcctcgacgacgatgggcgcatttgctctctcggcgttaaaagtggcgggtgcgctggtactggtggtattgctggggcgctatgttacgcgtccggcgctgcgttttgttgcccgctctggcttgcgggaagtgtttagtgccgtggcgttattccttgtgtttggctttggtttgctgctggaagaggtcggcttgtcgatggcgatgggcgcgtttctggcgggcgtactgctggcaagctcggaataccgtcatgcgttggaaagcgatatcgaaccgtttaaaggtttgctgttggggctgtttttcatcggtgttggcatgtcgatagactttggcacgctgattgaaaacccattgcgcattgtcattttgctgctcggtttcctcatcatcaaaatcgccatgctgtggctgattgcccgaccgttgcaggtgccaaataaacagcgtcgctggtttgcggtgttgttagggcagggcagtgagtttgcctttgtggtatttggtgcggcgcagatggcgaatgtgctggagccggagtgggcgaaatcgctgaccctggcggtggcgctgtcgatggcagcaacgccgattctgctggtgatcctcaatcgccttgagcaatcttctacggaggaggcgcgtgaagccgatgagatcgatgaagaacagccgcgcgtgattatcgccggattcggtcgttttggacagattaccggacgtttactgctctccagcggggtgaaaatggtggtgctcgatcacgatccggaccatatcgaaacgctgcgtaaatttggtatgaaagtgttttatggcgatgccacgcggatggatttactggaatctgccggagcggcgaaagcggaagtgctgattaacgctattgacgatccgcaaaccaacctgcaactgacggagatggtgaaagaacatttcccgcatttgcagattattgcccgcgcccgcgatgtcgatcactacattcgtttgcgtcaggcaggcgttgaaaagccggagcgtgaaacctttgaaggtgcgctgaaaaccgggcgtctggcgctggaaagtttaggtctggggccgtatgaagcgcgagaacgtgccgatgtgttccgccgctttaatattcagatggtggaagagatggcaatggttgagaatgacaccaaagcccgcgcggcggtctataaacgcaccagcgcgatgttaagtgagatcatcaccgaggaccgcgaacatctgtcattaattcaacgacatggctggcagggaacagaagaaggtaaacataccggcaacatggcggatgaaccggaaacgaaaccctcatcttaa

SEQ ID NO: 471724 - DNA, 531 bp, Shigella flexneri
atgatcctcatcatttatgcgcatccgtatccgcatcattcccatgcgaataaacggatgcttgaacaggcaaggacgctggaaggcgtcgaaattcgctctctttatcaactctatcctgacttcaatatcgatattgccgccgagcaggaggcgctctctcgcgccgatctgatcgtctggcagcacccgatgcagtggtacagcattcctccgcttcttaaactttggatcgataaagttttgtcgcacggctgggcttacggtcacggcggcacggcgctgcatggcaaacatttgctgtgggcggtgacgaccggcggcggggaaagccattttgaaattggtgcgcatccgggctttgatgtgctgtcgcagccgctacaggcgacggcaatctactgcgggctgaactggctgccaccgtttgccatgcactgcacctttatttgtgacgacgaaaccctcgaagggcaggcgcgccactataagcaacgtctgctggaatggcaggaggcccatcatggatag

SEQ ID NO: 471725 - DNA, 579 bp, Shigella flexneri
atgcagactgaagcacaaccgacacggacccggatcctcaatgctgccagagagattttttcagaaaatggatttcacagtgcctcgatgaaagccatctgtaaatcttgcgccattagtcctgggacgctctatcaccatttcatctccaaagaagccttgattcaggcgattatcttacaggaccaggagagggcgctggctcgtttccgggaaccgattgaagggattcattttgttgactatatggtcgagtctattgtctctctcacccatgaagcctttgggcaacgggcgctggtggtcgaaattatggcggaagggatgcgtaacccacaggtcgccgccatgcttaaaaataagcatatgacgatcactgaatttgttgcccagcggatgcgtgatgcccagcaaaaaggcgagataagcccagacatcaacacggcaatgacttcacgtttactgctggatctgacctacggtgtactggccgatatcgaagcggaagacctggcgcgtgaagcgtcgtttgctcagggattacgcgcgatgattggcggtatattaaccgcatcctga

SEQ ID NO: 471726 - DNA, 1704 bp, Shigella flexneri
atgttacgtcctgtagaaaccccaacccgtgaaatcaaaaaactcgacggcctgtgggcattcagtctggatcgcgaaaactgtggaattgatcagcgttggtgcgaaagcgcgttacaagaaagccgggcaattgcagtgccaggcagttttaacgatcagttcgccgatgcagatattcgtaattatgtgggcaacgtctggtatcagcgcgaagtctttataccgaaaggttgggcaggccagcgtatcgtgctgcgtttcgatgcggtcactcattacggcaaagtgtgggtcaataatcaggaagtgatggagcatcagggcggctatacgccatttgaagccgatgtcacgccgtatgttattgccgggaaaagtgtacgtatcaccgtttgtgtgaacaacgaactgaactggcagactatcccgccgggaatggtgattaccgacgaaaacggcaagaaaaagcagtcttacttccatgatttctttaactatgccgggatccatcgcagcgtaatgctctacaccacgccgaacacctgggtggacgatatcaccgtggtgacgcatgtcgcgcaagactgtaaccacgcgtctgttgactggcaggtggtggccaatggtgatatcagcgttgaactgcgtgatgcggatcaacaggtggttgcaactggacaaggcaccagcgggactttgcaagtggtgaatccgcacctctggcaaccgggtgaaggttatctctatgaactgtgcgtcacagccaaaagccagacagagtgtgatatctacccgctgcgcgtcggcatccggtcagtggcagtgaagggcgaacagttcctgattaaccacaaaccgttctactttactggctttggtcgtcatgaagatgcggatttgcgaggcaaaggattcgataacgtgctgatggtgcacgatcacgcattaatggactggattggggccaactcctaccgtacctcgcattacccttacgctgaagagatgctcgactgggcagatgaacatggcatcgtggtgattgatgaaactgcagctgtcggctttaacctctctttaggcattggtttcgaagcgggcaacaagccgaaagaactgtacagcgaagaggctgtcaacggggaaactcagcaggcgcacttacaggcgattaaagagctgatagcgcgtgacaaaaaccacccaagcgtggtgatgtggagtattgccaacgaaccggatacccgtccgcaaggtgcacgggaatatttcgcgccactggcggaagcaacgcgtaaactcgacccgacgcgtccgatcacctgcgtcaatgtaatgttctgcgacgctcacaccgataccatcagcgatctctttgatgtgctgtgcctgaaccgttattacggttggtatgtccaaagcggcgatttggaaacggcagagaaggtactggaaaaagaactgctggcctggcaggagaaactgcatcagccgattatcatcaccgaatacggcgtggatacgttagccggcctgcactcaatgtacaccgacatgtggagtgaagagtatcagtgtgcatggctggatatgtatcaccgcgtctttgatcgcgtcagcgccgtcgtcggtgaacaggtatggaatttcgccgattttgcgacctcgcaaggcatattgcgcgttggcggtaacaattga

SEQ ID NO: 471727 - DNA, 843 bp, Shigella flexneri
atgggcctcgggctttgctacagcctggtgaatattccttatggttcacttgctaccgcgatgacccaacaaccacaatctcgcgcccgtctgggcgcggctcgtgggattgccgcttcattgacctttgtatgcctggcatttctgataggaccgagcattaagaactccagcccggaagagatggtgtcggtataccatttctggacgattgtgctggtgattgccggaatggtgctttacttcatctgcttcaaatcgacgcgtgaaaatgtggtacgtatcgtggcgcagccgtcattgaagatcagtttgcaaaccctgaaacggaatcgcccgctgtttatgttgtgcatcggtgcgctgtgtgtgctgatttcgaccttcgcggtcagcgcctcgtcgttgttctacgtgcgctatgtgttaaatgataccgggctgttcactgtgctggtactggtgcaaaacctggttggtactgtggcatcggcaccgcttgtgccggggatggtcgcgaggatcggtaaaaagaataccttcctgattggcgctttgctgggaacctgcggttatctgctattcttctgggtttccgtctggtcactgccggtggcgttggttgcgttggccatcgcttcaattggtcagggcgttactatgactgtgatgtgggcactggaagctgataccgtagaatacggtgaatacctgaccggcgtgcgaattgaagggctcacctattcactattctcatttacccgtaaatgcggtcaggcaatcggaggttcaattcctgcctttattttgggattaagcggatatatcgccaatcaggtgtaa

SEQ ID NO: 471728 - DNA, 168 bp, Shigella flexneri
atgggcatccgcacatcaattgccttagtaccttgcggatttatgctactggcattcgttattatctggttttatccgctcacggataaaaaattcaaagaaatcgtggttgaaattgataatcgtaaaaaagtgcagcagcaattaatcagcgatatcactaattaa

SEQ ID NO: 471729 - DNA, 1266 bp, Shigella flexneri
atgagaaaaatagtggccatggccgttatttgcctgacggctgcctctggccttacctctgcttacgcggcgcaactggctgacgatgaagcgggactacgcatcagactgaaaaacgaattgcgcagggctgataagcccagtgctggcgcgggaagagatatttacgcatgggtacagggaggattgctcgatttcaatagtggttattattccaatattgttggcgttgaaggcggagcgtattatgtttataaattaggtgctcgtgctgatatgagtacccggtggtatcttgatggtgataaaagttttggctttgccctgggggcagtaaaaataaaacccagtgaaaatagcctgcttaaattaggtcgcttcgggacggattatagttatggtagcttaccttatcgtattccgttaatggttggcagttcgcaacgtacattaccgacagtttctgaaggagcattaggttattgggctttaacgccaaatattgatctgtggggaatgtggcgttcacgagtatttttatggactgattcaacaaccggtattcgtgatgaaggggtgtataacagccagacgggaaaatacgataaacatcgcgcacgttcttttttagccgccagttggcatgatgataccagtcgctattctctgggggcatcggtacagaaagatgtttccaatcagatacaaagtattctcgagaaaagcataccgctcgacccgaattatacgttgaaaggggagttgctcggcttttacgcgcagctcgaaggtttaagtcgtaataccagccagcccaatgaaacggcgttggttagtggacaattgacctggaatgcgccgtggggaagcgtatttggcagtggtggttatttgcgccatgcaatgaatggtgccgtggtggataccgacattggctatcccttttcattaagtcttgatcgtaaccgtgaaggaatgcagtcctggcaattaggtgccaactaccgtgtaactccgcaatttacgctgacatttgcaccgattgtgactcgcggctatgaatccagtaaacgagatgtgcggattgaaggcgcgggtatcttaggtggtatgaactatcgggtcagcgaagggccgttacaagggatgaatttctttcttgctgccgataaagggcgggaaaagcgcgatggcagtacgctgggcgatcgcctgaattactgggatgtgaaaatgagtattcagtatgactttatgctgaagtaa

SEQ ID NO: 471730 - DNA, 1509 bp, Shigella flexneri
atgaataaatcgctggtagcggtaggcgtcattgttgcgctaggcgtagtctggacaggcggcgcatggtatacaggcaagaagattgaaacccatctcgaagacatggtcgcgcaggcgaacgcgcaactcaaactgacagctcctgaatccaacctggaagtgagttatcaaaactatcatcgcggcgtattcagcagccagttgcaactgttggtgaaacccattgccgggaaagaaaatccgtggattaaaagcggtcagagcgtcatcttcaacgaatcggttgatcatggtcccttcccgcttgcccagcttaaaaaactgaacctgatcccgtcgatggcatcaattcaaaccacgctggttaataacgaagtaagcaaaccactgtttgatatggcaaaaggtgaaacgccttttgagattaactcgcgcattggttacagcggtgattccagttccgatatttcgctcaatccactgaattacgagcaaaaggatgaaaaagtcgcctttagcggcggcgagttccagttaaatgctgacagagacggcaaagccatctccctttccggagaggcgcaaagtggtcggatagacgcagttaacgaatacaaccagaaagtgcagttgacctttaataatctgaaaaccgacggttccagcacgctgggaagttttggtgagcgcgtaggaaaccaaaaactgtcactggaaaaaatgaccatttcagtggaaggcaaagaactggcactgctggaaggcatggagatcagcggtaaatcggatctggtcaatgacggtaaaacgatcaatagccaactggattactcgctaaacagcctgaaggtacagaatcaggatctgggcagcggcaagctgactttaaaagtcggccagattgatggtgaagcctggcatcagtttagccagcaatataacgcgcaaactcaggcgctgctggcacagccagaaattgccaacaatcccgaactttatcaggagaaagtgacggaagccttctttagcgccctgccgctgatgttgaaaggcgatccggtgattactatcgcgccgctaagctggaaaaacagtcagggtgaaagtgcgctgaatctgtcgctgttcctgaaagatccggcaacgactaaagaagcgccgcaaacgctggcgcaggaagtagatcgttcggttaaatctctggatgcgaaactgaccattccggtggatatggcaactgagttgatgactcaggtagcgaagctggaaggttatcaggaagatcaagcgaaaaaactggcgaaacagcaagttgaaggtgcatcagcaatggggcagatgttccgtctgaccaccttgcaggacaataccatcaccaccagcctgcaatatgctaacggtcagataacgttaaatgggcagaaaatgtcgttagaagattttgttggcatgtttgcgatgccagctcttaacgttccggctgtaccggcaattccgcagcagtaa

SEQ ID NO: 471731 - DNA, 1176 bp, Shigella flexneri
atgcaaaaactcattaactcagtgcaaaactatgcctggggtagcaaaacggcgttgactgaactttatggtatggaaaatccgtccagccagccgatggccgagctgtggatgggcgcacatccgaaaagcagttcacgagtgcagaatgccgccggagatatcgtttcactgcgtgatgtgattgagagtgataaatcgactctgctcggagaggccgttgccaaacgctttggcgaactgcctttcctgttcaaagtattatgcgcagcacagccactctccattcaggttcatccaaacaaacacaattctgaaatcggttttgccaaagaaaatgccgcaggtatcccgatggatgccgccgagcgtaactataaagatcctaaccacaagccggagctggtttttgcgctgacgcctttccttgcgatgaacgcgtttcgtgaattttccgagattgtctccctactccagccggtcgccggtgcacatccggcgattgctcactttttacaacagccacatgccgaacgtttaagcgaactgttcgccaacctgttgaatatgcagggtgaagaaaaatcccgcgcgctggcgattttaaaatcggcgctcgacagtcagcagggtgaaccgtggcaaacgattcgtttaatttctgaattttacccggaagacagcggcctgttctccccgctgttactgaatgtggtgaaattgaatcctggcgaagcgatgttcctgttcgctgaaacaccgcacgcttacctgcaaggcgtggcgctggaagtgatggcgaactccgataacgtgctgcgtgcaggtctgacgcctaaatacattgatattccggaactggttgccaatgtgaaattcgaagccaaaccggctaaccagttgttgacccagccggtgaaacaaggtgcagaactggacttcccgattcctgtggatgattttgccttctcgctgcatgaccttagtgataaagaaaccaccatcagccagcagagtgccgccattttgttctgcgtcgaaggcgatgcaacgttgtggaaaggttctcagcagttacagcttaaaccgggtgaatcagcgtttattgccgccaacgaatcaccggtgactgtcaaaggccacggccgtttagcgcgtgtttacaacaagctgtaa

SEQ ID NO: 471732 - DNA, 1647 bp, Shigella flexneri
atgtcaaacaaaccctttcattatcagtctccttttccactcaaaaaaaatgatactgagtattacctgctaaccagtgaacacgttagcgtatctgaatttgaagggcaggagattttgaaagtcgcacccgaagcgttaactctgttggcgcgtcaggcgtttcatgatgcgtcgtttatgctgcgtccggctcaccaacaacaggtggccgacattctgcgtgacccggaggccagcgaaaatgataaatatgtggcgctgcaattcctgcgtaactccgacatcgcggcgaaaggcgttctgccaacctgtcaggataccggcaccgcgattattgttggtaaaaaagggcagcgtgtatggaccggtggtggtgatgaagcggcgctggcgcgcggtgtctataacacttatatcgaagataatctgcgctactcgcaaaacgcgccgctggatatgtataaagaagtgaataccggcaccaatctgccagcgcagatcgatctttatgccgttgatggcgacgaatacaaattcctctgtatcgcaaaaggtggtggttcggcaaacaagacgtatctctatcaggaaaccaaagcgttactgacgccggggaaactgaaaaattacctggttgagaagatgcgcacgctgggtaccgcggcctgtcctccgtatcatattgcgttcgttattggtggaacttctgcagaaacgaaccttaaaacggtgaaactggcttccgcgaaatactatgatgaactgccaacggaagggaatgagcacggtcaggcgttccgcgatgtggaactggaaaaagaattactgatcgaagcgcaaaatctcggtctgggtgcgcagtttggtggtaaatacttcgctcacgacatccgcgtgattcgcctgccacgtcacggcgcatcctgtccggttggtatgggtgtttcctgctctgctgaccgtaatatcaaagcgaagatcaaccgtcaggggatctggatcgaaaaactggaacataatccaggtaaatatatccctgaagagctgcgtaaagcgggagaaggcgaagcggtgcgcgttgaccttaaccgtccgatgaaagagatcctcgcacagttgtcgcagtatcccgtttctacacgcttatcgcttaacggcacgattatcgttggtcgtgatattgctcacgccaaactgaaagagcggatggataacggtgaagggctgccgcaatacattaaagatcatccgatttactacgcgggtccggccaaaacgccggaaggttatgcctccggttctcttggcccaacgaccgccggacggatggattcttatgtcgatcaactgcaagcgcagggcggaagtatgatcatgctggcgaaaggcaaccgcagccagcaggtgacggatgcctgtaaaaaacacggcggcttctaccttggcagtatcggtggtccggccgctgtattggcgcagggaagtattaagagcctggaatgtgttgaatatccggaactgggaatggaagccatctggaaaattgaagtggaagatttcccggcgtttatccttgtggatgataaaggaaatgacttcttccagcagatacaactcacacagtgcactcgctgtgtgaaataa

SEQ ID NO: 471733 - DNA, 1404 bp, Shigella flexneri
atgaatacagtacgcagcgaaaaagattcgatgggggcgattgatgtcccggcagataagctgtggggcgcacaaactcaacgctcgctggagcatttccgcatttcgacggagaaaatgcccacctcactgattcatgcgctggcgctaaccaagcgcgcagcggcaaaagttaatgaagatttagacttgttgtctgaagagaaagcgagcgccattcggcaggcggcggatgaagtactggcaggacagcatgacgacgaattcccgctggctatctggcagaccggctccggcacgcaaagtaacatgaacatgaacgaagtgctggctaaccgggccagtgaattactcggcggtgtgcgcgggatggaacgtaaagttcaccctaacgacgacgtgaacaaaagccaaagttccaacgatgtctttccgacggcgatgcacgttgcggcgctgctggcactgcgcaagcaactcattccgcagcttaaaaccctgacacagacgctgagtgaaaaatcgcgtgcatttgccgatatcgtcaaaatcggtcgaacccacttgcaggacgccacgccgctaacactagggcaggagatttccggctgggtagcgatgctcgagcataatctcaaacatatcgaatacagcctgcctcacgtagcggaactggctcttggcggtacagcggtgggtactggactaaatacccatccggagtatgcgcgtcgcgtagcagatgaactggcagtcattacctgtgcaccgtttgttaccgcgccgaacaaatttgaagcgcttgcgacctgtgatgccctggttcaggcgcacggcgcgttgaaagggttggctgcgtcactgatgaaaatcgccaatgatgtccgctggctggcctctggcccgcgctgcggaattggtgaaatctcaatcccggaaaatgagccgggcagctcaatcatgccggggaaagtgaacccaacccagtgtgaagcattaaccatgctctgctgtcaggtaatggggaacgacgtggcgatcaacatgggtggcgcttccggtaactttgaactgaacgtcttccgtccgatggtgatccataatttcctgcaatcggtgcgcttgctggcagatggcatggaaagttttaacaaacactgcgcagtgggtattgaaccgaatcgtgagcgaatcaatcaattactcaatgaatcgctgatgctggtgactgcgcttaacacccacattggttatgacaaagccgcggagatcgccaaaaaagcgcataaagaagggctgaccttaaaagctgcggcccttgcgctggggtatcttagcgaagccgagtttgacagctgggtacggccagaacagatggtcggcagtatgaaagccgggcgttaa

SEQ ID NO: 471734 - DNA, 930 bp, Shigella flexneri
atggcgcgttacgatctcgtagaccgactcaacactacctttcgccagatggaacaagagctggctacatttgccgctcatcttgagcaacacaagctattggttgcccgcgtgttctctttgccggaggtaaaaaaagaggatgagcataatccgcttaatcgtattgaggtaaaacaacatctcggcaacgacgcgcagtcgctggcgttgcgtcatttccgccatttatttattcaacaacagtccgaaaatcgcagcagcaaggccgctgtccgtctgcctggcgtgttgtgttaccaggtcgataacctttcgcaagcagcgttggtcagtcatattcagcacatcaataaactcaagaccacgttcgagcatatcgtcacggttgaatcagaactccccaccgcggcacgttttgaatgggtgcatcgtcatttgccggggctgatcacccttaatgcttaccgcacgctcaccgttctgcacgaccccgccactttacgctttggttgggctaataaacatatcattaagaatttgcatcgtgatgaagtcctggcacagctggaaaaaagcctgaaatcaccacgcagtgtcgcaccgtggacgcgcgaggagtggcaaagaaaactggagcgagagtatcaggatatcgctgccctgccacagaacgcgaagttaaaaatcaaacgtccagtgaaggtgcagccgattgcccgcgtctggtacaaaggagatcaaaaacaagtccaacacgcctgccctacaccactgattgcactgattaatcgggataatggcgcgggcgtgccggacgttggtgagttgttaaattacgatgccgacaatgtgcagcaccgttataaacctcaggcgcagccgcttcgtttgatcattccacggctgcacctgtatgttgcagattaa

SEQ ID NO: 471735 - DNA, 1302 bp, Shigella flexneri
atgccaatgaaaaaattgtttatccagttttacctgttattgtttgtctgcttccttgtgatgtctctgctggttgggctggtgtacaaatttaccgccgaacgcgcgggcaaacagtcgctggatgatttgatgaacagttcgctgtatctgatgcgcagcgaattgcgagagatccccccacacgactggggtaagacgctgaaagagatggatttaaatctctctttcgatctgcgtgtcgagccactgagtaaataccatcttgatgatatttccatgcaccgactgcgtggcggcgaaattgtcgccctggacgatcagtacacgtttttgcagcgtatcccgcgcagccactacgtgctggcagttagtcctgttccttatctttattacctccatcaaatgcgattgctggatatcgccctgatcgcttttattgctatttccctcgcctttccggtgtttatctggatgcgtccgcactggcaggatatgttaaaactggaagcagcggcgcaacgatttggcgatgggcatctcaatgaacgtatccactttgatgagggttcgagctttgaacgacttggtatcgcatttaaccagatggcggacaatatcaacgccttaattgccagcaaaaaacagcttattgacggtatcgctcacgaactgcgaacaccgttagtgcgcctgcgttatcgactggagatgagcgataacctgagcgccgccgaatcccaggcgttgaatcgtgatatcagtcaacttgaagctttaattgaagagctgctgacttatgcccgactcgatcgcccacaaaacgagcttcatcttagcgaaccagacctgccgttgtggctgtcaacgcatctggcagatattcaggcagtaacgcccgataaaacggtacggataaaaacgctcatgcaaggccattatgcggcgttggatatgcgcttaatggagcgcgtgctggataatttgctcaataacgccctgcgctactgccattcaacggttgaaaccagcctgctactgtcggggaatagagcgacattaattgttgaggatgatggcccagggattgccccagaaaaccgcgaacatatctttgaaccttttgttcgcctcgatcccagccgggatcgctcaaccggcggctgcgggctggcaattgtccactcaatagcactggcaatgggcggtacggttaattgtgacatcagcgaactgggtggtgctcgcttctcgtttagctggccgttatggcataacatcccgcaatttacctctgcctga

SEQ ID NO: 471736 - DNA, 1284 bp, Shigella flexneri
atggatcaaaagagcgaatccctttccaaaagtgtttttatcgcgattttcctgggggctatcattggtatctccctgcatttcattcctgagacaagcagtgaaaccgttatcgaatggtataatattgctggtaacggttatgttaatttattaaaacttgttgccgttccactcatattcatttcgattctttcagcgattaataagctcgaaaatagcgctggtattggcaagatgtctttaactattgttgcctgtatgttgtgtttagtcatgattgcaggtttagttggcctggctattgccagtgcaattggccttgatgccagcgcctttggtcatatgcaatcctctttaaccagcgatgacgtctcgaaaacagctgcggtatctttaccgcgactcattacgtcattgatcccaaccaacctcttccttgatctgaccggggcaagaagtgtttcggttattggcatcgtcatctttacaattcttgctggtattgcgctgttaaaagtaaagaaagatgcaccagcagagggcgaaaaattgagcgcggggatcaacgcgattcaaatatgggtaatgaaaatggtccgtattgtcattgcgctgacgccttatggggtaatggcactaatggcgaaagtcttctcaacgtatcagctttcacagtttaccaatttgctcgggttcatcgtcgcctgttatctggccgtttttgtgatgtttattgttcactcgggcattttgctgttaataggtaaaaaccccgttaactattacaagaccgtctggcaagtacttacctttgcgtttgtttctcgcagtagtgcggcttcaattcctctggctatttctgcattggaaaaattgggggttccaaatacgattgctaatattgcagcgtcttttggttccagcatgggacaaaatggctgcgctgggatttatcctgccgtgatggtggcgatgattgctccaacaatgggtatcgatcccttctcattgcaattcctcgcaactcttttacctgccatcgcgcttggctcaataggggtagcaggcgtaggtagtggtgggacattcgcggcgctgattgtcctttcaacacttaatttccctgtcgcattagtagttatttttattgccatagagccgatcgttgatatggcaagaacagcgcttaatgtgaatggttcaataatgtccggtgtaatatcagcccgtcttcttaaggatagagagactaaagaacaacaaagcgtcacgttaaattaa

SEQ ID NO: 471737 - DNA, 744 bp, Shigella flexneri
atgaacactatcgtatttgtggaagatgatgcggaagtcggttcactgattgccgcgtacctggcaaaacatgatatgcaggttaccgtagaaccgcgcggcgaccaggccgaagaaaccattttgcgagaaaatccggatttggtgttactcgacatcatgctaccaggcaaggacggcatgaccatttgtcgtgatttacgcgcaaagtggtctggaccgattgttcttctaacctctctcgatagcgatatgaaccacatcctggcactggaaatgggtgcctgcgactatattctcaaaacgacgccccctgctgttttgctagcgcgtttacgtttgcatttgcgtcagaatgagcaagccacactgaccaaaggtcttcaggaaacgtctcttactccctacaaagccctgcatttcggcacgttaactatcgaccccatcaaccgcgtagtcaccctggctaacactgaaatctcgctctcgacagctgatttcgaattattgtgggaactagctacgcatgccgggcaaatcatggaccgcgatgcattgctgaaaaatttacgcggcgtcagttatgacggactggatcgtagcgtggacgtggctatttcgcggttaagaaaaaaactgctcgataacgccgcagaaccttatcgcattaaaactgtgcgtaacaaaggctatctttttgcgcctcatgcatgggatagtgacaataaacaatcagatgactaa

SEQ ID NO: 471738 - DNA, 336 bp, Shigella flexneri; identical to SEQ ID NO: 458395

SEQ ID NO: 471739 - DNA, 723 bp, Shigella flexneri
atgggtaaaacccagcccttgccaatattaattactggcggaggtcgtcgcatcggcctcgccctcgcatggcatttcattaatcaaaagcaaccggtgattgtcagctatcggacacactatccagccattgatggactgattaatgcaggtgcgcagtgtattcaggctgatttttcgaccaacgacggtgtgatggcgtttgccgatgaagtactaaaaaccacccatggtctgcgtgctattttgcataacgccagtgcgtggattgcggaaaaaccgggtgcgccactggccgacgtactggcttgcatgatgcagatccacgttaataccccatacctgctcaaccatgcgctggaaagattactgcgtgggcacggacacgccgccagcgatatcattcactttaccgattatgtggtggagcgcggtagcgacaaacatgttgcgtatgctgcaagcaaagcggcactggataatatgacccgctcgtttgcccgcaagctggcaccggaagtgaaagtgaattctattgcgccatcgctgatcctgtttaatgaacatgatgatgccgaatatcgacaacaggcgctgaataaatcactgatgaaaaccgcgcctggcgagaaagaagtgatcgacctggtcgattacttacttaccagttgctttgtcaccggacgcagtttcccacttgatggcggtcgtcatctgcgttaa

SEQ ID NO: 471740 - DNA, 1383 bp, Shigella flexneri
atggaaaagaaactgggactgagcgcactcaccgcgctggtattaagctcaatgctgggcgcgggtgttttcagtctgccgcaaaatatggcggcagttgccagcccggcagcactgctcatcggctggggtattactggcgctggcattttattgctggcctttgccatgctgatcctcacgcgcattcgtcccgaacttgatggcggtatctttacctatgcccgcgaagggtttggcgagctaatcggcttttgttccgcatggggatactggctgtgcgcggtcatcgccaacgtctcctatctggtgatcgttttttccgcgttaagcttttttacggacacgccggaattgcgcctgtttggcgatggtaatacctggcaatcgatagtcggtgcatcggctttattgtggattgttcactttttgatcctgcgcggggtgcaaaccgctgccagcattaacctggtggcgacactggcaaaattgttgccgctgggtctgtttgttgtgctggcgatgatgatgttcaaactggataccttcaagctcgacttcaccggacttgcacttggcgtacctgtttgggaacaggtgaaaaacaccatgctgatcaccctgtgggttttcattggtgtggaaggtgccgtggttgtttctgcgcgtgcgcgtaataaacgtgatgttggcaaagcgacactgctggcggttctctccgctctgggcgtttacttgctggtaacgctgctttcgctgggtgtggtggcacgtcctgaactggctgaaattcgtaacccgtcaatggccggtctgatggtggaaatgatgggaccatggggcgaaatcatcatcgctgccggtttgatcgtttccgtttgcggcgcgtacttaagctggaccatcatggcggcagaagttccgttcctggctgccactcataaagcattcccacgcatttttgcgcgccagaacgcacaagctgcgccatccgcctcactgtggttgaccaacatctgcgtgcaaatttgtctggtactcatctggctgaccggttccgattacaacacgttgctgaccatcgcctcagaaatgattctggtgccctatttcctggtcggcgcgttcttgctgaaaatcgcaacccgtccactgcataaagcggtaggtgtcggtgcctgcatttatggcttatggttattgtacgcctctggtccaatgcacttgctgttatccgttgttctgtatgcaccggggctgctggttttcctgtatgcgcgcaaaacgcatacacatgataatgtactgaaccgtcaggaaatggtgctgattggcatgctgttaattgcctcagttccggcgacctggatgctggtgggataa

SEQ ID NO: 471741 - DNA, 945 bp, Shigella flexneri
atgaagcttaagaacaccctcctggcgtcggcactgctttctgctacggcattctccgttaacgcagcaacagaactgacaccggagcaagcggcagcggttaaaccttttgaccgtgtagtggttaccggtcgttttaatgctattggcgaagcggtgaaagccgtttctcgtcgcgcagataaagaaggtgccgcctctttttatgttgtcgacacttctgattttggtaacagcggtaactggcgtgtggtcgctgacctctataaagccgatgctgaaaaagcagaagaaacaagtaatcgcgtaattaacggtgttgtcgaactgccgaaagatcaggctgttctgattgaaccgtttgacacggtcaccgtccagggcttctatcgtagccagccagaagtcaatgatgccatcaccaaagcggcaaaagcgaaaggtgcctactctttctacatcgttcgtcaaatcgatgccaaccagggcggcaaccagcgtattactgcattcatctataaaaaagatgctaagaaacgtatcgtccagagcccggatgtgatcccggcagattccgaagcaggacgtgcagctctggctgccggtggcgaagccgcgaagaaagttgagatcccgggtgttgcgactaccgcatcaccaagttctgaagtcggtcgcttctttgaaacccagtcatcaaaaggcgggcgttacaccgtcacgctcccggatggcactaaagtcgaagaactgaacaaagcgacagcagcgatgatggtcccgttcgacagcatcaaattctctggcaactacggcaacatgaccgaagtctcctatcaggttgcgaaacgtgccgcgaagaaaggtgctaagtattaccacatcacccgccagtggcagaaacgtggtaataacctgaccgtcagcgcagatctgtataaataa

SEQ ID NO: 471742 - DNA, 1533 bp, Shigella flexneri
atgcgaattggcataccaagagaacggttaaccaatgaaacccgtgttgcagcaacgccaaaaacagtggaacagctgctgaaactgggttttaccgtcgcggtagagagcggcgcgggtcaactggcaagttttgacgataaagcgtttgtgcaagcgggcgctgaaattgtagaagggaatagcgtctggcagtcagagatcattctgaaggtcaatgcgccgttagatgatgaaattgcgttactgaatcccgggacaacgctggtgagttttatctggcctgcgcagaatccggaattaatgcaaaaacttgcggaacgtaacgtgaccgtgatggcgatggactctgtgccgcgtatctcacgcgcacaatcgctggacgcactaagctcgatggcgaatatcgccggttatcgcgccattgttgaagcggcacatgaatttgggcgcttctttaccgggcaaatcactgcggccgggaaagtgccaccggcaaaagtgatggtgattggtgccggtgttgcaggtttggccgccattggcgcagcaaacagtctcggcgcgattgtgcgtgcattcgacacccgcccggaagtgaaagaacaagttcaaagtatgggcgcggaattcctcgagctggattttaaagaggaagcgggcagcggcgatggctatgccaaagtgatgtcggacgcgttcatcaaagcggaaatggaactctttgccgcccaggcaaaagaggtcgatatcattgtcaccaccgcgcttattccaggcaaaccagcgccgaagctaattacccgtgaaatggttgactccatgaaggcgggcagtgtgattgtcgacctggcagcccaaaacggtggcaactgtgaatacatcgtgccgggtgaaatcttcagtacggaaaatggtgtcaaagtgattggttataccgatcttccgggccgtctgccgacgcaatcctcacagctttacggtactaacctcgttaatctgctgaaactgttgtgcaaagagaaagacggcaatatcactgttgattttgatgatgtggtgattcgcggcgtgaccgtgatccgtgcgggcgaaattacctggccggcaccgccgattcaggtatcagctcagccgcaggcggcacaaaaagcggcaccggaagtgaaaactgaggaaaaatgtgcctgctcaccgtggcgtaaatacgcgttgatggcgctggcaatcatcctgttcggttggctgtcaagcgttgcgccgaaagagtttcttgggcacttcaccgttttcgcgctggcctgcgttgtcggttattacgtggtgtggaatgtatcgcacgcgctgcatacaccgttgatgtcggttaccaacgcgatttcagggattattgttgtcggagcactgttgcagattggccagggaggctgggttagcttccttagttttatcgcggtgcttatagccagcattaatattttcggtggcttcaccgtgactcagcgcatgctgaaaatgttccgcaaaaattaa

SEQ ID NO: 471743 - DNA, 1389 bp, Shigella flexneri
atgtctggaggattagttacagctgcatacattgttgccgcgatcctgtttatcttcagtctggccggtctttcgaaacatgaaacgtctcgccagggtaacaacttcggtatcgccgggatggcgattgcgttaatcgcaaccatttttggaccggatacgggtaatgttggctggatcttgctggcgatggtcattggtggggcaattggtatccggctggcgaagaaagttgaaatgaccgaaatgccagaactggtggcgatcctgcacagcttcgtgggtctggcggcagtgctggttggctttaacagttatctgcatcatgacgcgggaatggcaccgattctggtcaatattcacctgacggaagtgttcctcggtatcttcatcggggcggtaacgttcacgggctcggtggtggcgttcggcaaactgtgtggcaagatttcgtctaaaccgttgatgctgccaaaccgtcacaaaatgaacctggcggctctggtcgtttccttcttgctgctgattgtatttgttcgcacggacagcgtcggcctgcaagtgctggcattgctgataatgaccgccattgcgctggtattcggctggcatttagtcgcctccatcggtggtgcagatatgccggtggtggtgtcgatgctgaactcgtactccggctgggcggctgcggctgcgggctttatgctcagcaacgacctgctgattgtgaccggtgcgctggtcggttcttcgggggctatcctttcttacattatgtgtaaggcgatgaaccgttcctttatcagcgttattgcgggtggtttcggcaccgacggctcttctactggcgatgatcaggaagtgggtgagcaccgcgaaatcaccgcagaagagacagcggaactgctgaaaaactcccattcagtgatcattactccggggtacggcatggcagtcgcgcaggcgcaatatcctgtcgctgaaattaccgagaaactccgcgctcgtggtattaatgtgcgtttcggtatccacccggttgcggggcgtttgcctggacatatgaacgtattgctggctgaagcaaaagtaccgtatgacatcgtgctggaaatggacgagatcaacgatgactttgctgataccgataccgtactggtgattggtgctaacgatacggttaacccggcggcacaggatgatccgaagagtccgattgctggtatgcctgtgctggaagtgtggaaagcgcagaacgtgattgtctttaaacgttcgatgaacactggctatgctggtgtgcaaaacccgctgttcttcaaggaaaacacccacatgctgtttggtgacgccaaagccagcgtggatgcaatcctgaaagctctgtaa

SEQ ID NO: 471744 - DNA, 1035 bp, Shigella flexneri
atggcaaagccgatcatcacgctcaatggcctaaaaatcgtcattatgttgggaatgctggtcattattctctgcggtatccgttttgccgccgagatcatcgtgccgtttattctcgcattatttattgctgttattcttaacccgctggtgcaacatatggtccgctggcgtgtgccacgtgtactggcagtgtcgattttgatgacaatcatcgtgatggcgatggtgttgctattagcttatctgggttccgcgctcaacgagttgacgtggacgttaccgcaatatcgcaactctattatgacgccgctgcaagctcttgagccgttgttgcaacgcgtagggattgacgtctcagttgaccaactggcgcattacattgatccgaacgcggcgatgacgttgctcaccaacttattgacgcagttatctaatgccatgtcatcaatatttttattgctgctgacggtgctgtttatgctgctcgaagtgccacaattgcccggaaaatttcagcaaatgatggcgcgtccggttgaagggatggcggcgattcaacgtgcgattgacagtgtttctcattatctggtgctgaaaacagccatcagcatcatcaccggcctggtcgcctgggcgatgctcgccgcactcgatgttcgcttcgcttttgtctggggattgctggcttttgcgcttaattacatccctaatattggttcagttctcgcggcaatcccccctatcgctcaggtactggtgtttaatggcttctacgaagcgttgctggtgctggcgggatatctgctgattaatctggtcttcggcaatattctggagccgcgcatcatgggacgtgggctggggctttcgacattggtggtatttttgtcgttgattttttggggatggttgttaggaccggtgggtatgctgctttccgtgccgttgacaattattgtcaaaattgcgcttgaacaaacagcgggaggtcaaagcatcgccgttctgttaagcgatctcaataaagagtga

SEQ ID NO: 471745 - DNA, 366 bp, Shigella flexneri
atgtatatttattggattttattaggtctggctattgctacagaaattaccggtacgctgtcaatgaaatgggcgagcgtcagtgagggaaatggcggctttattttaatgctggtgatgatttctctgtcgtatatatttctctctttcgccgttaaaaaaatcgccttaggcgtagcttatgcgctgtgggaaggtatcggtattttatttattaccttgtttagcgttttgttattcgacgaaagtttatcgctgatgaaaattgccgggttaaccaccctggtcgccgggatagtgttgatcaaatcaggtacccgtaaagcgcgtaaacctgaactggaggtgaaccatggcgcagtttga

SEQ ID NO: 471746 - DNA, 330 bp, Shigella flexneri
atggcgcagtttgaatgggttcacgccgcctggctggcattggcaatcgtgctggaaatcgttgctaacgtctttttgaaattttctgacggctttcgtcgcaaaatatttggcttgctctccctggcggcggtgctggcggcctttagtgcgctttctcaggccgttaaagggatcgacttgtctgtcgtttatgcattgtggggcgggtttggtattgccgccacgttagccgcaggttggatcttgtttggtcaacggttaaatcgtaaaggctggattggcctggtcttgctgttggctggaatgatcatggtgaaacttgcctga

SEQ ID NO: 471747 - DNA, 822 bp, Shigella flexneri
atgcgtacaaccattgctgtagtgttgggtgcaattagtttgacgtctgcttttgtgtttgcagataaaccagacgttgccaaatcggcaaacgatgaggtcagcaccctgttttttggtcatgatgatcgtgtgccagtgaatgacacgacccaatcaccgtgggatgcggttgggcaactggaaacggccagcggcaatttatgtacggcgacgctgattgcacccaatctggcattaacggcaggacactgtttattgacgccgcctaagggtaaagcggataaggcggtagcgctgcgttttgtgtcaaataaaggtctttggcgctatgagatccacgacatagaaggccgcgttgatccgacactgggaaagcggttaaaagcagatggggatggttggattgttcctcccgcagctgcaccgtgggacttcggattgattgtgctacgtaatcccccttctggcattacaccgttgccgttatttgagggagataaagccgcgcttactgccgcattaaaatcggctggtcgtaaagtgactcaggcgggataccctgaagatcatctcgatacgttatacagtcatcaaaactgtgaagtgactggctgggcgcaaacgtcggtgatgtcacatcagtgcgataccttgccgggtgacagcggttcgcctctgatgttgcataccgatgacggctggcaattaattggggtgcaaagttcggctcctgccgcgaaagatcgctggcgcgccgataaccgggccatttctgttaccggttttcgcgacaagctggatcaactgtcgcaaaaataa

SEQ ID NO: 471748 - DNA, 309 bp, Shigella flexneri
atgaaaaaagtattagctctggttgttgccgctgctatgggtctgtcttctgccgcctttgctgcagagactgcgaccacacctgctccgactgcgacgaccaccaaagcagcgccagcgaaaactacacatcataaaaaacagcataaagcagcacctgcccagaaagcgcaggcggctaaaaagcatcataaaaatacgaaagctgaacagaaagcccctgaacaaaaagcgcaggcagcgaagaaacacgccgggaaacacggccatcagcaaccggcaaaacctgctgcacaacccgcagcgtaa

SEQ ID NO: 471749 - DNA, 366 bp, Shigella flexneri
atgaccacccgctatgggcgcggtccggtgatgttgttttcgacgggagttatgccgtttggtttactgatgaccttatttagctcgctgtggctgatctttgccggaatgttactcttctcagccggattcttcgcagcccactcagtagccagcagctggatcggcccccgcgcaaaacgcgctaaaggccaggcctcctcgctgtatctgttcagttactatctggggtcgagtattgccgggacgctgggtggtgttttctggcataactatggctggaacggcgtcggcgcatttattgctctgatgctggtcattgctctgctggtcgggacgcgtttgcatcgtcgtctgcacgcctga

SEQ ID NO: 471750 - DNA, 810 bp, Shigella flexneri
gtgagccgtactacaactgttgatggcgctccggcaagcgacactgacaagcaaagcatttctcagccaaatcaatttattaaacgcggtacgccgcaatttatgcgcgtcaccctggcgctgttctctgccggactggcaacctttgcacttctctattgtgtgcagcctatccttccggtgctttcgcaggagtttggcttaacgcccgcgaacagtagtatttcactgtccatttccacggcgatgttggctatcggtttgctatttactggcccgctatccgatgccattggtcgcaaaccagtgatggtcacggcgctactgttggcctccatttgtacgttactttcgacaatgatgaccagctggcacggcattttgattatgcgcgccttgattgggctttcgttaagtggcgtggcagctgttggcatgacttatcttagcgaggaaatccaccccagtttcgtggccttttcgatggggttgtatatcagcggcaactcaattggcggcatgagcggacgcttaattagtggtgtcttcacggactttttcaactggcgaattgctctggcggcaatcggttgtttcgcgctggcctcggcgttgatgttctggaaaatcctccctgaatcacgccatttttgcccgacttcgctgcgccctaagacgttatttatcaactttcgtctgcactggcgtgaccggggattaccgttattgttcgcagaaggctttttgctgatggggtcgttcgtcacgctgtttaattacatcggctatcggttgatgctttccccctag

SEQ ID NO: 471751 - DNA, 903 bp, Shigella flexneri
atgaatattgaacttcgtcatctgcgttactttgttgctgttgcggaagagctgcattttggacgcgcggctgcccgcctgaatatttcgcaaccgccgctaagtcagcagattcaggcactggagcaacaaatcggtgcccgactgctggcacgaactaatcgcagtgtattgctgacggcagcaggaaaacagtttcttgcagatagtcggcaaatcctgtctatggtggatgacgctgccgctcgcgctgaaagactgcatcagggtgaagcgggggagttgcgtattggttttacttcgtccgctccttttattcgggcggtgtccgatacgttatcgctgtttcgccgtgattatcctgatgtccatttacaaacccgcgaaatgaacactcgcgagcaaatcgctccgctcattgaaggaacgctggatatgggattgctgcgtaacacagcgttaccggagacgcttgaacacgcagtcatcgtccatgaaccgcttatggcgatgatcccgtacgatcatcccctggcaaataatccgagtgtaacactggctgaactggctgaactggcgaaagaaccctttgtcttttttgatccgcacgtcgggactgggctgtatgacgatattctcggactgatgcgacgttaccatttgacgcccgtcatcactcaggaggtgggcgaggcaatgaccatcatcggtctggtttccgccggtctgggtgtttcaattttgcctgcgtcatttaaacgtgttcagctcaacgaaatgcgctgggtgccgattgctgaagaggatgcggtttctgaaatgtggttggtctggccgaaacatcatgaacaaagtccagctgcgcgtaactttcgtattcatctgctgaatgctctcaggtga

SEQ ID NO: 471752 - DNA, 1221 bp, Shigella flexneri
gtggttgctgaaaaccagcctgggcacattgatcaaataaagcagaccaacgcgggcgcggtttatcgcctgattgatcagcttggtccagtctcgcgtatcgatctttcccgtctggcgcagctggctcctgccagtatcactaaaattgtccgtgagatgctcgaagcacacctggtgcgagagctggaaatcaaagaagcggggaaccgtggccgtccggcggtggggctggtggttgaaactgaagcctggcactatctttctctgcgcattagtcgcggggagattttccttgctctgcgcgatctgagcagcaaactggtggtggaagagtcgcaggaactggcgttaaaagatgacttgccattgctggatcgtatcatttcccatatcgatcagttttttatccgccaccagaaaaaacttgagcgtctaacttcgattgccataaccctgccgggaattattgatacggaaaatggtattgtacatcgcatgccgttctacgaggatgtaaaagagatgccgctcggcgaggcgctggagcagcataccggcgtaccggtttatattcagcatgatatcagcgcatggacgatggcagaggccttgtttggtgcctcacgcggggcgcgcgatgtgattcaggtggttatcgatcacaacgtgggggtgggcgtcattaccgatggtcatctgctacacgcaggcagcagtagtctcgtggaaataggccacacacaggtcgacccatatggtaaacgctgttattgcgggaaccacggctgcctcgaaaccatcgccagtgtggacagtattcttgagctggcacagctgcgtctcaatcaatccatgagctcgatgttacatgggcaaccgttaaccgtggactcattgtgtcaggcggcattgcgcggcgatctactggcaaaagacatcattatcggggtgggcgcgcatgtagggcgcattcttgccatcatggtgaatttatttaacccacaaaaaatactgattggctcaccgttaagtaaagcggcagatatcctcttcccggtcatctcagacagcatccgtcagcaggcccttcctgcgtatagtcagcacattagcgttgagagtactcagttttctaaccagggcacgatggcaggcgctgcactggtaaaagacgcgatgtataacggttctttgttgattcgtctgttgcagggttaa

SEQ ID NO: 471753 - DNA, 696 bp, Shigella flexneri
atgctgaagcgtttctttattaccggtacagacacttctgtagggaaaacggtggtttcccgcgcattgctacaagcgttagcctcccagggaaaaagggttgcgggatataaacccgtagcgaaggggagcaaagagacacccgaagggctgcgtaataaagatgccttggtgttgcagagtgtttcaaccatcgaactgccttatgaagcagttaatcctatcgcgttaagcgaagaagaaagtagcgtggcgcacagttgcccaatcaattacaccctcatttcaaacggcctggcaaacctgaccgataaagtcgatcatgtcgtggtagaagggactggcggctggcgcagtctgatgaatgatttgcgtccactctctgaatgggtagtgcaggaacaactgccggtgttgatggttgtcggtattcaggaaggttgcattaaccatgcactgctaacagctcaggcgatcgccaacgacgggctgccgctcattggctgggtggctaaccgaatcaacccaggactggcgcattatgcggaaatcattgatgtgctgggtaaaaaacttccggcaccgctcattggtgaactgccttatctgccgcgcgccgaacagcgtgaactggggcaatacatccgcttagctatgctgcgcagtgtgctggcggtagatagagtcacggtgtaa

SEQ ID NO: 471754 - DNA, 1257 bp, Shigella flexneri
atgttccgccgtctgcttatcgcaacagtcgtcggtattctcgctgtctttgccgttgccgggtttcgtcatgcgatgctgctactggagtggttgttcctcaataatgactccggcagtctggtcaatgcagcgacaaacctttcctcctggcgacggctgctaactccggcgctcggcggactggcggcgggtttgttgctgatgggctggcagaaatttacccaacaacgccctcatgcgccgaccgattacatggaagcgttgcaaaccgatggacagttcgattacgcagcaagcctggttaaatcgcttgcctcgctgctggtagtaaccagcggcagtgcaattggtcgcgaaggtgcgatgattcttttagctgcccttgccgcctcctgttttgcccaacgttttacgccacgccaggaatggaaattatggatcgcctgtggggccgcggcgggaatggctgcggcctatcgtgccccgcttgctggcagtttatttatagccgaagtgctgtttggcactatgatgttggcctctctcggcccggtgattatttccgccatcgtggcatggctggttagcaatctgattaatcatagcgacgcgttactctacaacgtacaactctcagtgacggttcaggctcgtgactatgcgctgattatcagtacaggtgtgctggcaggtctgtgcggaccactgttgttaacgttaatgaacgcctgtcatcgtggatttgtgagtctcaaacttgcgccgccctggcaactggcactaggcgggttgatcgtgggtctgctttccctgttcacacctgcagtgtggggcaacggctatagcaccgtacaatcctttttaaccgccccaccactgttaatgatcattgccgggatcttcctttgtaaactgtgtgccgtgctggcgagtagcggttccggcgcacccggtggtgtctttacaccgacgctatttatcggtcttgccattggcatgttgtatggtcgtagcctgggattatggttccctgatggcgaagaaattacgcttttactcggattgaccgggatggcgacactgttggcggcaaccacgcacgcgccgattatgtcgacgttgatgatatgtgaaatgaccggggagtatcagctactccccggtttattgattgcctgcgtaattgcgtcggtaatttcgcggacgttacaccgtgactctatctaccgccagcacactgcgcagcatagctaa

SEQ ID NO: 471755 - DNA, 615 bp, Shigella flexneri
atgacccatttttcacagcaagataatttttctgtcgcggcgcgcgtgttgggcgcgctgttttattacgctccagagagtgcggaagccgcacctctggttgcggtactcaccagtgacggctgggaaactcagtggcctctaccagaagcgtcattagcgccgctggtgacggcttttcagacacagtgtgaagagactcacgcccaggcctggcagcgtttgtttgtcggcccgtgggcactgccgtctccgccgtgggggtcggtctggctggatcgcgaatctgtgctgtttggcgattcaacattggcacttcgtcagtggatgcgcgagaaaggcattcagtttgaaatgaaacaaaacgaaccggaagatcattttggttcactgctgttgatggctgcgtggttggcggagaatggtcgccagacagaatgcgaagaattgctggcatggcacctttttccgtggtcaacacgttttcttgatgtttttatcgaaaaagcagaacaccctttctaccgtgcactgggtgaactggctcgcttaacgctggcgcaatggcaatcacaactgttgattcctgtcgcggttaaaccactctttcgatag

SEQ ID NO: 471756 - DNA, 855 bp, Shigella flexneri
atgggaaatggatggcatgaatggccactggttatctttaccgtattgggtcaatgcgtagtaggcgcgctgattgttagcggaattggctggttcgccgccaaaaatgacgcagaccgtcagcacattgttcgtggcatgtttttcctctggctgttgatgggcatcgggtttattgcctctgtcatgcacctgggatcgccactgcgagcgtttaactcgctgaatcgaatcggagcttctggtctgagtaacgagattgctgccggttccatattttttgccgttggcggactatggtggctggtggcggtcatcggtaaaatgccgcaagcgttggggaaactctggttacttgtcagcatggcgctcggcgtcattttcgtctggatgatgacctgcgtgtatcaaatcgacaccgtgccaacctggcataacggttacactacgctggctttcttcctgacggtattgttgagcggtccaatacttgctgccgcaattctgcgggcagcccgcgttacatttaataccacaccatttgccatcattagcgttctggcgctgatcgcttgtgccgaggtgattgtgctgcaaggtttgtctctggcgtctattcactcatccgtgcaacaagccagcgcactggtaccagattacgcctccttacaggtctggcgtgtggtattgttatgcgcaggtcttggatgctggctttgtccgctcattcgtcgccgtgaacctcacgttgccggacttgttctggggctaatcctcatacttgttggtgagatgatcgggcgtgtgctcttttatggcctgcacatgacagtaggaatggctattgcaggttaa

SEQ ID NO: 471757 - DNA, 618 bp, Shigella flexneri
atgaccacacaatatggattttttatcgattccagccgctgtactggctgtaaaacctgcgaactggcgtgcaaagattttaaagatcttggcccggaagtcagtttccgccgtatttatgaatatgctggcggcgactggcaggaagataatggcatctggcaccagaacgtgttcgcttattatctctccatctcctgtaaccattgcgatgaccccgcatgtacaaaagtctgccccagcggcgcaatgcataagcgtgaagatggctttgtggtggttgatgaagatgtttgtatcggctgccgctactgccacatggcttgtccgtacggcgcaccacagtacaatgctgaaaaagggcacatgacgaagtgcgatggctgttattcgcgcgtcgccgaggggaaacaacccatatgcgtcgaatcctgcccgctgcgtgcacttgagttcggtccaattgaagagctgcgccagaagcacggcactctggctgccgtcgcgccactgccgcgcgcgcatttcacaaaacccaatatcgttatcaaacctaacgccaacagccgcccgaccggcgataccactggttatctggctaatccggaggaagtgtaa

SEQ ID NO: 471758 - DNA, 1818 bp, Shigella flexneri
atgaaggctgaaatcagccatagaagtctgatgaaaacctccgcacttggcagtctcgcgctggcaagcagtgctttcactctgccattttcccaaatggtccgggcggcagaggctccggtagaagagaaaacggtctggagttcctgcaccgttaactgcgggagccgctgtctgctacgtttgcatgtgaaagatgacaccgtgtactgggtggagtctgatacgacaggtgacgacgtttacggtaatcatcaggttcgggcatgtttacgcgggcgctctatccgccgacggatgaatcatcctgacaggttgaaatatcccatgaagcgcgtcggcgagcgcggtgaaggtaaatttgaacggataagttgggacgaagccctggataccatcagtgataatcttcggcggatcctgaaagattacggcaatgaggctgtacatgtcctgtacggaacaggcgtagatggcggaaatatcaccaactcgaacgtcccgtaccgtctgatgaactcttgcgggggttttctcagtcgctatggcagctacagtaccgcacagatcagtgccgcaatgagttatatgttcggtgccaatgatggcaacagcccggatgatatcgccaatacgaaactggtcgttatgttcggaaataacccggcagaaacgcggatgagcggcggtggtgtcacttactacgtcgagcaagcccgcgaacgttcaaacgcacgcatgatcgtcatcgatccacgctataacgacacagctgccgggcgtgaagatgaatggctgcccattcgccctggcaccgatggcgcactggcctgtgcgattgcctgggtactgattactgaaaacatggtcgatcagccatttctcgacaaatattgtgttggttacgatgaaaaaacgctgcccgccaacgcaccacgtaacgcgcattataaagcctatattctgggcgaagggcctgacggcatagctaaaacgccggaatgggcagcaaaaatcaccagcatcccggcagaaaaaattatccagttggcacgagagatcggttcagcaaaacctgcttatatttgtcagggttgggggccacaacgacactccaacggcgaacaaacgtcccgcgctattgccatgctttccgttcttaccggtaacgtcggcataaacggcggcaactcaggtgtacgcgaaggtagctgggatctgggggtagaatggttcccgatgctcgagaatcctgttaaaacgcagatttccgtttttacatggacagatgccatcgaccatggtacgaaaatgaccgcgacccgtgatggtgttcgtggaaaagaaaaactggatgtccccatcaagtttttatggtgctacgccagtaacacattgatcaatcaacatggcgacatcaatcacacccatgaggtgcttcaggatgacagcaagtgcgagatgattgttggcattgaccacttcatgacggcctcggctaagtattgcgatatcctgttgcctgacctgatgccaacagagcaagaagaccttatctctcatgaatctgcagggaatatgggctatgtgatcctcgcccaacccgcaacctcagcaaaatttgaacgcaaacccatctactggatgctgagtgaagtcgccaaaccaaagcgcgtacccactccagctacggcaatattgatgtgttacagcaggcctgcccacaagaggtgtggatcaaccccattgatgctcaggcacgcggtatccgtcatggcgataccgtgcgggtatttaacaataatggagaaatgctga

SEQ ID NO: 471759 - DNA, 1110 bp, Shigella flexneri
atggttaatgtcagtcatatcaggaccttaagtagcgttgagtcaactacttcaagtccgtccatccgtctgacagtggagtccatctggaactacgcgggaaataccctcgttaatcagcattctgacatcaacaaaacgcatgaaattctgcaggacgaatcgaaatgcgaaatgattgtggtcatcgaaaactttatgacctcatcggcaaaatatgccgacattctgctggcagacctgatgaccgttgagcaggaagatattattcctaacgactacgccggtaacatgggatatctcattttcctccagccagtcaccagcgaaaaattcgaacgtaaaccgatttactggatcctgagtgaagtcgcgaaacgtcttggacctgacgtctatcaaaagttcacagaaggtcgcacgcaggaacaatggttacaacatctgtacgccaaaatgcttgccaaagatccggcgttaccgtcttacgacgaactgaaaaaaatgggtatctataagcgtaaagatcccaatggccattttgtcgcctacaaagcatttcgtgacgaccccgaggcaaatccacttaaaacgccttccggtaagattgaaatttattccagcaagctggcggaaattgcccgtacctgggaactggaaaaagatgaagtgataagcccactgccagtttatgcctcaacctttgaaggctgggactcccctgaacgtagaaccttcccactgcaactgtttggtttccattacaaatcccgtactcactcgacctacggcaacattgatgtcctgaaggcagcctgccgtcaggaggtgtggatcaaccctatagatgcacagaaacgtgggattgccaacggcgatatggtgcgggtgtttaaccatcgtggcgaagttcggctaccagccaaagtaacaccacgcattctccctggagttagcgctatgggccagggagcctggcacgagcccaatatgtctggcgataaaatcgaccatggcggatgtgtgaatacgctaaccactctgcgcccttcaccactggcgaagggaaacccgcagcacactaatctggtcgagatcgaaaaaatataa

SEQ ID NO: 471760 - DNA, 558 bp, Shigella flexneri
atgcgtcagagagagctcgcagccacagctaaggcattcctactggacaatcctgaagtcacactacaggagcttacagcgcacatacggtccatggctgagcagttcctgactgatgccagtgatgactactggaatggcgtagaggtggcgacactggttgacgagaagtccaacctcagggaacttgcagcgacaagagcgttgagtgtggaccagcagaggggcattaagttagcgctggaagtcctgaccgcagcacagcagagagtcgacactggtgatacctctggtctgattaagctgattgatggtggcgtaagccagcttactgatgataataaccatactgattactcaactataggcgactctacgtcgattctgaagaatgagcagggggatagaccagcagttttcacacaggaacgtcagttactcactccagagtcacgagaatcatctgtactttttcaggaattggtgacatcactgctggctgagaaggtccagacactgaaacaatccagctttaaggacttgtcagcgtccctgtga

SEQ ID NO: 471761 - DNA, 372 bp, Shigella flexneri
gtgctggatgcactggagcaggcgttatgggcccgtcgaccgtccggcacggtccatcacagtgataaaggttctcagtatgtatcgctggcctacacacagcggcttaaggaagccggattactggcatcaacaggaagtacaggcgactcgtatgacaacgcgatggcggagagcatcaatggtctttacaaagcggaggtaatacaccgtaagagctggaaaaaccgtgcagaagtggaactgaccacactcacgtgggtggactggtataacaatcgacgattgctggaaaggctgggccacatccctccggcagaagcagaaaaagcttattatgcttccatcggaaacgatgatctggcagcctga

SEQ ID NO: 471762 - DNA, 1368 bp, Shigella flexneri
atgttcggcataattatatctgtcatcgtattaattacgatgggctatttgatcctgaaaaactacaaacctcaggtggtgctggctgccgcaggtgtcttcctgatgatgtgcggagtctggttagggttcggtggtgtactcgatcccgccaaaagcagcggctacttgatcgtcgacatttataatgaaatcctgcgcatgctgtccaaccgcattgccggattggggctgtcgattatggcggtgggcggttatgcccgctacatggagcgcataggagccagttgcgcgatggtgagcttgctaagccgcccgttaaaactcattcgctcgccgtatattattctgtcggcaacttacgtcatcggccaaatcatggcgcagtttattaccagcgcctccggtctgggtatgttgctgatggtcaccttatttccgacgctggtgagtctgggagtaagtcgcctctctgcggtggcggttatcgcaaccacgatgtccattgagtgggggattctggaaacgaactccatttttgcagcccaggtcgcgggaatgaaaattgccacatacttcttccactaccagcttccggtcgcctcttgcgtcattatctcggtggcgatctcccactttttcgtgcaacgcgcttttgacaaaaaagataaaaatatcaatcacgaacaggcagagcaaaaaactctcgataatgtcccgccgctctattacgccattttacctgtgatgccgttaatcctgatgctcggctcgctgttcctcgcccacgtcgggctgatgaagtcagaactgcatctggtggtggtgatgttactaagtttgacggtgacgatgtttgttgagttcttccgcaagcataacttgcgcgaaacaatggacgatgtgcaggcgttttttgacggcatgggtacgcagtttgtcaacgtggtaacgctggtggtcgcgggtgaaatatttgcgaaaggcttaacgacgattggcactgttgatgcggttatcaggggtgcggagcattctggtctgggcggtattggcgtgatgattattatggcgctagtcattgccatttgtgccattgtgatgggctctggcaatgcgccgtttatgtcatttgccagtcttattccgaatatcgcagccggactacatgtaccagcggttgtaatgattatgccgatgcattttgccacgacgctagcgcgcgcggtttcgccgattactgcggtggtggtcgttacgtcaggaattgcaggcgtttcgccttttgcggtggtgaagcggacagcgatccccatggcagtcggtttcgtggtgaatatgattgccacaatcacgctattttattaa

SEQ ID NO: 471763 - DNA, 498 bp, Shigella flexneri
atggatttgtcacagctaacaccacgtcgtccctatctgctgcgtgcattctatgagtggttgctggataaccagctcacgccgcacctggtggtggatgtgacgctccctggcgtgcaggttcctatggaatatgcgcgtgacgggcaaatcgtactcaacattgcgccgcgtgctgtcggcaatctggaactggcgaatgatgaggtgcgctttaacgcgcgctttggtggcattccgcgtcaggtttctgtgccgctggctgccgtgctggctatctacgcccgtgaaaatggcgcaggcacgatgtttgagcctgaagctgcctacgatgaagataccagcatcatgaatgatgaagaggcatcggcagacaacgaaaccgttatgtcggttattgatggcgacaagccagatcacgatgatgacactcatcctgacgatgaacctccgcagccaccacgcggtggtcgaccggcattacgcgttgtgaagtaa

SEQ ID NO: 471764 - DNA, 639 bp, Shigella flexneri
atggctgtcgctgccaacaaacgttcggtaatgacgctgttttccggtcctactgacatctatagccatcaggtccgcattgtgctggctgagaaaggtgtaagtttcgagatcgaacacgtggaaaaggacaatccgcctcaggatctgattgacctcaacccgaatcagagcgttccgaccctggtggatcgtgagctgaccctgtgggaatctcgcatcattatggaatatctggatgagcgtttcccgcatccgccactgatgcctgtttacccggtagctcgcggtgaaagccgtctgtacatgcatcgcatcgaaaaagactggtacacgctgatgaacactatcatcaacggttcagcttctgaagcagatgccgcacgtaagcaactgcgcgaagaactgctggcgattgcgccggtcttcggtcagaagccgtacttcctgagcgatgagttcagcctggtcgattgctaccttgctccgctgctgtggcgtctgccgcaactgggcatcgagttcagcggcccgggtgcgaaagagctgaaaggctatatgacccgcgtctttgagcgtgactctttccttgcttctttaactgaagcagaacgtgaaatgcgtctgggccggagttaa

SEQ ID NO: 471765 - DNA, 393 bp, Shigella flexneri; identical to SEQ ID NO: 1060

SEQ ID NO: 471766 - DNA, 429 bp, Shigella flexneri
atgaaaacttttacagctaaaccagaaaccgtaaaacgcgactggtatgttgttgacgcgaccggtaaaactctgggccgtctggctactgaactggctcgtcgcctgcgcggtaagcacaaagcggaatatactccgcacgtagataccggtgattacatcatcgttctgaacgctgacaaagttgctgtaaccggcaacaagcgtactgacaaagtgtactatcaccacaccggccacatcggtggtatcaaacaagcgacctttgaagagatgattgctcgccgtcctgagcgtgtgattgaaatcgcggttaaaggcatgttgccaaaaggcccgctgggtcgtgctatgttccgtaaactgaaagtttacgcgggtaacgagcacaaccacgcggcacagcaaccgcaagttcttgacatctaa

SEQ ID NO: 471767 - DNA, 1128 bp, Shigella flexneri
atgcaaagcgttaccccaacatcgcaatacctgaaggcgctcaatgaaggcagccatcaacccgacgacgttcaaaaagaggccgtcagccgcctggaaattatttatcaagaactcatcaatagcaggccaccagcccccaggacgagtgggctaatggcgcgggtcggtaagctgtggggtaaacgcgaagacacaaagcatacgccagtgcgtggcttatatatgtggggcggtgtaggacgcgggaaaacctggctgatggaccttttctatcaaagcctgccgggagagcggaaacagcgcctgcactttcaccgttttatgctgcgggtgcacgaagagctaactgccttacaggggcagaccgatccgctggaaattattgccgatcgctttaaagccgaaactgacgtgctctgttttgacgaattttttgtttctgatattaccgacgccatgctacttggcggtctgatgaaagccctgttcacccgcggtattaccctggtagcgacgtcaaatattccgccggacgaactttatcgaaatggcctgcaacgtgcgcgttttctgcctgcaatcgatgccattaaacagcattgtgatgtaatgaacgtggacgctggtgttgattatcgactgcgtacactcactcaggcgcatctgtggctttcgccactcaacgatgaaacccgggcgcagatggataaactatggttggcgctggcgggggtgaaacgagaaaattcaccgacgttagaaatcaaccatcggccattggcgacaatgggcgtcgagaaccagacgctggcggtttcttttactacgctgtgcgtcgacgcccgcagtcagcatgactatattgcgctctcacgcttgtttcacacagtaatgttgtttgatgtgccagtcatgacgcggttgatggagagcgaagcgcggcgctttattgcgctggtggatgagttttacgagcgccatgtcaaattagtggtgagtgcagaagtgccgctgtatgaaatttatcagggtgagcggctgaagtttgagttccagcgttgcctgtcacgtctgcaagagatgcaaagcgaagagtatctgaagcgcgagcatttggcgggttaa

SEQ ID NO: 471768 - DNA, 399 bp, Shigella flexneri
atgacctgggaatatgcgctaattgggttagtcgtcggcatcattattggtgctgtggccatgcgttttggtaatcgtaaactacgccagcaacaggcgttgcagtacgaactggaaaagaataaagctgaactggacgagtatcgcgaagagctggttagccactttgcccgcagcgcggaattactggataccatggcgcacgactatcgccagctgtatcagcacatggcaaaaagctccagcagcctgctgccggaactgtctgctgaagcaaacccgttccgtaatcgtctggcagagtctgaagccagcaacgatcaggcaccggtgcaggtgcctcgcgactattctgaaggcgcatccggcctgctgcgtactggcgcgaagcgcgactaa

SEQ ID NO: 471769 - DNA, 1158 bp, Shigella flexneri
atgaaaaaacaaacccagctgttgagtgcattagcgttaagtgccgggttaactctctcggcgtcatttcaggccgtcgcgtcgattccaggccaggttgccgatcaggcccctctccccagtctggctccaatgctggaaaaagtgcttccggcagtggtgagcgtacgggtggaaggaacggccagtcagggacagaaaatcccggaagaattcaaaaagttttttggtgatgatttaccggatcaacctgcacaacccttcgaaggtttaggttccggtgtcatcatcaacgccagtaaaggctatgtgctgaccaacaaccatgtgattaatcaggcacagaaaatcagtattcagctcaatgatgggcgcgagtttgatgcaaaactgattggtagcgatgaccagagcgatatcgccctgttacaaattcaaaacccgagcaaattaacgcaaatcgctattgccgactccgataaattgcgcgtcggtgattttgccgtagcggtcggtaacccatttggccttgggcaaaccgccacctctggcattgtttccgcattaggccgcagcgggttgaatcttgaaggtctggaaaactttatccagacagatgcttccattaaccgcggtaactccggcggtgcactattaaaccttaacggtgagttaattggcatcaacactgcaatccttgcgcctggcggcgggagcgtcgggattggatttgccatccccagtaatatggcgcgaacactggcgcagcagcttatcgactttggtgaaatcaaacgcggtttgttaggcatcaaaggcaccgagatgagtgccgatatcgccaaagccttcaaccttgacgtgcagcgtggcgcgtttgtcagcgaagtgttgccaagttctggctcagcgaaagcgggcgtcaaagcgggcgatattattaccagcctcaacggcaaaccgctgaatagctttgctgagttgcgctctcgtatcgcgactacagagccgggcacgaaagtgaagcttggcctgctgcgtaacggcaaaccactggaagtagaagtgacgcttgataccagcacctcttcgtcggccagcgctggaaggtgcaacgttgagcgatggtcagctaaaagatggcggcaaaggtattaa

SEQ ID NO: 471770 - DNA, 1068 bp, Shigella flexneri
atgtttgtgaagctcttacgttccgttgcgattggattaattgtcggcgctattctgctggttgccatgccttcgctgcgcagccttaacccgctttccactccgcaatttgacagtaccgatgagacgcctgccagctataatctggcggttcgccgcgccgcgccagcggtggttaacgtttacaaccgtggtttgaacaccaactctcacaaccagcttgagatccgcaccctgggatccggtgtaatcatggatcaacgcggttatatcatcaccaataaacacgtcatcaacgacgccgatcagatcatcgtcgccttacaggatggacgtgtatttgaagcattgctggtgggatctgactctctaaccgatctggcggtacttaaaattaatgccactggcggtttacctaccattccaattaatgcacgtcgcgtaccgcacattggcgacgtagtactggcgatcggtaacccgtacaacctcgggcagaccattacccaagggattattagtgccacgggtcgaatcggtctgaacccgaccgggcggcaaaacttcctacaaaccgatgcttccattaaccacggtaactctggcggcgcgctggtgaactcgctgggagaactgatgggcattaacacgctgtcgtttgataagagtaacgatggcgaaacgccggaaggtatcggctttgcgattcctttccagttagcaaccaaaattatggataagctgatccgcgatggtcgcgtgatccgcggctacattggtatcggcggacgcgagatcgcaccactgcacgcgcagagcggtggtatagatcaactgcaagggatcgtggttaatgaagtgtcacctgacggcccagcggcgaatgcgggtattcaggtcaacgatctgattatttcggtggataacaaaccggccatctctgctctggagacgatggatcaggtggcggaaattcgccctggttcggtgatcccggttgtagtgatgcgtgatgataagcagttaacgctgcaggtcaccattcaggaatatccggcaaccaattaa

SEQ ID NO: 471771 - DNA, 939 bp, Shigella flexneri
atgaaagtcgcagtcctcggcgctgctggcggtattggccaggcgcttgcactactgttaaaaacccaactgccttcaggttcagaactctctctgtatgatatcgctccagtgactcccggtgtggccgtcgatctgagccatatccctactgctgtgaaaatcaaaggtttttctggtgaagatgcgactccggcgctggaaggcgcagatgtcgttcttatctctgcaggcgtagcgcgtaaaccgggtatggatcgttccgacctgtttaacgttaacgccggcatcgtgaaaaacctggtacagcaagttgcgaaaaactgcccgaaagcgtgcattggtattatcactaacccggttaacaccacagttgcaattgctgctgaagtgctgaaaaaagccggtgtttatgacaaaaacaaactgttcggcgttaccacgctggatatcattcgttccaacacctttgttgcggaactgaaaggcaaacagccaggcgaagttgaagtgccggttattggcggtcactctggtgttaccattctgccgctgctgtcacaggttcctggcgttagttttaccgagcaggaagtggctgatctgaccaaacgtatccagaacgcgggtactgaggtggttgaagcgaaagccggtggcgggtctgcaaccctgtctatgggccaggcagctgcacgttttggtctgtctctggttcgtgcactgcagggcgaacaaggcgttgtcgaatgtgcctacgttgaaggcgacggtcagtacgcccgtttcttctctcaaccgctgctgctgggtaaaaacggcgtggaagagcgtaaatctatcggtaccctgagcgcatttgaacagaacgcgctggaaggtatgctggatacgctcaagaaagatatcgccctgggcaaagagttcgttaataagtaa

SEQ ID NO: 471772 - DNA, 471 bp, Shigella flexneri; identical to SEQ ID NO: 459984

SEQ ID NO: 471773 - DNA, 264 bp, Shigella flexneri
atgaaaatcaaaaccactgtagctgcattaagcgtactttctgttctctctttcggtgcattcgctgccgactccattgatgctgcacaagcacaaaatcgtgaagcaatcgggaccgtatccgtaagtggtgtggcgtcttcgccaatggatatacgtgaaatgctgaacaaaaaagcggaagagaaaggcgcaacggcctaccagattactgaagctcgtagcggtgacacctggcacgctacggctgaactgtacaaataa

SEQ ID NO: 471774 - DNA, 273 bp, Shigella flexneri
atgaatatttatgcctttgattttgatgagattgagagtcaggaggatttttatcgtgactttagccaaacctttggtctggctaaagataaggtacgcgatctcgactcactatgggatgtgttaatgaacgatgtcctgccgctaccacttgagattgaatttgttcatctgggagagaaaacgcgtcgccgttttggcgcgttaatattgctgtttgatgaggcagaggaagagctggaagggcatttgcgttttaatgttcgtcattag

SEQ ID NO: 471775 - DNA, 1968 bp, Shigella flexneri
atgggtattttctccattgctaaccaacatattcgctttgcggtaaaactggcgaccgccattgtactggcgctgtttgttggctttcacttccagctggaaacgccacgctgggcggtactgacagcggcgattgttgccgccggtccggcctttgctgcgggaggtgaaccgtattctggcgctattcgctatcgtggctttttgcgcatcatcggcacatttattggctgtattgccggactggtgatcatcattgcgatgatccgcgcaccattattgatgattctggtgtgctgtatctgggccggtttttgtacctggatatcctcgctggtacgaatagaaaactcgtacgcgtgggggctggccggttataccgcgctgatcattgtgatcaccattcagccggaaccattgcttacgccgcagtttgccgtcgaacgttgtagcgagatcgttatcggtattgtgtgtgcgattatggcggatttgctcttttctccgcgatcgatcaaacaagaagtagatcgagagctggaaagtttgctggtcgcgcaatatcaattaatgcaactctgtatcaagcatggcgatggtgaagttgtcgataaagcctggggcgacctggtgcgacgcaccacggcactacaaggcatgcgcagcaacctgaatatggaatcttcccgctgggcgcgggccaatcgacgtttaaaagcgatcaatacgctatcgctgacgctgattacccaatcctgcgaaacttatcttattcagaatacgcgcccggaattgatcactgatactttccgcgaattttttgacacgccggtagaaaccgcgcaggacgtccacaagcagctcaaacgcctgcggagagttatcgcctggaccggggaacgggaaacgcctgtcaccatttatagctgggtcgcggcggcaacgcgttatcagcttctcaagcgcggcgttatcagtaacacaaaaatcaacgccaccgaagaagagatcctgcaaggcgaaccggaagtaaaagtagagtcagccgaacgtcatcatgcaatggttaacttctggcgaaccacactttcctgcattctgggcacgcttttctggctgtggacgggctggacttccggcagtggtgcaatggtgatgattgcggtcgtgacgtcactggcaatgcgtttgccgaatccacgcatggtggcgatcgactttatctatgggacgctggccgcgctgccgttagggctgctctactttttggtgattatccctaatacccaacagagcatgttgctgctgtgtattagcctggcagtgctgggattcttcctcggtatagaagtacagaaacggcgactgggctcgatgggggcactggccagcaccataaatattatcgtgctggataacccgatgactttccatttcagtcagtttctcgacagcgcattagggcaaatcgtcggctgtgtgctcgcgttcaccgttattttgctggtgcgggataaatcgcgcgacaggactggacgtgtactgcttaatcagtttgtttctgccgctgtttccgcgatgactaccaatgtggcacgtcgtaaagagaaccacctcccggcactttatcagcagctgtttttgctgatgaataagttcccaggggatttgccgaaatttcgcctggcgctgacgatgattatcgcgcaccagcgcctgcgtgatgcgccgatcccggttaacgaggatttatcggcgtttcaccgacaaatgcgccgcacagcagaccatgtgatatctgcccgtagcgatgataaacgtcgtcggtactttggccagttgctggaagaactggaaatctaccaggaaaagctacgcatctggcaagcgccaccgcaggtgacggaaccggttcatcggctggcggggatgctccataagtatcaacatgcgttgaccgatagttaa

SEQ ID NO: 471776 - DNA, 933 bp, Shigella flexneri
gtgaaaacactaataagaaaattctcccgtacggccatcacggtcgtattagtcattctggccttcatcgcaatttttaatgcctgggtctattacaccgaatccccctggacgcgtgacgcgcgctttagcgctgacgtcgttgcgatcgcgccggacgtttctggactcattacccaggtgaatgttcatgataaccagctggtgaaaaaaggacagatactgttcaccatcgaccagccgcgctatcaaaaggcgcttgaggaagcgcaagccgatgttgcttattatcaggtactggcacaggagaaacgccaggaggccggacgtcgtaaccgtctcggtgtgcaggcgatgtctcgcgaagagatcgaccaggctaacaacgtactacaaacggttctgcatcagttagcgaaagcgcaggcgacccgcgatctggcaaaactggatcttgaacgcacggtgatccgagcgccagcagatggctgggtgaccaacctcaacgtctataccggtgagtttattactcgaggatcaacggcggttgcgctggtgaaacagaactccttctatgtactggcctatatggaagaaactaagctggaaggggtgcgtccggggtatcgtgcagagatcacgccgcttggcagtaacaaagtgctgaaagggactgttgatagtgttgccgctggggtcaccaacgccagcagcacgcgtgacgacaaagggatggcgaccatcgactctgaccttgaatgggtgcgtttggcgcaacgtgttccggttcgtattcgtctcgacaaccagcaagagaacatctggcctgcgggcaccactgctacagtggtggtcactggcaaacaagatcgcgacgaaagccaggattcgttcttccgtaaaatggcccatcgcctgcgtgagtttggttaa

SEQ ID NO: 471777 - DNA, 204 bp, Shigella flexneri
atgagtctgtttcccgttatcgtggtgtttgggctgtccttcccaccgatattttttgaattgcttttatcactggcgattttctggctggtgcgccgggtacttgtgccaacaggtatctacgactttgtctggcatccggcgttgttcaacaccgcgctctattgctgcttgttttatttgatatcgcgactgttcgtttga

SEQ ID NO: 471778 - DNA, 930 bp, Shigella flexneri
atggaacgactaaaacgcatgtcggtgtttgccaaagtagttgaatttggctcttttaccgccgccgccagacagctacagatgagcgtttcgtccatcagtcagacggtgtcaaaactggaagatgagttgcaggtaaagctgttaaaccgtagcacacgcagcattggcctgaccgaagccggtagaatttactaccagggctgccgtcgtatgcttcatgaagtgcaggatgttcatgagcaactgtatgccttcaataacacccccatcgggacgctacgcattggctgttcttcaactatggcacaaaatgttctcgccgggctgacagccaaaatgctgaaagaatacccaggtttgagcgccaatctggttaccggaattccagcccccgacctgattgccgacggtctggatgtggtgatccgcgtcggcgcgttgcaggattccagcctgttttcccgccgtcttggcgcgatgccaatggtggtgtgcgccgcgaaaagctatctcacacaatacggcataccggaaaaacccgccgatttaagtagccattcatggcttgaatacagcgtgcggcccgacaatgaatttgaactgattgcaccggaagggatctcgactcgcctgatcccgcaagggagatttgtgactaatgatccgatgacgctggtgcgctggctaacggcgggtgccgggatcgcctacgtgccgctgatgtgggtgatcaacgagatcaatcgtggggagctggagatcctgctgccgcgttatcagtcagatccacgcccggtttatgcgttatataccgaaaaagataagctgccgctgaaggtacaggtcgtgatcaactcgctgacggattattttgttgaggtcggtaaattgtttcaggagatgcacgggcgcgggaaagagaagtaa

SEQ ID NO: 471779 - DNA, 1446 bp, Shigella flexneri
atgagtctgaacctggtaagtgaacaattgctagcggcgaacggcctgaaacatcaggacttgttcgcgatcctcggtcaactggccgaacgtcgccttgattatggcgatctctattttcagtcgagctatcacgaatcctgggttttagaagaccgcattattaaagatggttcttacaacatcgatcagggcgttggcgtgcgtgcaatcagcggtgaaaaaaccggatttgcttacgctgaccaaatcagcctgctggcgctggaacagagtgcgcaagcggcgcgcaccatcgtccgtgatagtggtgatggcaaagtacagacgctgggcgcggtagagcatagcccgttgtatacctcggtagatccgctgcaaagcatgagccgtgaagagaagctggatatcctgcgtcgcgtcgataaggttgctcgcgaagcggacaagcgcgtacaggaagtgactgccagcctcagtggtgtctatgaattaattctggttgcggccaccgacggcacgctagcggcggatgtccgtccgctggtgcgtctttccgtgagcgttctggtcgaagaagatggcaaacgcgaacgcggtgccagtggcggcggcggtcgttttggttatgagttcttccttgccgatcttgacggcgaagtccgtgcggatgcatgggcaaaagaagcagtgcgtatggcgctggtcaatctttctgccgttgctgcaccagcgggcaccatgccggtagtacttggcgcaggttggccgggcgtgctgttgcatgaagcggtaggtcacggtctggaaggcgacttcaaccgccgtggcacttcagtatttagtggacaggtcggggagctggtggcttcagaactgtgtaccgtggttgatgacggcacgatggtcgatcgccgtggttcggtggcgattgatgatgaaggtacgccaggccagtacaacgtgctgattgagaacggcattctgaaaggctacatgcaggataaactcaacgcgcgtttgatggggatgacgccgactggcaacggtcgccgtgaatcctacgcccatctgcccatgccgcgtatgaccaacacctatatgctgccgggtaaatcgaccccgcaagaaattattgaatccgttgagtacggtatctatgcaccgaactttggtggcggtcaggtggatatcacctccggcaaattcgttttctccacttcagaagcatatctgattgaaaacggtaaagtaacgaagccggtgaaaggcgcaacgttgattggttccggtatcgaaaccatgcagcagatttcgatggttggcaacgacctgaaactggataacggcgtgggtgtctgcggtaaagaagggcaaagtttgccggttggcgtgggccagccaacgttgaaagtcgataacctgactgttggcggtactgcgtaa

SEQ ID NO: 471780 - DNA, 3801 bp, Shigella flexneri
gtgaggcgattgccggggattttactgcttactggagccgcgctcgttgtgatcgctgccctgctggttagcggcctgcgtattgctttaccgcatcttaacgcctggcgtccggaaatcctcaacaaaatagaatccgcgactggcatgccggtagaagccagtcagctctcagccagctggcagaattttggcccgacgcttgaagcacacgacatccgtgcagaactaaaagatggcggcgaattttcggttaaacgcgttactctggcgctggatgtctggcagagcctgttacatatgcgctggcagtttcgcgacctcactttctggcagctgcgctttcgcaccaacactcctatcaccagcggtggtagcgatgacagtctggaagccagtcacatcagcgatctgtttcttcgtcaatttgaccatttcgatctccgcgacagtgaagtcagttttctgacgccatccggtcagcgcgccgagctggcgatcccacaactcacctggctgaacgatccacgtcgacaccgtgcggaaggcctggtaagcctctccagccttaccggacagcacggcgtgatgcaggtgcgcatggatttgcgcgatgatgaggggttgttaagcaatggtcgcgtctggctacaggcggatgacatcgacctgaagccgtggctcggtaaatggatgcaggacaatattgctctggaaacggcacagttctcccttgaaggctggatgacgatcgacaaaggcgatgtaaccggcggtgacgtctggctgaaacagggcggtgccagctggttgggcgagaagcaaacgcatacgctgtcggtggataatctgaccgcgcatattacgcgtgaaaatccgggctggcagttctctattcccgatacacggatcacgatggacggcaaaccctggccgagcggagcattgacgctggcctggataccggaacaggacgttggcggcaaagacaataaacgcagtgacgaactccggattcgcgctagtaatctggagctggcaggcctggaggacatacgcccgctggccgcgaaactttcacctgcactgggtgatgtttggcgctccacacaaccgagcggcaagattaacactctggcgctggatatcccgcttcaggcggcagacaagacccgttttcaggcatcgtggagcgatctggcctggaagcaatggaaattattaccgggtgcggaacacttctccgggacgctttccggcagcgttgaaaatggtttgcttaccgcgtcgatgaagcaggcaaagatgccttacgaaacggtattccgtgcgccactggaaatcgccgacggccaggcaactataagctggctgaacaatgacaaaggtttccagctggatgggcgtaatattgacgttaaagccaaagccgtccatgcgcgcggcggttttcgttacctgcaacctgctaacgatgaaccctggctgggtattctggctggcatcagtaccgatgatggttcacaagcctggcgctatttcccggaaaacttgatgggtaaagacttggttgattatttaagtggtgcgattcagggcggtgaagcggataacgcgacgctggtttatggtggcaatccgcaactcttcccctataaacacaacgaaggtcagtttgaagtgctggtgccgctgcgcaacgcgaagtttgccttccagccggactggcctgcattaactaaccttgatattgaactggactttattaacgacggtttatggatgaaaaccgatggcgttaatctgggcggcgtgcgcgcgagtaatctcaccgcagtgatccctgactactcaaaagaaaaactgctgattgacgctgacattaaaggtccgggtaaagccgttggcccttactttgatgagacaccgctgaaagattctctgggtgcgaccctgcaagaactccagctcgacggcgatgtgaatgctcgcttacatcttgatatcccgctgaacggcgaactggtaaccgcgaaaggtgaagtgacgctgcgtaataacagtctgtttatcaaaccactcgacagcatcctgaaaaatttgagcggtaaattcagctttatcaatggcgatctgcaaagtgaaccactgacagcaagctggtttaatcagccgttgaacgtggatttttccaccaaagaaggggcaaaagcctaccaggttgcggtgaatctcaacggtaactggcaaccggcgaaaaccggcgttctgcctgaagcggtgaacgaagcattgagtggcagcgtggcgtgggatggtaaagtgggcattgatctgccttatcatgctggcgcgacctataacgtagagctgaacggcgatctgaataatgtgagtagtcacttaccttcaccgttagccaaacctgcgggtgaaccactagcggtaaacgttaaggttgatggcaatctcaacagctttgaattaaccggacaggctggtgcggataaccatttcaatagccgctggttgcttggtcaaaagctgacgctcgatcgtgctatttgggcggcagacagtaaaacgctcccgccgttgccggaacaaagtggcgttgaacttaatatgccgccgatgaatggtgccgagtggctggccctgttccagaaaggcgctgcggagagtgtcggtggtgcagcgagtttcccacaacacataacgttacgtacgcctatgttgtcactgggaaatcagcaatggaataacctgagtattgtttcgcaaccgacggcaaatggcaccctggttgaggcgcaagggcgtgaaatcaacgccacgctagcgatgcgtaataacgcgccgtggctggcgaatatcaaatatctttattacaacccgagcgtggcgaaaactcgtggtgattcaacgccgtcatcacctttcccgacaacggagcgcattaacttccgtggctggccggacgcacaaatacgatgcacagagtgctggttctgggggcaaaaattcggtcgcattgacagtgatatcaccatttctggcgatacgttaacgctgaccaatggactgattgatactggtttctcgcggcttactgccgatggtgaatgggttaataatccggggaatgaacgtacctcgctgaaaggaaaactgcgtgggcagaaaattgatgccgccgcagaattttttggtgtcacgacgcccatacgccagtcgtcatttaatgtggattacgatttacactggcgcaaagcaccctggcagccagatgaagcgacgttgaatggcatcattcatactcaactgggtaaaggcgaaattaccgaaatcaataccggacatgccgggcaattgctgcgcttattgagcgtagatgccctgatgcgtaagctgcgttttgatttcagagacacttttggcgaagggttctattttgactccattcgcagcaccgcgtggattaaagacggcgttatgcacaccgacgacacgctggtggatggcctggaggcggatatcgccatgaaagggtcggtaaatctggtacgccgcgacctgaatatggaagcggttgtcgcaccagagatttctgcgacggtgggcgtggctgcggcttttgcggttaaccccattgttggcgcggcagtgtttgccgccagtaaagtgctggggccgctgtggagcaaagtctccattttgcgctatcacatttcgggtccgctggacgatccgcaaatcaacgaagtgttgcgccaaccgcgtaaagaaaaagcgcaatga

SEQ ID NO: 471781 - DNA, 1470 bp, Shigella flexneri
atgacggctgaattgttagtaaacgtaacgccttcggaaacgcgagtggcgtatattgatggcggtattctgcaggaaattcatattgaacgtgaggcgcgacgcggaatagtaggcaatatctacaagggtcgtgtaagtcgtgtacttccgggtatgcaggcggcttttgtagatattgggctggataaagccgcgtttcttcatgcatccgacatcatgccgcataccgaatgtgtggcgggtgaagaacaaaagcaattcacggtgcgcgacatctcggaactggttcgtcaggggcaagatctgatggtgcaggtggtgaaagatccgcttggcactaaaggtgcgcgcctgaccaccgatatcacgctgccttctcgctatctggtatttatgccaggggcttctcacgttggggtttcccaacgaattgaaagcgaatcagaacgtgaacgtctgaaaaaagtggtcgcagagtattgcgacgagcagggcgggtttatcatccgcaccgcagcggaaggggttggcgaggctgaactggcctccgatgccgcttatctgaaacgcgtctggaccaaagttatggagcgtaaaaagcgcccgcagacccgttatcagctgtacggcgaactggcgctggcgcagcgtgttctgcgtgattttgccgacgccgaactggaccgcattcgcgttgactcacgcctgacttacgaagcattgctggagtttacctcggagtacattcccgagatgaccagcaagctggagcattacaccggacgccagccgattttcgatctctttgatgtcgaaaacgaaatccagcgagcgttggaacgcaaagtagaactgaaatccggtggttatctgattatcgaccagaccgaagcgatgaccaccgtggacatcaataccggagcgtttgtcggtcatcgcaatctggacgacactattttcaataccaatattgaagcgacgcaggctatcgctcgccagttacggttgcgtaatctgggcgggattatcattattgatttcatcgatatgaataatgaagatcaccgccgccgcgtgctgcattcgctggagcaggcgttgagcaaagaccgggtgaaaaccagcgttaatggtttttcggcgctggggctggtggagatgacgcgtaaacgcacccgcgaaagcattgagcacgtactgtgtaacgaatgcccaacctgccacggtcgcggaacggtgaaaaccgtggaaacggtatgctatgaaatcatgcgcgagattgttcgtgtccaccatgcttacgactccgaccgtttcctggtctatgcttctccggcagtagccgaagccttgaaaggcgaagagtcacactcgctggcggaagtggaaattttcgttggcaaacaggttaaagtacaaattgaaccgctctataaccaggagcagtttgacgtcgtaatgatgtaa

SEQ ID NO: 471782 - DNA, 594 bp, Shigella flexneri
atgacttctctgtatttagcttccggttctccgcgtcgtcaggagttacttgcgcaacttggcgtgacctttgaacgtattgttacgggcattgaggagcagcgtcagccgcaggagagcgcgcagcagtatgttgtgcgtctggcacgcgagaaagcacaggcgggtgtcgcgcaaacggcacaggatctcccggtgctgggtgcggatattatcgttatcctgaacggagaagtgctcgagaaaccgcgcgacgcagagcatgcggcgcagatgttgcgcaaattatcgggtcagacccatcaggtgatgacggcagtggcgttggccgacagccagcacattctcgattgcctggtggtcaccgatgtgactttcagaacgttaacagacgaagacatcgcgggctatgtcgccagcggtgaaccgttagataaagcaggtgcatacggtattcaggggctgggtggctgttttgtcaggaagataaatggcagctatcacgccgtagtcggcttaccgctggttgaaacgtatgaattattaagtaattttaacgcactgcgtgagaaaagggataaacatgacggctga

SEQ ID NO: 471783 - DNA, 489 bp, Shigella flexneri
gtggcgagctatcgtagccagggacgctgggtaatctggctctctttcctcattgcgctgttgctgcaaatcatgccctggccggataacctgattgttttccggccaaactgggtgttacttatcttgttgtattggatcctggccttgccccatcgcgtaaatgtgggcacaggttttgtgatgggtgccatactggatctgatcagcggctcgatgcttggcgtacgcgtattggcgatgagcatcattgcttacctggtggcgctgaaataccagcttttccgcaacctcgcattatggcagcaggcgctggtcgtcatgttgctttcgctggtggtggatattattgttttctgggcagagtttttagtgattaacgtctctttcagaccggaagtgttctggagtagtgtagtcaatggggtgctctggccgtggattttcttgctgatgcgtaaagtccgtcagcagtttgcagtgcaataa

SEQ ID NO: 471784 - DNA, 1104 bp, Shigella flexneri
atgaagccaatttttagccgtggcccgtcgctacagattcgccttattctggcggtgctggtggcgctcggcattattattgccgacagccgcctggggacgttcagtcaaatccgtacttatatggataccgccgtcagtcctttctactttgtttccaatgctcctcgtgaattgctggatggcatatcgcagacgctggcctcgcgtgaccaactagaacttgaaaaccgggcgttacgtcaggaactgttgctgaaaaacagtgaactgctgatgcttggacaatacaaacaggagaacgcgcgtctgcgcgagctgctgggttccccgctgcgtcaggatgagcagaaaatggtgactcaggttatctccacggttaacgatccttatagcgatcaagttgttatcgataaaggtagcgttaatggcgtttatgaaggccagccggtcatcagcgacaaaggtgttgttggtcaggtggtggccgtcgctaaactgaccagtcgcgtgctgctgatttgtgatgcgacccacgcgctgccaatccaggtgctgcgcaacgatatccgcgtaattgcagccggtaacggttgtacggatgatttgcagcttgagcatctgccagcgaatacggatattcgtgttggtgatgtgctggtgacctccggtctgggcggtcgtttcccggaaggctatccggtcgcggttgtctcttccgtaaaactcgatacccagcgcgcttatactgtgatccaggcgcgtccgactgcaggactgcaacgtttgcgttatctgctgctgctgtggggcgcggatcgtaacggcgctaacccgatgacgccggaagaggtgcatcgtgttgctaatgaacgtctgatgcagatgatgccgcaggtattgccttcgccagacgcgatggggccaaagttacctgaaccggcaacggggatcgctcagccgactccgcagcaaccggcgacaggaaatgcagctactgcgcctgttgcgccgacacagcccgctgctaatcgctctccacaaagggctacgccgccgcaaagtggtgctcaaccgcctgcgcgtgcgccgggagggcaatag

SEQ ID NO: 471785 - DNA, 1044 bp, Shigella flexneri
atgttgaaaaaatttcgtggcatgttttccaatgacttgtccattgacctgggtactgcgaataccctcatttatgtaaaaggacaaggcatcgtattgaatgagccttccgtggtggccattcgtcaggatcgtgccggttcaccgaaaagcgtagctgcagtaggtcatgacgcgaagcagatgctgggccgtacgccgggcaatattgctgccattcgcccaatgaaagacggcgttatcgccgacttcttcgtgactgaaaaaatgctccagcacttcatcaaacaagtgcacagcaacagctttatgcgtccaagcccgcgcgttctggtttgtgtaccggttggcgcgacccaggttgaacgccgcgcaattcgtgaatccgcgcagggcgctggtgcccgtgaagtcttcctgattgaagaaccgatggctgccgcaattggtgctggcctgccggtttctgaagcgaccggttctatggtggttgatatcggtggtggtaccactgaagttgctgttatctccttgaacggcgtggtttactcctcttccgtgcgcattggtggtgatcgtttcgacgaagctatcatcaactatgtgcgtcgtaattacggttctctgatcggtgaagccaccgcagaacgtatcaagcacgaaatcggttcggcttacccgggcgatgaagtccgtgaaatcgaagttcgtggccgtaacctggcagaaggtgttccacgcggttttaccctgaactccaacgaaatcctcgaagcactgcaggaaccgctgaccggtattgtgagcgcggtaatggttgcactggaacagtgcccgccggaactggcttccgacatctccgagcgcggcatggtgctcaccggtggtggcgcactgctgcgtaaccttgaccgtttgttaatggaagaaaccggcattccagtcgttgttgctgaagacccgctgacctgtgtggcgcgcggtggcggcaaagcgctggaaatgatcgacatgcacggcggcgacctgttcagcgaagagtaa

SEQ ID NO: 471786 - DNA, 1941 bp, Shigella flexneri
atgagattaacgacgaaattttcggcctttgttacgctgctcaccgggttaacaatttttgtgactttgctgggctgttcgctaagtttctacaacgccattcagtataagtttagtcatcgcgttcaggcggtggcgacggcgattgatacccaccttgtgtcgaatgacttcagcgcattaaggccacaaattaccgaattaatggtgtcagcagatatcgttcgtgtagacctgctgcatggtgataaacaggtttataccctggccagaaatggtagttatcgtccggttggcaccagcgatctgtttcgtgaactgagcgttccgttgataaagcatccggggatgtcgttgcgtctggtttatcaggatccgatgggcaactatttccattcgttgatgaccaccgcgccgctcacgggggcgattggctttatcattcttatgctctttctggcggtacgctggttacaacggcaacttgccgggcaagaattgctggaaacccgggctactcgtatcttaaacggtgagcgtggctctaatgtgttgggaaccatctatgaatggccgcccagaaccagcagtgcgctggatacgctgcttcgtgaaattcagaacgcacgcgaacaacacagccgtcttgatacgctgatccgctcttatgccgcacaggacgtgaaaaccggcctcaataaccgactctttttcgataatcagttagcaacgttactggaagatcaggagaaagtaggtacccacgggatcgtgatgatgattcgtctgccggatttcaatatgttgagcgatacctgggggcacagccaggttgaagaacagttcttcactctgacgaatctgctgtcgacatttatgatgcgctaccctggcgcactgctggcgcgttaccaccgcagtgattttgctgcgctgttaccgcaccggacgttaaaagaggcagagagcatagccagtcagttaatcaaagccgtcgataccttgccgaacaataaaatgctcgatcgcgacgatatgatccacattggtatctgtgcctggcgtagtggtcaggataccgagcaggtaatggaacatgcagagtctgccacgcgtaatgcgggattgcagggtggcaatagctgggctatttatgatgactcgttgcctgaaaaaggacgcggtaatgttcgctggcgtacgcttatcgagcaaatgctcagtcgcggcggcccgcgcctttatcaaaaaccggcggttactcgcgaaggtcaggttcatcatcgcgaactcatgtgccgcatcttcgatggtaatgaagaggttagctcggcggagtatatgccgatggtcttgcagtttggcttatcggaagagtatgaccgtctgcaaatcagccgtcttattccactattgcgttactggccagaggaaaatctggcgattcaggttaccgttgagtcgctgattcgtccgcgttttcagcgttggctgcgcgatacgttaatgcaatgtgaaaaatcacaacgaaaacgcataattattgaacttgcagaggccgatgtaggtcaacatatcagtcgtttacaacctgttattcgtttagtgaatgctttaggggtacgggtagccgtcaaccaggctggtttgacgctggtaagcaccagttggatcaaagaacttaatgttgagttactcaagctccatccggggctggtcaggaacattgagaagcgaacggagaaccagctgctggttcaaagcctggtggaagcctgctccgggaccagcacccacgtttacgccaccggcgtgcgttcgcgaagcgagtggcagaccctgattcagcgcggtgttacaggcgggcaaggggattttttcgcgtcctcacagccacttgatactaacgtgaaaaaatattcacaaagatactcggtttaa

SEQ ID NO: 471787 - DNA, 975 bp, Shigella flexneri
atgcaggcgttacttttagaacagcaggacggcaaaactctcgcatcagtacagactctggacgaacgtcgcctgccggagggcgatgtcacggtcgatgttcactggtcgagcctgaactataaagatgcgctggcgattaccggtaagggaaaaatcatccgtaattttccgatgattcctgggatcgattttgccggaactgtacgcaccagcgaagatccgcgttttcatgccggtcaggaggtgttactcactggctggggcgttggtgaaaaccactggggtgggctggcggagcaggcgcgagtgaaaggtgactggctggttgccatgccgcaagggctggacgcgcgtaaagcaatgattatcggtactgccggttttaccgccatgctgtgtgtgatggcgctggaagatgccggtgttcgcccgcaggacggggagattgtcgtgacgggtgccagtggtggcgtcggcagtaccgccgtggcgctgctgcataagttgggttatcaggtcgttgccgtttccggtcgcgaaagtacccatgaatatctgaaaagtttaggtgccagcggtattctccctcgtgatgagtttgccgaatcccgtcctctggaaaaacaagtctgggctggggcaattgacactgttggcgacaaagtgctggcaaaagtgctggcgcaaatgaattacggcggctgcgtggcggcctgtggtctggcgggtggttttactctgccaaccacggtcatgccatttattctgcgtaatgtccgtttgcaaggggtggattcagtaatgacgccaccagaacgccgcgcacaagcctggcagcgactggtcgccgatttaccggaatcattctatacccaggcggcaaaagagatatctctgtcagaggcaccgaactttgccgaggccatcattaataaccagatccagggtcgcacgctggtgaaggttaactaa

SEQ ID NO: 471788 - DNA, 162 bp, Shigella flexneri; identical to SEQ ID NO: 24533

SEQ ID NO: 471789 - DNA, 471 bp, Shigella flexneri; identical to SEQ ID NO: 1037

SEQ ID NO: 471790 - DNA, 1350 bp, Shigella flexneri
atgctggataaaattgttattgccaaccgcggcgagattgcattgcgtattcttcgtgcctgtaaagaactgggcatcaagactgtcgctgtgcactccagcacggatcgcgatctaaaacacgtattactggcagatgaaacggtctgtattggccctgctccgtcagtaaaaagttatctgaacatcccggcaatcatcagcgccgctgaaatcaccggcgcagtagcaatccatccgggttacggcttcctctccgagaacgccaactttgccgagcaggttgaacgctccggctttatcttcatcggcccgaaagcagaaaccattcgcctgatgggcgacaaagtatccgcaatcgcggcgatgaaaaaagcgggcgttccttgcgtacctggttctgacggcccgctgggcgacgatatggataaaaaccgcgccattgctaaacgcattggttatccggtgattatcaaagcctccggcggcggcggcggtcgcggtatgcgcgtagtgcgcggcgacgctgaactggcacaatccatctccatgacccgtgcggaagcgaaagctgctttcagcaacgatatggtttacatggagaaatacctggagaatcctcgccacgtcgagattcaggtactggctgacggtcagggcaacgctatctatctggcggaacgtgactgctccatgcagcgccgccaccagaaagtggtcgaagaagcaccagcaccgggcattaccccggaactgcgtcgctacatcggcgaacgttgcgctaaagcgtgtgttgatatcggctatcgcggtgcaggtactttcgagttcctgttcgaaaacggcgagttctatttcatcgaaatgaacacccgtattcaggtagaacacccggttacagaaatgatcaccggcgttgacctgatcaaagaacagctgcgtatcgctgccggtcaaccgctgtcgatcaagcaagaagaagttcacgttcgcggccatgcggtggaatgtcgtatcaacgccgaagatccgaacaccttcctgccaagcccaggcaaaatcacccgtttccacgcacctggcggttttggcgtacgttgggagtctcatatctacgcgggctacaccgtaccgccgtactatgactcaatgatcggtaagctgatttgctacggtgaaaaccgtgacgtggcgattgcccgcatgaagaatgcgctgcaggagctgatcatcgacggtatcaaaaccaacgttgatctgcagatccgcatcatgaatgacgagaacttccagcatggtggcactaacatccactatctggagaaaaaactcggtcttcaggaaaaataa

SEQ ID NO: 471791 - DNA, 243 bp, Shigella flexneri
atggacactcgttttgttcaggcccataaagaggcgcgctgggcgctggggctgacccttttgtatctggcagtttggttagtagacgcttacttacctggcgttgcccccggttttaccggctttccgcgctggtttgagatggcctgcatcctgacgccgctactgtttattggactgtgctgggcgatggtgaaatttatctatcgcgatatcccactggaggatgacgatgcagcttga

SEQ ID NO: 471792 - DNA, 1452 bp, Shigella flexneri
atgcagcttgaagtaattctaccgctggtcgcctatctggtggtggtgttcggtatctcggtttatgcgatgcgtaaacggagcaccggcaccttccttaatgagtatttcctcggcagccgctctatgggcggtattgtgctggcgatgacgctcaccgcgacctatatcagtgccagttcgtttatcggcgggccaggagctgcttataaatacgggctgggctgggtattgctggcgatgattcagcttcctgctgtctggctttcactcggtattctcggcaagaagtttgcgattcttgcgcgccgctacaatgcagtgacgctgaacgatatgctgtttgcccgctaccagagtcgtcttctggtgtggctggcgagtttgagtttgctggttgcgttcgttggtgcgatgaccgtgcagtttatcggcggtgcgcgcctgctggaaaccgcggcgggtattccttatgaaaccgggctgctgatttttggtatcagcattgcgttatataccgcctttggtggctttcgcgccagcgtgctgaacgacaccatgcaagggcttgtgatgctgattggcaccgttgtgctgcttattggcgtggtacatgccgctggcggcttaagcaacgcagtacagaccttgcaaaccatcgatccgcaactggttacgccacaaggcgctgacgatattctgtcgcctgcctttatgacgtcgttctgggtactggtgtgctttggcgtgattggcctgccgcatactgcggtgcgctgtatctcttataaagacagcaaagcagtacaccgggggatcatcatcggtacgattatagtcgcaatcctgatgttcggtatgcacctggccggagcgttaggtcgtgcagtgatccccgatctcaccgtaccggatctggtgatcccgacgttaatggtaaaagtgctgccaccttttgctgccgggatctttctggctgcacctatggctgcgatcatgtcgacaattaacgcccaactgctgcaaagttccgctacgatcattaaagatctctatctgaatatccgtccggatcaaatgcaaaacgagacgcgtctgaagcggatgtcggcggtaattacgttagttctcggcgcgttgctgctgcttgccgcctggaagccgccagaaatgatcatctggctgaatttgctggccttcggtgggctggaagccgttttcctgtggccgctggtgctgggtctttactgggaacgcgccaacgccaaaggcgcgctaagtgcgatgatcgttggcggcgtgctgtatgccgtactcgcgacgctgaatattcagtacctgggcttccaccctatcgtgccctcgttactactaagtttgctggctttcctggtcggaaaccgtttcggtacatccgtcccgcaagctaccgttttgactactgataaataa

SEQ ID NO: 471793 - DNA, 882 bp, Shigella flexneri
atgccttggatccaactgaaactgaacaccaccggcgcgaacgcggaagatcttagcgatgcgctgatggaagcgggtgccgtttctatcacttttcaggatacccacgatacgccagtatttgagccgctgccgggcgaaacgcgcctgtggggcgacaccgatgtgattggtctgttcgacgctgaaaccgatatgaacgacgtggtggcgattctggaaaaccatccgctgctcggcgcaggcttcgcgcataaaatcgaacaactagaagataaagactgggagcgcgaatggatggataatttccacccgatgcgctttggtgaacgactgtggatctgccctagctggcgtgatgtgccggacgaaaacgccgtcaacgtgatgttagatccagggctggcgtttggtacgggtacccatccaaccacctctctgtgcctgcaatggctcgacagcctcgatttaaccggtaaaacagtcatcgactttggctgtggttccggcattctggcgatcgcggcgctgaaactgggtgcagcaaaagccattggtattgatatcgatccgcaggcgattcaggccagccgcgataacgccgaacgtaatggcgtttctgaccgtctggaactctacttaccgaaagatcagccagaagaaatgaaagccgacgtggtggtcgctaacatccttgcaggcccattacgtgaactggcaccgttaatcagcgtcctgccggtttcaggcggtttgctgggcctttccggtattctggcaagccaggcagagagcgtttgtgaagcttatgccgatagcttcgcactggacccggtcgtggaaaaagaagagtggtgccgtattaccggtcgtaagaattga

SEQ ID NO: 471794 - DNA, 966 bp, Shigella flexneri
atgcgcatcggacaatatcagctcagaaatcgcctgatcgcagcgcccatggctggcattacagacagaccttttcggacgttgtgctacgagatgggagccggattgacagtatccgagatgatgtcttctaacccacaggtttgggaaagcgacaaatctcgtttacggatggtgcacattgatgaacccggtattcgcaccgtgcaaattgctggtagcgctccgaaagaaatggcagatgcagcacgtattaacgtggaaagcggtgcccagattattgatatcaatatgggttgcccggctaaaaaagtgaatcgcaagctcgcaggttcagccctcttgcagtacccggatgtcgttaaatcgatccttaccgaggtcgtcaatgcagtggacgttcctgttaccctgaagattcgcaccggctgggcaccggaacaccgtaactgcgaagagattgcccaactggctgaagactgtggcattcaggctctgaccattcatggccgtacacgcgcctgtttgttcaatggagaagctgagtacgacagtattcgggcagttaagcagaaagtttccattccggttatcgcgaatggcgacattactgacccgcttaaagccagagctgtgctcgactatacaggggcggatgccctgatgataggccgcgcagctcagggaagaccctggatctttcgggaaatccagcattatctggacactggggagttgctgcccccactgcctttggcagaggttaagcgcttgctttgcgcgcacgttcgggaactgcatgacttttatggtccggcaaaagggtaccgaattgcacgtaaacacgtttcctggtatctccaggaacacgctccaaatgaccagtttcggcgcacattcaacgccattgaggatgccagcgaacagctggaggcgttggaggcatacttcgaaaattttgcgtaa

SEQ ID NO: 471795 - DNA, 297 bp, Shigella flexneri; identical to SEQ ID NO: 459552

SEQ ID NO: 471796 - DNA, 885 bp, Shigella flexneri
atgagaacaggatgtgaaccgacccggtttggtaatgaagctaagaccattattcacggtgatgcctttgccgaacttaaaaagctacctactgaaagcgtcgatctgctctttgccgacccaccgtataacatcggtaaaaattttgatggtctgatcgaagcctggaaagaagatctgtttatcgactggctgtttgaagtgattgcagagtgccaccgcgttctgaaaaagcagggcagcatgtacattatgaacagtacggaaaacatgccctttatcgatctccagtgccgcaagctttttaccatcaaaagtcgcatcgtctggtcatatgacagttctggagtacaggcgaaaaaacactacggctccatgtacgaacccatcctgatgatggtgaaagacgcaaagaactacacattcaacggtgatgctattctggtagaagccaaaaccggatcgcagcgcgcgttgatcgattatcgcaaaaatcctccacagccatacaatcatcaaaaagtaccgggtaacgtctgggattttccgcgcgtgcgttatttgatggatgaatatgagaaccacccgacgcaaaaaccgaaagccttactgaaacgcattattctcgcctcttccaacccaggcgatatcgttctcgacccgtttgccggtagctttactaccggtgccgtagccatcgccagcggacgaaaattcattggtattgagatcaacagcgagtacatcaaaatggggcttcgacggctggatgtcgcgtcgcattactccgcggaagaactggcgaaagtgaaaaaaagaaagaccggcaacctgtcaaaacgaagccggttaagcgaagttgaccccgatctcattgcaaagtaa

SEQ ID NO: 471797 - DNA, 201 bp, Shigella flexneri
atgattcgcaagtattggtggctcgtcgttttcgctgtcttcgtttttctgtttgatactttactgatgcagtggattgaactgctgacaacagaaacagacaaatgccgtaatatgaactcagttaatccactaaaactggttaactgtgacgaactgaattttcaggacagaatgtgggtaatgactccaacttactga

SEQ ID NO: 471798 - DNA, 696 bp, Shigella flexneri
atgttcagaaaattagcagctgaatgttttggtactttctggcttgtttttggtggctgtggtagtgctgtactggccgcaggcttcccggaattaggcattggttttgccggcgtggcgctggcatttggtttgaccgttctgacgatggccttcgctgttggtcatatttctggtggtcattttaacccggcggtcactattggtttatgggctggcggacgttttccggcaaaagaagtcgttggctacgtaattgcccaggttgtcggcggtattgttgcagcggcgctgctgtatttaattgccagtggtaaaacgggttttgacgcggcagccagcggttttgcttctaacggttatggcgagcattcaccaggcggttattccatgctttccgcgctggtagttgaactggtattgagtgcgggcttcctgttagtgatccacggtgcaaccgacaaattcgctccggcaggttttgcgccgatcgctattggtctggccttaaccctgattcacttaatcagtattccggtgactaacacttctgttaacccggcgcgcagcaccgcggttgctatcttccagggcggctgggcattagaacaactgtggttcttctgggtggtgccaattgtcggcggcattatcggtggtctgatttaccggactctgctggaaaagcgtgattaa

SEQ ID NO: 471799 - DNA, 900 bp, Shigella flexneri
atgttttctgggctgttaatcattctggttcccctgattgtgggttacctcattccgcttcgccaacaagctgcgttaaaagctattaatcagctattaagctggatggtttaccttattctcttttttatgggtatcagtctggcgtttctcgataacctcgccagtaacctgttggcgattctgcattattctgccgtcagtattaccgttattttactgtgtaatattgccgccctgatgtggctggagcgaggcctgccgtggcgcaaccaccatcagcaagaaaaactcccgtcgcgtattgcgatggcgctggagtcgctaaaactgtgcggcgtagtagtgattggttttgccattggtctgagtggactggctttcttacaacacgcgaccgaagccagtgaatacacgttaattttgctacttttcctcgttggtattcagttgcgcaataatggcatgaccttaaagcagattgtccttaatcgccggggaatgattgtcgccgtggtggtggttgtcagttcattaattggtggtttaattaacgcctttattcttgatctccccatcaataccgcgctggcaatggcctccggtttcggctggtattctctttccggtattttattgaccgaatcttttggtccggtaatcgggagcgcggcgttttttaatgatctggcccgtgaactgattgctattatgttgatccctgggctgattcgccgcagccgctctactgcactgggcttatgcggtgccacatcaatggatttcaccctgcccgttcttcaacgtactggcgggctggatatggtcccggcggcaattgttcacggttttattcttagcctgttagtgccgatcctcatcgcctttttctctgcgtaa

SEQ ID NO: 471800 - DNA, 1653 bp, Shigella flexneri
atgttttgtgtgcaatgtgaacaaactatccgtactccggcagaaaacggctgctcatacgcgcaggggatgtgtggtaaaacggcggaaacttctgaccttcaggatttactcatcgcggcgctgcaagggctttctgcctgggcggtaaaagcgcgtgaatacggcatcatcaaccacgatgttgacagcttcgcgccacgtgcctttttctcaaccctgaccaacgttaacttcgattctccgcgtattgtcggctacgctcgtgaagcgattgccttgcgcgaggcgctgaaagcacaatgcctggctgtagatgccaacgcgcgcgtcgataacccgatggctgacctgcaactggtgagcgatgatctcggcgagctgcaacgtcaggcagcagaatttacccctaacaaagataaagcggcgattggcgaaaacattctcggcctgcgtctgctgtgcctgtatggcctgaaaggtgcggcggcctatatggaacacgcgcatgttctcggtcaatacgacaacgatatttatgcccagtaccataaaatcatggcgtggctggggacctggcctgccgatatgaacgcgcttcttgagtgttcaatggaaatcggccagatgaacttcaaagtgatgagcattctggatgcaggcgaaaccggtaaatacggtcacccgacgccaacccaggtcaacgtcaaagcgacggcgggtaaatgcattctgatttccggtcacgatctcaaagatctctacaacctgctggaacagaccgaaggcacgggcgttaatgtctacacccacggcgaaatgctgcctgcgcatggctacccggagctgcgtaaattcaagcatctggtcggtaactacggcagcggctggcagaatcagcaagtggagttcgctcgtttccctggccccatcgtgatgacctcgaactgcatcatcgacccaaccgtaggcgcttatgacgatcgtatctggacccgcagcatcgttggctggcctggcgtgcgtcatctggatggcgaagatttctctgcggtcatcgcccaggcgcaacaaatggcgggcttcccgtacagcgaaattcctcacctgatcaccgtgggctttggtcgccagacgctgcttggtgcagccgatacgctgattgatctggttagccgtgaaaaactgcgtcatatcttcctgcttggtggctgtgacggcgcacgcggcgagcgccactacttcaccgatttcgccaccagcgtgccggatgactgcctgatcctgaccctcgcctgtggtaaatatcgctttaacaaacttgagtttggcgatatcgaaggtctgccgcgtctggtagatgcaggtcaatgtaacgatgcttactcagcaattattctggctgtcactctggcagagaaactgggctgtggtgtgaacgatctgccgctgtcgctggtgctctcctggtttgaacagaaagcgattgtcattctgctgacgctgctttctctgggcgtgaaaaatatcgtcaccggcccgactgcacctggtttcctgacaccagacctgctggcggtgctgaacgagaaattcggcctgcgttctatcaccactgttgaagaagacatgaagcaactgttgaacgcgtaa

SEQ ID NO: 471801 - DNA, 969 bp, Shigella flexneri
atgacgatgccaacgaatcaatgcccgtggcggatacaggttcatcacattacgcaagaaacgccggatgtgtggacgatttccctgatttgccacgatcactacccatatcgcgccgggcaatatgcactggtcagcgtgcgaaactcagcggaaacgctgcgtgcttacaccatttcctccacgccaggcgtgagtgaatatatcaccctgaccgtgcggcggattgatgacggtgtcggctcccagtggctgacgcgcgatgtaaaacgcggtgattatctctggctttcggacgcgatgggggaatttacctgcgacgataaagcagaagataaattcctgttgctggcggcaggctgcggcgtcacgccgattatgtcgatgcgtcgctggcttgcgaagaaccgtccacaggccgatgtgcgggtgatctacaacgtgcgtacgccgcaggatgttattttcgccgatgagtggcgtaactatccggtaacgctggtggcagaaaataacgttaccgaaggctttatcgctggtcgtctcactcgcgaactgctggcagatgtacctgacttagcttcacgtaccgtgatgacctgcggcccggctccgtatatggattgggtagagcaggaagtgaaagcgctcggcgtgacgcgtttctttaaagagaaattcttcaccccagtagcagaagcggcgaccagcggtctgaaattcaccaaactgcaaccggcacgagaattttacgccccggttggcaccacgctactggaggcgctggaaagcaataacgttccggttgtcgctgcctgccgtgcgggtgtttgcggctgctgtaagacaaaagtggtttccggtgaatatacggtgagcagtacaatgacgctgaccgacgccgaaatcgctgaaggttacgtactggcctgctcctgccatccgcagggggatttggttctcgcataa

SEQ ID NO: 471802 - DNA, 1719 bp, Shigella flexneri
atgaaacaaacggttgcagcttatatcgccaaaacactcgaatcggcaggcgtgaaacgcatctggggagtcacgggcgactctctgaacggtcttagcgacagtcttaatcgcatgggcaccatcgagtggatgtccacccgccatgaagaagtggcggcgtttgccgctggcgctgaagcacaactttcaggagaactggcggtctgtgccggatcgtgcggcccaggcaacctgcacttgatcaacggcctattcgattgccaccgcaataacgttccggtactggcgattgccgctcatattccctccagcgaaattggcagcggctatttccaggaaacccacccacaagagctattccgcgaatgtagtcactattgcgagctggtttccagcccggagcagatcccacaagtgctggcaattgctatgcgcaaagcggtgcttaaccgtggcgtttccgttgttgtattaccgggcgacgtggcgttaaaacctgcgccagaaggggcaaccacgcactggtatcatgcgccacagccagtcgtgatgccggaagaagaagagttacgcaaactggcgcaactgctgcgttattccagcaatatcgccctgatgtgtggcagcggctgcgcgggggcgcataaagagttagttgagtttgccgggaaaattaaagcacctattgttcatgccctacgcggtaaagagcatgtcgaatacgataatccgtatgatgttggaatgaccgggttaatcggattctcgtcaggtttccataccatgatgaacgccgacacgttagtgctactcggtactcagttcccctaccgtgcgttctacccgaccgatgccaaaattattcagattgatattaatccagccagcatcggcgcgcatagcaaggtagatatggcgctggtcggcgatatcaaatcaaccctgcgcgcattgctgccactggtggaagaaaaaaccgatcgcaagtttctggataaagcgctggaagattaccgcgatgcccgcaaagggctggacgatttagctaaaccgagcgagaaagccattcacccgcaatatctggcgcagcaaattagtcattttgccgccgatgacgccatctttacctgtgacgtcggcacgccaacggtatgggcggcacgttatctgaaaatgaacggcaagcgtcgcctgttaggttcgtttaaccacggttcgatggctaacgccatgccgcaggcgttgggtgcgcaggcaaccgagccggaacgtcaggtggtcgccatgtgcggcgatggcggttttagcatgttgatgggcgatttcctctcagtagtgcagatgaaactgccggtgaaaattatcgtctttaataacagcgtgctgggctttgtggcgatggagatgaaggccggaggttacctgacagacggtactgagctgcacgacaccaactttgcccgcattgccgaagcgtgcggcattacgggtatccgtgtagaaaaagcctctgaagttgatgaagccctgcaacgcgccttctctatcgacggtccggtgttggtggatgtggtggtcgccaaagaagaattagccattccaccgcagatcaaactcgaacaggccaaaggttttagcctgtatatgttgcgcgcaattatcagcggacgcggcgatgaagtgatcgaactggcgaaaacgaactggctaaggtaa

SEQ ID NO: 471803 - DNA, 1002 bp, Shigella flexneri
atgattgatttacgcagtgataccgttacccgaccgagccgcgccatgctcgaagcgatgatggccgccccggttggggacgacgtttacggagacgaccctaccgttaatgctctgcaggactatgcagcagagctttccggtaaagaagccgccatttttctgcctaccggcactcaggccaacctggtcgctctgctcagtcactgcgaacgtggcgaagagtatattgtcggtcaggccgcgcataactatctgtttgaagccggtggcgcagcggtgctgggcagtattcagccgcaacccatcgacgcggctgccgacggcacgctaccgctggataaagtggcgatgaaaatcaaacccgacgatatccatttcgcccgcaccaaattactcagtctggaaaacacccacaacggcaaagtgctgccgcgtgaatacctgaaagaagcatgggaatttacccgcgagcgcaatctggcgctgcatgttgacggtgcgcgcatctttaatgccgtggtggcttacggctgcgaactgaaagagatcacgcaatattgtgattcgttcaccatttgcctgtcgaaaggtcttgggacgccagtcggttcattactcgtcggtaatcgtgattacattaaacgtgccatccgctggcggaaaatggccggtggcgggatgcgtcagtccgggattctggctgccgccgggatgtatgccctgaaaaataacgtcgcacggttgcaggaagatcacgacaacgccgcctggatggcggagcaactgcgtgaagcaggcgcggatgtgatgcgtcaggacactaatatgctgtttgttcgcgtcggggaagaaaatgctgccgcgttaggcgaatacatgaaagcgagaaacgtgctgattaacgcctcgccgattgtccgcctggtgacgcatcttgacgtctcgcgcgaacaactggcggaagtcgccgcccactggcgcgcattcctggcgcgttaa

SEQ ID NO: 471804 - DNA, 1431 bp, Shigella flexneri
gtgccgcaacgcattttagttctcggtgccagtggctacattggtcagcatctggtgcgcacactcagccagcaagggcatcagatcctagcggcggcacgtcatgtcgacaggcttgcaaagctgcaactggcaaacgtcagttgccataaagtcgatctcagctggccggataaccttccggccctgttgcaggatatcgataccgtctattttctggtgcacagcatgggcgaaggcggcgattttatcgctcaggagcgccagctggctctcaacgtccgcgatgcgctacgtgaagtaccagttaagcaattaatctttctcagttcgttgcaggccccgccacatgagcagtcggatcatctgcgagctcgtcaggctacggcggacattcttcgtgaagcgaatgtaccagtgaccgaacttcgggccggaattatcgttggcgcaggttcagcggcgttcgaagtcatgcgcgatatggtctacaacctgccagtgttaacgccgccacgctgggtacgttcacgcaccacgcccatcgcgctggaaaacttgctgcactatctggtggcgctgttagaccatccagccaacgaacaccgcatcttcgaagccgccggaccagaggtgctcagttatcagcaacagtttgaacattttatggcggtgagcggtaagcgccgctggttgatccccatccccctccccacccgctggatttcggtgtggtttctcaatgtgattacttccgtaccgcccaccaccgccagggcgttgattcaggggctgaaacacgatctgctggcagatgataccgcgctacgtgcactcatcccacaacggctgatcgctttcgatgacgcggtacgtagcacgttgaaagaggaagaaaaactggtcaactccagcgactggggctacgacgctcaggcctttgcccgctggcgaccggagtacggttatttcgccaaacaggcggggtttaccgttaaaacgtccgccagccttgcggctttatggctggtggtgaaccaaatcggcggtaaagagcgttatttctttggcaatattttgtggcagacacgggcgttgatggaccgcgcgatcggtcataatctggcgaaaggccgcccggagcgcgaatatttacagaccggcgatgcggtggatagctggaaagtgattgtcgttgaaccgaaaaagcaacttacgttgttatttggcatgaaagcgccggggctgggacgactgtgttttaccctggaagataaaggtgactatcgtactatcgatgtccgcgctttctggcatccgcacggtatgccggggctgttttactggttattgatgatccccgcgcatctgtttatttttcgcggaatggcaaaacaaatcgccagactggcagaacaaagcacagattaa

SEQ ID NO: 471805 - DNA, 1014 bp, Shigella flexneri
atgaaggtactggttaccggcgccaccagcggcttaggtcgaaacgcggtagagtttttatgccagaaaggcatcagcgtgcgtgcgagcggtcgcaacgaagcaatgggtaaattgctggaaaaaatgggcgcagagtttgttccgacggatctgaccgagctggtttcatcacaagctaaagtgatgctcgcgggcattgatacgctgtggcactgctccagctttacctcaccctgggggacacaacaggctttcgatctggctaacgttcgcgccactcgccgcctgggtgaatgggctgtcgcctggggtgtgcgtaactttattcatatctcttccccctccctgtacttcgattatcaccaccatcgcaatattaaagaagattttcgccctcaccgcttcgccaacgagtttgcccgcagcaaagcagccagcgaagaagtgatcaatatgctttcgcaggcgaatccacaaacgcgctttactattctgcgcccacaaagtctgttcggaccgcacgataaagtctttattccccgtctggcgcatatgatgcaccactacggcagtattctgttaccgcatggcggcagtgcgctggtcgatatgacctactatgaaaatgccgtgcacgcaatgtggctggcaagccaggaagcctgcgataagctaccttccgggcgtgtgtacaacatcaccaacggcgagcatcgcacactgcgcagcatcgtgcagaagctgatcgacgagttgaatattgactgtcgtattcgttccgtcccttacccgatgctggatatgatcgcccgcagcatggagcgtttaggccgcaagtcagcaaaagagccgccgctgacccactacggcgtctccaagttgaattttgactttacgctggatattacgcgtgcgcaggaagagttaggttatcagccggtcatcaccctggatgaaggcatcgagaaaactgccgcctggctacgcgaccacggaaaactgccgcgctaa

SEQ ID NO: 471806 - DNA, 831 bp, Shigella flexneri
atgagaagagtcttctggctggtcgctgccgctctgttactggcagggtgtgcaggcgaaaaaggcattgtcgagaaagagggatatcagcttgatacccgacaccaggcgcaggcggcgtatccgcgcattaaagtgctggtgatccactacaccgcagatgattttgatagctcgctggcgacactgactgataagcaggtcagctcgcattatctgatccctgcggtgccaccgcgatacaacggtaaaccgcgcatctggcaactggtgccggaacaagaactggcctggcatgcggggattagcgcctggcgcggggcaacgcgccttaacgacacctctattggcattgagctggaaaaccgtggctggcaaaaatcatccggagtgaaatattttgccccgtttgaacaggcacagattcaggcgcttattccgctggcgaaagatattattgcccgttatcacatcaagccggaaaacgtagtggcacatgcggatatcgcaccgcagcgcaaagacgatccggggccattatttccctggcagcaactggcgcagcaggggattggtgcctggccggatgcgcagcgggtgaacttttaccttgccgggcgcgcgccgcacacaccggtagataccgcgtcattgctggagcttttggcgcgctacggttatgacgtaaaacctgatatgacaccgcgcgagcagcggcgcgtgattatggcattccagatgcatttccgcccgacgttatataacggcgaagcggatgcagaaactcaggcgattgccgaagcattgctggagaaatacgggcaggattag

SEQ ID NO: 471807 - DNA, 324 bp, Shigella flexneri
atgcaattttctacaaccccaactctggaaggcctgaccatcgttgaatattgcggtgtggtgaccggcgaagcgattttaggtgccaatattttccgtgatttctttgccggtatccgcgatatcgttggcggacgttccggtgcgtatgaaaaagaactgcgtaaagcacgggagatcgcctttgaggaattaggctcccaggcgcgggcgctgggggccgatgccgtagttggtattgatatcgactacgaaacggtcgggcaaaacggcagtatgctgatggttagcgtcagcggtacggcggtgaaaacgcgtcgatga

SEQ ID NO: 471808 - DNA, 1803 bp, Shigella flexneri
gtggattatcgtttttcttgggtgatttttaatatgataaacaatatatctgatcaagcatcatcatttccaggcacacaactaaatcaaagtgataatttcctggattcactgagggaatttttcgcgatattaaattccagtcgtaagggtgagttgtctacatgggataccatctacttgcatctgatattagcaataaatgctgacagtgatctcataaaaaatgatgtgttgctcgcggaaaatattccatcagcgaattaccaatttaatacattttttagcaatactttcgagattgatgttaaaaaatatctgggtaaatcagaagataacgaagttgaaataaaagcgggtaatgaaagaatctctattggaatacgtaatgtatcgaatggaaaacttgaaagacaacagtttcttttcccactggactatgagaataaattacaagaacaattagataagtattttacgattgaatcgcacccattattatacaggtataccattggtagtaagattgcgaatgtgatttttgaaaagttatacagtcgtattgactttaacaaagaacaatatatatcctttataaaggacgcatttattcatttttatgattatagcaggcgatatgctattagtgagaatatcgataaagacgctgtaacaaacaatatcgcattgatgagcactttttatgacagtgataatacgtcaggtgaggttttaaataatgattttacagaagaagagtcatttgaaactgcgttagatgtagagcatgcaatagtgcttggatttgctgatgataattttgaaacaaaacctgttcattatcaggatttattaacacgatttagtgcctttcaagataccgtgtttaatctgtttcctgaaatgcactcttcgcattaccacgatatttgtagcgtaagtgtggatatgacaaagggaacgcaatgcatgattcacttgatggtgaatgaagaagttttcatgtctctgcctgttccagttgccacgatggtacgtgaagatgcaagtaatttagtcaatcttaaaacactactcaatgatggttgtttcattaaatatagtcattttaatgacgtggcattaataaagcaaaacataagtaatctctatttatcacacactgttgtgaatgaaagcatattgaaaaaatgttgttttgaaaacggcagtttaggtgatgttaaaataacaaatagcaatgtaataaacagtgcattcaaaaatatttcgtttagatctgttaaaattaataacgtaaatactcattctttaaaatttattaactgcaattttttcaatgttgatatgataagagttaatctcagcaaatgtctttttcatgaatgtagtatgcatggtgtcaagataaaaccctggttgcctgtaaaatggacaaaagaattaataagtgattatttgtatggctgtttactatctctgtactctatctgtgcaagggatatatataatatgaacgccgggaataacgtgaaggttgctgcggatgctttccttgaaattattttctctcttaaaaataaatattgtattaaactattaagcgctcaggatcgggcgtttatatacgagtttgcaagaatgatcttcgcttatattaatgacaaaagcattgagatcttattactttcttgttttgcggcggctgaccaaaaagcaatccagcggtatagacctcagtcacaagatggggaagactttaggagtcatttacaatataagttgcctctttccgctcattaa

SEQ ID NO: 471809 - DNA, 516 bp, Shigella flexneri
atgcgctaccgttcactatctctacttattccatgtgcactgctgctgagtgcctgtaccaccgtcacgccagcttataaagataacggcccccgcaccggttcctgtgtccagggagggcctgacagtgtggctcaacaattctacgactaccgcattcaacatcgcagcaatgacattaccgccctgcgcccctatttgagtgacaaactggcaacccaacttagcgatgccagccgcgataatagtcatcgtgaattgttaagcagcgatccgttctccagtcgaaccaccttgccagacagcgcccacgttgccagtgcatcgactatccctaatcgtgatgcccgtaacattccattgcgggtggatctcaaacagggtgaccagggctggcaggatgaagtgttaatgattcaggaaggccagtgttgggtcatcgacgatgtgcgctacttaggcggtagcgttcatgccacggcgggtacgctccgtcagtccatcgagaatcgctaa

SEQ ID NO: 471810 - DNA, 729 bp, Shigella flexneri; identical to SEQ ID NO: 458201

SEQ ID NO: 471811 - DNA, 732 bp, Shigella flexneri
atgaaaaaagttctgattgccgcgttaattgcaggttttagtctttccgccacagctgccgaaaccattcgttttgctaccgaagccccctatcctccgtttgaatcgattgatgcaaacaaccagatcgttggttttgacgtcgacctggcacaggcactgtgtaaagagattgatgcaacctgtactttctctaaccaggcgtttgacagcctgatcccaagcctgaaattccgtcgcgtagaagcagtgatggcgggcatggatatcactccggagcgtgaaaagcaggtactgtttactaccccgtactatgacaactctgccctgtttgtgggtcagcaaggcaaatacaccagtgttgatcagctgaaaggcaaaaaagtcggcgttcagaacgggacgacacaccagaagttcattatggataagcacccggaaatcaccaccgttccgtatgacagctaccagaacgcaaaactggatctgcaaaacgggcgtatcgacagcgtatttggtgacaccgcagtggtcactgagtggctgaaagataacccaaaactggcggcagtgggcgataaagtgaccgataaagattatttcggtactggcctcggcatcgcggtacgtcagggcaacactgaactgcagcagaaactcaacactgcgctggaaaaagtgaagaaagatggcacttacgaaaccatctacaacaaatggttccagaagtaa

SEQ ID NO: 471812 - DNA, 717 bp, Shigella flexneri
atgaatgaattttttcctttagcaagcgccgccgggatgaccgtcggccttgccgtttgtgcattgattgtcgggctggcgctggcgatgttctttgcggtatgggagtcagcgaaatggcgtcctgtcgcgtgggcaggttcagcgctggtaaccattctgcgtggcctgccagaaattctggtagtgctgtttatctattttggctcctcgcagttactgctgacgctttcggatggcttcactatcaatcttgggttcgtgcagatcccggtgcagatggacattgagaacttcgacgtgagtccgttcctttgtggtgtcatcgctctgtcactgctgtatgccgcctatgcctcgcaaacgctgcgcggcgcgttgaaagctgtaccggtgggccagtgggaatctggtcaggcgctggggctgtcgaaatcggctatctttttccgtctggtgatgccgcagatgtggcgtcatgcgctgcctggcctcggtaaccagtggctggtgctgctgaaagataccgcgctggtcagtttgattagtgtgaatgatttaatgttacaaaccaaaagcattgctactcgtacccaggaaccatttacctggtacattgtggcggcggcgatttacctggtgatcaccctgctcagtcagtacattctcaaacgcattgacctgcgcgcgacacgttttgagcggaggcccagctaa

SEQ ID NO: 471813 - DNA, 669 bp, Shigella flexneri
atgtttgagtatttacccgagctgatgaaagggctgcacaccagcctgacgctaaccgttgcctcgctgattgtggcactgattctggcattgatttttaccatcatcctgacgctgaaaacgccggtgctggtgtggctggtgcggggttatatcacgctgtttaccggtacgccgctgctggtgcagatcttcctgatttattacgggccgggccagtttccgacgttgcaggagtatccggcactgtggcatttgttgtcagaaccgtggttatgtgcgctgattgcgttatcgctgaacagtgcggcgtataccacgcagctgttttacggtgcaattcgtgcgatcccagaaggtcagtggcagtcctgtagcgccctgggaatgagcaaaaaagatacgctggcgatcctgctgccgtatgcctttaaacgctcgctctcttcttattccaacgaagtggtgctggtgttcaaaagtacctctctggcttacaccattacgctgatggaagtgatgggatacagccagttgttgtacggacgcacctacgatgtaatggtgttcggtgcggcagggattatttacctggtcgtcaacggcctgctgacgctgatgatgcgtctgatcgagcgcaaagcactggcattcgaacggcggaattaa

SEQ ID NO: 471814 - DNA, 732 bp, Shigella flexneri
atgaaaaagttagttcttgccgctttacttgcttcctttactttcggtgcttctgccgcagagaaaatcaattttggcgtttcagccacctatccaccctttgaatctataggtgctaataatgagattgtcggctttgatatcgatctggcaaaagccttgtgcaaacaaatgcaggcagaatgtacttttactaatcacgcgttcgacagcctgatcccgtcactgaaattcagaaaatatgacgccgtaatctccggtatggatatcaccccggagcgtagcaagcaggtttcgtttaccacaccctactatgaaaactcagccgtcgtgatttccaaaaaagatacctacaaaacgtttgccgacctgaaaggcaaacgcattgggatggaaaacggtacgacgcaccagaaatatattcaggatcagcacccggaagtgaaaactgtctcctatgacagttatcagaatgcctttatcgatctgaaaaatggtcgtattgatggggtatttggtgacaccgcggtggtaaacgaatggctgaaaaccaatccgcaactgggcgttgcgactgaaaaagtgaccgatccgcaatacttcggcaccggcctgggtatcgctgtacgtccggataacaaagctctgctggaaaaactgaataacgcgctggcagcaattaaagctgacggtacatatcagaaaatcaatgaccagtggtttccgcagtaa

SEQ ID NO: 471815 - DNA, 1128 bp, Shigella flexneri
atgcagtgcgcactttacgacgcgggtcgctgtcgttcctgtcagtggataacgcagccgattccagagcaactctccgctaaaaccgccgatcttaaaaatctgctcgccgattttccggttgaggaatggtgcgcgccggtgtcaggcccggaacaagggtttcgtaataaagccaaaatggtggtgagtggtagcgttgaaaaaacactgctcggtatgctgcatcgcgatggcacgccggaagacctttgtgactgcccgctttatccagcctcatttgcgcccgtttttgcggcgctaaaaccgtttatcgcccgagcggggttaacgccctacaacgtggcgcgtaagcgtggcgaactgaaatacattctgctgactgaaagccagagtgatggcggcatgatgctgcgctttgtactgcgttctgataccaagctggcgcaactgcgtaaggcgctgccgtggttacacgaacaactaccgcagctgaaagttattaccgtcaatattcagccggtacatatggcgattatggaaggggagacggagatctacctgaccgaacaacaggcactggcggagcgttttaatgacgtaccgctgtggatccgtccgcaaagtttcttccagactaatccggcggtcgccagccagttgtacgccaccgcgcgcgactgggtacgacagctgccggttaaacatatgtgggatctgttctgcggtgtggggggctttggtttacactgcgcgacgcctgacatgcagttaaccgggatcgaaattgcgccagaggccattgcctgtgcaaagcagtcagccgctgaactgggcttaactcgtttacaatttcaggcgctggactccactcagtttgccactgctcagggggaggtgccggagctggtgctggttaacccgccgcgccgcggcattggtaaaccgctgtgtgattatctttcaacgatggcaccgcgttttattatctactccagctgtaacgcccaaaccatggcgaaagatatccgcgaactgccaggttaccgcatcgaacgggtacagctttttgatatgttcccgcacaccgcgcactatgaagtgttgacgctgctggtgaagcaataa

SEQ ID NO: 471816 - DNA, 489 bp, Shigella flexneri
atggaagacgaaacgttgggattttttaagaaaacatcttcatctcatgctcgcctgaatgtgcctgcgctggtgcaggtggcggcgctcgccattattatgatccgtggcctcgacgtgctgatgattttcaatacgctgggcgtgcgcggtattggcgagttcattcatcgcagcgtacaaacctggagtttaacgctggtctttttaagcagtctggtgctggttttcattgagatctggtgtgcgttttcactggtgaaagggcgtcgctgggcgcgctggctatatctgctgacacaaatcaccgccgcaagttacttgtgggcggcttcgctggggtacggttatccggagctgttcagcattcccggtgaatcaaaacgtgaaatcttccatagcctgatgctgcagaagctgccggatatgctcatcctgatgctgctgttcgttccctcgaccagtcggcggttcttccagttgcaataa

SEQ ID NO: 471817 - DNA, 846 bp, Shigella flexneri
atgaataatttaccggtagttcgttcgccctggcggattgtgattttgctgctgggctttacctttctctacgcgccaatgctgatgctggttatctattcgtttaacagctcgaagctggtgacggtgtgggccggctggtcaacgcgctggtatggtgagttattgcgcgatgacgcgatgatgagtgcggttggttcaagcctgacaattgctgcctgtgcggcaacggcggcggcgatcctcgggactattgcggcggtggtgctggtgcgctttggcaggtttcgcggatcaaatggctttgcctttatgatcaccgcgccgctggtaatgccagatgtcatcacgggcttgtcgctgttgttattattcgtcgcgcttgctcatgccattggctggcctgcggaccgcggtatgcttaccatctggctggcgcatgtcactttctgtacggcttatgtggcggtcgttatttcgtcgcgtctgcgggaactggatcgctcgatagaagaagccgcgatggatctcggtgcgacgccgctgaaagtgtttttcgtcattacgctaccgatgatcatgcccgcgatcatttctggctggttactggcttttactttgtcgcttgatgatctggtgatcgccagctttgtttccgggccgggagccaccacgttaccgatgctggtcttttccagcgtgcggatgggggtgaatccggaaatcaacgccctggcaacattgatcctcggcgcggtcggaattgtcggatttatcgcctggtatctgatggcgcgcgcagaaaaacagcggatacgcgacatccaacgtgcaagacgtggctga

SEQ ID NO: 471818 - DNA, 954 bp, Shigella flexneri
atgaatacacttgaacctgctgcccagtcgaaaccgccgggcggatttaagctgtggttgtcgcagctgcaaatgaagcatgggcgcaaactggtcattgcgttgccatatatctggttgatcttgctgtttctgctgccatttctgattgtctttaaaataagcctggcggagatggcgcgcgctattccaccttataccgaactgatggagtgggctgacgggcaactgtccatcactcttaatctcggtaattttctgcaactgaccgacgattcgctctatttcgatgcttatctccagtcgctacaggtggctgcgatttcgacattttgctgtttactgatcggctatccgctggcgtgggcggtggcgcacagtaagccttcgacccgtaatattttattactactggtgatcctgccgtcgtggacctcgtttctgatccgcgtttatgcttggatgggaatattaaaaaacaacggtgtgctgaataattttctgctgtggctgggggttatcgatcaaccgctgaccattcttcataccaatctggcagtttatattggcattgtttacgcctacgtgccgtttatggtgctgccgatttataccgcgttgattcgtattgattattcgctggtggaagcagcgctggatctcggtgcacgaccgctgaaaacgttctttactgtgatcgtgccgctgactaaaggtgggattattgccggatcgatgctggtgtttatcccggctgtgggcgagtttgtgatcccggaactgctcggtggcccggacagcatcatgatcgggcgcgtgctatggcaagagtttttcaataaccgcgactggccggtggcctcggcggtagcgatcatcatgttgctgctgctaattgtgccgataatgtggttccacaaacaccagcaaaaaagcgtgggagaacacggatga

SEQ ID NO: 471819 - DNA, 1134 bp, Shigella flexneri
gtgaatgacgctatccctcgcccgcaggcgaaaacccgtaaggcgctgacgccgctattagaaatccgcaacctcaccaaatcctacgatggtcaacatgcggtggatgatgtcagcctgaccatctacaaaggtgaaatcttcgcgctgctgggcgcatccggctgtggcaagtccacgctgctgcgtatgctggcaggtttcgaacaaccttctgccggacagataatgcttgatggcgtcgatttgtcacaggttccgccttacctgcgccccatcaatatgatgtttcagtcttacgcgctgtttccgcatatgaccgtggaacagaacatcgcttttggcctgaaacaggacaaactaccgaaagcggaaatttccagtcgggtcaatgagatgctcggcctggtgcacatgcaggagttcgccaaacgtaaaccgcatcagctttctggtggtcagcgacagcgtgtggccctggcccgaagccttgccaagcgcccgaaactattactgctcgacgagccgatgggcgcgctggataaaaagctgcgtgaccggatgcagcttgaagtggtggatattctggagcgcgtcggtgtgacttgtgtgatggtcacccacgatcaggaagaggcgatgaccatggcggggcgcatcgccattatgaatcgtgggaaatttgtccagattggcgaaccggaagagatctacgagcatccgactacccgctatagcgccgaatttattggctcggtaaacgtctttgaaggcgtactcaaagagcgtcaggaagatggcctggtgcttgattcgccggggctggtgcatccactgaaagtcgacgcggatgcctcggtggtcgataacgtgccggtacatgtggcgctgcgcccggaaaaaatcatgctttgcgaagagccgcccgccaatggttgtaacttcgcggtgggggaggtgatacacattgcctatctcggcgatctttcggtgtatcacgttcgtctgaaaagtgggcagatgattagtgcccagctacaaaacgcccatcgtcatcgtaaagggttaccgacctggggcgacgaagtgcgtttgtgctgggaagtggacagctgtgtggtgctgacggtttaa

SEQ ID NO: 471820 - DNA, 1113 bp, Shigella flexneri
gtgaccgccttaaataaaaaatggctatcgggtctggttgcgggtgctctgatggccgtctctgtcggcacgctcgcggctgaacaaaaaacactccacatttataactggtctgattatatcgcccctgacacggtggccaattttgaaaaagaaaccggtattaaagtcgtctacgatgttttcgactctaacgaagtactggaaggcaaattaatggcgggtagcaccggctttgacttggtggttccatctgccagctttctagaacgccagttgactgcgggagttttccagccgctggacaaaagcaaattgccggagtggaagaatctcgacccggagctgctgaagctggtcgccaaacacgatcccgacaataaatttgctatgccctatatgtgggcgacgaccgggattggctataacgttgataaagttaaagctgtgctgggcgaaaacgcgcccgtcgatagctgggacttgatcctcaaacctgaaaatctggaaaaactgaaaagctgcggtgtctctttcctggatgcgccagaagaagtttttgctaccgtgttgaattatctcggcaaagatcccaacagcactaaagcggatgattacaccggaccggcaaccgatctgctgttaaagctgcgcccgaacattcgttatttccattcatctcaatacattaacgacctggcaaacggcgatatttgcgtcgctatcggctgggcaggtgatgtctggcaggcgtcaaaccgcgcgaaggaagcgaagaatggagtgaatgtctcgttctcgattccaaaagaaggggcgatggcgttctttgatgtattcgccatgcctgcggatgccaaaaacaaagacgaagcctatcagttcctgaattacctgctgcgcccggatgtagtagcgcatatttccgaccatgtgttctatgtcaacgccaataaagcagccacgccgctggtgagtgcggaagtccgtgagaacccgggtatttatccgcctgcggatgttcgtgcgaagctgttcactctgaaagtgcaggacccgaaaatcgaccgtgtgcgcacccgcgcgtggaccaaagtgaagagcggaaaataa

SEQ ID NO: 471821 - DNA, 477 bp, Shigella flexneri
atgacatcgctggtcgttcctggtctggatacgctgcgtcaatggctcgatgacctggggatgagtttttttgaatgtgataactgtcaggctctgcatctgccccatatgcagaatttcgacggtgtctttgatgccaaaatcgatctgatcgataacacgatcctgttttctgccatggcggaagtccgaccttcagccgtattgccgctggcggcggatttatctgccatcaatgccagttcgctgaccgtgaaagcatttcttgatatgcaggatgataatctgccaaagctggtggtttgccagtctttatccgttatgcagggcgtaacctatgagcagtttgcatggttcgtgcgtcagagcgaagagcagatttcgatggtcattcttgaagctaatgcccatcaactgctgttaccgactgacgatgaagggcaaaacaacgttaccgaaaactattttctccactga

SEQ ID NO: 471822 - DNA, 903 bp, Shigella flexneri
gtgaaaattgccatattgtcccgggatggaacgctctattcgtgtaagcggctgcgtgaagccgctatacagcgcggtcacctggttgaaattcttgatccgctttcttgctacatgaacataaatcctgcggcgtcttctattcactacaaaggccgcaagttaccccattttgacgcagtgatcccgcgtattggcaccgccattaccttttatgggacggcggcactgcgccagttcgagatgctggggagctatccgctcaatgagtcggtcgccattgcccgggcgcgtgacaaattgcgttccatgcaactgctggcgcgtcagggcatcgacctgcctgtcacgggcattgcgcattcgccggatgataccagcgatttaatcgacatggtcggtggtgcgccgctggtggtcaagttggttgaaggcacgcagggaattggcgtcgtgctggcggagactcgtcaggcggcggaaagcgtgattgacgctttccgcggtctgaacgcgcatattctggtgcaggaatatatcaaagaggcgcaagggtgcgatatccgctgtctggttgttggtgatgaagtggtcgctgcgattgaacggcgggcgaaagagggctattttcgttccaatttgcatcgtggcggcgcggcaagcgtcgccagtatcacaccacaggagcgtgaaatcgcgataaaagccgcgcgaacgatggcgctggacgttgctggtgtggatattctgcgtgctaatcgcgggccgttggtgatggaagtgaatgcgtcgccggggctggaaggaatagaaaaaaccaccggtatcgatatcgcgggtaaaatgatccgctggatcgaacgccacgctacgacagaatattgcctgaaaacgggtggttag

SEQ ID NO: 471823 - DNA, 723 bp, Shigella flexneri
atgacgccaaccattgaacttatttgtggccatcgctccattcgccatttcactgatgaacccatttccgaagcgcagtgtgaggcgattattaacagcgcccgtgcgacgtccagttccagttttttgcagtgtagtagcattattcgcattaccgacaaagcattacgtgaagaactggtgacgctgaccggcgggcaaaaacacgtagcgcaagcggcggagttctgggtgttctgtgccgactttaaccgccatttacagatctgtccggatgctcagctcggcctggcggaacaactgttgctcggtgtcgttgatacggcaatgatggcgcagaatgcattaaccgcagcggaatcgctgggattgggcggggtatatatcggcggcctgcgcaataatattgaagcggtgacgaaactgctgaaattaccgcagcatgttctgccgctgtttgggctgtgccttggctggcctgcggataatccggatctcaagccgcgtttaccggcctccattttggtgcatgaaaacagctatcaaccgctggataaagacgcactggcgcagtatgacgagcaactggcggaatattacctcacccgtggcagcaataatcgctgggatacctggagcgatcatatccgccgaacaatcattaaagaaagccgcccatttattctggattttttgcacaaacagggttgggcgacgcgctaa

SEQ ID NO: 471824 - DNA, 288 bp, Shigella flexneri; identical to SEQ ID NO: 458215

SEQ ID NO: 471825 - DNA, 258 bp, Shigella flexneri
atgcaaaccgttatttttggtcgttcgggttgcccttactgtgtgcgtgcaaaagatctggctgagaaattgagcaatgaacgcgatgattttcagtatcagtatgtagatattcgtgcggaagggatcactaaagaagatctacaacaaaaggcaggtaaacccgtagaaaccgtgccgcagatttttgtcgatcagcaacatatcggcggctataccgattttgctgcatgggtgaaagaaaatctggacgcctga

SEQ ID NO: 471826 - DNA, 378 bp, Shigella flexneri; identical to SEQ ID NO: 458217

SEQ ID NO: 471827 - DNA, 1686 bp, Shigella flexneri
gtgaatataaacgtcgccgaattgttaaatgggaattacattctgttattatttgtggtcctcgcgcttgggctatgtctcggaaagttacgacttggttcgatccaactgggtaattccattggcgttttagtcgtatcgctgttattaggccaacaacatttcagcattaacaccgatgcgcttaatcttggctttatgctgtttattttctgcgtcggggtcgaagccggaccgaactttttttccattttttttcgtgatgggaaaaattacctaatgttagcactggtgatggttggcagtgcgctggtgatcgccttagggttaggtaagctgtttggctgggatattggcctgacggccggtatgttagcaggctctatgacgtcgacaccggttctggtcggtgctggcgatacactgcatcattccggcatggaaagcaggcagctctcactggcactggataatctgagcctcgggtatgccttaacctatttaatcggtctggtgagtttgattgttggtgcgcgttacttgccgaaattgcagcatcaggacttacagaccagcgcccagcaaatcgcccgcgaacgtggcctggacactgatgccaaccgtaaggtttatttaccggtgatccgcgcctatcgcgtcggcccggagctggtggcctggaccgacggcaaaaatctgcgtgaactgggtatttatcgacaaaccggctgctacattgaacgtattcgacgtaacgggattctggcaaatccagacggtgatgccgtgctacaaatgggcgatgaaatagcgttggtaggctatcccgacgcccatgcccgactcgatcccagcttccgtaacggtaaagaagttttcgatcgtgaccttctcgacatgcgtatcgtcactgaagaagtggtcgttaaaaaccataacgctgtaggtaaacgtctcgcacaactgaagttgaccgatcacggttgcttccttaaccgcgtcattcgtagccagattgagatgccgatagatgacaacgtcgtgcttaacaaaggtgacgttttacaagtcagcggtgatgcccgtcgcgtaaaaaccatcgccgatcgcatcggctttatctcgattcacagccaggtcactgacctgctggcattttgcgccttctttgttattgggctgatgatcgggatgatcaccttccagttcagcacattcagtttcggcatggggaacgctgccgggttgttattcgccggaattatgctgggctttatgcgtgctaaccacccgaccttcggttacattccgcaaggtgcattaagcatggtgaaagagttcggcttgatggtgtttatggcaggcgttggtctgagcgccggtagcggtattaataacggcctgggcgcgattggcggtcagatgttgattgccggattaattgtcagtcttgtgcccgtggttatctgtttcttgttcggtgcttatgtattgcgaatgaaccgcgcactgttgttcggcgcaatgatgggcgcacgcacctgcgcgccggcaatggagatcatcagtgatacagctcgcagtaacatccctgcgctgggctatgcgggcacctacgcaatcgccaacgtcctgctgacgctggcagggacaatcatcgtcatggtatggccaggattaggataa

SEQ ID NO: 471828 - DNA, 537 bp, Shigella flexneri; identical to SEQ ID NO: 459844

SEQ ID NO: 471829 - DNA, 1128 bp, Shigella flexneri
atggcgtcctgggcaacccgtacgcctgctatccgcgatattctctctgtctcgatcgctgaaatgggcggtgttctctttggtctgtcgatcggttcgatgagcggtattctctgctcggcgtggttagtgaaacgctttgggacacgtaatgtcatcctggtcacgatgtcctgcgcattgatcgggatgatgatattaagtctggcactctggctgacatcgcccctgctctttgccgttggtctcggcgtctttggggcaagttttggttctgcggaagtggcgataaacgttgaaggtgccgccgttgagcgagaaatgaataaaacggttttgccgatgatgcacggtttttatagcctgggcacgctggcaggcgctggtgtcgggatggcactgacggcctttggcgttccggcaacggtgcacattttattggcggcgctggtaggtatcgcgcctatttatatcgccattcaggcaatccctgacggtacgggcaaaaatgctgccgatggcacccagcatggcgaaaaaggcattcctttttatcgcgatatccagttgctgttgattggtgttgtagtgctggcgatggcctttgccgaaggttctgccaacgactggttacccttattaatggttgatggtcacggttttagccccacttccggctcactgatttatgccggttttaccctggggatgaccgttggacgcttcaccggcggttggttcatcgacagttacagtcgcgttgccgtggttcgggccagtgcactaatgggggcgttgggtattgggctgattatttttgtcgatagcgcctgggtcgcaggagtgtctgttgtactttggggactgggtgcctcgctgggcttcccgctgaccatttctgccgccagcgataccggccccgatgcaccaacccgcgtcagtgtggtagcaacgaccggttatctggctttcctcgtcgggccgccgctgctgggctatctcggcgaacattatggattacgtagtgcaatgctggttgtactggcgctggttattctcgcggctattgtcgcgaaagccgtcgccaaacccgataccaaaacgcagacggcgatggagaatagttga

SEQ ID NO: 471830 - DNA, 816 bp, Shigella flexneri
atgagcattaaattaattgcggtagacatggatggtactttcttaagcgatcaaaaaacctataaccgtgagcggtttatggctcagtatcagcaaatgaaagcacaaggcattcgctttgtggtcgccagcgggaatcaatattatcagttgatctctttcttccctgaaattgcgaatgaaattgcctttgtggctgaaaacggcggctgggtaatgagtgaaggcaaagatgtttttaatggcgagctgtcgaaggatgcgtttgctactgtcgtggaacatttgctgacgcgcccggaagtggaaattattgcctgcggaaaaaatagcgcctatacactcaaaaaatatgacgatgccatgaaaacggtggcggaaatgtattatcaccgtctggaatacgtcgataactttgacaacttagaagatattttctttaagtttggcctgaatctttccgatgaactgattccacaagtacaaaaagcattacatgaggccatcggcgatattatggtgccagtccacaccggcaacggcagcatcgatctgattatccccggcgtacataaagccaatggccttcgccaactgcagaaattatggggaatagacgacagcgaagtggtggtctttggcgatggcggtaacgatattgagatgctgcgtcaggcaggctttagttttgcaatggaaaatgccggcagcgcagtcgtcgcagcggcaaaataccgggcaggctacaataaccgtgaaggcgtactggatgtgatcgataaagttcttaaacacgaagcgccatttgaccaataa

SEQ ID NO: 471831 - DNA, 279 bp, Shigella flexneri; identical to SEQ ID NO: 801

SEQ ID NO: 471832 - DNA, 1227 bp, Shigella flexneri
atgcaaaataaattagcttccggtgccaggcttggacgtcaggcgttacttttccctctctgtctggtgctttacgaattttcaacctatatcggcaacgatatgatccaacccggtatgttggccgtggtggaacaatatcaggcgggcattgattgggttcctacttcgatgaccgcgtatctggcgggcgggatgtttttacaatggctcctggggccgctgtcggatcgtattggtcgccgtccggtgatgctggcgggtgtggtgtggtttatcgtcacctgtctggcaatattactggcgcaaaacattgaacaattcaccctgttgcgcttcttgcagggcataagcttctgtttcattggcgctgtgggatacgccgcaattcaggaatccttcgaagaggcggtttgtatcaagatcaccgcgctgatggcgaacgtggcgctgattgctccgctacttggtccgctggtgggcgcggcgtggatccatgtgctgccttgggaggggatgtttgttttgtttgccgcattggcagcgatctcctttttcggtctgcaacgagctatgcctgaaaccgccatgcgtataggcgagaaactgtcactgaaagaactcggtcgtgactataagctggtgctgaagaacggccgctttgtggcgggggcgctgggattcgttagcctgccattgctggcgtggatcgcccagtcgccgattatcatcattaccggggagcagttgagcagctatgaatatggcttgctgcaagtgcctattttcggggcgttaattgcgggtaacttgctgttagcgcgtctgacctcgcgccgcaccgtacgttcgctgattattatgggcggctggccgattatgattggtctgttggtcgctgctgcggcaacggttatctcatcgcacgcgtatttatggatgaccgccgggttaagtatttatgctttcggtattggtctggcgaatgcgggactggtgcgattaaccctgtttgccagcgatatgagtaaaggtacggtttctgcggcgatgggaatgctgcaaatgctgatctttaccgtcggtattgaaatcagcaaacatgcctggctgaacgggggcaacggactgtttaatctcttcaaccttgtcaacggaattttgtggctgtcgctgatggttatctttttaaaagataaacagatgggaaattctcacgaagggtaa

SEQ ID NO: 471833 - DNA, 597 bp, Shigella flexneri
atgctggaaaatttgaatctctctctattctctcttattaacgcgacgccagactcggctccgtggatgatctcgttggcgatttttattgctaaagatttgattaccgtggtgccgttgctggccgcggtactttggttgtgggggcttacagcacaacggcaactggtgataaaaatcgctatcgcgctggcggtcagcctgtttgtgtcctggacgatgggacatctttttccgcacgaccgaccctttgtcgaaaatatcggctataacttcctgcatcatgcggcggatgactcattcccgagcgatcacggtacggtgattttcacctttgcactggcatttttatgctggcatcgcctgtggtccggctcacttttaatggtgctggccgtcgtcattgcctggtcgcgcgtttatcttggcgtccactggccgctggatatgctcggtggattgctggcaggtatgattggctgccttagtgcccagattatctggcaagcgatggggcataaactctatcaacgtctgcaatcgtggtatcgcgtctgttttgcattaccgatccgcaaaggctgggtgcgtgactga

SEQ ID NO: 471834 - DNA, 759 bp, Shigella flexneri
atggaaacacgtcgcgaagagcgtatcgggcagctgctgcaagaattaaaacgcagcgataagttacatcttaaagacgccgccgccctgcttggggtttcggagatgacgattcgtcgcgatctgaacaaccacagtgcgcccgtcgttttgctcggcggctatattgttctggaaccgcgcagtgccagccattacctgttaagcgatcaaaaatcccgcttggtggaagaaaaacgccgggcggcaaaactggctgcgacactggtagaacccgatcagaccctcttttttgactgtggcaccaccacgccgtggattattgaagcgattgataatgaaatcccttttaccgccgtttgttattcgctaaatacctttctggcgctgaaagagaaaccccattgccgcgcatttctgtgcggtggtgaatttcacgccagcaacgccattttcaaacccatcgattttcagcaaacgttgaataatttttgcccggatatcgctttttattccgcggcgggcgtgcatgtcagtaaaggcgctacctgttttaatcttgaagagttgccggtaaaacactgggccatgtcgatggcgcaaaagcatgtgctggttgtcgaccacagtaaatttggcaaggtgcgtccggcgcgcatgggtgacctgaaacgctttgatattgtggtgagtgattgttgcccggaagatgagtatgtgaagtacgcgcagacgcaccgtattaagttgatgtattaa

SEQ ID NO: 471835 - DNA, 246 bp, Shigella flexneri
gtgaccataccgcgtgggcagctgaaaaacctgaaggcgagctacacgttaacggaaccgcagcttaccgcaccgctgaaaaaaggtcaggttgtcgggaccattgatttccagcttaacggtaaatccattgagcagcgtccgctgatcgtgatggaaaatgtggaagagggcggattctttggtaggatgtgggatttcgtgatgatgaaattccatcagtggttcggcagctggttctcttaa

SEQ ID NO: 471836 - DNA, 225 bp, Shigella flexneri; identical to SEQ ID NO: 133446

SEQ ID NO: 471837 - DNA, 840 bp, Shigella flexneri
gtggatacggaattgttaaaaactttcctggaagttagccgaacgcgtcactttggtcgagcggctgaatcgctctatctgacccagtcagcagtgagctttcgaatcagacaactggaaaatcaactgggtgtgaaccttttcacccgccacagaaacaatatccgtttaaccgctgccggtgaaaaactactgccttatgcagaaacgctcatgagcacctggcaggccgcccgcaaggaggtggcgcatacctcacgacataacgagttttctatcggtgccagcgcctcgttgtgggaatgtatgcttaatcagtggttgggacgcttgtatcaaaatcaggatgcccatacaggcttacagttcgaagcgcgaattgcccaacggcagtctctggtaaaacagctgcatgaacgccagcttgatcttcttattaccactgaagcgcccaaaatggacgaatttagtagtcagttgctggggtatttcactttagcgctttataccagtgccccttctaaactaaagggagatcttaactatctgcgactggagtgggggccagattttcaacagcatgaggcaggtttgatcggtgctgacgaagttcccattctgacaaccagttctgctgaactggcacagcaacagattgcgatgcttaatggttgcacctggctacccgtcagctgggcgcgtaaaaaaggcggcctgcataccgttgtcgatagcacaacactttcacggccgctttatgccatatggctgcaaaatagcgataaaaatgcgttgattcgcgatcttttgaaaattaacgtgctggatgaagtgtattaa

SEQ ID NO: 471838 - DNA, 339 bp, Shigella flexneri; identical to SEQ ID NO: 460036

SEQ ID NO: 471839 - DNA, 1521 bp, Shigella flexneri
atgtcactgtcaattgttcatacccgcgcagccctggaagtaaatgcgcccccaatcactgttgaggtacatatcagtaaaggtctacccggcttaacgatggtgggcttaacagaaacaacggtgaaagaagctcgcgatcgcgtgcgcagcgccattatcaatagcggatatgaatatccggcgaaaaaaatcaccatcaaccttgctccagccgatctgccaaaagaagggggacgatatgatttacctatcgccattgcgttgctggcggcctcagaacagcttacagccaataagttagatgaatatgaattagtcggagaactagcgcttacaggcgctctgcgtggcgttcccggtgcaatctccagtgcaactgaagctattaagtcgggcagaaaaattatcgtcgcgaaagataacgaagatgaagtggggctaattaacggtgaaggatgcctgatagccgatcatctgcaggctgtctgtgcgtttctggaaggtaagaacactctcgaacgcccgaaaccaactgatgcagtatcccgggcgctacaacatgatctcagtgatgttgtcggtcaggagcaaggaaaacgaggactggaaattaccgccgctggtgggcacaaccttttactgattgggccgccgggaacaggtaaaacaatgctcgccagccgtattaatggcctgttgccagatttaagcaatgaagaggcactggagagcgctgcgatattaagtctggtaaatgctgaatcagtacaaaaacaatggcggcagcgcccgttccgctcacctcatcacagtgcgtcgttaactgcgatggtgggcggtggtgcaattccagggccaggtgaaatttcgttggcgcataacggcgtgctttttcttgatgagctacctgaatttgaacggcgtacactggatgccttgcgagagccgattgaatccgggcagatccatctttcacgcacacgagcaaaaataacctatccagcccgtttccagcttgttgcggcgatgaatcccagccctaccggacattatcagggaaaccataaccgctgcacgccagaacagacattacgttatctcaaccggctctcggggccctttctcgaccgcttcgatctctcactggagatcccattaccaccccccggcattttgagtaaaacggtagtgccgggagaaagcagcgccaccgttaaacaacgcgtaatggccgccagagagcgccaatttaagcggcagaataaactgaatgcctggctggatagtccggaaatacgccaattctgcaaacttgagagcgaagatgcgatgtggttggaagaaacgctgatccatctggggttatcgattcgtgcctggcagcggttactgaaagttgcacgaaccattgctgatattgatcagtctgacattatcacacgtcagcatttgcaggaggcagttagctatcgtgcgattgaccgtttgctcatccatctgcaaaaactactgacataa

SEQ ID NO: 471840 - DNA, 1647 bp, Shigella flexneri
atgaatggcgcacagtgggtggtacatgcgttgcgggcacagggtgtgaacaccgttttcggttatccgggtggcgcaattatgccggtttacgatgcattgtatgacggcggcgtggagcacttgctgtgccgacatgagcagggtgcggcaatggcggctatcggttatgcccgtgctaccggtaaaactggcgtatgtatcgccacgtctggtccgggcgcaaccaacctgataaccgggcttgcggacgcactgttagattccatccctgtcgttgccatcactggtcaggtgtccgcaccgtttatcggcaccgacgcatttcaggaagtggatgtcctgggattgtcgttagcctgtaccaagcacagctttctggtgcagtctctggaagagttgccgcgcatcatggctgaagcattcgacgttgccagctcaggtcgtcctggtccggttctggtcgatatcccaaaagatatccagttagccagcggcgatctggaaccgtggttcaccaccgttgaaaacgaagtgactttcccacatgccgaagtcgagcaagcgcgccagatgctggcaaaagcgcaaaaaccgatgctgtacgttggcggtggcgtggggatggcgcaggcagttccggctttgcgtgaatttctcgctgccacaaaaatgcctgccacctgtacgctgaaagggctgggcgcagtagaagcagattatccgtactatctgggcatgctggggatgcacggaaccaaagcggcaaacttcgcggtgcaggagtgtgacctgctgatcgccgtgggtgcacgttttgatgaccgggtgaccggcaaactgaacaccttcgcaccacacgccagtgttatccatatggatatcgacccggcagaaatgaacaagctgcgtcaggcacatgtggcattacaaggtgatttaaatgctctgttaccagcattacagcagccgttaaatatcaatgactggcagcaacactgcgcgcagctgcgtgatgaacattcctggcgttacgaccatcccggtgacgctatctacgctccgttgttgttaaaacaactgtcggatcgtaaacctgcggattgcgtcgtgaccacagatgtggggcagcaccagatgtgggctgcgcagcacatcgcccacactcgcccggaaaatttcatcacctccagcggcttaggtaccatgggttttggtttaccggcggcagttggcgcacaagtcgcgcgaccgaacgataccgttgtctgtatctccggtgacggctctttcatgatgaatgtgcaagagctgggcaccgtaaaacgcaagcagttaccgttgaaaatcgtcttactcgataaccaacggttagggatggttcgacaatggcagcaactgttttttcaggaacgatacagcgaaaccacccttaccgataaccccgatttcctcatgttagccagcgccttcggcatccctggccaacacatcacccgtaaagaccaggttgaagcggcactcgacaccatgctgaacagtgatgggccatacctgcttcatgtctcaatcgacgaacttgagaacgtctggccgctggtgccgccaggtgccagtaattcagaaatgttggagaaattatcatga

SEQ ID NO: 471841 - DNA, 264 bp, Shigella flexneri
atgatgcaacatcaggtcaatgtatcggctcgcttcaatccggaaaccttagaacgtgttttacgcgtggtgcgtcatcgtggtttccacgtctgctcaatgaatatggctgccgccagcgatgcacaaaatataaatatcgaattgaccgttgccagcccacggtcggtcgacttactgtttagtcagttaaataaactggtggacgtcgcacacgttgccatctgccagagcacaaccacatcacaacaaatccgcgcctga

SEQ ID NO: 471842 - DNA, 930 bp, Shigella flexneri
atgaccacgaagaaagctgattacatttggttcaatggggagatggttcgctgggaagacgcgaaggtgcatgtgatgtcgcacgcgctgcactatggcacctcggtttttgaaggcatccgttgctacgactcacacaaaggaccggttgtattccgccatcgtgagcatatgcagcgtctgcatgactccgccaaaatctatcgcttcccggtttcacagagcattgatgagctgatggaagcttgtcgtgacgtgatccgcaaaaacaatctcaccagtgcctatatccgtccgctgatcttcgtcggtgatgttggcatgggagtaaacccgccagcgggatactcaaccgatgtgattatcgccgctttcccgtggggagcgtatctgggcgcagaagcgctggagcaggggatcgatgcgatggtttcctcctggaaccgcgcagcaccaaacaccatcccaactgcggcaaaagccggtggtaactatctctcttccctgctggtgggtagcgaagcgcgccgccacggttatcaggaaggtatcgcgctggatgtgaacggttatatctctgaaggcgcaggcgaaaacctgtttgaagtgaaagatggtgtgctgttcaccccaccgttcacctcctccgcgctgccgggtattacccgtgatgccatcatcaaactggcgaaagagctgggaattgaagtgcgtgagcaggtgctgtcgcgcgaatccctgtacttggcggatgaagtctttatgtccggtacggcggcagaaatcacgccagtgcgcagcgtagacggtattcagattggcgaaggccgttgtggcccggttaccaaacgcattcagcaagccttcttcggcctcttcactggcgaaaccgaagataaatggggctggttagatcaagttaatcaataa

SEQ ID NO: 471843 - DNA, 1851 bp, Shigella flexneri
atgcctaagtaccgttccgccaccaccactcatggtcgtaatatggcgggtgctcgtgcgctgtggcgcgccaccggaatgaccgacgccgattttggcaagccgattatcgcggttgtgaactcgttcacccaatttgtaccgggtcacgtccatctgcgcgatctcggtaaactggtcgccgaacaaattgaagcggctggcggcgttgccaaagagttcaacaccattgcggtggatgatgggattgccatgggccacggggggatgctttattcacttccatctcgcgaactgatcgctgattccgttgagtatatggtcaacgcccactgcgccgacgccatggtctgcatctctaactgcgacaaaatcaccccggggatgctgatggcttccctgcgcctgaatattccggtgatctttgtttccggcggcccgatggaggccgggaaaaccaaactgtccgatcagataatcaaactcgatctggttgatgcgatgatccagggcgcagacccgaaagtttctgactcccagagcgatcaggttgaacgttccgcgtgtccgacctgcggctcctgctccgggatgtttaccgctaactcaatgaactgcctgaccgaagcgctgggcctgtcgcagccgggcaacggctcgctgctggcaacccacgcggaccgtaagcagttgttcctcaatgccggtaaacgcattgttgaattgaccaaacgttactacgagcaaaacgacgaaagtgcactgccgcgcaatattgctagcaaagcggcgtttgaaaatgccatgacgctggatatcgcgatgggcggctctaccaacacggtacttcacctgctggcggcggcgcaggaagcggaaatcgacttcaccatgagtgatatcgacaaactttcgcgtaaagtcccgcagttatgcaaagttgcgccgagcacccaaaaataccatatggaagatgttcaccgtgctggtggtgttatcggtattctcggtgaactggatcgcgcggggttactgaaccgtgatgtgaaaaacgtacttggcctgacgttgccgcaaactctggaacaatacgacgttatgctgacccaggatgacgcggtaaaaaatatgttccgcgcaggccctgcgggcattcgtactacacaggcattctcgcaggattgccgttgggattctctcgatgacgatcgcgcaaacggctgtatccgctcgctggaacacgcctacagcaaagacggcggcctggcggtgctctacggtaattttgctgaaaacggctgcatcgtgaaaaccgcgggcgtcgatgacagcatcctcaaattcaccggcccggcgaaagtgtacgaaagccaggacgacgcggtagaagcgatcctcggtggcaaagttgtcgcgggcgatgtggtggtgatccgctatgaaggcccgaaaggcggccctggcatgcaggaaatgctctacccaaccagcttcctgaaatcaatgggtctcggtaaagcctgtgcgctgatcaccgacggtcgtttctctggcggcacctctggtctttccatcggccacgtctcaccggaagcggcaagcggcggcagcattggtctgattgaagatggtgacctgatcgctatcgacatcccgaaccgtggcattcagttacaggtaagcgatgccgaactggcggcgcgtcgtgaagcgcaggaagctcggggtgacaaagcctggacgccgaaaaaccgtgaacgtcaggtttcctttgccctgtgcgcctacgccagcctggcaaccagcgccgacaaaggtgcggtgcgcgataaatcgaaactggggggttaa

SEQ ID NO: 471844 - DNA, 1545 bp, Shigella flexneri
atggctgactcgcaacccctgtccggtgctccggaaggtgccgaatatttaagagcagtgctgcgcgcgccggtttacgaggcggcgcaggttacgccgctacaaaaaatggaaaaactgtcgtcgcgtcttgataacgtcattctggtgaagcgcgaagatcgccagccagtgcacagctttaagctgcgcggcgcatacgccatgatggcgggcctgacggaagaacaaaaagcgcacggcgtgatcactgcttctgcgggtaaccacgcgcagggcgtcgcgttttcttctgcgcggttaggcgtgaaggccctgatcgttatgccaaccgccaccgccgacatcaaagtcgatgcggtacgtggattcggcggcgaagtgctgcttcatggcgcgaactttgacgaagcgaaagctaaagcgatcgaactgtcacagcagcaggggttcacctgggtgccgccgttcgaccatccgatggtgattgccgggcaaggcacgctggcgctggaactgctccagcaggacgcccatctcgaccgcgtatttgtgccagtcggcggcggcggtctggcggcgggcgtagcggtgctgatcaaacaactgatgccgcaaatcaaagtgatcgccgtagaagcggaagactccgcctgcctgaaagcagcgctggatgcgggtcatccggttgatctgccacgcgtgggactgttcgccgaaggtgtcgcggtaaaacgcatcggtgacgaaaccttccgtttatgccaggagtatctcgacgacatcatcaccgtcgatagcgatgcgatctgtgcggcgatgaaggatttattcgaagatgtgcgtgcggtggcggaaccctctggcgcgctggcgctggcgggaatgaaaaaatatatcgcccagcacaacattcgcggcgaacggctggcgcatattctttccggtgccaacgtgaacttccacggcctgcgctacgtctcggaacgctgcgaactgggcgaacagcgtgaagcgttgttggcggtgaccattccggaagaaaaaggcagcttcctcaaattctgccaactgcttggcgggcgatcggtcaccgagttcaactaccgttttgccgatgccaaaaacgcctgcatctttgtcggcgtgcgcctgagccgcggcctcgaagagcgcaaagaaattttgcagatgctcaacgacggcggctacagcgtggtggatctctccgacgacgaaatggcgaagttgcatgtgcgctatatggtcggcgggcgtccgtcacatccgttgcaggaacgcctctacagcttcgaattcccggaatcaccgggcgcgctgctgcgcttcctcaacacgctgggtacgcactggaacatttctttgttccactatcgcagccatggcaccgactacgggcgcgtactggcggcgttcgaacttggcgaccatgaaccggatttcgaaacccggctgaatgagctgggctacgattgccacgacgaaaccaataacccggcgttcaggttctttttggcgggttaa

SEQ ID NO: 471845 - DNA, 891 bp, Shigella flexneri
ttggatttacgcgatctgaaaaccttcctgcatctggcggaaagccgccattttggccgcagcgcgcgggcgatgcacgttagcccgtccacgctctcacggcagattcagcgcctggaagaagatctcggccagccgctgtttgtgcgcgataaccgcacggtgacgctgactgaagcgggcgaagaactgcgcgttttcgcccagcaaacgctgttgcagtatcagcagctgcgccacaccatcgaccagcaagggccgttgctctatggcgaattacatatcttctgctcggtgaccgccgcttacagccatctgccgccgattctggatcgcttccgcgcggaacacccgtcggtggagatcaaactcactaccggtgatgcggcagatgcaatggaaaaagtcgtcacaggtgaagctgatctggcgattgccgggaagccagagattctgcccggcgcggtggcgttttcgatgttggagaatctggcagtggtgttgattgcacccgcattgccctgcccggtgcgtaatcaggtttctgtcgaaaagccggactggtcaacggtaccgtttatcatggccgatcaggggccggtgcgccgccgcattgagttgtggttccgacgcaataaaatcagtaacccgatgatttacgccacggttggcgggcatgaagcgatggtatcgatggtggcgctcggctgtggcgtggcattgttgccggaagtggtgctggaaaacagccccgaaccggtgcgtaaccgcgtgatgattttagagcgcagcgatgagaaaacgccgtttgagctgggcgtgtgtgcgcagaaaaagcggctacatgagccgctaattgaggcattctggaagattttgccgaaccattaa

SEQ ID NO: 471846 - DNA, 1476 bp, Shigella flexneri
atggctaactacttcaatacactgaatctgcgtcagcagctggcacagctgggcaaatgtcgctttatggggcgcgatgaattcgccgatggcgcgagctaccttcagggtaaaaaagtagtcatcgtcggctgtggcgcacaaggtctgaaccagggtctgaacatgcgtgattctggtctcgatatctcctacgctctgcgtaaagaagcgattgccgagaagcgcgcgtcctggcgtaaagcgaccgaaaatggttttaaagtgggtacttacgaagaactgattccacaggcggatctggtggttaacctgacgccggacaagcagcactctgatgtagtgcgcaccgtacagccactgatgaaagacggcgcggcgctgggttactcgcacggtttcaacatcgtcgaagtgggcgagcagatccgtaaagacatcaccgtagtcatggttgcgccgaaatgccctggcaccgaagtgcgtgaagagtacaaacgtggattcggcgtaccgacgctgattgccgttcacccggaaaacgatccgaaaggcgaaggcatggcgatcgctaaagcatgggcggcagcaaccggtggtcaccgtgcgggcgtgctggaatcgtccttcgttgcggaagtgaaatctgacctgatgggtgagcaaaccatcctgtgcggtatgttgcaggctggctcgctgctgtgcttcgacaagctggtggaagagggcaccgatccggcatacgcagaaaaactaattcagttcggttgggaaaccatcaccgaagcgctgaagcagggcggtatcacactgatgatggaccgtctctctaacccggcgaaactgcgtgcttacgcgttgtctgaacagctgaaagagatcatggcaccgctgttccagaaacatatggacgacatcatctccggcgaattctcctccggtatgatggcggactgggccaacgatgataagaaactgctgacctggcgtgaagagaccggcaaaaccgccttcgaaaccgcgccgcagtatgaaggcaaaatcggcgagcaggagtacttcgataaaggcgtactgatgatcgcgatggtgaaagcgggcgttgaactggcgttcgaaaccatggttgattccggcatcatcgaagaatctgcttactatgaatcactgcacgaactgccgctgattgccaacaccatcgcccgtaagcgtctgtatgaaatgaacgtggttatctctgatactgccgagtacggtaactatctgttctcttacgcttgtgtgccgctgctgaaaccgtttatggcagaactgcaaccgggcgatttgggtaaagctattccggaaggtgcggtagataacgcgcagctgcgtgatgtaaatgaagcgattcgcagccatgcgattgagcaagtaggtaagaaactgcgcggctatatgacggatatgaaacgtattgctgttgcgggttaa

SEQ ID NO: 471847 - DNA, 282 bp, Shigella flexneri
atggcaaaaacagcagcagcactgcatatccttgtaaaagaagagaaactggctctggatcttctcgtgcagattaagaacggtgccgatttcggcaagctggcgaagaaacactccatttgcccatcaggcaaacgcggcggtgatttaggtgaattccgccagggtcagatggttccggcgttcgataaagttgtgttctcttgtccggtactggagccaaccggcccgctgcacacccagttcggttaccacatcattaaggtgctgtaccgtaactaa

SEQ ID NO: 471848 - DNA, 2022 bp, Shigella flexneri
atgcgtctaaaccccggccaacaacaagctgtcgaattcgttaccggcccctgcctggtgctggcgggtgcgggttccggtaaaactcgtgttatcaccaataaaatcgcccatctgatccgcgggtgcggttatcaggcgcgacatatcgcggcggtgacctttaccaataaggcggcgcgcgagatgaaagagcgtgtcggacagacgctgggtcgcaaagaggcgcatgggctgatgatctcaaccttccacacgctggggctggatatcatcaagcgtgagtatgcggcgctggggatgaaggcgaacttttcgctgtttgacgataccgatcagctggcgttgctcaaagagttgaccgaagggctgattgaagatgacaaagttctcctgcaacagttgatttcgaccatctctaactggaagaacgatctcaaaacaccgtcccaggcggcagccagtgcgattggcgagcgggaccgtatttttgcccattgttatgggctgtatgatgcacacctgaaagcctgtaatgtgctcgacttcgatgatctgattttattgccgacgctacttctgcaacgcaatgaagaagtccgcgagcgctggcagaacaaaattcgctacctgctggtggacgaatatcaggacaccaacaccagccagtatgaactggtgaaactgctggtgggcagccgcgcgcgctttaccgtggtgggtgacgatgaccagtcgatctactcctggcgcggcgcacgtccgcaaaacctggtgctgctgagccaggattttccggcgctgaaggtgattaagcttgagcagaactaccgctcttccggacgtattttgaaagcggcgaacatcctgatcgccaataacccgcacgtctttgaaaagcgtctgttctccgaactgggttacggcacagagctaaaagttttaagcgcgaataacgaagaacatgaagccgagcgcgtcactggtgaactgattgcgcatcacttcgtcaataaaacgcagtacaaagattacgctattctttatcgcggtaactatcagtcgcgggtgtttgaaaaattcctgatgcaaaaccgcatcccgtacaaaatttctggtggtacgtcgtttttctctcgtcctgaaatcaaggacttgctggcttatctgcgcgtgctgactaacccggacgatgacagcgcatttctgcgtatcgttaacacgccgaagcgagagattggcccggcgacgctgaaaaagctgggtgagtgggcgatgacgcgcaataaaagcatgtttaccgccagctttgatatgggcctgagtcagacgcttagcggacgtggttatgaagcattgacccgcttcactcactggttggcagaaatccagcgtctggcggagcgggagccgattgccgcggtgcgcgatctgatccacggcatggattatgaatcctggctgtacgaaacatcgcccagcacgaaagctgccgaaatgcgcatgaagaacgtcaaccaactgtttagctggatgacggagatgctggaaggcagcgaactggatgagccgatgacgctcacccaggtggtgacgcgctttactttacgcgacatgatggagcgtggtgagagtgaagaagagctggatcaggtgcaactgatgactctccacgcgtcaaaagggctggagtttccttatgtctacatggtcggtatggaagaagggtttttgccgcaccagagcagtatcgatgaagataatatcgatgaggagcggcggctggcctatgtcggcattacccgcgcccagaaggaattgacctttacgctgtgtaaagaacgccgtcagtacggcgaactggtgcgcccggagccgagccgctttttgctggagctgccgcaggatgatctgatttgggaacaggagcgcaaagtggtcagtgccgaagaacggatgcagaaagggcaaagccatctggcgaatctgaaagcgatgatggcggcaaaacgagggaaataa

SEQ ID NO: 471849 - DNA, 1485 bp, Shigella flexneri
atgggttccacctcgtcgctgtatgcagccattgatctcggttcgaatagttttcatatgctggttgtgcgcgaggtggctggaagcatccagacgctgacgcgaattaaacgcaaagtgcgtctggctgctggcctgaatagcgaaaatgacctctctaatgaagcaatggagcgcggttggcaatgtctgcgcctgtttgctgaacgtctgcaagatatccctccctcgcaaattcgcgttgtcgctacggcgacattacgacttgccgtcaatgcgggtgattttattgccaaagcgcaggaaatcctcggttgtccggtacaggtgatcagcggtgaagaggaagcgcgtctgatttatcagggcgttgctcacaccactggtggtgccgatcagcgcctggtggtggatataggcggtgccagtactgaactggtaaccggcacgggtgcacaaaccacctcgttgttcagcctgtcgatgggctgcgtcacctggctggaacgctattttgccgatcgtaatctggggcaagaaaattttgatgctgcagaaaaagcggcacgcgaagtgttacgtccggttgccgatgaattacggtatcacggctggaaagtgtgcgttggtgcttccggcaccgtgcaggcgttacaggaaatcatgatggcacaggggatggatgaacgcattaccctggaaaagttgcagcaattgaaacagcgagccattcattgcggtcggctggaggaactggagattgacgggctgacgctggaacgtgcattagtgttcccgagtggtctggcgatcctgatcgccatttttaccgaactgaatattcagtgtatgaccctggcgggcggtgcgctgcgtgaaggcctggtctacggcatgttgcatctggccgtcgagcaggatattcgcagccgtacactgcgtaatattcaacgccgctttatgatcgatattgatcaggcacagcgcgtagccaaagttgcggctaacttcttcgatcaggtggaaaacgaatggcatcttgaagcaataagccgcgatttgctcatcagcgcctgtcagcttcatgaaatcggcctgagcgttgacttcaaacaagctccgcaacacgctgcttatctggtgcgtaacctggatcttcccggttttacccccgcacagaagaaactgctggcgacgctactgctcaaccagactaacccggtcgatctctcatcgctgcatcagcaaaatgccgtaccaccgcgcgtcgcagaacaactctgccgtttactccgcctggctatcatttttgccagccgtcgccgtgacgatctcgtgccagagatgacattacaggctaaccatgaactgttgaccttgacgcttccgcaaggttggctaacccaacatccgctgggtaaagagattattgctcaggaaaaccagtggcagagctatgtccactggccgctggaagtgcattaa

SEQ ID NO: 471850 - DNA, 1266 bp, Shigella flexneri
atgagcaaaacacatttaacagaacagaagttttccgacttcgccctgcatccgaaggttgtagaagcccttgaaaaaaaagggtttcataactgtacgcccattcaggcactggcccttccgctgacgctggcgggtcgtgacgtagccgggcaggcgcaaaccggtaccgggaaaacgatggcgtttcttacgtcaacgtttcattatcttctctctcatcctgcgattgccgatcgcaaggtgaatcaaccgcgtgccttaattatggcaccgacgcgtgaacttgccgtgcagatccacgccgacgcggaaccgctggcggaagctaccggcctgaagctgggcctggcttacggtggtgatggctatgacaaacagctgaaagtgctggaaagcggcgttgacattctgattggcaccacgggtcgtttaattgactacgccaagcagaaccacattaacctcggtgccattcaggtagtggtactggacgaagccgatcgcatgtacgatctaggctttattaaagatatccgctggctgttccgccgtatgccgcctgcaaatcagcgcctcaacatgctgttctccgccacgctttcgtaccgggtacgtgaactggcgttcgagcagatgaacaatgccgaatatattgaagtggaaccggaacagaaaacgggccaccgtattaaagaagagcttttctacccttctaacgaagaaaaaatgcgtttgctgcaaacgctgatcgaagaagagtggccagacagagcgattattttcgccaataccaaacaccgttgtgaagagatctggggccacctggcggcagatggtcatcgtgtcggtttgttgacaggcgatgtcgcgcagaaaaaacgtctgcgtattcttgatgaatttacccgtggcgatctggatattctggttgccaccgacgttgccgcgcgtggtttgcatattccggcagtgacgcacgtctttaactacgatttacccgatgactgtgaagattacgttcaccgtattggtcgtacaggtcgcgcaggcgcaagcggtcactctatcagcctggcgtgtgaagagtatgcattgaatttgcctgctattgagacctatattggtcactcaattccggtaagcaaatacaatccggacgcattgatgaccgatctgccaaaaccgctgcgcctcacgcgcccgcgcacaggcaatggtccgcgtcgtactggcgctccgcgtaatcgtcgtcgttcaggttaa

SEQ ID NO: 471851 - DNA, 330 bp, Shigella flexneri; identical to SEQ ID NO: 3901

SEQ ID NO: 471852 - DNA, 1260 bp, Shigella flexneri
atgaatcttaccgaattaaagaatacgccggtttctgagctgatcactctcggcgaaaatatggggctggaaaacctggctcgcatgcgtaagcaggacattatttttgccatcctgaagcagcacgcaaagagtggcgaagatatctttggtgatggcgtactggagatattgcaggatggatttggtttcctccgttccgcagacagctcctacctcgccggtcctgatgacatctacgtttcccctagccaaatccgccgtttcaacctccgcactggtgataccatctctggtaagattcgcccgccgaaagaaggtgaacgctattttgcgctgctgaaagttaacgaagttaacttcgacaaacctgaaaacgcccgcaacaaaatcctctttgagaacttaaccccgctgcacgcaaactctcgtctgcgtatggaacgtggtaacggttctactgaagatttaactgctcgcgtactggatctggcatcacctatcggtcgtggtcagcgtggtctgattgtggcaccgccgaaagccggtaaaactatgctgctgcagaacattgctcagagcattgcttacaaccacccggattgtgtgctgatggttctgctgatcgacgaacgtccggaagaagtaaccgagatgcagcgtctggtaaaaggtgaagttgttgcttctacctttgacgaacccgcatctcgccacgttcaggttgcggaaatggtgatcgagaaggccaaacgcctggttgagcacaagaaagacgttatcattctgctcgactccatcactcgtctggcgcgcgcttacaacactgttgttccggcgtcaggtaaagtgttgaccggtggtgtggacgccaatgcccttcatcgtccgaaacgcttctttggtgcggcgcgtaacgtggaagagggcggcagcctgaccattatcgcgacggcgcttatcgataccggttctaaaatggacgaagttatttacgaagagtttaaaggtacaggcaacatggaactgcacctctctcgtaagatcgctgaaaaacgcgtcttcccggctatcgactacaaccgttccggtacccgtaaagaagagctgctcacgactcaggaagaactgcagaaaatgtggatcctgcgcaaaatcattcacccgatgggcgaaatcgatgcaatggaattcctcattaataaactggccatgaccaagaccaatgacgatttcttcgaaatgatgaaacgctcataa

SEQ ID NO: 471853 - DNA, 219 bp, Shigella flexneri
atgccaaaaacgccacgtgtttacgtggcgttttgcttttatatctgtaatcttaatgtcgcgctggcgatgttaggaaaattcctggaatttgctggcatgttatgcaatttgcatatcaaatggttgatttttgcacagggctggtgggttcggaacggactttcccttctgaataaaggtcttcgtggttatacttctgctaataattttctctga

SEQ ID NO: 471854 - DNA, 1104 bp, Shigella flexneri
gtgaatttactgacagtgagtactgatctcatcagtatttttttattcacgacactgtttctgttttttgcccgtaaggtggcaaaaaaagtcggtttagtggataaaccaaacttccgcaaacgtcaccagggattgatacctctcgttggggggatttcggtttacgcagggatttgcttcacgttcggaattgtcgattactatattccgcatgcatctctctatctcgcttgtgccggtgtgcttgttttcattggcgcgctggatgatcgttttgatatcagcgtaaaaatccgtgccaccatacaggccgctgttggcattgttatgatggtgttcggcaaactttatctcagtagcctgggttatatctttggctcctgggagatggtgctcggaccgtttggttacttcctgacgctatttgccgtctgggcggccattaatgcgttcaacatggttgatggcattgatggcttgctgggcgggttgtcctgcgtctcgtttgcagcaatcggtatgattttgtggttcgacgggcaaaccagcctcgcaatctggtgctttgcgatgatcgccgccatcctgccatacatcatgcttaaccttggtatcctgggtcgccgctacaaagtctttatgggtgatgcgggcagtacgctgattggttttaccgttatctggatcctgctcgaaacgacccagggcaaaacccatcccatcagcccggttaccgctttgtggataatcgccattccgctaatggatatggtggcgattatgtaccgtcgcctgcgtaaaggcatgagcccattctctcctgaccgtcagcatattcaccatttgatcatgcgtgccgggtttacttcccgtcaggcgtttgtgctgattacccttgccgcagcactgctcgcttccattggcgtgctggcagaatattctcattttgtcccggagtgggtcatgctggtgctctttttgctagcattcttcctctatggatattgcattaagcgtgcctggaaagttgctcgctttattaagcgcgtaaaacgcagactgcgtagaaatcgtggtggcagccccaatttaaccaaataa

SEQ ID NO: 471855 - DNA, 1047 bp, Shigella flexneri
atgacacaaccaatgcctgggaaaccggccgaagacgctgaaaatgaactggatattcgtgggttgtttcgtaccttgtgggctgggaagctatggattattggcatggggctggcgtttgcgttaatcgcgctggcgtatactttttttgctcgtcaggagtggagctcgacggcgattaccgatcgtccaacggtgaatatgctggggggatattactcgcagcagcaatttttgcgtaacctggatgtccgttcaaacatggcttctgccgatcaaccatcggtcatggacgaagcctataaagagtttgttatgcaactggcctcgtgggatacccgcagagagttctggctgcaaaccgactattacaaacagcggatggtgggcaacagcaaagccgatgcggcgttgctggatgaaatgattaacaacatccagtttatccccggagactttactcgcgcggtcaatgacagcgtgaagcttattgccgaaaccgcgcctgacgctaataacctgttacgtcagtatgttgcttttgccagccagcgtgcagccagccatctgaatgatgagctgaaaggcgcatgggcggcacgcaccatccagatgaaagctcaggtgaagcgtcaggaagaggtggcgaaagccatctacgaccgccggatgaacagtattgagcaggcgctgaaaattgctgagcagcataatatttcgcgcagtgcgacagatgtgcctgccgaggaattacctgattcagaaatgttcctgcttgggcgtccaatgctccaggctcgactggaaaatttacaggccgtcggtccggcctttgatctcgactatgatcagaatcgagccatgttaaacaccctgaatgttggtccaaccctggatccgcgttttcagacctatcgctatttgcgtacgccggaagaaccggtaaaacgcgatagcccacgtcgtgccttcctgatgattatgtggggcattgtcggggggctgatcggggctggtgtcgcattaacccgccgttgctcgaaatag

SEQ ID NO: 471856 - DNA, 1131 bp, Shigella flexneri
gtgaaagtactgactgtatttggtacgcgcccggaagccatcaagatggctccgttggtgcatgcgttggcaaaagatcctttttttgaggctaaagtttgcgtcactgcgcagcatcgggagatgcttgatcaggtactgaaactcttttccattgtacctgactacgatctcaacataatgcagccaggacagggcctgacagagataacctgtcggattctggaagggctaaaacctattcttgccgagttcaaaccagacgtcgtgctggttcacggcgatacgacgacgacgctggcaaccagcctggcggcgttttatcagcgtattcctgttggtcacgttgaggctggtctgcgcacgggcgctctctattcgccgtggccggaagaggctaaccgtacattgaccgggcatctggcgatgtatcacttctctccaaccgaaacttcccggcaaaacttgctgcgtgaaaacgttgcggatagccgaatcttcattaccggtaatacagtcattgatgcactgttatgggtgcgtgaccaggtgatgagcagcgacacgctgcgttcagaactggcggcaaattacccgtttatcgcccccgataaaaagatgattctggtgaccggtcataggcgtgagagtttcggtcgtggctttgaagaaatctgccacgcgctggcagacatcgccaccacgcaccaggacatccagattgtctatccggtgcatctcaacccgaacgtcagagagccggtcaatcgcattctggggcatgtgaaaaatgtcattctgatcgatccccaggagtatttaccgtttgtctggctgatgaaccacgcctggctgattttgactgactcaggcggcattcaggaagaagcgccttcgctggggaaaccggtgctggtgatgcgcgataccactgagcgtccggaagcggtgacggcgggtacggtgcgtctggtaggcacggataagcagcgaattgtcgaggaagtgacgcgtcttttaaaagacgaaaacgaatatcaagctatgagccgcgcccataacccgtatggtgatggtcaggcatgctctcgcattctggaagcgttaaaaaataatcggatatcactatga

SEQ ID NO: 471857 - DNA, 1263 bp, Shigella flexneri
atgagttttgcgaccatttctgttatcggactgggttacatcgggctgcctacagcagcagcgtttgcctcacggcaaaaacaggtgattggtgtcgatatcaaccaacacgcggttgataccatcaatcgtggcgaaatccatatcgtcgagcctgatttggcgagcgtagtaaaaactgccgtagaaggcggttttttacgagcgagcacgacgccagttgaagcggatgcctggctgattgctgtacctacgccgtttaaaggcgatcatgagccagatatgacctacgttgaatcggctgctcgctccattgcgccagtgctgaaaaaaggcgcgctggtgatccttgaatccacctcgccggtggggtcaaccgagaagatggctgaatggttagcagagatgcgcccggatctgactttcccacagcaggtgggcgagcaggcggacgtcaacattgcttactgcccggaacgtgtattaccgggccaggttatggtcgagctgattaaaaacgatcgcgtgattggtggtatgacgccggtttgttcggcccgcgccagcgaattgtacaaaattttcctcgaaggtgagtgtgtcgtcactaactcgcggacggcggaaatgtgtaagctcaccgaaaacagcttccgcgatgtgaatatcgcttttgctaatgaattgtcgctgatttgtgccgatcaggggattaacgtctgggaactgattcgcctggcgaatcgtcaccctcgcgttaatattcttcagcctggccctggcgtgggcggtcactgcattgctgttgatccgtggtttatcgtggcacagaacccccagcaggcgcggcttatccgtaccgcgcgcgaagttaacgatcacaaaccgttctgggttatcgatcaggtgaaagcggcggttgccgactgccttgctgctaccgataaacgcgccagtgaactgaaaatcgcctgctttggtctggcgtttaaaccgaatattgatgacctgcgcgaaagcccggcgatggaaatcgctgaactgatcgcccagtggcacagcggcgaaacgctggttgttgagcctaacatccaccagttgccgaaaaaactgaccgggctttgtactctggcgcagcttgacgaggcgctggcaacggcagacgtgctggtgatgctggtcgatcatagtcagttcaaagttatcaatggcgacaatgtccatcagcagtatgtcgtcgatgccaaaggagtctggcgctga

SEQ ID NO: 471858 - DNA, 1068 bp, Shigella flexneri
atgagaaaaattctgataacaggtggtgccgggtttattggctcggcgctggtgcgttatatcatcaacgaaacgagcgatgcggtggtagtggtcgataagctgacctacgccggaaacctgatgtcgctggcaccggtcgcgcaaagcgagcgctttgcctttgagaaagttgatatctgcgatcgggcagaactggcacgcgtattcactgagcatcagccagactgtgtcatgcatctggcagccgaaagccatgttgaccgttctattgacggcccggcagcgtttattgaaaccaacattgtcgggacttatacattgcttgaagcggcgcgggcttactggaatacgctgacggaagataaaaaatcagcgttccgttttcatcatatctccaccgacgaagtatatggtgacctgcactcgacggatgatttcttcaccgaaaccacgccgtatgcgccgagcagcccttattccgcgtcaaaagccagcagcgaccatctggtgcgcgcctggctgcggacctacggtctgccgacgctgatcaccaactgctcgaataactacggtccttaccactttccggaaaaactgatcccgctgatgatcctcaacgcgctggcgggtaaaccgctgccggtatatggcaacgggcagcaaatccgtgactggctgtatgtggaagatcacgcccgcgcgctgtattgcgtggcgaccaccgggaaagtcggtgaaacctataatattggtggtcacaacgagcgtaagaatctcgatgttgtggaaaccatttgcgagctgctggaagaactggcttcgaacaagccgcacggcgtggcgcactatcgtgacctgatcacctttgtcgctgaccgtccggggcatgatctgcgttatgccattgatgcttcgaaaattgcccgtgaacttggctggctgccgcaggaaacctttgaaagtggaatgcgtaaaacggttcagtggtatctggctaatgaaagctggtggaagcaggtgcaggacggcagctatcagggtgagcgtttaggtctgaaaggctaa

SEQ ID NO: 471859 - DNA, 882 bp, Shigella flexneri
atgaagggtattatcctggcgggcggttccggtacccgattgcatccgattacgcgcggcgtatcgaagcaactgttgccgatttacgataagccaatgatttactatccgctgtcggtgctgatgctggccggtatccgcgaaattctcatcatcactacgccggaagataaaggttatttccagcgcctgctgggcgatggtagtgagttcggtatccagctggaatatgccgaacagcccagcccggacggtctggcgcaggcctttatcatcggtgaaaccttccttaatggtgaaccttcttgtctggtgctgggcgataacatcttcttcggtcagggcttcagtccgaagctgcgtcatgttgcggcgcgcacggaaggggcgacggtttttggctatcaggtgatggacccggaacgctttggcgtggtggaatttgacgacaatttccgcgctatctcgcttgaagaaaagccaaaacagccgaagtcaaactgggcggtgaccgggctttatttctacgacagtaaagtcgtggagtacgcaaagcaggtgaagccgtcggagcgcggtgaactggagattacctccatcaaccagatgtacctcgaggcgggcaacctgaccgttgaactgctcgggcgcggatttgcctggctggataccggcactcacgacagcctgattgaggccagcacttttgtgcagacagtagaaaaacgccagggctttaagattgcctgcctggaagagatcgcctggcgtaacggctggctcgatgacgagggtgtgaagcgtgctgccagttcattagcgaaaactggctacggccaatatctgctggagttacttcgtgcccgtccgcgccagtattga

SEQ ID NO: 471860 - DNA, 675 bp, Shigella flexneri
gtgcccgtccgcgccagtattgagccactaacctgggaaaacgccttctttggtgttaacagcgccatcgtgcgcattacgtctgaagcaccgctcctgacgtcagacgccttagcgccatggtcacgggtgcaggccaaaattgcggcatcaaatacgggggaactggatgccctgcaacagctgggattctccctggtagaaggtgaagttgatttggcgctacccgtgaacaatgtcagtgatagcggtgctgtcgtggcacaagagaccgatattcccgcattacgtcagttagctagcgccgcatttgcgcaaagccgttttcgtgcgccgtggtatgcgcctgacgccagcggtcgcttttatgcacagtggattgaaaatgccgtgcgcggcacctttgatcatcaatgtctgattctacgtgcggcgtccggcgatattcgcggctatgtctctttacgggaactcaatgcgacagatgcgcgaattggcctgctggctggacgcggtgcaggtgctgagctgatgcaaacggcgctaaactgggcgtatgctcgcggtaaaacaactttgcgggtggcgacccaaatgggcaacaccgccgcgcttaaacgatacatacaaagtggtgcgaatgtagaaagcaccgcgtactggttatacaggtga

SEQ ID NO: 471861 - DNA, 1131 bp, Shigella flexneri
atgattccatttaacgcaccgccggtggtgggaaccgaactcgactatatgcagtcggcaatgggtagcggcaaactgtgtggcgatggcggttttacccgtcgctgccagcagtggctggagcaacgttttggcagcgccaaagtgttactgacgccgtcctgcaccgcttcgctggagatggcggcgctgctgctcgatatccagcctggcgatgaagtgatcatgccgagctacacctttgtctccaccgccaatgcctttgtgctgcgtggcgcgaaaatcgtctttgtggatgttcgcccggacaccatgaacatcgacgaaacgttgattgaagcagcgatcaccgacaaaacgcgcgttatcgtgccggtccattacgcgggtgtggcctgcgaaatggacaccattatggcgttggcgaaaaagcataatttgtttgtggtggaagatgccgctcagggcgtgatgtccacttacaaagggcgtgcactgggaaccattggtcatattggctgctttagcttccatgaaaccaaaaactacacggcgggtggtgaaggcggcgcgacgctgattaacgataaagcgttaatcgaacgagccgagatcatccgtgaaaagggcactaaccgcagccagttcttccgtggtcaggtcgataaatatacctggcgcgatattggctccagctatttgatgtccgatctgcaagctgcgtacctgtgggcgcaactggaagcagcggatcgtatcaaccagcaacgtctggcgctgtggcaaaactactacgatacgttagcgcctctggcgaaagccgggcgtatcgagctgccgtcgattcccgatggctgcgtgcagaacgcgcatatgttctacattaaactgcgggatattgatgaccggagcgcgttgattaactttctgaaagaagcggaaatcatggcggtgtttcattacattccgctgcacggttgccctgcgggggaacactttggtgagttccacggtgaagatcgctacaccaccaaagagagcgagcgcctgctgcgcctgccgctgttctacaacctgtcgcccgtcaatcagcgtacggtaattgcgactttgttgaactacttctcctga

SEQ ID NO: 471862 - DNA, 1251 bp, Shigella flexneri
atgtcgttggcaaaagcgtccttgtggacggcggccagtacactggtcaagattggtgccgggttactggtcggtaagttgctggcggtgtcatttggtccggcggggcttgggctggcggcaaatttccgccagttgattaccgtgctcggcgtgcttgccggggctggcatctttaacggtgtaaccaaatacgttgcccagtaccatgataatccgcaacagctgcgccgcgtggtcggcacttcatcagcgatggtacttggtttctctacgctgatggcgctggtttttgtgctggcagctgcgccaatcagccagggattgtttggtaataccgactatcaggggctggtgcgtttagtggcgctggtgcaaatggggatcgcctggggcaacctgttactggcgctgatgaaaggctttcgcgatgccgcaggtaatgcgttatcgctgattgtcggcagcttgattggcgttctcgcgtactacgtcagttaccgtttgggcggttatgaaggggcgttgctgggtctggcgctgattcccgcgctggtggtaattcctgccgccatcatgttgattaaacgtggtgtcatcccgttaagctatctgaaacccagctgggataacggtctggcagggcagttgagcaaatttacgctcatggcgttgattacgtcggtgaccttgcctgttgcttacatcatgatgcgtaaactgctggcggcgcagtatagctgggatgaagtggggatctggcaaggggtgagcagtatttccgatgcctacctgcaatttattacggcatcgttcagcgtatatttgctgcccacgttgtcgcggctaacggaaaagcgcgatatcacccgggaagtggttaaatcgctgaaattcgtcttaccggcagtggcggcagcgagttttaccgtctggttgctgcgtgattttgctatctggttgctgttgtcgaataaatttaccgctatgcgcgatctctttgcctggcagttagtgggtgatgtgttaaaagtgggcgcttatgtctttggttatctggtgatcgccaaagcgtcactgcggttttatattctggcggaagtcagccagttcactttattgatggtatttgcccactggctaatccctgcgcatggtgcactgggcgcggcgcaggcatatatggcaacttatatcgtctatttttctctttgttgtggcgtgtttttactctggcgtaggcgggcatga

SEQ ID NO: 471863 - DNA, 1080 bp, Shigella flexneri
atgactgtactgattcacgtactgggatcggatatccctcaccataaccgaaccgttttgcggtttttcaatgacgcgctggccgcgacgagcgagcacgcgcgcgagtttatggttgttggcaaggacgacggcttaagtgatagctgtccggcgctttctgtgcaatttttccctgggaaaaaatcgctggcggaagcggtcatcgcgaaagcaaaagctaaccgtcagcagcgattttttttccacggtcagttcaatcccacactgtggctggctctgctgagtggtggcattaagcccagccagtttttctggcatatctggggggcagacctgtatgagctttccagtggcttgagatataagcttttttacccactacgtcgcctggcgcaaaagcgagtcggctgtgtatttgccacccgcggcgatttgagcttttttgccaaaacgcacccaaaggtgcggggagaactgctgtacttcccgacgcggatggacccttctctcaatacgatggcgaacgatcggcaacgtgaaggaaaaatgaccattctggtggggaactccggcgaccgcagcaatgagcatgtcgccgctttacgtgccgttcatcagcaatttggcgatacggtaaaagtggtggtgccgatgggatatccgcctaataacgaagcgtacattgaggaagttcgtcaggcggggctggagttattcagcgaagaaaatctgcaaattttgagcgaaaaactggaatttgacgcctatctggcgctacttcgtcagtgcgatcttggttactttatttttgcccgccagcagggcattggtacgctttgcttactgattcaggcgggcattccttgtgtgcttaacagggaaaatccgttctggcaggatatgacggaacagcatttgccagtgctgtttactaccgacgatctcaacgaggatattgtgcgtgaagcgcagcgccagttggcgtcggcggataaaaacaccattgccttctttagccctaactatctacaaggctggcagcgggcgttggcgattgccgccggggaggtcgcatga

SEQ ID NO: 471864 - DNA, 1353 bp, Shigella flexneri
atgagtctgctgcaattcagtggcctgtttgtggtctggctgctctgcacgctgtttattgccacgctgacctggtttgagtttcgccgtgtgcgctttaacttcaatgtcttcttttcattgctgtttttgctcacctttttcttcggcttcccgctgaccagcgtgctggtatttcgctttgatgttggtgtcgcgccgccagaaatcttgttgcaggtgttgctttctgcgggctgcttctacgcggtttactatgtcacctacaaaacccgcctacgcaaacgcgttgctgatgtaccgcgccgtccgctgtttaccatgaaccgcgtggagaccaatcttacgtgggtgatcctgatgggtatcgcgctggtaagcgtcggcatcttcttcatgcacaacggctttttgctgttccggcttaactcctacagtcagatcttttccagtgaagtctccggcgtggcgttaaaacgcttcttttactttttcatcccggcgatgctggtggtctactttctgcgccaggacagcaaagcgtggctgtttttcctcgtcagcacggtcgcctttggcttgctgacttatatgattgtcggcggcactcgcgccaatatcatcatcgcattcgctatcttcctgtttattggcattattcgcggctggatttcgttgtggatgctggcggcggcgggcgtgctggggattgttggcatgttctggctggcgttaaaacgctatggaatgaatgtgagcggcgatgaagcgttctatacgtttctctatctcactcgcgacaccttttcaccgtgggagaatctggcgttgctgttgcagaactacgacaacatcgacttccagggcctggctccaattgtccgcgatttctatgtctttatcccttcctggctgtggccggggcgcccgagtatggtgctgaactcagccaattactttacctgggaagtactgaataaccactccggactggcgatctcgcctacgcttataggctcactggtggtgatgggcggcgcgttgttcatcccactcggggcgattgtggttggactgatcatcaaatggttcgactggctgtatgagctgggcaaccgcgagactaatcgctataaggctgcgatattgcacagtttctgctttggggcgatcttcaatatgatcgtgctggcacgtgaagggctggattcgtttgtctcacgcgtagtcttttttatcgtggtcttcggcgcatgtctgatgatcgcaaaactgttgtactggctttttgaaagcgccggactcattcataaacgtacaaaatcatcgctccggacgcaggttgaaggataa

SEQ ID NO: 471865 - DNA, 741 bp, Shigella flexneri
atgaataacaacaccacggcaccgacctatacgctgcgtggcttacagttgattggttggcgtgatatgcagcatgccctcgattatctgtttgctgacgggcagcttaagcagggaacgctggttgccattaatgccgaaaaaatgctgaccattgaagataacgccgaggtcagggagttaattaacgctgccgaatttaaatatgcggatggcatcagcgttgtacgttcagtacgtaaaaagtacccgcaggcgcaggtttcccgcgttgccggtgccgatctctgggaagagctgatggcgcgcgcaggcaaagaagggacgccggtatttcttgtgggcggtaaacctgaagtgctggcgcaaactgaagctaaactgcgcaaccaatggaatgtgaatatcgttggcagtcaggatggttattttaaacccgagcagcgtcaggcgctgtttgaacgcattcatgccagcggagcgcaaatcgtcaccgttgcgatgggatcgccaaagcaggagatcttcatgcgcgactgccgtctggtgcatccagatgcgctgtatatgggcgttggcgggacttacgatgttttcaccggtcacgtaaaacgcgcaccgaaaatctggcaaacgctgggactggagtggctctaccgcctgctttcgcagccgagccgcattaagcgtcagcttcgtttgctgcgttatttacgctggcactacaccggcaacctctga

SEQ ID NO: 471866 - DNA, 1386 bp, Shigella flexneri
atggcagataacaaaccagagctacagcgtgggctggaagctcgacatatcgaactcatcgccctggggggcaccattggcgtcggcctgtttatgggggccgccagtaccctgaaatgggccgggccatccgtattgttggcctatatcatcgccgggctgttcgtttttttcatcatgcgttcaatgggcgaaatgttgttcctcgaaccggttaccggttcgttcgccgtttatgcgcatcgttatatgagcccgttttttggctatctcaccgcctggtcttactggtttatgtggatggcggtggggatctcagaaatcaccgccattggcgtttatgtccagttttggtccccggagatggcgcagtggatacccgcattgatcgcggtggcgctggtggcgttggcgaatctggcggcggtgcggttgtacggcgaaatcgagttctggttcgcgatgatcaaagtcaccacgattatcgtgatgattgtcattggcctgggcgtgattttctttggctttggcaatggcgggcagtcgattggttttagcaatctcacagagcatggcggtttctttgcgggtggctggaaagggttcctgaccgctctgtgtattgtggtggcgtcctaccagggcgtggagctgattggcattactgccggtgaagcgaagaatccgcaggtgacgctgcgcagtgccgtaggcaaagtgctgtggcggatcctgattttctacgtaggcgcgattttcgttatcgtcaccatcttcccgtggaatgaaattggcagcaacggcagcccgttcgtactgacttttgccaaaatcggtattaccgcagcggcgggcattatcaactttgtggtgctgacggctgcgctctctggctgtaacagcggcatgtacagttgcggacgtatgctctacgcactggcgaaaaaccgtcagttaccggcggcaatggcaaaagtttcccgtcacggcgtaccggttgcgggtgtggcagtatctattgctattctgctaattggctcatgcctgaactacatcattcccaatccgcagcgtgtgtttgtctacgtctacagtgccagcgtgcttccggggatggtgccatggtttgtgatattgataagccagctgcgttttcggcgtgcacataaagcggcgattgccagccatccgttccgctcaatcctgttcccgtgggccaactacgtaacaatggcattcctgatttgcgttttgatcggcatgtactttaatgaagatacgcgtatgtcgctgtttgtcggcatcatctttatgctggcggtgacggcgatttataaagtttttgggcttaatcgccacggtaaagcgcataaactggaggaataa

SEQ ID NO: 471867 - DNA, 1236 bp, Shigella flexneri
atgctgcaacaggttccaacgcgtgcttttcatgtgatagcgaaaccgagcggttccgattgtaatctgaactgtgactactgtttttatctcgaaaaacaatccctttaccgcgaaaagccagtcacgcatatggacgatgacacgctggaagcgtatatccgtcactatatcgccgccagcgaactgcaaaacgaagtggcttttacctggcagggcggcgaaccaacgctactcgggctggagttttaccgccgtgccgtggcgctacaggcgaaatatggtgctggcaggaagataagtaacagtttccagactaacggcgtgctgctcgatgacgaatggtgtgcatttctggcagaaaataattttcttgttgggttatcgctggatggtccggctgagatccacaatcaatatcgcgtgaccaaaggcggcagacccacgcataaactggtgatgcgtgccctgacgctcctgcaaaaacatcatgtcgactataacgtgctggtctgcgtcaaccgcaccagcgcgcagcaaccgttacaggtttatgattttttgtgcgatgcgggagtcgaattcatccagtttattccggtggtcgagcgcctggctgatgaaacagctgtccgcgatggactgaaactacatgcgcctggtgatattcagggggaactgacggaatggtctgtgcgccccgatgaatttggtgaatttctggtggcgatttttgaccactggatcaaacgcgacgtcggcaagattttcgtgatgaatatcgaatgggcgtttgccaattttgtcggtgcgccgggtgcggtttgccatcatcagccaacctgtgggcgctcggtgattgttgagcacaacggcgacgtttacgcctgcgatcactatgtttatccgcaatatcggctggggaatatgcatcagcaaacaattgcagaaatgatcgattccccgcaacagcaggtgtttggtgaagataaatttaagcaattaccggcgcagtgtcgcagttgtaacgtgttaaaagcatgttggggaggctgcccgaaacaccgcttcatgctcgatgccagcggcaaaccggggctgaattatttgtgtgccgggtatcagcgttatttccgccatctaccgccatatcttaaagcaatggctgatttgctggcgcacggtcgcccggccagtgacattatgcaggcacatttgatggtggtgaataagtaa

SEQ ID NO: 471868 - DNA, 477 bp, Shigella flexneri
atgaaactcatcagtaacgatctgcgcgatggcgataagttgccgcatcgtcatgtctttaacggcatgggttacgatggcgataatatttcaccgcatctggcgtgggatgatgttcctgcgggaacgaaaagttttgttgtcacctgctacgacccggatgcgccaaccggctccggctggtggcactgggtagttgttaatttacccgctgatacccgcgtattaccgcaagggtttggctctggtctggtagcaatgccagacggcgttttgcagacgcgtaccgattttggtaaaaccggatacgatggcgcagcgccgccgaaaggcgaaacccatcgctacatttttaccgttcacgcgctggatgtagagcgtattgatgtcgatgaaggagccagcggcgcgatggtcgggtttaacgttcatttccactctctggcaagcgcatcgattaccgcgatgtttagttaa

SEQ ID NO: 471869 - DNA, 1290 bp, Shigella flexneri
atgacaacggacgatcttgcctttgaccaacgccatatctggcacccatacacatccatgacctcccctctgccggtttatccggtggcgagcgccgaaggttgcgagctaattttgtctgacggcagacgcctggttgacggtatgtcgtcctggtgggcggcgatccacggctacaatcacccgcagcttaatgcggcgatgaagacgcaaattgatgccatgtcgcatgtgatgtttggcggtatcacccatgcgcccgccatcgagctatgccgcaaactggtggcaatgacgccgcaaccgctggagtgcgtttttctcgcggactccggttccgtagcggtggaagtggcgatgaaaatggcgttgcagtactggcaagccaaaggcgaagcgcgccagcgttttctgaccttccgcaatggttatcatggcgatacctttggcgcgatgtcggtgtgcgatccggacaactcaatgcacagcctgtggaaaggctatctgccagaaaacttgtttgctcccgccccgcaaagccgcatggatggtgaatgggatgaacgcgatatggttggttttgcccgcctgatggcggcgcatcgtcatgaaatcgcagcggtgatcattgagccgattgtccagggcgcaggcgggatgcgcatgtaccatccggaatggttaaaacgaatccgcaaaatgtgcgatcgcgaaggtatcttgctgattgccgacgagatcgccaccggatttggtcgtaccggcaaactgtttgcctgtgaatatgcagaaatcgcgccggacattttgtgcctcggtaaagccttaaccggcggcacaatgaccctttccgccacacttaccacgcgcgaggttgcagaaaccatcagtaacggcgaagccggctgctttatgcatgggccaacttttatgggcaatccgctggcctgcgcggcagcaaacgccagcctagcgattatcgaatccggcgaatggcagcagcagatggcggctattgaagtgcagctgcgcgagcaactggcaccagcccgtgatgccgaaatggttgccgatgtgcgcgtactgggggcaatcggtgtggtcgaaaccactcgtccggtgaatatggcggcgctgcaaaaattctttgtcgaacagggggtatggatccggccttttggcaaactgatttacctgatgccgccctatattattctcccgcaacagttgcagcgtctgaccgcagcggttaaccgcgcggtacaggatgaaacatttttttgccaataa

SEQ ID NO: 471870 - DNA, 1041 bp, Shigella flexneri
atggctcaccgcccacgctggacattgtcgcaagtcacagaattatttgaaaaaccgttgctggatctgctgtttgaagcgcagcaggtgcatcgccagcatttcgaacctcgtcaggtgcaggtcagcacgttgctgtcgattaagaccggagcttgtccggaagattgcaaatactgcccgcaaagctcgcgctacaaaaccgggctggaagccgagcggttgatggaagttgaacaggtgctggagtcggcgcgcaaagcgaaagcggcaggatcgacgcgcttctgtatgggcgcggcatggaagaatccccacgaacgcgatatgccgtacctggaacaaatggtgcagggggtaaaagcgatggggctggaggcgtgtatgacgctgggcacgttgagtgaatctcaggcgcagcgcctcgcgaacgccgggctggattactacaaccacaacctggacacctcgccggagttttacggcaatatcatcaccacacgcacttatcaggaacgcctcgatacgctggaaaaagtgcgcgatgccgggatcaaagtctgctcaggtggcattgtgggcttaggcgaaacggtaaaagatcgcgccggattattgctgcaactggcaaacctgccgacgccgccggaaagcgtaccaatcaacatgctggtgaaggtgaaaggcacgccgcttgccgataacgatgacgttgatgcctttgattttattcgcaccattgccgtagcgcggatcatgatgccgacctcttacgtgcgcctttctgccggacgcgagcagatgaacgaacagactcaggcgatgtgctttatggcaggcgcaaactcgattttctacggttgcaaactgctgaccacgccgaatccggaagaagataaagacctgcaactgttccgcaaactggggctaaatccgcagcaaactgccgtgctggcaggggataacgaacaacagcaacgtcttggacaggcgctgatgaccccggacaccgacgaatattacaacgcggcagcattatga

SEQ ID NO: 471871 - DNA, 1155 bp, Shigella flexneri
atgagctggcaggagaaaatcaacgcggcgctcgatgcgcggcgtgctgccgatgccctgcgtcgccgttatccggtggcgcaaggagccggacgctggctggtggcggatgatcgccagtatctgaacttttccagtaacgattatttaggtttaagccatcatccgcaaattatccgtgcctggaagcagggggcggagcaatttggcatcggtagcggcggctccggtcacgtcagcggttatagcgtggtgcatcaggcgctggaagaagaactggccgagtggcttggctattcgcgggcgctgctgtttatctctggttttgccgcgaatcaggcagtcattgccgcgatgatggcgaaagaggaccgtattgttgccgaccggcttagccatgcctcattgctggaggctgccagtttaagcccgtcgcagcttcgccgttttactcataacgatgtcgctcatctggcgcgactgcttgcttccccctgtccggggcagcaactggtggtgacagaaggcgtgttcagcatggacggcgatagcgcgccactggcggaaatccagcaggtaacgcaacagcacaatggctggttgatggtcgatgatgcccacggcacgggcgttatcggggagcaggggcgcggcagctgctggctgcaaaaggtaaaaccagaattgctggtagtgacttttggcaaaggatttggcgtcagtggggctgcggtgctttgctcaagtacggtggcggattatctgctgcaattcgcccgccaccttatctacagcaccagtatgccgcccgctcaggcgcaggcattacgtgcgtcgctggcggtcattcgccgtgatgagggggatgcacggcgcgaaaaactggtgtcactcattgcgcgttttcgtgccggagtacaggatttgccgtttacgctggctgattcatgcagcgccatccagccattgatcgtcggtgataacagccgtgcgttacaactggcagaaaaactgcgccagcaaggctgctgggtcacggcgattcgcccgccaaccgtacccgctggtactgcgcgactgcgcttaacgctaaccgctgcgcatgaaatgcaggatatcgaccgtctgctggaggtgctgcatggcaacggttaa

SEQ ID NO: 471872 - DNA, 756 bp, Shigella flexneri
atggcaacggttaataaacaagccattgcagcggcatttggtcgggcagccgcacactatgagcaacatgcagatctacagcgccagagtgctgacgccttactggcaatgcttccacagcgtaaatacacccacgtactggacgcgggttgtggacctggctggatgagccgccactggcgggaacgtcacgcgcaggtgacggcgttagatctctcgccgccaatgcttgcgcaagcccgccataaagatgccgcagatcattatctggcaggagatatcgaatccctgccgttagcgactgcgacgttcgatcttgcatggagcaatctcgcggtgcagtggtgcggtaatttatccacggcactccgcgagctgtatcgggtggtgcgccccggaggcgtggtcgcgtttaccacgctggtgcagggatcgttacccgaactgcatcaggcgcggcaggcggtggacgagcgtccgcatgctaatcgctttttaccgccagatgaaatcgaagagtcgctgaacggcgtgcgttatcaacatcatattcagctcatcacactatggtttgatgatgcgctcagtgccatgcgttcgctgaaaggcatcggtgctacgcatcttcatgaagggcgcgacccgcgaatattaacgcgttcgcagttgcagcgattgcaactggcctggccgcaacaacaggggcgatatcctctgacgtatcatctttttttgggagtgattgctcgtgagtaa

SEQ ID NO: 471873 - DNA, 678 bp, Shigella flexneri
gtgagtaaacgttattttgtcaccggaacggataccgaagtggggaaaaccgtcgccagttgtgcacttttacaagccgcgaaggcagtaggttatcggacggcaggttataaaccggtcgcctctggcagcgaaaagaccccggaaggcttacgtaatagtgacgcgctggcgttacagcacaacagcagcctgcagctggattacgcaacggtaaatccttacaccttcgcagaacccacctcgccgcacatcatcagcgcccaagagggcaggccgatagaatcattggtaatgagcgccggattacgcgcgcttgaacaacaggctgactgggtgttagtggaaggtgctggcggctggtttacgccgctttctgacactttcacttttgcagattgggtaacacaggaacaactgccggtgatactggtagttggtgtgaaactcggctgtattaatcacgcgatgttgactgcgcaggcaatacaacacgccggactgactctggcgggttgggtggcgaacgatgttacgcctccgggaaaacgtcacgctgaatatatgaccacgctcacccgcatgattcccgcgccgctgctgggagagatcccctggcttgcagaaaatccagaaaatgcggcaaccggaaagtacataaaccttgccttgttgtag

SEQ ID NO: 471874 - DNA, 2022 bp, Shigella flexneri
atgagtaaaccgttcaaactgaattccgcttttaaaccttctggcgatcagccagaggcgattcgacgtctcgaagaggggctggaagatggcctggcgcaccagacgttacttggcgtgactggctccgggaaaaccttcaccattgccaatgtcattgctgaccttcagcgcccaaccatggtacttgcgcccaacaaaacgctggcggcccagctgtatggcgaaatgaaagagttcttcccggaaaacgcggtggagtatttcgtctcctactacgactactatcagccggaagcctatgtaccgagttccgacaccttcattgagaaagatgcctcggttaacgaacatattgagcagatgcgtttgtccgccaccaaagcgatgctggagcggcgtgatgtgattgtagtggcgtctgtttccgcgatttatggtctgggcgatcctgatttatatctcaagatgatgctccatctcacggtcggtatgattatcgatcagcgcgcgattctgcgccgactggcggagctgcaatacgctcgtaatgatcaagcattccagcgtggtactttccgcgttcgtggcgaggtgatagatatcttcccggcagaatcggatgacattgcacttcgcgtggaactgtttgacgaggaagtggaacgattgtcgttatttgacccgctgaccgggcagattgtttccactattccacgttttaccatctacccgaaaacgcactacgtcacaccgcgcgagcgcatcgtacaggcgatggaggagatcaaagaagaactggccgccagacgcaaagtgctgttggaaaacaacaaactgctggaagagcagcggctgacccagcgtacccagtttgatctggagatgatggacgagctgggctactgttcggggattgaaaactactcgcgcttcctctccggtcgtggaccgggtgagccaccgccgacgctgtttgattacctgcctgccgatgggctgctggtcgtcgatgaatctcacgtcaccattccacaaattggcggcatgtatcgcggtgaccgggcgcgtaaagagacactggtggagtacggcttccgcctgccatcagcgctggataaccgtccgcttaagtttgaagagttcgaagcattagcgccgcaaaccatctatgtttcggcgacgccgggtaattacgagctggaaaaatccggcggcgatgtggtggatcaggtggtgcgtccaaccggattgcttgacccgattatcgaagtgcggccggtggcgacacaggttgatgatcttctttcggagattcgtcagcgagcggcaattaacgaacgcgtgctggtcaccacactgaccaagcgaatggcggaagatcttaccgaatatctcgaagaacacggtgagcgcgtgcgttatcttcactcagatatcgacaccgtcgagcgtatggagattatccgcgacttgcgtctgggtgagttcgacgtattggtagggatcaacttactgcgtgaaggtctggatatgccggaagtgtcgctggtggcgatcctcgacgctgacaaagaaggcttcctgcgttccgaacgttcgttgatccagaccattggtcgtgcggcacgtaacgttaacggtaaagcgattctctacggcgataggagcactccatcaatggcgaaagcgattggcgaaaccgaacgtcgccgtgagaaacagcagaagtacaacgaggaacacggcattacgccgcaaggcttgaacaagaaagtggtcgatatcctggcgctggggcagaacattgccaaaaccaaagcgaagggcagaggaaaatcgcgcccgattgttgagccggataatgtgccgatggatatgttgccgaaagcgttgcagcagaaaatccatgaactggaagggctgatgatgcaacacgcgcagaatctggagttcgaagaagcggcacaaattcgtgaccagttgcatcagttgcgtgagttgtttattgccgcatcgtaa

SEQ ID NO: 471875 - DNA, 909 bp, Shigella flexneri
atgcgcaatcgtacgctggctgatcttgatcgtgtcgttgctctcggcggagggcatggactgggacgcgttctctcatcactttcgtctttgggttctcgtttaacgggtatcgtcaccaccacggataatggtggctcgacggggcgtattcgccgttcagaaggcggcattgcttggggcgatatgcgcaactgcctcaaccagctgataacggaaccgaacgtcgcctccgcgatgtttgaataccgttttggcggcaatggcgaactttccggtcataatctcggaaacttgatgttaaaggcgctggatcaccttagcgtgcggcctctggaagccatcaatttaattcgtaatctgctgaaagtggatacgcatttgattccaatgtcagagcatcctgttgatctgatggcgattgacgatcaggggcatgaagtttacggcgaggtcaatatcaaccagttaactacgccgattcaagagttattgttaacgcctaatgtacccgcaacgcgtgaggcggttcacgctatcaatgaagcggatctcatcattattgggcctggcagtttttataccagcctgatgccaattctgctgctgaaggaaatcgcccaggcattacgccgcacgccagcgccgatggtttatatcggcaatctggggcgtgagttgagtttacctgcggctaatttgaagctggaaagcaagctggcaattatggagcagtatgttggtaaaaaggtcattgatgcggtcatcgtcgggccaaaagtggatgtctcggcggtgaaagagcggattgtgatccaggaggtactggaggccagcgatattccgtatcgtcatgaccgccagttgttacataacgcgctggaaaaggcgttacaggctttaggttaa

SEQ ID NO: 471876 - DNA, 990 bp, Shigella flexneri
atggcttcacaactgactgatgcatttgcgcgtaagttttactacttgcgcctgtcgattaccgatgtgtgtaactttcgttgcacctactgcctgccggatggctacaaaccgagcggcgtcaccaataaaggctttcttaccgtcgatgaaattcgccgggttacgcgcgccttcgccagtctgggcaccgaaaaagtgcgcctgacaggaggagagccgtctttacgccgcgactttaccgatatcatcgccgctgtgcgggaaaacgacgctatccgccagattgcggtcaccaccaatggttaccgtctggaacgcgatgtggcgaactggcgcgatgcgggacttactggcattaacgtcagtgtcgacagtttggacgcccgccagtttcacgctattaccgggcaggataaattcaaccaggtcatggcagggattgatgctgcatttgaggccggttttgagaaggtcaaagtcaataccgtgctgatgcgtgatgttaatcatcaccagctcgacacctttctgaactggatccagcatcgccctatccagctgcgtttcatcgaactgatggaaacgggcgagggcagcgagctcttccgtaagcatcacatctctggtcaggttctgcgtgacgagctactgcgtcgcggctggatccaccaattacgtcaacgcagcgacggtcccgcgcaagtcttttgccatccagattacgccggagagattggccttatcatgccgtatgaaaaagacttctgcgccacttgcaaccgcctgcgcgtttcctccattggtaaactccatctctgcctgtttggtgaaggcggcgttaacctgcgcgatctgctggaaggcgatacccagcaacaggcgctggaagcgcgtatttcagcggcgctgcgggagaagaaacagacccatttcctgcatcaaaacaacaccggtattacgcaaaacttatcgtacattggcggctaa

SEQ ID NO: 471877 - DNA, 513 bp, Shigella flexneri
atgagtcaggtaagcactgaatttatcccgacccgtattgctattcttacggtttctaatcgtcgcggtgaagaagacgatacctccggtcactatctgcgcgattcggcgcaagaagcgggccatcacgttgtcgatgaagccattgtgaaagaaaaccgctacgctattcgcgctcaggtatctgcgtggatcgccagcgacgatgtacaagtggtattgattacgggtggtactggcctgacggaaggtgatcaggctcccgaagcgctgctgccgttgttcgaccgtgaggttgaaggttttggtgaagtgttccgtatgttgtcgtttgaagagattggcacttccacgttgcaatctcgtgcggtagcgggcgtcgctaacaaaacgctgattttcgccatgccgggttcgaccaaagcgtgccgtaccgcatgggaaaatatcatcgcgccgcagctggatgcccgtacgcgtccgtgtaatttccatccacatttgaagaaataa

SEQ ID NO: 471878 - DNA, 486 bp, Shigella flexneri
atgtcgcaactgacccatatcaacgccgctggcgaagcgcacatggtggatgtctccgccaaagcggaaaccgtgcgtgaagcgcgggcggaagcctttgtcaccatgcgcagcgagacgctggcgatgattattgatggtcgccaccacaaaggcgacgtatttgccactgcgcgtattgccggtattcaggcggcaaaacgcacttgggatctgatcccgctgtgtcacccgctgatgctcagcaaagttgaagtcaatttacaggccgagccggagcacaatcgggtgcgtatagaaaccttatgccgcctgaccgggaaaaccggtgtcgaaatggaagcgttaaccgcggcctccgtggcggcgctgaccatttatgacatgtgcaaagcggtgcaaaaagatatggtgattggtccggtacgtttgctggcgaagagcggcggcaagtcgggtgactttaaggtggaagcggatgattaa

SEQ ID NO: 471879 - DNA, 246 bp, Shigella flexneri
atgattaaagttctttttttcgcccaggtgcgcgagttggtgggaacagatgcaaccgaagtggctgcggattacccaaccgttgaagcgttacgccagcacctggctgcgcagagcgatcgctgggcgctggcgctggaagatggcaaattgctggctgccgtcaaccagacgctggtgagttttgaccatccgctgactgacggcgacgaagtagctttcttcccgccggtaaccggaggttaa

SEQ ID NO: 471880 - DNA, 453 bp, Shigella flexneri
atggcagaaaccaaaattgttgtcggcccgcagccgttcagcgtaggagaagagtacccgtggctggcggagcgtgacgaagacggtgcggtagtcaccttcaccggaaaggtgcgcaaccataacctgggcgacagcgtcaaagcattaaccctcgaacactatccggggatgactgaaaaagcactggcagaaattgttgatgaagcgcgtaaccgctggccgctggggcgcgtcacggtgattcaccgcatcggggaattatggccgggcgatgaaatcgtttttgtcggtgtcaccagtgcgcatcgcagcagtgcgtttgaagccgggcagtttattatggattatctcaaaacccgcgcaccgttctggaagcgcgaagccacgccggaaggcgaccgctgggttgaagcccgggagagcgatctgcaggcggcaaaacgctggtag

SEQ ID NO: 471881 - DNA, 705 bp, Shigella flexneri
atggacagattcccacgttctgattcaatcgtacaaccccgggctggcttgcaaacttatatggcgcaagtctatggctggatgaccgttggcttgttgctgaccgcatttgttgcctggtatgcggctaattccgcggccgtgatggagctgttgttcactaaccgtgtctttttaatcggtctgatcatcgcgcaattagcattggttattgtgttatcagcgatgattcaaaagctgagcgcaggtgtaacgacgatgctctttatgctttattcggcgctgacgggtcttacgctttccagtatattcattgtctataccgctgcttctatcgccagtactttcgtcgttactgccgggatgttcggcgcaatgagcctgtacggttacaccacgaagcgcgatttaagtggctttggcaatatgctgtttatggcgttaatcggcattgtgctggcatcgctggtcaacttctggctgaaaagcgaagcattgatgtgggcagttacctacatcggcgtgattgtctttgtcggattgacggcgtatgacactcagaaattgaaaaatatgggtgagcagattgatacccgcgacacgtcgaacctgcgcaaatattccattcttggtgcgttaaccttgtatctggacttcatcaacctgttcctgatgttgttacggatcttcggcaaccgccgttaa

SEQ ID NO: 471882 - DNA, 714 bp, Shigella flexneri
atggaatcatactcgcaaaacagcaataaattagattttcagcacgaggccaggatattaaacggtatatggctcattaccgctttaggtttggtggcaaccgcaggactagcctggggagctaagtatctcgaaattacggcaaccaaatatgattcaccaccaatgtatgtcgccatagggttattattactttgtatgtatggcttaagtaaggatatcaacaagataaatgccgccatcgcgggcgtaatatatctgtttttactctctttggtggcgattgtcgttgcaagtttagttcctgtatatgccattatcatcgtgttcagcactgcgggcgcgatgtttttaatcagtatgctggccggtttattatttaatgttgatcctggttctcaccgttttatcattatgatgacgttgacagggttggccctggtaatcatcgtgaatgcggcattaatgagtgaacggcccatttgggtaataagttgcttaatgattgtgttatggccaggcattatctcgcatggacgaaataagctccttgaactggcaggaaaatgccatagtgaagagttgtggagtccggttcgttgcgcttttacaggtgcattaacactctattactattttatcggcttctttgggatacttgccgcgatagctataacgcttgtctggcaaaggcatacgcgtttttttcattag

SEQ ID NO: 471883 - DNA, 957 bp, Shigella flexneri
atgagtaaatcacacccgcgctggcgcttagcaaagaagatcctcacctggctgttttttatcgcggtgattgtgttgctggtggtctacgccaaaaaagtggactgggaagaggtctggaaggtcatccgcgactacaatcgcgttgcgctgcttagtgcggtcgggctggtggtcgtcagctatctgatttacggctgctatgacctgctcgcccgcttttactgcggtcacaaactggcgaagcgccaggtgatgctggtgtcgtttatctgctacgccttcaacctgacgctcagtacctgggtcggcggcattggtatgcgctatcgtttgtactcccgactagggttaccgggcagcactattacgcggatttcctcgctcagtattaccaccaactggctgggctatattttactggcagggattatctttaccgcaggcgtggtggagttgccggattactggtatgtcgatcaaactacgctgcgtattctcggcattggcttactgatgattatcgcggtttatttgtggttttgcgctttcgcgaagcaccgccatatgaccatcaaagggcaaaagctggtgctgccttcatggaaattcgccctcgctcagatgctgatttccagcgttaactggatggtaatgggggcgattatctggctgttacttggtcaaagcgtgaactatttctttgtactgggcgtgttactggttagtagtattgctggcgtcatcgtgcatattccggcggggatcggtgtgctggaagcggtgtttatcgcactactggctggggagcatacctcgaaagggagcattatcgccgccctgctcgcttatcgcgtcctgtattactttatcccgctgctgctggcgctgatctgttacctgctactggaaagccaagcgaagaagctacgggcgaaaaatgaagcggcgatgtga

SEQ ID NO: 471884 - DNA, 1242 bp, Shigella flexneri
atgaaatgtagctggcgcgaaggcaataagatccagttgctggaaaacggcgagcaatattatcccgcggtgtttaaggcgattggcgaggcacaagaacgcatcattcttgaaacgtttatctggtttgaggataacgtcggcaaacagctgcatgcggcactactggcagcagcgcaacgcggggttaaagcggaagtcttgctggatggctacggttcgccggatctcagcgatgagtttgtcaatgaactgacggcagctggcgtagtgttccgctactacgatccccgccctcgcctttttggtatgcgcaccaatgtgtttcgccggatgcatcgcaaaattgtggtgatcgacgcgcgtatcgcctttattggcgggctgaattactccgccgagcatatgtccagctacggtccagaggctaaacaggattacgcggtacgccttgaagggccgattgtcgaagatattctccagtttgagctggaaaacctgcctggacagagcgcggcacgacgctggtggcgacgtcatcacaaagcggaagagaaccgccagccgggagaagcgcaggtattgctggtctggcgcgataacgaagaacatcgcgatgatattgaacgccattatctgaaaatgctcactcaggcgcagcgggaagtgattatcgccaacgcctacttcttccccggctatcgatttttacacgccttgcgtaaagcggcacggcgcggggtgcggatcaaactgatcattcagggcgaaccggatatgccgattgtcagagtcggtgcgcgcttgctgtataactatctggttaaaggcggcgttcaggtttttgagtaccgccgccgcccgctccacggcaaagtggcattgatggacgatcactgggcgacagtagggtccagtaatctcgatccgctcagtttgtcactgaatctcgaagcaaatgtcatcatccacgatcgtcattttaaccagacgctgcgcgataatctgaacggcattattgccgcagattgtcagcaggtggatgaaaccatgctgcccaaacgcacctggtggaacctgaccaaaagcgtgctggcgttccactttttacgccacttcccggcgctggttggctggcttccggcacacacaccacgtctgacgcaggttgatccccccgcacaaccgacaatggaaacgcaggatcgggtagaaactgaaaacacgggggtaaacccctga

SEQ ID NO: 471885 - DNA, 762 bp, Shigella flexneri
atgcccgatcaaacacaacaattttcgttcaaggtgctcaccatcaacattcacaaaggctttaccgcgtttaaccgacgtttcattttgccggaacttcgcgatgccgtgcgtaccgtcagcgccgatattgtttgcctgcaggaagtgatgggcgcgcacgaagttcatccgctgcatgtggaaaactggcccgatacctcgcactacgagtttctcgccgacactatgtggagcgattttgcctacggtcgcaatgccgtatacccggaagggcatcacggcaacgccgtactgtcgcgttatcccattgaacattatgagaatcgcgatgtttcggtcgatggtgcggaaaagcgcggcgtgctctactgccgcattgtgccgccgatgaccggaaaagcgattcatgtgatgtgcgtacatctgggcctgcgtgaggcgcaccgtcaggcgcagcttgcgatgctcgccgaatgggtgaatgagctaccggacggcgaaccggtattggtggcgggtgatttcaatgactggcggcaaaaagctaatcatccgttaaaagtgcaggccggactggatgagatttttacccgcgcccacggacgcccggcgcgcacgtttccggtgcaatttcctctactacgactggacaggatctacgtcaaaaatgccagcgccagcgcgccaaccgcgttgccgctgcggacatggcgacacctttctgatcatgcccctttaagtgcggagattcatttatga

SEQ ID NO: 471886 - DNA, 411 bp, Shigella flexneri
atgaagtggcaacaacgtgttcgtgtcgcaacgggtctaagttgctggcagattatgttgcatttactggtagtggcgctgctggtggtgggctggatgagtaagactctggttcacgtcggcgtgggattatgcgcactgtattgtgtcacggtagtgatgatgctggtgtttcagcgccaccccgagcaacgctggcgtgaggtggcagacgtgctggaagagctgaccacgacctggtattttggcgcagcgctgattgtgctgtggctgttgtcccgcgtactggaaaacaactttttgctggcaattgcagggctggcgatccttgctggcccggcggtagtgtctttgctggcgaaagataagaagttacatcaccttacgtctaaacatcgcgtacgccgctga

SEQ ID NO: 471887 - DNA, 1107 bp, Shigella flexneri
atgtttcatcgcttatggacgttaatccgcaaagagttgcagtcgttgctgcgcgaaccacaaacccgcgcgattctgattttacccgtgctaattcaggtgatcctgttcccgttcgccgccacgctggaagtgactaacgccaccatcgccatctacgatgaagataacggcgagcattcggtggaacttactcaacgttttgcccgcgccagcgcctttacacatgtgctgctgctgaaaagcccacaggagatccgcccgaccatcgacacacaaaaggcgttactactggtgcgtttcccggctgacttctcgcgcaaactggataccttccagaccgcgccgttgcagttgatcctcgacgggcgtaactccaacagtgcgcaaattgccgccaactacctgcaacagatcgtcaaaaattatcagcaggagctgctggaaggaaaaccgaaacccaacaacagcgagctggtggtacgcaactggtataacccgaatctcgactacaaatggtttgtggtgccgtcgctgatcgccatgatcaccactatcggcgtaatgatcgtcacttcactttccgtcgcccgcgaacgtgaacaaggtacgctcgatcagctactggtttcgccgctcaccacctggcagatcttcatcggcaaagccgtaccggcgttaattgtcgccaccttccaggccaccattgtgctggcgattggtatctgggcgtatcaaatccccttcgccggatcgctagcgctgttctactttacgatggtgatttacggtttatcgctggtgggattcggtctgttgatttcatcactctgctcgacacaacagcaggcgtttatcggcgtgtttgtttttatgatgcccgccattctcctttccggttacgtttcgccggtggaaaacatgccagtgtggctgcaaaatctgacgtggattaaccctattcgccactttacggacattaccaagcagatttatttgaaggatgcgagtctggatattgtgtggaatagtttgtggccgctactggtgataacggccacgacagggtcagcggcgtacgcgatgtttagacgtaaggtgatgtaa

SEQ ID NO: 471888 - DNA, 1134 bp, Shigella flexneri
atgagtaacccgatcctttcctggcatcgcgtgcgggcgctgtgcgtcaaagagacgcggcagatcgttcgcgatccgagtagctggctgattgcggtagtgatcccactgctactgctgtttatttttggttacggcattaacctcgactccagcaagctgcgggtcgggattttgctggaacagcgtagcgaagcggcgctggatttcacccacaccatgaccggttcgccctacatcgacgccaccatcagcgataaccgtcaggaactgatcgccaaaatgcagtcggggaaaattcgcggtctggtggttattcccgtggatttcgccgaacagatggagcgcgccaacgccaccgcaccgattcaggtgatcaccgacggcagtgagccgaataccgctaactttgtgcaggggtatgtcgaagggatctggcagatctggcaaatgcagcgagcggaggacaacgggcagacttttgaaccgcttattgatgtacaaacccgctactggtttaacccggcggcgataagccagcactttattatcccgggtgcggtgaccattatcatgacggtcatcggcgcgattctcacctcgctggtggtggcgcgagaatgggaacgcggcaccatggaggctctgctctctacggagattacccgcacggaactgctgctgtgtaagctgatcccttattactttctcgggatgctggcgatgttgctgtgtatgctggtgtcagtgtttattctcggcgtgccgtatcgcggttcgctgctgattctgttttttatctccagcctgtttttactcagtaccctgggaatggggctgctgatttccacgattacccgcaaccagttcaatgccgctcaggtcgccctgaacgccgcttttctgccgtcgattatgctttccggctttatttttcagatcgacagtatgcccgcggtgatccgcgcggtgacgtacattattcccgctcgttatttcgtcagcaccctgcaaagcctgttcctcgccgggaatattccagtggtgctggtggtaaacgtgctgtttttgatcgcttcggcggtgatgtttatcggcctgacgtggctgaaaaccaaacgtcggctggattag

SEQ ID NO: 471889 - DNA, 1737 bp, Shigella flexneri
atgaatgatgccgttatcacgctgaacggcctggaaaaacgctttccgggcatggacaagcccgccgtcgcgccgctcgattgtaccattcacgccggttatgtgacggggttggtggggccggacggtgcaggtaaaaccacactgatgcggatgttggcgggattactgaaacccgacagcggcagtgccacggtgattggctttgatccgatcaaaaacgacggcgcgctgcacgccgtgctcggctatatgccgcagaaatttggtctgtatgaagatctcacggtgatggagaacctcaatctgtacgcggatttgcgcagcgtcaccggcgaggcacgtaagcaaacttttgctcgcctgctggagtttacgtctcttgggccgtttaccggacgcctggcgggcaagctctccggtgggatgaaacaaaaactcggcctggcctgtaccctggtgggcgaaccgaaagtgttgctgctcgatgaacccggcgtcggcgttgaccctatctcacggcgcgaactgcggcagatggtgcatgagctggcgggcgaagggatgttaatcctctggagtacctcgtatctcgacgaagccgagcagtgccgtgacgtgttactgatgaacgaaggcgagttgctgtatcagggagaaccaaaagccctgacacaaaccatggccggacgcagctttctgatgaccagtccacacgagggcaaccgcaaactgttgcaacgcgccttgaaactgccgcaggtcagcgatggcatgattcaggggaaatcggtacgtctgatcctcaaaaaagaggccacaccagacgatattcgccatgccgacgggatgccggaaatcaacatcaacgaaactacgccgcgttttgaagatgcgtttattgatttgctgggcggtgccggaacctcagaatcgccgctgggtgcaatattgcatacggtagaaggcacacccggcgagacggtgatcgaagcgaaagaactgaccaagaaatttggtgattttgccgccaccgatcacgtcaactttgccgttaaacgtggggagatttttggtttgctggggccaaacggcgcgggtaaatcgaccacctttaagatgatgtgcggtttgctggtgccgacttccggccaggcgctggtgctggggatggatctgaaagagagttccggtaaagcgcgccagcatctcggctatatggcgcaaaaattttcgctctacggcaacctgacggtcgaacagaatttacgctttttctctggtgtgtatggcttacgcggtcgggcgcagaacgaaaaaatctcccgtatgagcgaggcatttggcctgaaaagtattgcctcacacgccaccgatgaactgccattaggttttaaacagcggctggcgctggcctgttcgctgatgcatgaaccggatattctctttctcgacgaaccgacttccggcgttgaccccctcacccgccgtgaattttggctgcacatcaacagcatggtagagaaaggcgtcacggtgatggtcaccacccactttatggatgaagcggaatattgcgaccgcatcggcctggtgtaccgtgggaaattaatcgccagcggtacgccggacgatttgaaagcacagtcagctaacgatgagcaacccgatcccaccatggagcaagcctttattcagttgatccacgactgggataaggagcatagcaatgagtaa

SEQ ID NO: 471890 - DNA, 996 bp, Shigella flexneri
atgaaaaaacctgtcgtgatcggactggcggtagtggtacttgccgccgtggttgccggaggctactggtggtatcaaagccgccaggataacggcctgacgctgtatggcaacgtggatattcgtacggtgaatcttagtttccgtgttggggggcgcgttgaatcgctggcggtggacgaaggtgatgctatcaaagcgggccaggtgctgggcgaactggatcacaagccgtatgagattgccctgatgcaggcgaaagcgggcgtctcggtggcacaggcgcagtatgatctgatgcttgccgggtatcgcgatgaagaaatcgctcaggccgccgcagcggtgaaacaggcgcaagccgcctatgactatgcgcagaacttctataaccgccagcaaggactgtggaaaagccgcaccatttcggcaaatgacctggaaaatgcccgctcctcgcgcgaccaggcacaggcaacgctgaaatcagcacaggataaattgcgtcagtaccgttccggtaaccgtgaacaggacatcgctcaggcgaaagccagcctcgaacaggcgcaggcgcaactggcgcaggcggagctgaatttacaggactcaacgttgatagcaccgtctgatggcacgctgttaacgcgcgcggtagagccaggcacggttctcaatgaaggtggcacggtgtttaccgtttcactaacgcgtccggtgtgggtgcgcgcttatgttgatgaacggaatcttgaccaggcccagccggggcgcaaagtgctgctttataccgatggtcgcccggacaagccgtatcacgggcagattggtttcgtttcgccgactgctgaatttaccccgaaaaccgtcgaaacaccggatctgcgtaccgacctcgtctatcgcctgcgtattgtggtgaccgacgccgatgatgcgttacgccagggaatgccagtgacggtacaattcggtgacgaggcaggacatgaatga

SEQ ID NO: 471891 - DNA, 672 bp, Shigella flexneri
atgaataatcctgccatgacaatcaagggtgaacaggcgaaaaaacagctgattgctgccgcactggcgcagtttggtgaatatggaatgaacgccaccacccgcgagatagccgcccaggccgggcagaatatcgctgccatcacctactacttcggttcgaaagaagatttgtacctcgcctgcgcccaatggattgccgattttattggcgagcagttccgtccgcatgccgaggaagccgaacgcttgttcgcccaaccacagcctgatcgggctgccatccgtgaactgatccttcgcgcctgcaggaacatgattaagctgctcacccaggatgacaccgtcaacctcagcaagtttatctcccgtgagcagctctctcccacggcagcctaccacctggtgcacgaacaggtgattagtccgctacacagccacctgacacgcctgattgccgcctggaccggctgcgacgctaatgacacccgcatgatccttcatacccatgcgttgattggtgagattctggcgttccgtcttggcaaagaaacaattctgttacgtaccggctggaccgcgttcgatgaagaaaagaccgaactgatcaaccagacggtgacctgtcatatcgacctgattttgcaaggattatcgcaaaggagtttgtag

SEQ ID NO: 471892 - DNA, 1221 bp, Shigella flexneri
atgtctttcgattctttgggtttaagccctgatatcctgcgcgccgttgccgagcagggttaccgtgaacccacccctattcagcagcaggcgatccctgcggtgctggaaggccgcgacctgatggctagcgcccagaccggcaccggcaaaacagcgggctttacgctgccgctgttgcaacacctgatcactcgccagccgcacgccaaagggcgtcgtccggtacgtgcgctcattcttaccccgacccgtgaactggcggcacagattggcgaaaacgtccgtgattacagcaaatacctgaacattcgttcgctggtggtgtttggcggtgtcagcattaacccacaaatgatgaagttgcgcggcggcgttgatgtgctggtggcaacgccgggacgtttgctggacctggaacatcaaaatgcagtgaagctggatcaggttgaaatcctcgtcctcgatgaagctgaccgcatgctcgacatgggctttatccacgatatccgtcgcgtgttaacaaaactgccagcgaaacgccagaacctgctgttctctgcgaccttctctgacgatattaaagccctggcggaaaaactgttgcacaacccgctggaaatcgaagtggcacgccgcaataccgcgtctgatcaggtgacccagcacgttcactttgtcgataagaaacgcaaacgcgaattgctgtcgcacatgattggtaaagggaactggcagcaggtgctggtgtttacccgtaccaaacacggcgctaaccatctggctgagcagctcaataaagatggcatccgtagtgtggcgatccacgggaataaatcgcaaggtgcgcgtacccgtgcgctggctgattttaaatcgggtgacattcgcgtactggtggcgaccgatatcgctgcgcgcggtctggatatcgaagagttgccgcacgtcgtcaactatgaactgccaaacgtaccggaagattatgtccaccgtatcgggcgtaccggtcgtgcggctgctaccggtgaagcgttgtcgctggtgtgtgttgatgaacacaaactgctgcgtgatatcgaaaaactgctggaaaaagagatcccgcgcattgcgattccgggctatgagccggacccgtcaatcaaagccgaaccgatccagaacggtcgccagcaacgtggcggcatcaggctgatgaacaaacgcaaaactgcctga

SEQ ID NO: 471893 - DNA, 450 bp, Shigella flexneri
atgcaagacaccatcataaatttctacagcaccagcgatgactacggtgatttttctaactttgccgccaggcccatcaaggttgacgggaatacctggcccacctccgaacactattttcaggcacaaaaattccttgatgaaaaataccgcgaagagatccgtcgggtttcttcccccatggtcgccgctcgcatggggcgtaatcgttccaagccacttcgtaaaaactgggagtcggttaaagaacaggtgatgcgtaaagcacttcgcgctaaattcgaacagcatgcagaactgcgtgtgctcttgctggcaaccgcgcccgcaaaactggttgagcatacggaaaacgatgcttactggggagacggtggtaatggtaagggcaagaatcgactgggctaccttttaatggagttgcgcgaacaattggctatagagaagtaa

SEQ ID NO: 471894 - DNA, 2286 bp, Shigella flexneri
gtgctcgaacgggcattaaaccgcattatgttggtggttattgcgagccgctttccagaaacagaaaaaccattacccctgaaaaccgaaaaatgccacaatattggctgtttatacagtatttcaggttttctcatggcattaaccgccgcgcttaaagcgcaaattgccgcctggtataaggcgcttcaggaacagatccccgactttattccccgtgcgccgcagcggcagatgattgcggacgtcgccaaaacgctggccggagaagaagggcggcatctggcgattgaagcccccaccggcgttgggaaaacgctctcctatttgatccccggcatcgccattgcccgcgaagagcaaaaaacgctggtggtgagtaccgccaacgtggcgttgcaggatcagatttacagcaaagatttaccgctgctgaaaaagatcattcccgatcttaaattcactgccgctttcgggcgtgggcgctacgtttgtccacgtaatctgacggcgctcgccagcactgaacccacgcaacaggatctgctggcgtttcttgacgacgaactgacgccaaataatcaggaagagcaaaaacgttgtgcgaagctgaagggcgatctcgacacttataaatgggatggtctgcgcgatcatacggatatcgctatagatgatgatctctggcgtcgtttgagtaccgacaaagccagctgcctcaaccgtaactgttactactatcgtgaatgcccgttttttgttactcgtcgggagattcaggaagcggaagtggtggtggcaaaccatgcgctggtgatggcggcgatggaaagcgaagccgtactgcctgacccgaaaaatctgctgctggtgctggacgaaggtcatcacctgccagatgtggcccgggatgcgctggagatgagcgctgaaatcaccgcgccctggtatcgactacagctggacttgttcacgaaactggtcgctacctgcatggagcagtttcgcccgaagaccatcccaccgctggcgatccctgaacgtttgaatgcgcattgtgaagagttgtatgagcttatcgcctcgttaaacaacattctcaatctctacatgcctgccgggcaggaggcagagcaccgttttgcgatgggcgaactgcctgatgaattgctggagatctgccagcggctggcaaaactcaccgagatgctgcgtggtctggcggagttatttcttaacgatttaagtgagaaaaccggcagccacgatattgtgcgtctgcatcggttgattttacagatgaaccgcgcgctggggatgtttgaggtgcaaagcaaactctggcggctggcgtctctggcgcaatcttccggtgcgccggtgaccaaatgggcgacgcgggaagagcgcgaagggcagctacacctctggtttcactgcgtgggaatacgtgtcagcgatcagctggaaaggctgctgtggcgcagtattccgcacattattgtcacctccgcaaccttgcgttcgctgaatagtttttcgcgtttgcaggagatgagtggtctgaaagagaaagcgggtgaccgttttgtggcgctggattccccctttaaccactgcgaacagggcaaaattgttattccccggatgcgctttgagccttccatcgacaacgaagagcaacacattgccgaaatggcggcctttttccgtgaacaggtggagagcaaaaaatatctcggtatgttggtactgtttgccagcggacgggcgatgcagcgctttctcgactatgtgacggatttacgcctgatgttgctggtgcagggcgatcagccgcgttatcgcttagttgaactgcaccgcaaacgcgttgccaacggtgagcgtagcgtgctggtgggcttacagtcatttgccgaagggcttgatttgaaaggtgatctgctcagccaggtgcatatccacaaaatcgcttttccgcccatcgacagcccggtggtgatcaccgaaggggaatggctgaaaagcctcaaccgctatccgtttgaggtgcaaagcctgccgagcgcctcgtttaacctgattcagcaggttgggcgactgattcgaagccacggttgctggggcgaagtggttatctacgacaaacgcttgctgacaaaaaattatggcaagcgactactggatgcattaccggtatttccgatagagcaaccggaagtccctgaaggtatagttaaaaagaaagaaaaaacgaaatccccacgccgtcggcggcgttaa

SEQ ID NO: 471895 - DNA, 963 bp, Shigella flexneri
atggactatcgcaaaatcattaaagagatcgggcgcgggaaaaaccacgcgcgcgatttagaccgggatactgcgcgcggtctgtatgctcatatgctcaatggtgaagtccctgaccttgagttgggcggcgtattgattgcgctgcgtatcaaaggggaaggggaagcagagatgctcggcttttacgaagccatgcaaaatcacaccatcaagctgacgccgcctgcaggcaagccgatgccgattgtcatccccagttacaacggcgcgcgtaaacaggctaacctgacgccattattggcgattctgctgcataaactcggttttcctgtggtggttcacggagttagcgaagatccaactcgcgtgctgacagaaaccattttcgaactgatgggtattacaccaacgttgcacggcgggcaggcgcaggcgaagctcgacgaacatcaaccggtgtttatgcctgtcggcgcgttttgcccgccgctggaaaaacaactggcgatgcgctggcggatgggcgtgcgtaacagtgcacataccctggcgaaactggcgacgccatttgccgaaggtgaggcactgtgtctttccagcgtttcgcatccggaatacattggacgcgtcgcgaagttctttagcgatatcggcgggtgggcgttactaatgcatggtactgaaggcgaagtgtatgctaatccgcagcgctgcccgcagatcaatctcattgaccgtgaagggatgcgggtgctgtatgaaaaacaggaccctgctggtagcgagttactgccacaagcaaaagatccggaaaccacggcgcagtggactgagcgttgcctggctggcagcgaagcgattcccgaatcgctgaaaatccagatggcttgctgcctggtggctacgggtgaagcggcaactatcagcgatggcctggcgcgcgttaatcaggcattttaa

SEQ ID NO: 471896 - DNA, 1086 bp, Shigella flexneri
atggaaagtggtcatcgctttgatgctcagacgctgcacagttttattcaggctgtatttcgtcagatgggtagcgaggaacaagaagcgaaattagttgccgatcatttaatcgcggcaaacctggcagggcatgattctcatggtattggcatgatcccaagctatgtgcgttcctggagtcaggggcatctgcaaattaaccatcatgccaaaatcgttaaagaggcgggggcggcagtcacgctcgatggcgatcgcgcattcggtcaggtcgcggcacacgaagcgatggcgctggggattgagaaagcgcatcagcacggtattgctgccgtggcgctacataactcgcatcatatcggccgtatcggttactgggcggagcagtgttcagcggcggggtttgtctctatccactttgttagcgtggtcggtattccaatggtcgcgccgttccacggtcgcgacagccgctttggcaccaatcccttctgtgtggttttccctcgtaaagataatttcccgctgttgcttgattacgccaccagcgccattgcatttggcaaaacccgcgtcgcctggcataaaggcgtccccgtgccgccaggttgcctgattgacgttaacggcgtgccgacgaccaatccggcggtaatgcaggagtcgccgttggggtcgctgttgacctttgccgaacataaaggctacgcccttgcagcgatgtgtgaaattcttggcggggcgctttctggcggtaaaacgacgcatcaggaaacgttgcaaaccagccccgatgccattcttaactgcatgaccactatcatcatcaacccggaactgttcggcgcgccggattgtaacgcgcagaccgaagcctttgccgagtgggtgaaagcctcgccgcatgatgacgataagccgattttgctaccgggcgagtgggaagtgaacacgcgtcgcgaacggcaggagcaggggattccattggatgcgggaagctggcaggccatttgtgatgcggcgcggcagattggtatgtcggaagagacgttgcaggctttctgtcagcagttagccagctaa

SEQ ID NO: 471897 - DNA, 261 bp, Shigella flexneri
atgaaaactatcaatactgttgttgctgctatggctctttcaactctgtcatttggcgtgttcgcggcggaaccggtaacggcatcccaggcacagaacatgaataaaatcggcgtggtttctgccgatggcgcatccaccctcgatgccctggaagcgaaactggctgagaaagcggcggcagccggtgccagtggatacagcatcacttccgccaccaacaacaataaattaagcggtactgcggtaatttataagtaa

SEQ ID NO: 471898 - DNA, 267 bp, Shigella flexneri
atggcatccgcttgggctaacgatgacgccgtcaacgaacagatcaacagtacaattgaagatgcgattgcccgcgctcggggtgaaattccgcgtggcgaaagcctgtatgaatgtgaagagtgcggtgcccccatcccgcaagcccgtcgggaagccattcctggcgtgcgcttatgtattcattgtcagcaggagaaagatttacaaaaaccagcgtatacaggatataatcgcagaggttcgaaagacagacagttacgttaa

SEQ ID NO: 471899 - DNA, 675 bp, Shigella flexneri
atgtaccacattcccggcgtgttatcgccacaggacgtcgcccattttcgcgaacaactggaacaagccgaatgggtggatggacgcgtcaccaccggagcacaaggtgcacaagttaagaacaatcagcaagtagacacccgcagcgcgttatacgccgcactgcaaaatgaggtgctgaacgcggttaaccaacatgcattgttctttgccgctgccttgccgcgtaccctttccacgccgctgtttaatcgctatcagaacaatgaaacctatggtttccatgtggatggcgcagtacgcagccatccacaaaacggctggatgcgcactgacctttctgccacgctgtttttaagcgatccacaaagctacgacggcggcgaactggtcgttaatgacacctttggacaacatcgggtaaaactcccggcaggtgatctggtgttgtatccctccagcagcctgcattgcgtgacacccgtaacccgcggcgtacgagtggcatcatttatgtggatccagtcgatgatccgcgatgataaaaagcgcgccatgctgtttgaactggacaaaaatattcagtcgctgaaaagccgctatggtgaaaatgaagagatcctgtcgctgctcaatctttatcataatctgctgcgggaatggtcggagatctga

SEQ ID NO: 471900 - DNA, 1176 bp, Shigella flexneri
gtgagtaataaaattctcaccaaccagaccaacctgacctcgacgttctataccggttctatcggtcatgatgtcagtaccggcgtggaatttacccgtgaaacgcagactaactatggcgttaatccggtgacgttaccggcggtaaatatttatcatcctgacagcagaattcatcccggcggcctgacgcgcaacggcgcaaacgccaatggtcagacggataccttcgcaatttacgccttcgatacgctgcaaatcacccgtgattttgagctgaacggcgggatccgtctggataattatcatactgaatatgacagtgccaccgcctgcggcggcagcggacgcggtgccatcacctgcccagctggtgtggcaaaaggttctccagtcaccaccgtcgacaccgccaagtcgggcaatctggtgaactggaaagccggggcgctgtaccacctgacggaaaacggcaatgtctatattaactatgccgtttcccagcagcctccgggcggcaacaacttcgcccttgcgcagtctggcagtggtaacagtgccaaccgcaccgattttaaaccgcaaaaagccaacaccagcgagattggcaccaaatggcaggttctggataaacgcctgttgctcaccgccgcgctgttccgtactgatatcgaaaatgaagttgagcaaaatgatgacgggacttactcgcaatacggtaagaaacgcgtcgaaggctatgagatatccgtggcagggaatatcactcccgcgtggcaggtgattggcggctatacccagcaaaaagcaaccatcaaaaacggcaaagatgttgcccaggatggttcctcatcgctgccgtataccccggagcacgccttcaccttatggagccaatatcaggcaaccgatgatatctctgttggcgcgggcgcacgctatatcggcagtatacataaaggttcagacggcgcggtgggaacgccagcatttacagaaggttactgggtcgccgatgccaaactggggtatcgggttaatcgcaatctcgacttccagctaaacgtttacaacctgtttgataccgattacgtcgcctcaatcaacaagagcggctaccgttatcacccgggcgagccaagaaccttcttgctcacagccaatatgcatttctga

SEQ ID NO: 471901 - DNA, 783 bp, Shigella flexneri
gtgggtgcgttttttgcgggtgagaacggtaactccaccactggcgacgccatttatatgcgtggtgccgatacctctaacagtatttatattgatggtattcgcgatatcggcagcgtctcgcgcgacaccttcaataccgagcaggtcgaagtgattaaagggccgtccggcaccgactacgggcgcagcgcaccgacaggctcgatcaatatgatcagcaagcagccgcgcaatgattccggcattgacgcctccgccagtattggcagcgcctggttccgccgcggcacgctggacgtcaatcaggtcattggtgatactaccgcggtgcgcctgaatgtgatgggcgaaaaaacccacgatgccggacgcgacaaagtcaaaaatgagcgttacggcgtcgccccttctgtcgcttttggccttggtacagcaaatcgtttgtatcttaattatctgcatgtcactcagcacaacacgccagacggcggcattccgaccatcggtttgccgggctattctgccccatctgcgggagcggcggccctgaatcattccggaaaagttgatactcataacttttacggcacggattccgattacgacgattcgaccaccgacaccgccaccatgcgttttgagcacgacatcaacgataacaccaccattcgcaatactacccgttggtcgcgcgtaaagcaggattacctgatgacggcgattatgggcggggcgtcgaatattactcagcccaccagcgatgtgaatagctggacctag

SEQ ID NO: 471902 - DNA, 354 bp, Shigella flexneri
atggttgaggatattttggctccagggttacgggtcgtgttttgcggtatcaaccctgggctttcatccgccgggactggttttccctttgctcatccggcaaatcgcttctggaaggtgatatatcaggccgggtttaccgaccgtcagttgaagccgcaggaggcacagcatctgctggattatcgttgtggcatcaccaaactggtagaccgtccaacggtgcaagccaatgaagtttcaaagcaggagctgcacgcaggtgggcgtaagctgattgaaaaaattgaagattatcagccgcaggcgttggcgattctgggcaaacaagcatatgaacagggattcagctag

SEQ ID NO: 471903 - DNA, 315 bp, Shigella flexneri
atgcccgcactgcgccgccgcctggaaacgttgagcaaacttgccgttaaaccgcaagttagtgcgctggttagcgtgcgggataacgcctgtcaggattatctcgcgcaccttgatggttttaatatcgaatggctggcacatgatgagcaggcggtagatgcgcgtctggcgcagatgcaaatccctgccgatgattacttcatctggataaccggcgaaggtaaagtcgttaagaatttaagccgccgctttgaagcggaacagtatgacccacagcgggtacgtgcagcggcttactggcacgcaaagtaa

SEQ ID NO: 471904 - DNA, 465 bp, Shigella flexneri
atgaataacaccccccgctacccgcagcgcgttcgcaatgatctgcgcttccgtgaactgactgtgctacgcgttgagcgcatcagcgccggttttcagcgcattgtccttggcggcgaggcgttggacggttttacatcgcgcggctttgacgatcacagcaaactcttctttcctcaacctgacgctcactttgtgccgccaacggtaacggaagagagcatcgtctggccggaaggaccacgcccaccgtcgcgtgactatacgccactgtatgacgaactacgccatgaactggcgatcgatttctttattcacgacggtggggtcgccagcggctgggcgataaacttacggtggcaggtccgcgcggttcgctggtggtgccggaagattacgcgtatcagctgtatgtctgcgatgaatccggaatgcccgcactgcgccgccgcctggaaacgttga

SEQ ID NO: 471905 - DNA, 624 bp, Shigella flexneri
atgagccatcatcacgaagggtgttgtaaacatgaaggccagccacgccatgagggctgctgcaaaggtgagaagtcagaacacgagcactgcggacacggtcaccagcatgaacacggtcaatgttgcggtggtcgccacggtcgcggcggcggtcgtcggcaacgtttctttggtcacggtgaattgcgtctggtgattctggatattctctcgcgcgatgacagccacggttacgaattgattaaagcgattgagaatctaacccaggggaattacaccccaagcccgggcgtcatctacccgacgctggattttctgcaggagcagtcgctgattaccatccgcgaagaggaaggtggtaagaagcagattgcgctgaccgaacaaggcgcgcagtggctggaagaaaaccgcgaacaagtggagatgattgaagaacgcatcaaagcgcgttgcgttggcgcggcgctgcgccagaacccgcaaatgaagcgggcgctggataattttaaagcggtgctggatttacgcgtcaaccagagcgatatcagtgatgcacaaataaaaaagatcattgcggtgatcgaccgcgccgcttttgatattacgcaactggattaa

SEQ ID NO: 471906 - DNA, 402 bp, Shigella flexneri
gtggaagcggcgcgtgccggcgaacagggcaaaggttttgcagtggtggcaggggaagtgcgtcatttagccagccgcagcgctaatgctgccaacgatattcgcaagctgattgatgccagtgctgataaggtgcaatccggttcgcagcaggtacacgccgccggacggacgatggaagatattgtggcacaggtgaaaaacgtcacccagttgatcgcccagattagccattcaacgctggaacaggccgatgggctttccagcctgacccgtgcagtggatgagcttaacctgatcacccagaaaaatgccgagctggtggaagagagtgcgcaggtgtcggcgatggtgaaacaccgcgccagccgactggaagacgcggtgacggtgctgcattaa

SEQ ID NO: 471907 - DNA, 1047 bp, Shigella flexneri
atgtcttctcatccgtatgtcacccagcaaaataccccgctggcggacgataccactctgatgtccactaccgatctgcaaagctatatcactcatgctaatgacacttttgtgcaggtgagcggctttaccttgcaagagttacaagggcagccgcacaacatggtgcgtcacccggatatgccaaaagcggcgtttgcggatatgtggttcaccctgaaaaaaggggagccctggagcggcatcgtgaaaaatcgccgcaaaaatggcgaccattattgggtgcgggccaatgcggtaccgatggtgcgcgagggaaaaatcagtggctatatgtcgattcgtacccgggcgacggatgaagagattgcggcggtggagccgctgtacaaagcgttgaactccggacgtaccagtaagcgtattcataaaggcctggtggtgcgtaaaggctggctgggtaaactgccttcattaccgcttcgctggcggacgcgtggagtgatgaccctgatgtttatcttgctggcggccatgctttggtttgttgctgccccggtggtgacgtatttcctctgtgtgttagtggtattgttggcaagcgcttgttttgaatggcagattgtgcgcccgatagaaaatgtcgcccgtcaggcactgaaggtggcgaccggagagcgtaatagtgttgagcacctgaatcgcagcgatgagctggggctgacattacgcgcggtagggcagcttggcctgatgtgccgttggctaattaacgatgtctcaagccaggtgtccagtgtcagaaatggcagtgagacgctggcgaaaggcaccgatgaactgaacgaacatacccagcagacagttgataacgttcagcaaacggtggcgaccatgaaccaaatggcggcgtcggtgaaacagaactctgccacggcgtcggctgccgataaactttctatcaccgccagtaatgcggcagtgcagggtggggaggcgatgaccacggtgatcaagacaatggacgatatcgccgacagtacctag

SEQ ID NO: 471908 - DNA, 1491 bp, Shigella flexneri
atgataaccgcatttgtgtttatcccgattttcgcgatcgcagccggagtggcgcaatccctgcaatacttaaatcggtatcatgtgatacgcgagcctccggagcatattttgaacaggttaccttcgagcgcatcggctttagcgtgcagcgcccacgccctgaatctcattgagaagcgaacgctggatcatgaggagatgaaagcacttaaccgagaggtgattgaatacttcaaagagcatgtcaatccggggtttttagagtatcgcaaatctgttaccgccggcggggattacggagccgtagagtggcaagcgggaggtttaaatacgcttgtcgacacccagggacaggagtttatcgactgcctgggaggttttggaattttcaacgtggggcaccgtaatccagttgtggtttccgccgtacagaatcaacttgcgaaacaaccactgcacagccaggagctactcgatccgttacgggctatgctggcgaaaacccttgctgcgctaacgcccggtaaactgaaatacagcttcttctgtaatagcggcaccgagtccgttgaagcggcgctgaagctggcgaaggcttatcagtcgccgcgcggcaaatttacttttattgccaccagcggcgcgttccacggtaaatcacttggcgcgctgtcggccacggcgaaatcgaccttccgcaaaccgtttatgccactgctgccagggttccgtcatgtgccgtttggcaatatcgaagccatgcgcacggctcttaatgagtgcaaaaaaaccggtgatgatgtggctgcggtgatcctcgaaccgattcagggcgaaggtggcgtaattctgccgccgccgggctatctcaccgccgtgcgtaagctgtgcgatgagttcggcgcactgatgatcctcgatgaagtacaaacgggcatggggcgcacgggcaagatgtttgcctgcgaacatgagaacgttcagccggacattctgtgtctggcaaaagccctcggcggcggcgtgatgccgattggcgcgaccatcgccactgaagaggtgttttcagttctgttcgacaacccattcctgcataccaccacctttggcggcaacccgctggcctgtgcggcggcgctggcgaccatcaatgtgttgctggagcagaacttaccggctcaggctgagcaaaaaggcgatatgttgctggacggtttccgtcaactggcgcgggaatatcccgatctggtacaggaagcgcgtggtaaagggatgttgatggcgattgagtttgttgataacgaaatcggctataactttgccagcgagatgttccgccagcgcgtactggtggccggaacgctcaataacgccaaaacgatccgcattgaaccgccactgacactgaccattgaacagtgtgaactggtgatcaaagcggcgcgtaaggcgctggcggccatgcgagtaagtgtcgaagaagcgtaa

SEQ ID NO: 471909 - DNA, 198 bp, Shigella flexneri
gtgaccagcctggtgccgtactacagcgaagaggagctgatggggaaaacggtggtggtcttatgcaatctgcaaaaagcgaaaatgcgtggtgaaacgtcggaatgcatgctgttgtgtgcggaaaccgatgacggcagtgaaagcgtgttgttaacgccggagcggatgatgcctgcgggcgtacgcgtcgtataa

SEQ ID NO: 471910 - DNA, 138 bp, Shigella flexneri
atggaaaccgtggcttacgctgattttgcacgtctggaaatgcgcgtcggaaagattgtggaagtgaaacgccatgaaaacgccgacaagctgtacatcgtacaggttgatgtggggaaaaaacactgcaaaccgtga

SEQ ID NO: 471911 - DNA, 984 bp, Shigella flexneri
atggcaacattaaaagacatcgcaatcgaagctggcgtatccctggcgacagtatccagggtcttaaatgacgatccgacattgaatgtgaaagaagagacgaaacatcgcattctcgagatcgccgaaaagctggagtacaagaccagtagcgcccgtaaactacagacaggcgcagtcaaccaacaccatattctggctatctacagctaccagcaggagctggagatcaacgatccttactatctggcgatccgccacggcattgaaactcagtgcgaaaagctggcgatcgaactgaccaactgttatgaacacaacggattaccagacattaaaaacgtcaccggtattttaattgtcggcaaacccacgcccgccctgcgcgccgctgccagcgcgttgaccgacaatatctgttttatcgactttcacgaacccggcagcggttacgatgcggtggatatcgatctggcacgcatcagtaaagaaatcatcgacttctatatcaaccagggcgttaatcgtattggttttattggcggtgaagatgagcctggcaaggcggatattcgtgaggtcgcctttgcggaatatggccgactgaaacaagtggtacgcgaagaggatatctggcgcggcggtttttccagttcgtcgggttatgaactggcaaaacaaatgctggcgcgggaagactatccgaaggcactgtttgttgcttccgattccattgctatcggcgtactgcgggcaattcatgaacgtggcctgaacatcccacaagatatttcgcttatcagcgttaacgatatccccaccgcgcgatttacctttccgccgctctccaccgtgcgcatccattccgagatgatgggaagtcagggcgttaacctggtgtatgaaaaagcccgcgatggtcgcgcgctgccgctgctagtcttcgttcccagcaaattaaaactgcgcggcacgacccgttaa

SEQ ID NO: 471912 - DNA, 3087 bp, Shigella flexneri
atgaatcgctgggaaaacattcagctcacccacgaaaaccgacttgcgccgcgtgcgtactttttttcatatgattctgttgcgcaagcgcgtacctttgcccgcgaaaccagcagcctgtttctgcccttaagcagtcagtggaatttccacttttttgaccatccgctgcaagtaccagaagccttcacctctgagttaatggctgactgggggcatattaccgtccccgccatgtggcaaatggaaggtcacggcaaactgcaatataccgacgaaggttttccgttccccatcgatgtgccgtttgtccccagcgataacccaaccggtgcctatcaacgtattttcaccctcagcgacggctggcagggtaaacagacgctgattaaatttgacggcgtcgaaacctattttgaagtctacgttaacggtcagtatgtgggtttcagcaagggcagtcgcctgaccgcagagtttgacatcagcgcgatggttaaaaccggcgacaacctgttgtgtgtgcgcatgatgcagtgggcggactctacctacgtggaagaccaggatatgtggtggtcggcggggatcttccgcgatgtttatctggtcggaaaacacctaacgcatattaacgatttcactgtgcgtaccgactttgacgaagcctattgcgatgccacgctttcctgcgaagtggtgctggaaaatctcgccgcctcccctgtcgtcacgacgctggaatataccctgtttgatggcgaacgcgtggtgcacagcagcgccattgatcatttgacaattgaaaaactgaccagcgccagctttgcttttactgtcgaacagccgcagcaatggtcagcagaatccccttatctttaccatctggtcatgacgctgaaagacgccaacggcaacgttctggaagtggtgccacaacgcgttggcttccgtgatatcaaagtgcgcgacggtctgttctggatcaataaccgttatgtgatgctgcacggcgtcaaccgtcacgacaacgatcatcgcaaaggccgcgccgttggaatggatcgcgtcgagaaagatctccagttgatgaagcagcacaatatcaactccgtgcgtaccgctcactacccgaacgatccgcgtttttacgaactgtgtgatatctacggcctgtttgtgatggcggaaaccgacgtcgaatcgcacggctttgctaatgtcggcgatatcagccgtattaccgacgatccgcagtgggaaaaagtctacgtcgagcgcattgttcgccatatccacgcacagaaaaaccatccgtcgatcatcatctggtcgctgggcaatgaatccagctatggctgtaacatccgcgcgatgtaccatgcggcgaaagcgctggatgacacgcgactggttcattacgaagaagatcgcgatgctgaagtggtcgatattatttccaccatgtacacccgcgtgccgctgatgaatgagtttggtgaatacccgcatccgaagccgcgcatcatctgtgaatatgctcatgcgatggggaacggaccgggcgggctgacggagtaccagaacgtcttctataagcacgattgcattcagggtcattatgtctgggagtggtgcgaccacgggatccaggcacaggacgaccacggcaatgtctggtataaattcggcggcgactacggcgactatcccaacaactataacttctgtcttgatggtttgatctattccgatcagacgccgggatcgggcctgaaagagtacaaacaggttatcgcgccggtaaaaatccacgcgctgactcgcggcgagttgaaagtcgaaaataaactgtggtttaccacgcttgatgactacaccctgcacgcagaggtgcgcgccgaaggtgaaacgctcgcgacgcagcagattaaactgcgcgacgttgcgccgaacagcgaagcccccttgcagatcacgctgccgcagctggacgcccgcgaagcgttcctcaacattacggtgaccaaagattcccgcacccgctacagcgaagccgggcattctatcgccacttatcagttcccgctgaaggaaaacaccgcgcagccagtgcctttcgcaccaaataatgcgcgtccgctgacgctggaagacgatcgtttgagctgcaccgttcgcggctacaacttcgcgatcaccttctcaaaaatgagtggcaaaccgacatcctgccaggtaaatggcgagtcgctgctgacccgcgagccaaagatcaacttcttcaagccgatgatcgacaaccacaagcaggagtacgaagggttgtggcagccgaatcatttgcagatcatgcaggaacatctgcgcgactttgccgtagaacagagcgatggtgaagtgttgatcatcagccgcacagttattgcaccgccggtgtttgacttcgggatgcgctgtacctacatctggcgcatcgctgccgatggccaggttaacgtggcgctttccggcgagcgttacggcgactatccgcacatcattccgtgcatcggtttcaccatggggattaacggcgaatacgatcaggtggcgtattacggtcgtggaccgggcgaaaactacgccgacagccagcaggctaacatcatcgatatctggcgcagcaccgtcgatgccatgttcgagaactatcccttcccgcagaacaacggcaaccgtcagcatgtccgctggacggcactgactaaccgccacggcaacggtctgctggtggttccgcagcgcccaattaacttcagcgcctggcactatacccaggaaaacatccacgctgcccagcactgtaacgagctgcagcgcagtgatgacatcaccctgaacctcgaccaccagctacttggcctcggctccaactcctggggcagcgaggtgctggactcctggcgcgtctggttccgtgacttcagctacggctttacgttgctgccggtttctggcggagaagctaccgcgcaaagcctggcgtcgtatgagttcggcgcagggttcttttccacgaatttgcacagcgagaataagcaatga

SEQ ID NO: 471913 - DNA, 450 bp, Shigella flexneri
atgaggatcatcgataacttagaacagttccgccagatttacgcctctggcaagaagtggcaacgctgcgttgaagcgattgaaaatatcgacaacattcagcctggcgtcgcccactccatcggtgattcattgacctaccgtgtggaaaatgactccgcgaccgatgcgctatttaccgggcatcgacgctattttgaagtgcattactacctgcaagggcagcaaaaaattgaatatgcgccgaaagagacattacaggtagtggaatattatcgtgatgaaactgaccgtgaatatttaaaaggctgcggagaaaccgtagaggtccacgaagggcaaatcgttatttgcgatatccatgaagcgtatcggtttatctgcaataacgcggtcaaaaaagtggttctcaaagtcaccatcgaagatggttatttccataacaaataa

SEQ ID NO: 471914 - DNA, 1434 bp, Shigella flexneri
atgtctgataccaaacgtaatacaatcggcaaattcggcttgctctcgctgacttttgccgccgtttacagctttaacaacgttatcaataataatattgagcttggactggcctcggcaccgatgtttttcctcgcgacgattttttattttattcccttctgtctgatcatcgcagaatttgtttcgttaaataaaaactcagaagccggtgtctacgcgtgggtaaaaagttcgctgggcggacgttgggcatttattactgcctacacttactggttcgtaaatctgttctttttcacctcgctgttgccgcgcgttattgcttatgcttcgtatgccttcctcggctacgaatatattatgacgccggttgccaccaccgttatcagtatggtgctgttcgccttctccacctgggtttccaccaacggggcgaaaatgctggggccaattacctccgtcacttcaacgctgatgctgctgttaacgctctcctacattttactggcaggtacggcactggttggcggcgtacagcctgccgatccgatcaccgttgacgcgatgatcccgaacttcaactgggcgttcctcggcgttaccacctggatctttatggccgcaggtggcgcggagtccgtcgcggtgtacgttaacgacgtcaaaggcggttcgaaatcgttcgttaaagtgatcatcctcgccgggatttttatcggcgtactgtattccgtctcctcggtgctgattaacgtcttcgtcagcagcaaagagttgaaatttaccggcggatcggtgcaggtattccacggcatggcggcgtattttggtctgccggaagcgttgatgaatcgctttgtcggtctggtgtcctttaccgcaatgttcggttccctgctgatgtggaccgcaacgccggtgaaaattttcttctccgaaatcccggaaggcatctttggtaagaaaaccgtcgaacttaacgaaaacggcgttccggcgcgcgcagcatggatccagtttctgatcgtcatcccgctgatgattatcccgatgctcggttccaataccgtgcaggatctgatgaataccattattaatatgaccgccgcagcgtccatgcttccgccgttattcatcatgctggcttacctgaatttacgcgccaaattagatcacctgccacgcgatttccgtatgggctcccgccgcaccggtattatcgttgtttcaatgctgattgcgatatttgccgtagggtttgtcgcttcgacattcccgactggcgcgaatattctgaccatcattttttataacgtcggcggtattgttatcttcctcggctttgcgtggtggaaatacagcaaatatataaagggattaacggctgaagagcgccatattgaagcgacgccagccagcaatgttgattaa

SEQ ID NO: 471915 - DNA, 321 bp, Shigella flexneri
atgaaattaatcactgcaccatgcagagcattacttgctctgccgttttgctacgccttttctgcggcaggagaagaagcacgtccggcagaacatgacgacacaaaaacacccgcaattacctcgacatcttctccttcatttcgtttttacggcgaattagggcttggtggatatatggatttagagggtgagaataaacataaatacagcgacggcacctatattgaaggtggcctggagatgaagtacggctcctggttcggcctgatttacggcgaaggctggaccgtgcaggccgaccacgacggtaatgcctag

SEQ ID NO: 471916 - DNA, 354 bp, Shigella flexneri
gtgcctgaccatagctggggtggtttcgaaggtgggattaaccgtttctatggcggttatcgtaccaatgatggcaccgaaatcatgctcagtctgcgtcaggattcctcgctggatgacctgcaatggtggggcgacttcacacccgatttgggctacgtcattcccaatacccgcgacattatgaccgcgctgaaggtacagaacttaagcggcaactttcgttatagcgtcaccgccacacctgccggacatcatgacgaaagcaaagcctggctacattttggcaagtacgatcgctacgacgacaaatacacctatccggcaatgggtgaacggttacatccagtatga

SEQ ID NO: 471917 - DNA, 375 bp, Shigella flexneri
atgaatggtctggaaattaccgacggcacaggacaactctatctcacgggcctgtttacccctaactttgccgctcgcgcctggcaccataccggacgtgccgacgggctggacgtaccgggaagtgaaagcgggatgatggtgagcgccatgtatgaagcgttaaaaggcgtttatctctccaccgcttacacctacgccaaacatcgccctgaccacgctgacgatgaaaccacctctttcatgcagtttggtatctggtacgaatatggcggcggacgtttcgccacggcttttgatagccgcttctacatgaaaaatgcctctaacgatcccagcgaccaaatcttcctgatgcaatatttctactggtaa

SEQ ID NO: 471918 - DNA, 2352 bp, Shigella flexneri
atgaaaatcaaaactattttaacgccagtaacctgcgctctgctgataagtttttccgctcatgccgctaacgccgacaattataaaaacgtgattaaccgtactggtgcgccgcagtacatgaaggattacgattacgacgatcaccagcgttttaatccgtttttcgatctcggagcctggcatggtcatctgttgccagacggcccgaacaccatgggcggctttccgggcgttgcgctgctgacggaagaatacatcaactttatggccagcaatttcgaccgcctgactgtctggcaagacggcaagaaagtcaacttcacgctggaggcatacagtattcccggcgcgctggtgcaaaaactgacagcaaaagatgtgcaggtcgaaatgactctgcgcttcgccacgccgcgcacgtcactactggaaactaaaatcatcagcaataaaccgctggatctggtgtgggatggcgaactgctggaaaaactggaagcgaaagaagggaaaccgctttccgataaaaccattgccggcgaataccctgactatcagcgcaaaatcagcgccacccgtgatggcctgaaagtcacctttggcaaagtgcgcgccacctgggatctgctgacctccggcgaatcggaatatcaggtgcataaatccctgccggtgcagactgaaatcaacggtaatcgctttaccagtaaggcgcatatcaacggttcgaccacgctctacaccacctattcccatctgctgaccgctcaggaagttagcaaagagcaaatgcagatccgcgatattctggcgcgtccggcgttttatctcaccgcctcgcagcaacgctgggaagaatacctgaagaaagggttaaccaatccggatgcgacgccggaacagacgcgcgtcgcggtgaaagcgatcgaaacgctcaacggtaactggcgctcaccgggcggtgcggtgaattataacaccgtcacgccgtcggtgaccggacgctggttctccggcaatcagacctggccgtgggatacctggaagcaggcgtttgcgatggcgcatttcaatccggatatcgccaaagagaatatccgcgcggtcttctcctggcagatccagcctggcgacagcgtgcgtccgcaggatgtgggctttgtccccgacctgatagcgtggaaccttagccccgagcgtggtggcgatggcggcaactggaacgaacgtaataccaaacccagccttgccgcctggtcggtgatggaagtatacaacgtcacccaggataaagcctggttggcagagatgtacccgaaactggtggcctatcacgactggtggttacgtaaccgcgatcataacggcaacggggtgccggaatatggcgcgacccgcgacaaagcccacaacaccgagagcggcgagatgctgtttacggtgaaaaaaggcgataaagaagagacgcagtctgggctgaacaactacgcccgcgtggtggagaaaggccagtacgacagtctggaaattccggcacaggtcgctgcgtcgtgggaatcgggccgtgatgatgccgccgtctttggttttatcgacaaagaacagttggataaatatgtcgctaatggcggcaaacgtagcgactggacggtgaaattcgccgaaaaccgcagtcaggacggaacgttgctgggctactcgctattgcaggagtcggtggatcaggccagctatatgtacagcgataaccattatctggcggagatggcaaccatcctcggtaagccagaagaggccaaacgctatcgccagttggcacagcagctcgcggactacatcaacacctgtatgttcgacccgactacccagttctactatgacgtacgtattgaagataaaccactggcgaacggctgcgcgggcaaaccgattgttgagcgcggtaaagggccggaaggctggtcgccgctgtttaacggtgcggcaacgcaggccaatgccgacgcggtggtgaaggtgatgctcgatcctaaagagttcaacacctttgttccgctgggaacggcggcgttaaccaatccggcttttggcgctgatatctactggcgcgggcgcgtatgggtggatcagttctggtttggtctgaaagggatggagcgttacggttatcgtgatgatgccctgaagctggcggatacgttcttcaggcacgccaaaggattaaccgccgatggcccaattcaggagaattacaacccgctgacaggcgcgcagcaaggcgcaccaaatttctcctggagtgccgctcatttgtatatgttgtataacgattttttccgtaagcagtaa

SEQ ID NO: 471919 - DNA, 2019 bp, Shigella flexneri
atgagctacccgtcgctgttcgccccgctggatttaggttttaccacgttaaaaaaccgcgtgttgatgggttcaatgcacaccgggctggaggaatacccggacggtgctgaacggctggctgcgttttatgccgaacgcgcccgtcacggcgtggcgctgattgtcagcggcggcattgcaccagatttaacaggcgttggcatggaaggtagcgcaatgctcaacgacgccagccagatcccacaccatcgcaccattaccgaagccgtacatcaggaaggcggcaaaatcgccctgcaaattttgcataccgggcgctacagctaccaaccgcatctggtcgcaccgtccgcattgcaggcccccatcaaccgtttcgttcctcacgaactcacccatgaagagatcctgcaactgatcgacgatttcgcccgctgcgcgcaactggcgcgggaggccggatacgatggcgtcgaagtgatgggctctgaagggtatttgatcaacgaatttctgacgctgcgcaccaatcagcgtagtgaccagtggggcggcgattaccgcaaccggatgcgatttgccgtagaagtagtgcgtacggtgcgcgaacgcgtcggcaacgacttcattattatttaccggttgtcgatgctcgacctggtcgaaggcggcggcacttttgccgaaacggtagaactggcgcaggccattgaagcggcgggcgcgaccattatcaacaccggaataggctggcacgaagcgcggattccgaccatcgccacgcccgtgccgcgcggcgcatttagctgggtcacgcgcaaactgaaaggccacgtctcgctgccgctggtaaccaccaaccggattaacgatccgcaggttgccgacgatattctctcgcgcggcgatgccgatatagtatcgatggcgcgaccgtttctcgcggatgcggaactgctgtcaaaagcgcaatcagggcgagccgatgagatcaacacttgtattggctgcaaccagggctgcctcgatcagatcttcgttggcaaagtcacctcgtgcctggtgaatcctcgcgcctgccacgaaaccaaaatgccaatccttcccgccgtgcagaaaaaaaatctggcggtggtcggcgctggacctgctgggctggcgtttgccattaacgcggcggcgcgtgggcatcaggtaacattgtttgatgcgcacagcgagatcggcgggcagtttaatatcgccaaacagatccccggcaaagaggagttttacgaaacgctgcgctactaccgccggatgatcgaagtgacgggcgtgacgctgaaactcaatcacaccgtgacggcggatcagttacaggcgttcgatgaaacgatcctcgccagtgggatcgtgccgcgtgttccgcctatcgacgggatcgatcatccgaaggtattgagttatctcgatgtactgcgcgacaaagcgccggtaggcaacaaggttgccatcatcggttgtggcgggattggttttgatacggcgatgtatttaagtcagccgggcgaatccaccagccagaatatcgccaggttctgtaatgagtgggggatcgacagcagcctacaacaggctggtggcttaagcccgcagggaatgcagatcccgcgtagcccacggcaaattgtgatgctccagcgcaaagccagcaaaccgggacaggggttaggcaaaaccaccggctggatccatcgcaccatcctgctctcgcggggtgtgaaaatgatcccaggcgtaagttatcagaagattgacgatgacgggctgcatgtggtgatcaacggcgaaacgcaggtattagcagtggacaatgtggtgatctgcgcagggcaagagccaaaccgcgcgctggcgcaaccgctgattgatagcgggaaaactgtgcatttaattggcggctgcgatgtggctatggagctggacgcacgacgggcaattgcccagggaacacggctggcgctggagatttaa

SEQ ID NO: 471920 - DNA, 417 bp, Shigella flexneri
atgattgcgattgccgacatcttgcaagcaggagaaaagctaactgctgtggcaccttttctggcgggtattcagaacgaggaacaatacacccaggcgctggaactggtagatcatctgctgctcaacgatcctgaaaaccccttgctggatctggtgtgtgccaaaataaccgcgtgggaagaatcagcgcccgaatttgcggaatttaatgccatggctcaagccatgcctggcggtatagccgtgattcgtacccttatggatcaatatggtttaaccctttccgatctgccggaaattggcagtaaatctatggtgtcacgcgttttgagcgggaagaggaaattaacgctggaacacgctaaaaaattggcaacgcgattcggcatttctcccgccttgtttattgattaa

SEQ ID NO: 471921 - DNA, 315 bp, Shigella flexneri; identical to SEQ ID NO: 261899

SEQ ID NO: 471922 - DNA, 1137 bp, Shigella flexneri
atgagccacttagacaacggtttccgttcactgacactacaacgttttccggcgacggatgacgttaacccgctacaggcgtgggaagcggcagatgaatatttgctgcaacagttggacgacacagaaatccccggcccggtgttgatcctgaatgatgcctttggtgcgttaagctgcgcgctggcggaacataagccgtacagcattggcgactcatacatcagtgaactggcgacgcgcgagaatttacgcctaaacgggattgatgagtcgagcgtgaagtttctcgacagcaccgccgactacccgcaacagccgggtgtggtgctgatcaaagtgccgaaaacactggcattgctggaacagcaactgcgtgcgctgcgcaaagtggtcacgtcggatacacgtattattgccggtgccaaagcccgtgacattcacacttccacgctggaactgttcgaaaaagtgctcggcccgaccaccaccacgctggcatggaaaaaagcgcgcctgattaattgcacgttcaatgaaccgccgctggccgatgcgccgcagaccgttagctggaagctggaaggtactgactggactatccataaccatgcgaatgtcttctcccgcaccgggcttgatatcggcgcgcgcttctttatgcaacatctgccagagaatctcgaaggggagattgtcgatctcggttgcggtaatggcgttattggtctgacgctgcttgataaaaacccgcaggcgaaagtggtgtttgtcgatgaatcgccgatggcggttgcttccagccgtttgaacgttgaaaccaacatgccagaggcgttggatcgcagcgagtttatgatcaacaacgcgctctccggcgtggagcctttccgctttaatgctgtgctctgcaaccctccgtttcaccaacaacatgcgctgaccgataacgtcgcctgggagatgttccactacgcccgccgctgcctgaaaatcaacggcgagctgtatatcgttgccaaccgccatctggattacttccataaactgaagaaaattttcggcaactgcaccactattgcgacgaataataaatttgtggtgctgaaagcggtgaagctgggacgtcgtcggtaa

SEQ ID NO: 471923 - DNA, 504 bp, Shigella flexneri
atgagcaatcttacttatcttcagggttatcccgagcagctgctttcgcaggtgcgaacactgattaacgaacagcgtctgggcgatgtgctggcaaaacgctatccgggaacacacgactacgccaccgataaagctctctggcaatatactcaggatctgaaaaatcagtttctgcgtaatgccccgccgatcaataaagtgatgtatgacaataagatccatgtgctaaaaaacgcgctcgggttacataccgctgtttctcgtgtgcagggcggcaagctgaaagcaaaagcagagatccgcgtcgctaccgtgtttcgcaacgcgccggaaccgtttttgcgcatgatcgtggtgcacgagctggcgcacctgaaggagaaagagcataacaaagcgttctatcaattgtgctgccatatggagccgcagtaccaccagcttgagttcgacacccggctgtggctaacgcagttgtcgcttgggcaggacaaaatctga

SEQ ID NO: 471924 - DNA, 693 bp, Shigella flexneri
atgctgcgcgcatttgcccgccttcttctccgtatttgtttttctcgccggactctaaagattgcctgcttactgttacttgtggcaggagcgaccatttttatcgccgatcgcgttatggtcaacgccagcaagcagctgacctggggcgatgtcaacgccgtcccggcgcgtaacgtgggtttattgctgggggcgaggccgggtaatcgctactttacccgacgtattgataccgcagcagcgttgtaccacgccggaaaagtgaaatggctactggtgagtggcgataacggacgtaaaaattacgatgaagcatcaggtatgcagcaggctttgatcgctaaaggcgtaccggcgaaagtgatcttttgcgactatgccggattctcaacgctggattcggtagtgcgtgccaaaaaggtgtttggggaaaaccatatcaccattatctcgcaagaatttcataaccaacgcgccatctggctggcaaaacagtacggcatcgacgctatcgggtttaacgcgccagacctcaatatgaagcacggtttttatactcaactgcgggagaaactcgctcgtgtcagcgcggtgattgacgcaaaaatcctccatcgccagccgaaatatctcgggccatcggtcatgattgggccgtttagtgagcatggctgtccggcgaaagaataa

SEQ ID NO: 471925 - DNA, 999 bp, Shigella flexneri
atgatacgtttcgctgtgattggtacgaactggatcactcgccagttcgtcgaggccgcccatgagagcggtaaatacaagttaaccgccgtatattcccgcagccttgagcaggctcagcacttcgccaatgatttttctgtcgagcatctgtttacgtcgctggaagcgatggcggaaagcgatgccattgacgcggtgtatattgccagcccgaattccctgcacttttcccagacacaacttttccttagccataaaattcatgtgatttgcgaaaaaccgctggcgtcgaatctggcggaagtggatgccgccattgcctgtgcgcgcgaaaatcaggtggtgctgtttgaggcatttaaaaccgcctgcctgccgaactttcatttgttgcgccaggcgctgccgaaagcaggcaaactgcgtaaagtctttttcaactattgccagtattcctcgcggtatcaacgttacctggacggtgagaatcccaacacctttaatccggcattctctaacggttcaattatggatatcggcttttactgcctggcgtcggcggtggcgttatttggtgagccgaaaagcgtgcaggcaacggcgagtttgctggcaagcggcgttgacgcccacggcgtggtggtgatggattacggtgatttcagcgtcaccttgcagcactcaaaggtcagtgattctgtcctgggaagcgagattcagggcgaagcgggatcgctggtgattgaaaaactgtctgaatgccagaaagtctgctttgtgccgcgtggcagccagatgcaggatctcacccagccgcagcatattaataccatgctctacgaagcagagctgttcgctaccctggtggatgagcatctggtggatcatccagggctggcggtcagtcgcatcacagccaaactgctgaccgagatccgccgccaaactggggtgatttttccggcagatagcgtaaaactatacttgccaaagtaa

SEQ ID NO: 471926 - DNA, 966 bp, Shigella flexneri
atgaatactgtcggcacgccgttgctatggggcggattcgctgttgttgtcgccattatgctggctatcgacctgttgttgcaggggcgtcgtggggcacatgccatgaccatgaaacaggctgcggcctggtcgctggtctgggtgacgctgtcgttactgtttaacgccgctttctggtggtatctggtgcaaaccgaaggtcgcgccgttgccgatccacaggccctggcctttctcacgggttatctgattgagaaatcgctggcggtcgataacgtctttgtctggctgatgttgttcagctatttctccgttccggcggcattacaacgtcgcgtgctggtgtatggcgtgctcggggcgattgttctgcgtaccatcatgatcttcacaggcagctggctgatttcgcagttcgactggatcctgtatatcttcggtgccttcctgctgtttaccggcgtgaagatggcgctcgcccatgaagatgaatcaggcattggcgacaagccgctggtgcgctggctacgcggtcatttgcgcatgaccgacaccatcgacaacgagcatttctttgtgcgtaagaatggattgctgtacgccacaccgctgatgctggtactgattctggtggaattgagcgacgtgatttttgccgtggatagcattccggctatcttcgccgtgaccactgacccgttcattgtgctgacctcaaacctgtttgcaatcctcggcctgcgtgcgatgtatttcctgctggcgggcgtagcagagcgtttctcgatgctcaaatatggcctggcggtgattctggtgtttatcggtatcaagatgctgattgtcgacttctaccatattccaatcgccgtctcgctgggcgtggtgtttggcattctggtgatgacgtttattatcaacgcctgggtgaattatcggcatgataagcagcggggagaatga

SEQ ID NO: 471927 - DNA, 1245 bp, Shigella flexneri
atgactacgcaacgttcaccggggctattccggcgtctggctcatggcagcctggtaaaacaaatcctggtcggccttgttctggggattcttctggcatggatctcaaaacccgcggcggaagctgttggtctgttaggtactttgttcgtcggcgcactgaaagctgttgcccccatcctggtgttgatgctggtaatggcatctattgctaaccaccagcacgggcagaaaaccaatatccgtcctattttgttcctctatctgctgggcaccttctctgcagctctggccgcagtagtcttcagctttgccttcccttctaccctgcacttgtccagtagcgcgggtgatatttcgccgccgtcaggcattgtcgaagtgatgcgcggactggtaatgagcatggtttccaaccccatcgacgccctgctgaaaggtaactacatcgggattctggtgtgggcgatcggcctcggcttcgcactgcgtcacggtaacgagaccaccaaaaacctggtcaatgatatgtcgaatgccgttacctttatggtgaaactggtcattcgcttcgcaccgttcggtatttttgggctggtttcttctaccctggcaaccaccggtttctccacactgtggggctacgcgcaactgctggtcgtgctggttggctgtatgttactggtggcgctggtggttaacccattgctggtgtggtggaaaattcgtcgtaacccgttcccgctggtgctgctgtgcctgcgcgaaagcggtgtgtatgccttcttcacccgcagctctgcagcgaacattccggtgaatatggcgctgtgtgaaaagctgaatctggatcgcgatacctattcagtttctattccgctgggagccaccatcaatatggcgggcgcagcaatcaccattaccgtgttgacgctggctgcggttaatacgctgggtattccggtcgatctgcccacagcgctgctgttgagcgtagtggcttctctgtgtgcctgtggcgcatccggcgtggcggggggttctttgctgctgatcccactggcctgtaatatgttcggtatttcgaacgatatcgccatgcaggtggttgccgtcggctttattatcggcgtattgcaggactcttgcgaaaccgcgctgaactcttcaactgacgtgctgttcactgcggcagcttgccaggcggaagacgatcgtctggcaaatagcgccctgcgtaattaa

SEQ ID NO: 471928 - DNA, 552 bp, Shigella flexneri
atgaccgcgtattggctggcccagggcgtgggtgtcatcgcctttctgattggtatcacaacatttttcaatcgtgacgaacgtcgcttcaaaaagcagctttcggtctatagcgccgttattggcgtacatttttttcttctgggcacctatcccgctggtgccagtgccatccttaatgccattcgtacattgattaccttacgcacgcgcagcttatgggtaatggcgatttttattgtgctgactggcggaattggcctcgcgaagttccatcatcctgtcgaactattgccggttatcggtacgattgtcagtacctgggcgctgttccgctgtaaagggctcaccatgcgctgcgtgatgtggttttcaacgtgttgctgggtgattcacaacttctgggcggggtcgataggcggcacgatgattgagggtagttttctgcttatgaatggcctgaatatcattcgtttctggcggatgcagaaaaggggaattgatccgtttaaagtagagaaaacccctcccgccatagacgaaaggggttaa

SEQ ID NO: 471929 - DNA, 1488 bp, Shigella flexneri
atgcaatacatcaagatccatgcgctggataacgtcgcggtcgctttagcagatttggctgaaggcacagaagtcagtgtcgataaccagactgttacgctgcgccaggatgttgctcgtggacataaatttgcgttaacggatatcgcaaaaggggccaacgtcatcaaatatggcctgccgattggttatgcattggcggatattgcggcgggggaacacgtccacgcccacaatacgcgcacgaatctgagcgatctggatcagtatcgctatcaacctgattttcaggatctgcctgcgcaagcggcagatcctgaagtgcagatctatcgtcgcgctaacggcgatgtcggggtgcgtaacgagctgtggatcctgccaaccgtgggctgtgtcaacggcatcgcgcggcaaatccagaaccgtttcctgaaagagaccaacaacgccgaaggtaccgacggcgtgttcctcttcagccacacctatggctgctcacaactgggcgacgatcacatcaacacccgcaccatgctgcaaaacatggtgcgccacccgaacgcgggcgcagtgctggtgattggtctgggctgtgaaaacaaccaggttgccgcattccgtgaaacgttgggcgatatcgatcctgaacgcgttcatttcatgatctgccaacagcaggatgatgagatcgaagccgggatcgagcatttgcatcagctgtataacgtgatgcgcaacgataaacgcgagccaggcaaactcagcgaactgaagtttggtctggagtgcggtggttctgacggtctttctggtattactgctaacccgatgctggggcgtttctctgactacgtgattgctaacggcggtactaccgtactgaccgaagtgccggagatgtttggcgcagagcagttgctgatggaccattgccgcgacgaagcaacgtttgaaaaactggtcaccatggtcaacgacttcaaacagtactttattgcccatgatcagccgatctacgaaaacccatcaccggggaacaaagcgggcggtatcaccacgctggaagacaaatcacttggctgtacccagaaagcgggttccagtgtcgtggttgacgtgctgcgttacggcgagcgtctgaaaacgccagggctgaacttgttaagtgcgccgggtaacgatgccgtagcgaccagcgccctggcgggtgcgggctgccatatggtgctgttcagtactggtcgcggcacgccatacggtggatttgtgccgacggtgaaaatcgccaccaacagtgaactggcggcgaagaaaaaacactggatcgactttgacgcgggtcagctgatccacggtaaagcgatgccgcagttgctggaagaatttatcgacaccatcgttgagtttgccaacggtaagcaaacctgcaacgagcgtaacgacttccgcgaactggcgatcttcaaaagcggcgtaacgctataa

SEQ ID NO: 471930 - DNA, 1413 bp, Shigella flexneri
atgactccgtttatgactgaagatttcctgttagataccgaatttgcccgccgtctgtatcacgactacgcaaaagaccagccgattttcgattaccattgccatttgccgccgcagcagattgcggaagactatcgttttaaaaacctgtatgacatctggttgaagggcgatcactacaaatggcgcgctatgcgtaccaacggtgtggctgagcgtctgtgtactggtgatgcgtctgaccgtgaaaaatttgacgcctgggcggcgactgttccgcacactatcggcaacccgttataccactggacgcacctcgaactgcgtcgtccgttcggtatcactggcaaattgctttctccgtcaactgccgatgaaatctggaacgaatgtaacgaactgctggcgcaggataacttctccgcgcgcggcatcatgcagcagatgaacgtgaaaatggtcggcaccaccgatgacccgatcgattctctggagcatcacgcagagatcgccaaagacggctctttcaccatcaaagtgctgccgagctggcgtccggacaaagccttcaatatcgaacaggcgacctttaacgactacatggcgaagctgggcgaagtttccgataccgacattcgccgctttgctgacctgcaaactgccttgaccaaacgtctggatcacttcgccgctcacggctgtaaagtgtctgaccatgcgctggacgtggtgatgtttgctgaagcgaacgaagcggaactggacagcattctggcgcgccgtctggctggcgaaaccctgagcgagcacgaagtggcacagttcaaaactgcggtactggtgttccttggtgccgaatatgcacgtcgcggctgggtacagcagtaccacattggcgcgctgcgtaataacaacctgcgtcagttcaaactgctggggccggatgtaggctttgactccatcaacgaccgtccgatggcggaagagttgtctaagctgctgagcaagcagaacgaagaaaacctgctgccgaaaaccattctctactgcctgaacccgcgcgataacgaagtgctgggcaccatgatcggtaacttccagggcgaaggtatgccgggcaaaatgcagttcggttccggctggtggtttaacgatcagaaagacggtatggaacgtcagatgacccaactggcgcagctcggtctgctgagccgctttgtcggtatgctgactgacagccgtagcttcctgtcatacacccgtcacgaatacttccgccgcattctgtgccagatgatcggtcgctgggtggaagcgggcgaagcaccggcggacatcaacctgctggtcgagatggtgaaaaatatttgctttaacaatgcgcgtgactacttcgccattgaactgaactaa

SEQ ID NO: 471931 - DNA, 1299 bp, Shigella flexneri
atgcgtaaaattaaagggttacgttggtatatgatcgcactggtgacgctcggcaccgtgcttggttacctgacgcgtaacactgtggcggcagctgcgccaactctgatggaagagttaaacatctccacccaacagtattcctatatcatcgcagcctattctgctgcttatacggtcatgcaaccggtagcaggttatgtactggatgtgctgggtacgaaaatcggttatgcaatgtttgctgtgctgtgggccgtgttctgtggtgcaaccgcgctggcaggtagctggggtggcctagctgttgctcgtggtgcggtcggtgccgcggaagcagcgatgatcccggcgggtctgaaagccagctccgaatggttcccggcgaaagagcgttccatcgcagtaggctactttaacgtaggttcttcgattggtgcgatgattgcgccgccgctggtggtatgggcaatcgtgatgcacagctggcagatggcatttatcatctccggtgcattgagctttatctgggcgatggcatggctgattttctataaacatccgcgcgaccagaagcatctgaccgatgaagaacgcgactatattattaatggtcaggaagcccagcaccaggtgagcacggcgaagaaaatgtccgttggtcagatcctgcgtaaccgtcagttctggggtatcgcactgccgcgtttccttgcagaaccggcctggggtacttttaacgcgtggatcccgctgttcatgtttaaagtttacggctttaacctgaaagagatcgcgatgttcgcctggatgccgatgctgtttgctgacctcggttgtatcctcggtggttacctgccgccgctgttccagcgttggtttggtgtgaacctgatcgtttcccgtaagatggtcgtaacgctgggtgctgtgctgatgattggcccgggtatgatcggtctgttcaccaacccgtatgtcgcaattatgctgctgtgtatcggtggttttgcccaccaggcactgtctggcgcgctgattacgctctcttctgacgtgttcggtcgtaacgaagtggcgacggcgaacggtttaaccgggatgtccgcatggctggcaagtacgctgtttgcgctggttgtcggtgcactggctgacaccatcggcttcagcccgctgttcgcagttctggcagtatttgacctgctgggtgcgctggttatctggaccgtattgcagaacaaaccggcgattgaggtggcgcaggaaacacataacgatcccgcaccgcaacattaa

SEQ ID NO: 471932 - DNA, 1089 bp, Shigella flexneri
atgagaaatcgattgattgcggcgatattgggcttgtttggcacgctcactggcgttcaggcagctcctgacgtgaccagtgaaattacgtatgatttggcatctggtagagcggattattacttctggaaggatgaagcgtcggcaggaaataatggatatatgtggtatgaatgttcgtatcctgacctccaacaaacctgtacagctaatggaaatatatcgacagtacaaatctatttaactgaacaacgcagtgggatgcgttggccggtaaaactcaaaggatttaaaacagccattgtaagtagcgatgaagcgccgctaggatgcaaggggggcaaagggcttcagacgaatcttaaggattctaatagatcttcatgtacagaagatggtcaacattattatatatacgatacaaagtttcttacgctctaccttgagcagacagagatgaagaatttgccgattggtggcgtctggaaggggaaagttaaattacattcgaacagcccggcccaggactatttcgcaaatattaccctgaatacgctcgaccccaaccatattgacgtgttcttcccggagttcgcccacgccacgccaagggtgcagttagacttgcatccaacaggaagcgttaacggcagcaactacgcgcaagatctgaccatgttggacatgtgcctgtacgatggttttaacggtaatgccatcagttatgaaatcatgctcaaagatgaagggcgaccagctgcagggcgcagagacggttacttctctatctatcgtcagggagggaccaccaccgacgagggagaacgcattgattaccgggtcaaaatgtacaacccggaaaccggtgggcaaattgatgtgcgcaataatgaaaatatggtctggaacagcattaacctgaaacgtgtgcgtccggtggtactgcccggtattcgctatgccgtgatgtgtgtgccgacacccttgactctggcagtcgataaattcagcgtgatggataaacaggccgggtactacatgggcaaattgtcagtaatctttacgccttccttgccaaccatcaattaa

SEQ ID NO: 471933 - DNA, 2526 bp, Shigella flexneri
atggttaatcttgataccgtaacatttcttgatccagcaagtctatataacaagctggaactggatgtagacgatcagaaaatcgcgcatatagtgaaagaaaaattatcgcagccgctagctcgccacggtgaattggcttgcggttatgtacgtactgactcagggtgtggttttctgaataccgatacgctggaaataatctataatgatgaagaaagttcggcaacgttgtttattaatccgcaatggaattcagctttcgatgcgaagtcattatatttaaatccagacaaaaatactgttaacgcttttatacatcagcaagacatcaatgttctggcacaggatgattaccaatcgttgtctattcagggaaacggtgcgctgggaataacagaaaatagctatattggtgcacactggaatttcaacggttatgatgcagatgatgtcagtgacagtaatactgacgtcagcgatctctattatcgttatgattttttacgtcgttattatgtgcaggcgggtcgcatggacaaccgcacactatttaatgcacaaggcgggaactttacctttaactttctgccactcggtgcaatcgatgggatgcgtatcgggtcgacactgagctatttaaaccaggcgcaaagccagcaaggaaccccagtaatggttctgctttcgcgcaattctcgtgttgacgcttatcgtaatgagcaacttttgggatcgttttatctcaatagtggttcgcaatttattgataccagttcctttccgccaggcagctacagcgtggcattaaaagtctacgaaaataaccaactcacccgcaccgagcttgtgccgtttaccaaaaccggcggtctgactgacggaaatgcgcaatggttcttacaggcaggtaaaactacatcacaggtttctgatgatgaaagttcagcttatcagctaggagtacgcctgccattacatccgcaatatgagctctacgcagggctggcgaatgccgatgatgtgagtgctttcgagttaggtaataactggacggcagatttaggcagggtggggaatcttgcaatcagcgccagcgtgttccgtaacgatgacggcggcaaaggtgatatgcaacaggccaactggagtaatccgggatggccgacgttgggcttttatcggaccaactctgacggcgatgcttgtacaaccgacagcagagagagctataacgccttaagctgttatgaaagtatttccgcgacagtttcactgaattttgtcggctggaatatgatgctgggttatacctgcacacaaaataacactgatgatagtttgcgttgggataaacagcagagctttgaaaataactatcttcgccagacaacagcgcaaagtatctctgaaactgtacaacttagcgcttcccgcgctattgtgatgcgtgactggattttgagtacgtcagtcggtgttttccatcgtaatgacaacggtggcgataacgacgacaacggcttgtacttatcgttttcgttatctgacacgccaacgatggatagcaataacaacagccattcaaccaatgtgcctacggattatcgttatagcgaacaggatggcgatcaaacgtcatggcagttatcgcataccttttataacgattcattcagccataaagaacttggcgtaaccgtcggaggcctgaacaccgataccataaacagcgcggttaacgggcgttgggatgggcaatacggaaatgtctacgctaccgtatctgatagttatgaccgtaagaatcatgatcatctttcggcctttacgggcacttatagctctacgctggctgtcagtcgctatggcgttaatttgggagccagtggtacagacgatttgctgggtgcggtactggtggatgtgaaaggcttctctgaacaggatgaagagagtcaggatctgcaactcgaagcgcgggtggcaggcagccgaactttgcagcttggtcaaagtgacagtgtgttgttcccttatcctggatttcagtctggttttgttgaggttaacgacagtagccagggcaatcagcaggggacaacaaacatcattaacggtgcagggaatcgtgaattaatgttgttgcctggcaagctgcgctatcgcgaagtgtctgccagctttaactacaactatatcggtcgtttattactgccggcagcggtgaaaaaattcccgattgtggggctgaacagcgccatgttactggtagctgaagatggcggatttacacttgaaattaacggcagcgaaaaagagctctatctgctttccgggcagcaattccttaagtgtccactgagtgttgtaaagaaacgcgccagcattcgttacagcggagatgttacttgtagtgtggtgacttattcacaattaccggagtcgattcaggttcaggcacagttgaaacagcctaaattacgtggaaacgttcagacggcgcaaagggaggttgcaccatga

SEQ ID NO: 471934 - DNA, 444 bp, Shigella flexneri
atgacacacgttctgcgcgccagaaggctgctgactgaagagggatggttcgatgaccatcagttgcgtgttgctgacggtgtcatcgcagcaatcgaaccgattccagtgggcgtgactgaacgcgatgcggaactgctctgccccgcttacatcgacacccatgtacacggtggtgcgggcgttgatgtaatggatgacgcgccggatgtactcgacaagctggcaatgcacaaggcacgcgaaggtgtcggcagttggttaccgaccaccgtaaccgcgccgcttaataccattcatgcggcgctgaaacgtattgctcaacgttgccaacgcggcggacctggtgcgcaagtgctggggagttatctcgaaggaccgtacttcacgccgcagaataaaggcgcgcatccgccgggtaatgctgccaacttactgatttag

SEQ ID NO: 471935 - DNA, 435 bp, Shigella flexneri
atgttaagtattattttgacagggcatggcgggtttgccagtggcatggaaaaagcaatgaagcaaatcctcggcgatcaatcgcagtttattgccatcgattttcccgaaacctcaagcgccgcgctgcttacatcgcagcttgaagaggccatcgcccaactggattgtgaagacggcattgtttttctgacggatttgctgggcggcacgccgtttcgcgtagcttcaacgctggcgatgcaaaaaccgggctgtgaagtgattaccggcaccaatttgcaactgctactggagatggtgctggagcgcgaagggttaagcggtgaagaattccgtgtacaggcgctggagtgtggacaccgagggctgaccagtctggtggacgtgttaggccgctgccatgaagaatgtccggtcgaggaaggaatatga

SEQ ID NO: 471936 - DNA, 810 bp, Shigella flexneri
atggcatctaatcaaaccaccctgccgaacgtcagcgaaaatgaagaaacactgctgactggcgtcaatgaaaacgtgtatgaagatcggagcattgccgcggagctgacgaaaaaagatatcaaccgcgtcgcctggcgttccatgctgttacaagcgtcttttaactacgaacgtatgcaggcttctggctggttgtacggtctgctgcctgctctgaaaaagatccacactaataaacgcgacctggcgcgcgccatgaaggggcatatgggtttcttcaatacccatccgtttctggtgacgtttgttatcggcattatccttgcgatggagcgttctaagcaggacgttaacagtattcagagcaccaaaattgccgtcggtgcgccgcttggcgggattggcgatgcgatgttctggctaacgctactgccgatttgtggcgggataggcgcaagcctcgcgctacaaggctctattcttggcgcagtcgtctttattgtgctgttcaacgtggtacacttggggctgcgttttggtctggcgcattatgcttaccgcatgggcgtggcggcgattccccttattaaagcgaataccaaaaaagtcggccatgctgcgtcaatcgttggaatgacggtaatcggcgcactggtggcaacctatgttcgtttaagcaccacgctggaaatcacggcgggcgacgcagtagttaagttacaggctgatgttatcgacaaactgatgcctgccttcttaccgctggtctacaccctgaccatgttctggctggtacgccgcggctag

SEQ ID NO: 471937 - DNA, 780 bp, Shigella flexneri
atggaaatcagcctgttgcaggcattttcgttgggcattatcgcctttatcgctggcctagatatgtttaacggcttaacccatatgcaccgcccggtggtcctcggcccgttggtcgggctggtacttggcgatctgcataccggaattttaaccggcgatacgctggaactagtgtggatggggctggccccgctggcgggcgcacagccgcctaacgtgattatcggtactatcgtcggcacggcgtttgccattactactggcgtgaaacccgatgtcgcggtcggtgtcgccgtacctttcgctgtcgcagtacagatggggattaccttcctgttctcggtgatgtctggcgtgatgtctcgctgcgaccggatggcggagaacgccgatactcgcggcattgaacgcgtgaactatctggcactgctggcactcggcactttctattttctctgcgctttcctgcctatctacttcggcgcggaacatgcaaaaaccatcattgatgtcctgccgcaacgattaatcgacggcctcggcgtcgcgggcggcatcatgccagcaatcggttttgccgtgctgctgaaaatcatgatgaaaaacgtctacataccctacttcatcctgggctttgttgccgcaacctggctcaagttaccggtgctggctattgctgccgccgcgctggcgatggcgctgatcgatctgctgcgtaaatctcctgaaccgactcaacctgcggcacagaaagaggaatttgaagatggcatctaa

SEQ ID NO: 471938 - DNA, 474 bp, Shigella flexneri
atgccaaatattgttttaagccggattgatgaacgcttgattcacggtcaggtcggcgttcagtgggtcggatttgcgggggcaaatctggtgctggtagccaacgatgaggttgccgaagatccggtacaacaaaacctgatggaaatggtactggcagaagggatcgccgtacgtttctggacgctgcaaaaagttatcgacaacattcatcgcgccgccgatcgacagaaaatcctgctggtttgtaaaacacccgccgatttcctgacgctggtgaaaggtggcgttccggtgaatcgcattaacgttggcaatatgcactacgccaatggcaaacaacaaatcgccaaaacggtttctgtggatgcgggcgatatcgcagcatttaacgacctgaaagccgctggggtggaatgcttcgttcagggcgtcccgacagagcctgctgtggacctctttaaattactttga

SEQ ID NO: 471939 - DNA, 1281 bp, Shigella flexneri
gtgaaacatctgacagaaatggtgagacagcacaaagcgggcaaaacaaatgcaatttatgccgtttgttccgcacatccgctggtgctggaggctgcaatccgctacgccagtgcaaaccaaacgccgttactgattgaagcaacctccaatcaggtagaccagttcggcggttataccggaatgacgcccgccgattttcgcggctttgtttgtcagctcgccgactcgttgaatttcccgcaggatgcgctgattctgggtggtgaccatctggggccaaaccgctggcaaaacctgccagccgctcaggcaatggccaatgccgatgatttgattaaaagctacgttgcggcaggattcaaaaaaatccaccttgattgcagcatgtcctgtcaggacgatccaattcccttaactgatgacatcgtggctgaacgcgccgcccgtctggcgaaagtggcggaagaaacctgtcgcgaacactttggcgaagccgatctggagtatgtcattggtaccgaagtgccggtacctggcggcgcgcatgaaaccttaagcgagctggcggtcaccacgccggatgccgcccgcgccacgctggaagcccatcgtcacgcctttgaaaagcaaggtttgaatgccatctggccacgcattattgccctggtggttcaacccggcgtcgaattcgatcacaccaacgttattgattatcagcccgccaaagcgagcgccttaagccagatggtcgaaaactacgaaacgctgattttcgaagcgcactctaccgattatcaaacgccgcaatctctgcgccagctggtgattgaccactttgccattctgaaagttggcccggcgctgaccttcgccctgcgtgaagcccttttttctctggcggcgattgaagaagaactggtaccagcgaaagcctgttccggtctgcgtcaggtgctggaaaacgtgatgctcgaccgcccggaatactggcaaagccactaccacggtgacggcaacgcgcgtcgtctggcgcgtggttacagctactcagatcgcgtgcgctattactggccggacagccagattgatgacgctttcgctcatctggttcgtaatctggcggattcaccaattccgctaccgctcatcagccagtatctgccgctgcagtacgtgaaagttcgctccggcgagctgcaaccgacgccacgggaactcattataaaccatattcaggacatcctggcgcagtaccacacagcctgtgaaggccaataa

SEQ ID NO: 471940 - DNA, 825 bp, Shigella flexneri
atgagtaataccgacgcttcaggtgagaagcgagtgacaggcaccagcgagcgacgagaacagatcattcagcgtctgcgacagcaagggagtgtgcaggttaacgatctgtcggcattgtatggcgtatctactgtgacgatccgcaatgatctggcgtttctggaaaagcaggggatcgctgtgcgtgcctatggtggcgcgttgatctgcgatagcacgacgccgtcagtcgagccatcagtggaagataaaagcgcactgaacaccgcgatgaaacgcagcgttgcgaaagctgccgttgagttgattcagccaggtcatcgggtgatcctcgattccgggaccaccacttttgagattgctcgtctgatgcgcaagtacactgacgtaattgcgatgaccaacggtatgaacgtggctaatgcgttgctggaagcggaaggcgttgagctgctgatgaccggcgggcatttgcgccgtcagtcgcaatctttttacggcgatcaggctgagcaatcgctgcaaaattaccacttcgatatgctgtttcttggtgtagatgcgatcgatctggagcgcggcgtcagcacacataatgaagatgaagcccgtttaaaccgtcggatgtgcgaagttgcggaacggatcatcgtggtcaccgattccagtaaattcaatcgttccagtttacataagatcattgatactcaacgtatcgacatgatcattgttgatgaaggcattcctgcggatagtctggaaggactgcgaaaggctggggttgaagtgattctggtcggggatcacgcgtcttcgctgtga

SEQ ID NO: 471941 - DNA, 1572 bp, Shigella flexneri
atggccaacatcgaaatcagacaagaaacgccaactgcgttttatataaaagttcacgacacagataatgtggcaattattgttaatgataatggcctgaaagcaggaacgcgttttccggatgggctggaattaattgaacatattccccaggggcataaagtcgcattgctggacattccggctaatggtgaaattattcgttatggcgaagtgattggttacgccgtgcgtgcaatcccacgcggaagctggatcgacgaatcaatggttgtactaccggaagcgccgccgttacacacgctgccactggcaaccaaagtcccggaacccttaccgccgctggaaggatacacctttgagggctatcgcaatgccgatggcagcgtgggcaccaaaaacctgctcggcatcaccaccagcgtccactgtgtggcaggcgtggtggactatgtagtaaaaatcattgaacgcgatctgctaccgaaatacccgaacgtcgatggcgtggtggggctgaatcatttgtacggttgtggcgtggcgattaacgcaccggcagcagttgtacctattcgtaccattcacaatatttcgctgaaccctaactttggcggcgaagtaatggtgattggcctgggttgtgaaaagttgcagcctgagcgcctgctgactggaacggatgatgtgcaagctattccagtagaaatcgccagcattgtcagtttgcaggatgaaaagcatgtcggttttcagtccatggtcgaggatattttgcaggtcgccgaacgccatctacaaaaactgaatcaacgtcagcgagaaacctgtccggcttcagaactggttgtcggcatgcattgcggtggcagcgatgcgttttctggcgtaacggcaaacccggcggttggctatgcgtctgatctactggtgcgctgcggcgcaacggtgatgttttcagaagtcacggaagtgcgtgacgcgatccatctgctgacaccacgcgcagtgaacgaagaggtcggcaaacggctgctggaggagatggagtggtacgataactatctcaatatgggaaaaaccgaccgcagcgccaacccttcgccgggcaacaagaaaggcggtctggcaaacgtggtagagaaagcgctcggctccattgctaaatcgggcaaaagtgcaattgttgaagtgctgtcgcccggtcaacgcccgactaaacgcggattaatttacgccgcgacgccagccagcgattttgtctgtggcacgcaacaggtggcttcgggtatcaccgtgcaagtgtttacgaccggtcgtggtacgccgtacggcctgatggcggtacccgtcattaaaatggcaacccgcaccgagctggcgaaccgctggtttgatttaatggatattaatgcgggcaccatcgctaccggcgaagaaactattgaagaggtgggctggaagttgttccactttattctcgacgtcgccagcgggaagaagaaaaccttctcggatcaatggggactgcataaccagctggcggtgtttaacccagcaccggtgacctga

SEQ ID NO: 471942 - DNA, 1335 bp, Shigella flexneri
atgattctggacaccgttgacgcaaaaaggaaaggtgtgcatacccgctatttaatattactgattatttttattgttaccgccgttaactacgccgatcgtgcaacgctgtctattgctggtaccgaagtggcaaaagagttgcagttaagtgcggtttcgatgggttacatcttctccgcttttggctgggcctacttgctgatgcaaatccccggcggctggttgcttgataagtttggctcgaaaaaagtttacacctacagcctctttttctggtcgctgttcaccttcctgcaaggctttgttgatatgttcccgctggcctgggcagggatctccatgttctttatgcgctttatgctgggattctcggaagctccatcattcccggcgaacgcccgtattgtcgccgcctggttcccgacgaaagaacgtggtactgcctccgccatctttaactcggcacaatatttctcgctggcgctcttttcgcctctgcttggctggctgactttcgcctggggatgggagcacgtctttaccgttatgggggtgatttgttttgtgctgacggcgctgtggatcaagttgattcataacccgacagatcacccacgtatgtctgaggaagagctgaagtttatctctgaaaatggcgcggtggtcgatatggaccacaaaaagccgggcagcgcggcagcaagcggtcccaaactgcattacatcaagcaattgctctctaaccgcatgatgttgggcgtatttttcggacaatattttatcaacaccatcacctggttcttcctcacctggttcccgatttatctggtgcaggaaaaaggcatgtcgattctgaaagtgggtctggtcgcctcgattccggcactgtgtggttttgcgggcggcgtgctgggaggtgtcttctcggattatctgatcaaacgcggtttatccctgaccctggcacgtaagctaccgattgtgctgggaatgttgctggcttccaccatcatcttatgtaactacaccaacaacaccacgctggtggtcatgctgatggcgctggctttttttggcaaaggatttggtgctctgggctggccggtgatttctgacaccgcgccgaaagagattgttggcctctgtggcggcgtctttaacgtctttggcaatgttgcctccattgtcactccactggtgattggctacctggtaagtgaactgcactccttcaatgcagcactggttttcgtgggatgttcagcgctgatggcgatggtctgctacctcttcgtagttggcgacattaaacgtatggaattgcagaaataa

SEQ ID NO: 471943 - DNA, 225 bp, Shigella flexneri
atgaataacgatgttttcccgaataaattcaaagccgcactggctgcgaaacaggtacaaattggttgctggtcagcactctctaacccgattagcactgaagttcttggtttggctgggtttgactggctggtgctggatggcgaacatgcgccaaacgatatctccacgtttattccgcagttaatggccttgaaaggcagcgccagcgcgccagtagtgtga

SEQ ID NO: 471944 - DNA, 546 bp, Shigella flexneri
gtgccgaccaacgagccggaaattattaagcgtcttctggatatcggtttctataacttcctgattccttttgtagaaacaaaagaggaagcagagcaggcggtggcatcaacccgttacccaccggaaggcattcgcggcgtctccgtttctcaccgcgccaatatgtttggcaccgtggcggattatttcgctcagtcgaacaagaacatcactattctggtccagatagaaagtcagcagggcgtagataacgtcgatgccattgccgctaccgaaggcgtagacggcatcttcgtcggccccagcgatctggccgcggcattaggccatctcggcaatgcatcacacccggatgtacaaaaagcaattcagcacatttttaaccgtgccagcgcgcacggcaaacccagcggtatcctcgcgccggtcgaagccgatgcgcgtcgttatctggaatggggcgcgacgtttgtggctgtcggcagcgatctcggcgtcttccgctctgccactcataaactggctgatacctttaaaaaataa

SEQ ID NO: 471945 - DNA, 891 bp, Shigella flexneri
atgactatgaaagttggttttattggcctggggattatgggtaaaccaatgagtaaaaaccttctgaaagcaggttactcgctggtggttgctgaccgtaacccagaagctattgctgacgtgattgctgcaggtgcagaaacagcctctacggctaaagcgatcgctgaacagtgcgacgtcatcataaccatgctgccaaactcccctcatgtgaaagaggtggcgctgggtgagaatggcattattgaaggcgcgaagccaggtacggtattgatcgatatgagttctatcgcaccgctggcaagccgtgaaatcagcgaagcgctgaaagcgaaaggcattgatatgctggatgctccggtgagcggcggtgaaccgaaagccatcgacggtacgctgtcagtgatggtgggcggcgacaaggctattttcgacaaatactatgatttgatgaaagcaatggcgggttccgtggtgcataccggggcaattggtgcaggtaacgtcaccaaactggcgaatcaggtcattgtggcgctgaatattgccgcgatgtcagaagcgttaacgctggcaactaaagcgggcgttaacccggacctggtgtatcaggcaattcgcggtggactggcgggcagtaccgtgctggatgccaaagcgccgatggtgatggaccgcaacttcaagccgggcttccgtattgatctgcatattaaggatctggcaaatgcgctggatacttcccacggcgtcggcgcgcaactgccgctcacagctgcggttatggagatgatgcaggcactgcgagcagatggtttaggaacggcggatcatagcgccctggcgtgctactacgaaaaactggcgaaagtcgaagttactcgttaa

SEQ ID NO: 471946 - DNA, 1146 bp, Shigella flexneri
atgaaaatcgtaatcgccccagactcttataaagaaagtttatctgccagcgaggttgcgcaggcgatagaaaaaggatttcgggaaatttttcctgatgcacagtacgtttctattccggttgccgacggtggcgaaggaacggtggaagcgatgattgcagccacccagggttctgaacgtcacgcctgggttacagggccgctgggcgagaaagtgaatgccagttgggggatctccggcgatggcaaaaccgcgtttattgaaatggcggcggccagtgggctggagctggtacctgcggaaaaacgcgatccactcgtgaccacttcacgcggcacaggcgagttaatcctgcaggcgctggagagcggcgcgacaaacattattatcggcattggcggtagcgctacaaatgatggcggcgcaggcatggtacaggcgctgggggcgaaattatgcgacgccaacggcaatgaaattggttttggcggcggtagtcttaatactctgaatgatattgatatttccggcctcgatccgcgcttaaaagattgcgtcattcgcgtcgcttgtgatgtcaccaatccgctggtgggcgataacggcgcatcgcgcatctttggcccacaaaagggagccagtgaagcgatgattgttgagctggacaataacctctctcactatgcctatgtcattaaaaaagcgctgcatgttgatgtaaaagatgtccccggcgcaggagctgcgggcggtatgggtgcggcgctgatggcgtttcttggtgcggaactgaaaagtggtattgaaatcgtcactacggcgctgaatctggaggaacatattcacgattgtacgctggtgatcaccggtgaagggcgtattgacagccagagtattcacggcaaggtaccgattggcgtcgcaaacgtggcgaagaagtaccataaaccggtgattggcattgcgggtagcctgaccgatgatgttggcgttgtacatcagcatggcattgatgcggtcttcagcgtattgaccagcataggtacgttggacgaagcattccgcggggcttatgacaatatctgccgtgcttcacgtaatattgccgcgacactggcgattggaatgcgcaacacggggtga

SEQ ID NO: 471947 - DNA, 651 bp, Shigella flexneri
atggctaatactattctaaatcattttaaattggattcaacaaattttactaatgccaacatgtttcaggttaattttgttagttcaacacaaaacgccacaatctcctgggattatttactaaaaataacgcctgttttaataagcattagcgatatgtattctgaagaaaaaatcaagtttgtcgaaagttgtttaaatgagcttggagacattaccgaagaacaattaaaaattatgagatttgcaattataaaatctataccaagggcaactcttacagataaattagaaaatgaattaacaaaagaaatatataaaagctcatcgaaaatcaacaattgcttgaacagaattaaattaccagagatgaaagaattctcatcaaaaaaaatatatgattacatcgatacaatcattgaagattatgaaaatatcaaagaaaatgcttatctggtcgtcccccaaattaattatactatggatttaaacatagaagactctagctcagaagagttaataccctcgagaaagacgaaaattctccggacaatggctttgaggtcggggaatataacacatatgaagcatataactcagagaatcaatattttaccagagaggactatacgtataattacgaccttttaa

SEQ ID NO: 471948 - DNA, 348 bp, Shigella flexneri
atgttccctgtttcatcaattggtaatgatattagtagtgatttagtccgtcgaaaaatgaatgaccttcctgaaagccccataggaaataacctcgaagcactagcaccaggtatagaaaaactaaaacagacctctattcaaatggtcactttacttaacgcgttacaaccaagtggaaaatgcattatcactggtgattttcaaaaagaattagcgtacttacaaaatgtaattctttataatgactcgtctcttcgtctggattttttaggttataacacccaaattattcaacgatcggacaatacctgcgaacttaccattaatgaaccgttaaaaaactag

SEQ ID NO: 471949 - DNA, 540 bp, Shigella flexneri
atgaaaggcttcccaattgcacatatttttcacccttcaatcccgccaatgcacgcagtggttaacaatcacaatagaaatattgattattggacggtaaaaagaaagtttgcagaaattgtctccaccaatgacgttaataaaatttacagtataagtaatgaactccggagagtattatctgcaattactgcattgaatttctatcaaggcgatgttccttctgtcatgatccgaatccaaccggaaaatatgagtccattcatcatagatatttctacaggagaacatgatgattatatcatacaaacattagatgtaggcacttttgcaccttttggtgaacaatgtacttgctcagccgtcaataaaaaagagctggaatgtattaaggagacgatttctaagtattgcgcaaagttcacccaaaaagaagccatcttaacaccccctaggcactttaataaaacctgcattacttcagattgttggcaaattctctttttttcacccgatcattttaataatgatttttattga

SEQ ID NO: 471950 - DNA, 345 bp, Shigella flexneri; identical to SEQ ID NO: 460391

SEQ ID NO: 471951 - DNA, 939 bp, Shigella flexneri
atgagcactattcttcttccgaaaacgcagcacctggtagtctttcaggaagtcattagaagtggctctatcggctcggctgcaaaagaattagggttaactcaaccggccgtcagtaaaatcattaacgatattgaagattattttggtgtggaattagtggtgcggaaaaataccggtgtaacattaacacctgccggtcaattgttactctcccgttccgaatccattacccgtgaaatgaaaaatatggttaatgagataagcggtatgtcttctgaagcggtggtggaagtctcatttggttttccttcattgattggttttacttttatgtcagggatgatcaacaagttcaaagaggtgttcccgaaagcgcaggtttctatgtatgaagcgcaactgtcttcgttcttaccggcaatccgcgacggtcgactggattttgcgattggtacgttaagtgcagaaatgaagcttcaggatttacatgttgagccgctgttcgagtccgagtttgtgctggtagccagtaagtcccgaacatgcaccggcaccaccacgctggagtcgttgaagaacgaacagtgggtgttgccacaaactaatatggggtactacagcgaactgcttactacgttacaaagaaatggcatcagtattgaaaacatcgttaaaaccgactcagtcgtgacaatttataatcttgttctcaatgctgatttcttaactgtaattccttgtgatatgacgtcaccttttggttctaatcaatttattactattccggttgaagaaacattacctgtggcacaatatgccgcggtatggtcgaaaaattatcgtattaaaaaagcagcatcggttttggtggaattagccaaagagtattcatcttataatgggtgtagacgaaggcaattaatagaagttggttag

SEQ ID NO: 471952 - DNA, 990 bp, Shigella flexneri
atgcatattacatacgatctgccggttgctattgatgatattattgaagcgaaacaacgactggctgggcgaatttataaaacaggcatgcctcgctccaactattttagtgaacgttgcaaaggtgaaatattcctgaagtttgaaaatatgcagcgtacgggttcatttaaaattcgtggcgcatttaataaattaagttcactgaccgatgcggaaaaacgcaaaggcgtggtggcctgttctgcgggcaaccatgcgcaaggggtttcgctctcctgcgcgatgctgggtatcgacggtaaagtggtgatgccaaaaggtgcgccaaaatccaaagtagcggcaacgtgcgactactccgcagaagtcgttctgcatggtgataacttcaacgacactatcgctaaagtgagcgaaattgtcgaaatggaaggtcgtatttttatcccaccttacgatgatccgaaagtgattgctggccagggaacgattggtctggaaattatggaagatctctatgatgtcgataacgtgattgtgccaattggtggtggtggtttaattgctggtattgcggtggcaattaaatctattaacccgaccattcgtgttattggcgtacagtcagaaaacgttcacggcatggcggcttctttccactccggagaaataaccacgcaccgaactaccggcaccctggcggatggttgtgatgtctcccgcccgggtaatttaacttacgaaatcgttcgtgaattagtcgatgacatcgtgctggtcagcgaagacgaaatcagaaacagtatgattgccttaattcagcgcaataaagtcgtcaccgaaggcgcaggcgctctggcatgtgctgcattattaagcggtaaattagaccaatatattcaaaacagaaaaaccgtcagtattatttccggcggcaatatcgatctttctcgcgtctctcaaatcaccggtttcgttgacgcttaa

SEQ ID NO: 471953 - DNA, 1332 bp, Shigella flexneri
atgagtacttcagatagcattgtatccagccagacaaaacaatcgtcctggcgtaaatcagataccacatggacgttaggcttgtttggtacggcaatcggcgccggggtgctgttcttccctatccgcgcaggttttggcggactgatcccgattcttctgatgttggtattggcataccccatcgcattttattgccaccgggcgctggcgcgtctgtgtctttctggctctaacccttccggcaacattacggaaacggtggaagagcattttggtaaaactggcggcgtggttatcacgttcctgtacttcttcgcgatttgcccactgctgtggatttatggcgttactattaccaatacctttatgacgttctgggaaaaccagctcggatttgcaccgctgaatcgcggctttgtggcgctgttcctgttgctgctgatggctttcgtcatctggtttggtaaggatctgatggttaaagtgatgagctacctggtatggccgtttatcgccagcctggtgctgatttctctgtcgctgatcccttactggaactctgcagttatcgaccaggttgacctcggttcgctgtcgttaaccggtcatgacggtatcctgatcactgtctggctggggatttccatcatggttttctcctttaacttctcgccaatcgtctcttccttcgtggtttctaaacgtgaagagtatgagaaagacttcggtcgcgacttcaccgaacgtaaatgttcccaaatcatttctcgtgccagcatgctgatggttgcagtggtgatgttctttgcctttagctgcctgtttactctgtctccggccaacatggcggaagccaaagcgcagaatattccagtgctttcttatctggctaaccactttgcgtccatgaccggtacgaaaacaacgttcgcgattacactggaatatgcggcttccatcatcgcactcgtggctatcttcaaatctttcttcggtcactatctggggacgctggaaggcttgaatggtctgattctgaagttcggttataaaggtgacaaaaccaaagtgtcgctgggtaaactgaatactctcagcatgatcttcatcatgggctccacctgggttgttgcctacgccaacccgaacatcctcgacctgattgaagccatgggcgcaccgattatcgcatccctgctgtgcctgttgccgatgtatgctatccgtaaagcgccgtctctggcgaaataccgtggtcgtctggataacgtgtttgttaccgtgattggtctgctgaccatcctgaacatcgtatacaaactgttttaa

SEQ ID NO: 471954 - DNA, 1209 bp, Shigella flexneri
atgaatgaatttccggttgttttggttattaactgtggttcgtcttcgattaagttttccgtactcgatgccagcgattgtgaagtattaatgtcaggtattgccgacggtattaactcggaaaatgcattcttatccgtaaatgggggagagccagcaccgctggctcaccacagctacgaaggtgcattgaaggcaattgcatttgaactggaaaaacggaatttaaatgacagcgtggccttaattggccaccgcatcgctcacggcggcagtatttttaccgagtccgccattattaccgatgaagtcattgataatatccgtcgcgtttctccactggcacccctgcataattacgcaaatttaagtggtattgaatcggcgcagcaattatttccgggcgtaactcaggtggcggtatttgataccagtttccaccagacgatggctccggaagcttatttatacggcctgccgtggaaatattatgaagagttaggtgtacgccgttatggtttccacggcacgtcgcaccgctatgtttcccagcgcgcacattcgctgctgaatctggcggaagatgactccggcctggttgtggcgcatcttggcaatggcgcgtcaatctgcgcagttcgcaacggtcagagtgttgacacctcaatgggaatgacgccgctggaaggcttgatgatgggtacccgcagtggcgatgtcgactttggtgcgatgtcctgggtcgccagccaaaccaaccagagcctgggtgacctggaacgcgtagtgaataaagagtcgggattattaggtatttccggtctttcttcggatttacgtgttctggaaaaagcctggcatgaaggtcacgaacgcgcgcaactggcaattaaaacctttgttcaccgaattgcccgtcatattgccggacatgcagcttcattacgtcggctggatggaattatattcaccggcggaataggagagaattcaagtttaattcgtcgtctggtcatggaacatttggctgtattaggcgtagagattgatacagaaatgaataatcgatctaactcttttggcgagcgaattgtttccagtgaaaatgcgcatgtcatttgcgtcgttattccgactaacgaagaaaaaatgattgctttggatgccattcatttaggtaaagttaacgcgcccgcagaatttgcataa

SEQ ID NO: 471955 - DNA, 2190 bp, Shigella flexneri
atgaaggtagatattgataccagcgataagctgtacgctgacgcatggcttggctttaaaggtacggactggaaaagcgaaattaatgtccgcgattttattcaacataactatacaccgtatgaaggcgatgaatcttttctcgccgaagcgacgcctgccaccacggaattgtgggaaaaggtaatggaaggcatccgtatcgaaaacgcaacccacgcgccggttgatttcgataccaatattgccaccacaattaccgctcatgatgcgggatatattaaccagccgctggaaaaaattgttggcctgcaaacggatgcgccgttgaaacgtgcgctacacccgttcggtggcattaatatgattaaaagttcattccacgcctatggccgtgaaatggacagtgaatttgaatatctgtttaccgatctgcgtaaaacccataaccagggcgtatttgatgtttactcaccggatatgctgcgctgccgtaaatctggcgtgctgaccggtttaccagatggctatggtcgtgggcgcattatcggtgactatcgccgcgtagcgctgtatggcatcagttatctggtgcgtgaacgcgaactgcaatttgccgatctccagtctcgtctggaaaaaggcgaggatctggaagccaccatccgtctgtgtgaggagctggcagagcatcgtcatgcgctgttgcagattcaggaaatggcggcgaaatatggctttgatatctctcgcccggcgcagaatgcacaggaagcggtgcagtggctctacttcgcttatctggcggcagtgaaatcgcaaaatggcggcgcgatgtcgctggggcgcacggcatcgttcctggatatctacattgagcgcgactttaaagctggcgtcctcaatgagcagcaggcacaggaactgatcgatcacttcatcatgaagatccgtatggtacgcttcctgcgtacaccggaatttgattcgctgttctccggcgacccaatctgggcgacggaagtgatcggcgggatggggctggacggtcgtacgctggtgaccaaaaactccttccgctatttgcacaccctgcacactatggggccggcaccggaacctaacctgaccattctttggtcggaagaattaccgattgcctgctgcgtcagcccaatggtgattggtaagcaaatgcagttctttggtgcacgcgctaacctggcgaaaacgctgctctacgcaattaacggcggggtggacgagaagctgaagattcaggtcgggccgaaaacagcaccgctgatggacgacgtgctggattacgacaaagtgatggacagcctcgatcacttcatggactggctggcggtgcagtacatcagcgcgctgaatatcattcactacatgcacgacaagtacagctacgaagcttcgctgatggcgctgcacgatcgtgatgtctatcgcactatggcatgcggcatcgcgggcctgtcggtggcgacggactccctgtctgccatcaaatatgcccgcgtgaaaccaatccgtgacgaaaacggcctggcggtggactttgaaatcgacggtgaatatccgcagtacggcaacaacgacgagcgcgtagacagcattgcctgcgacctggttgaacgctttatgaagaaaattaaagcgctgccaacctatcgcaacgccgtccctacccagtcgattctgactatcacttctaacgtggtgtacggccagaaaaccggtaatacgccggacggtcgtcgcgccggaacaccgttcgcgccgggcgctaacccgatgcatggtcgtgaccgcaaaggtgccgtggcctcattgacgtcggtggcgaaactgccgttcacctacgccaaagatgggatctcgtacaccttctcaatcgttcctgcggcgctgggcaaagaagatccagtacgtaaaaccaaccttgttggcctgctggatgggtatttccaccacgaagcggatgtcgaaggcggtcaacacctcaacgtcaacgtaatgaatcgggaaatgctgctggatgccatcgagcacccggaaaaatatcctaacctgacaatccgtgtctctggctacgccgtgcgcttcaacgcactgacccgtgaacagcaacaggatgttatttcacgtacttttacccaggcgctctga

SEQ ID NO: 471956 - DNA, 390 bp, Shigella flexneri; identical to SEQ ID NO: 460397

SEQ ID NO: 471957 - DNA, 984 bp, Shigella flexneri
atgattagtgcattcgatattttcaaaattgggattggtccctccagttcgcataccgtggggccaatgaatgccggaaaaagttttattgatcggctggaaagtagcggcttattaaccgcgatgagccatattgtggtcgatctgtacgggtcgttgtcactgacgggcaaaggccatgccacggatgtcgccattatcatgggactggcaggaaacagtccgcaggatgttgtcattgatgagatccctgcatttatagagttagtaacgcgcagcgggcggctgccagtggcatctggtgcgcatattgttgattttcctgtagcaaagaacattatcttccatcccgaaatgttgcctcgccatgagaacggaatgcggatcactgcctggaagggacaggaagcgctattaagtaaaacctattactctgtcggcggcgggtttattgtcgaagaagaacacttcggcctgtcgcacgatgtcgaaacgtccgtaccttacgatttccactcagcaggtgaactgctgaaaatgtgtgattacaacggcctgtctatatctggcctgatgatgcacaacgagctggcgctgcgcagcaaagcggaaattgacgcagggtttgcccgtatctggcaagtgatgcatgacggtattgaacgcgggatgaacactgaaggcgtgctgcctggtccgctcaatgtgccgtgtcgtgccgtagcgctgcgtcgtcagctggtttctagcgataacatctctaacgatccgatgaatgtcatcgactggatcaacatgtacgcgctggcggttagtgaagaaaacgcagctggcgggcgcgtggtaacggcaccgactaacggtgcgtgcggcattattccggcagtgctggcttattacgataagttccgtcgtccggtaaacgagcggtcaattgcccgctattttctggcagcgggggctattggccgctgtataaaatga

SEQ ID NO: 471958 - DNA, 384 bp, Shigella flexneri
atgaacgcctccatctctggcgcggaggtcggctgtcagggggagattggcgtggcctgttcaatggcagcggcagggttaactgaactactgggcggcagtccggcgcaggtatgcaatgcggcggaaatcgcgatggagcataaccttgggctgacctgcgatccggttgccggacaggtacaaatcccgtgcattgaacgtaatgccattaatgccgtgaaagcagtaaacgccgcgcggatggcgatgcgccgcacctcggcaccgcgtgtttcactcgataaagtgatcgagacgatgtatgaaaccggcaaagatatgaacgataaataccgcgaaacatcacgcggaggactggccattaaagtggtctgcggctga

SEQ ID NO: 471959 - DNA, 1332 bp, Shigella flexneri
atggaaattgcatcgaataaaggcgtcattgcagacgcttcgaccccggcgggtcgtgctggaatgagtgagagcgagtggcgagaagcgatcaaattcgacagtactgacaccggctgggtgattatgagtatcgggatggcgattggcgcggggattgtttttctcccggtgcaggtcggtttgatgggattgtgggtatttttgctctcatcggtgattggttacccggcaatgtatctgtttcagcggttgtttattaatacgctggcagaatcaccagaatgtaaagattacccgagtgtcattagcggttatttaggtaaaaactggggcatcctgttaggtgcgctctatttcgtaatgctggtgatttggatgttcgtctattccaccgccatcaccaacgatagtgcttcctatctgcataccttcggcgtgacggaagggttgctgtcagacagtcccttttatggtctggtactgatttgcattctggtggcgatctcttcacgcggcgagaaattgttattcaaaatttcgaccgacatggtgctgaccaagctgctggtagtcgctgcgctgggcgtgtcgatggtgggaatgtggcatctgtataacgtcggttcgctaccgccgctggggctgctggtgaaaaacgccattattacgctgccgtttaccctgacgtcgattctgtttatccagacgttaagcccgatggtgatctcttatcgctcgcgggaaaaatcaattgaagtggcgcggcataaagcattgcgggcaatgaatatcgcgtttggcattttgtttgtcaccgtctttttctacgccgtgtcgttcacgctggcgatgggacatgacgaagcggtaaaagcctacgagcagaatatttccgcgctggcgattgccgcacagtttattagcggtgacggcgcagcgtgggtgaaagtggtcagcgtcattctcaatatctttgctgtcatgactgcattctttggcgtctatttaggctttcgcgaagcaacgcaagggatcgtaatgaacatcctgcgtcgcaagatgcctgccgagaagattaacgaaaatcttgttcagcgcggcatcatgattttcgccattttgctggcctggagcgccatcgtactgaacgcaccggtgttgagcttcacctctatctgtagcccgattttcggcatggtagggtgcctgatcccggcgtggctggtttacaaagtaccggcattgcacaaatacaaagggatgtctctgtacctgattatcgtcactggtttgttgctttgtgtttctctgttcctggcattttcttga

SEQ ID NO: 471960 - DNA, 1137 bp, Shigella flexneri
atgtttgattcgactttaaatccgttatggcagcgttacatcctcgccgttcaggaggaagtaaaaccggcgctgggatgtactgaaccgatttcactggcgctggcggcggcggttgctgcggcagaactggaaggtccggttgaacgtgtagaagcctgggtttcgccaaatctgatgaagaacggtctgggcgtcaccgttcccggcacgggaatggtggggctgccgattgcggcggcgctgggggcgttaggtggaaatgccaacgccgggctggaagtgctgaaagacgcaactgcgcaggcaattgccgatgccaaagcactgctggcggcggggaaagtctctgttaagatccaggaaccttgcaatgaaatcctcttctcacgcgccaaagtctggaacggtgagaagtgggcgtgtgtcaccatcgtcggcgggcataccaacattgtgcatattgagacgcacaatggtgtggtgtttacccaccaggcgtgtgtggcagagggcgagcaagagtcgccgctgacggtgctttccagaacgacgctggctgagatcctgaagttcgtcaatgaagtcccatttgcggcgatccgctttattctcgattccgcgaagctaaattgtgcgttatcgcaggaaggtttgagcggtaagtgggggctgcatattggcgcgacgctggaaaaacagtgcgagcgcggtttgctggcgaaagatctctcttcatccattgtgattcgtaccagcgcggcatccgatgcgcgtatgggcggcgctacgcttccggctatgagtaactccggctcgggtaaccaggggatcactgcaataatgcctgtggtggttgtagcagaacacttcggagcggatgatgaacgactggcgcgtgcgctgatgctttctcatttgagcgcaatttacatccataaccagttaccgcgtttgtctgcactttgtgccgcaacgaccgcagcaatgggggccgccgccgggatggcatggctggtggatgggcgttatgaaactatctcgatggcgatcagcagtatgatcggcgatgtcagcggcatgatttgcgatggtgcgtcgaacagctgcgcgatgaaggtttcgaccagtgcttag

SEQ ID NO: 471961 - DNA, 153 bp, Shigella flexneri
atggcgctggatgataccgccgtgaccggcaatgaagggatcgtggcgcatgatgttgagcagtcgattgccaacctgtgtgcgttagcaagccattcgatgcagcaaacggatcggcagattatcgagattatggcgagcaaggccagataa

SEQ ID NO: 471962 - DNA, 165 bp, Shigella flexneri
atgagtaaaaaatcgaccaaaaagcgccagccagcgaagcccgtggtggcgaaagaacctgctcgcaccgccaaaaattttggctatgaagagatgttgagcgagctggaagctatcgtcgcggatgctgaaacgcgtttagccgaggatgaagctaccgcgtaa

SEQ ID NO: 471963 - DNA, 702 bp, Shigella flexneri
atgattactacccgaactgccaggcagtgtggacaagcagactacggatggttgcaggcccggtatactttttcctttggacactacttcgacccgaaattgttaggctatgcctccctgcgtgtgcttaaccaggaagtgctggccccaggtgccgcctttcagccgcgaacctatcccaaagtcgatattttaaatgtgattctggatggagaagcagagtatcgcgacagcgaaggcaatcatgttcaggccagcgccggagaggcgttgctgctctctacccagccgggtgtcagctatagcgaacacaatctcagcaaagacaaaccgttaacgcgaatgcagctttggctggatacctgcccgcagcgagagaatccgctgattcaaaagctggcgcttaatatggacaagcagcaattaatcgcctcgccagagggtgcgatgggaagcctgcaattacgccaacaagtgtggctgcaccatatcgtgctcgacaaaggcgaaagtgcgaatttccagttgcatgggccacgcgcgtatttgcaatcgattcacgggaaatttcatgcgcttacgcatcatgaagagaaagcggcgctaacctgcggtgatggggcgtttattcgtgacgaggctaacattacgctggttgccgattccccactgcgcgctttgctgatagatttgcctgtctag

SEQ ID NO: 471964 - DNA, 897 bp, Shigella flexneri
atggccaaagaaagggcattaacgctggaagcactacgggttatggatgcgatcgatcgccggggcagttttgcggcggcagcggatgagctgggacgcgtgccttccgcacttagctacaccatgcaaaaactggaagaagagctggatgtggtgctgtttgaccgctcgggccatcgcaccaaattcaccaatgtcgggaggatgttgctggagcgagggcgcgttttgctggaagccgcagataaactgactactgatgcggaagctctcgcgcgcggttgggaaacgcatctcaccattgtgaccgaagcgctggtaccgacacctgcctttttcccgttaatcgacaaactggcggcaaaagccaatacccaactggcaatcatcacagaagtgctggcgggggcgtgggaacggctggagcaggggcgggcggatatcgttatcgcgccggatatgcattttcgttcctcgtcggagatcaactcgcgcaagctctatacgttaatgaacgtctacgttgccgcgcctgatcacccgattcatcaggagccggaaccgttatctgaagtgacgcgtgtgaaatatcgtggaattgcggtagcggataccgctcgtgagcgcccggtgttgaccgtacagctgctggacaaacagccgcgcttaacggtgagcacgattgaagataaacgtcaggcattactggcggggcttggcgtggcgacgatgccgtatccgatggtcgaaaaagatattgcggaagggcggttgcgtgtcgtcagcccggaatcgaccagcgagatcgatattattatggcctggcgtcgtgacagtatgggggaagcgaaatcctggtgtctgcgggaaattccaaagttgttcgctggaaaataa

SEQ ID NO: 471965 - DNA, 369 bp, Shigella flexneri
atggactggtatctgaaagtactaaaaaattatgtcggtttccggggtcgtgcgcggcgcaaagagtactggatgtttattctggtcaacatcatctttacgttcgtgctggggctgctggataaaatgttaggctggcaacgcgctggtggcgaaggcatcctgacgataatctacggtattctggtgtttttaccgtggtgggcggttcagttccgccgcctgcacgacaccgaccgctcggcgtggtgggcactgctattcttaatcccgtttatcggctggcttattatcattgtctttaactgccaggcgggtacgccaggcgaaaaccgctttggaccagatccaaaactggaacaagaataa

SEQ ID NO: 471966 - DNA, 987 bp, Shigella flexneri
atgggtcaactgattgacggcgtctggcatgacacctggtacgataccaaatctaccggcggtaaatttcaacgttcagcttccgcatttcgtaactggctcactgccgatggcgcacctggccccactggcacaggcggttttatcgcagagaaagatcgttatcatctctatgtttcactcgcctgcccgtgggcgcaccgcacgctgatcatgcgcaaactcaaaggactggaaccgtttatttccgtttccgtagtgaacccgctgatgctggaaaacggctggacctttgatgacagttttccgggagcaaccggagatacgctctatcaacatgaatttctgtatcagctttatctccacgccgatccacactacagcggacgagttactgttcccgtgctgtgggacaaaaagaaccacaccatcgtcagcaacgaatcagcagaaatcatccgcatgttcaataccgcgtttgatgcgctgggcgcaaaagcgggtgattactacccaccagccctgcaaacgaaaattgacgaacttaacggctggatttatgacaccgttaacaacggcgtgtataaagctggttttgccaccagccagcaagcctacgacgaggcggtggcgaaagtgtttgaatcgctggcgcgactggagcagattttaggccagcatcgttacctgaccggcaaccagctaaccgaagccgatattcgcctgtggactacgctggtgcgttttgatccagtgtatgtgacccacttcaagtgtgataagcaccgcatcagcgattacctgaatctgtatggcttcctgcgcgatatctaccagatgccggggatcgccgaaactgtcaatttcgatcacatccgtaatcattacttccgcagccataagaccatcaaccctacggggattatttcaattggtccgtggcaggatctcgatgaaccgcatggacgagatgttcgcttcggttaa

SEQ ID NO: 471967 - DNA, 387 bp, Shigella flexneri
atgattctctccatcgacagcaacgacgctaatagcgcgcccttgcacaaaaaaacaatcagcagcctgagtggcgcagtggagagtatgatgaaaaaattagaagatgttggtgtactggtagcgcacattttaatgccgattctgtttattaccgcaggctggggaaaaatcaccgcttactctggtacccaacaatatatggaagcaatgggtgtcccgggttttatgctgctgacggcatttttatttcacagcaactttgctgaaggcgtcaactcgctgatgttcatgaaaaacctgacaatttctggcggattcctgctgctggcaattaccggtccgggcgcgtatagcatcgaccgcctgctgaataaaaagtggtaa

SEQ ID NO: 471968 - DNA, 300 bp, Shigella flexneri; identical to SEQ ID NO: 460926

SEQ ID NO: 471969 - DNA, 405 bp, Shigella flexneri
atggcggacactcatcacgcgcaagggcccggtaaaagcgttctgggcatcgggcagcgaattgtttccatcatggttgaaatggtggaaacacgtctgcggctggcggtggtggagctggaagaggaaaaagctaatctctttcaacttttactgatgctgggcctgacgatgcttttcgctgcatttggtcttatgagcctgatggtgctaattatttgggcggttgatccgcaatatcgcctgaatgcgatgattgccaccaccgtggtgttgctgctactggcactgattggcggtatctggacgttacgtaaatcgcgtaaatccaccttgctgcgccatacacgccatgagctggcaaacgatcggcaactgctcgaggaggagtcccgtgagcagtaa

SEQ ID NO: 471970 - DNA, 306 bp, Shigella flexneri; identical to SEQ ID NO: 460924

SEQ ID NO: 471971 - DNA, 435 bp, Shigella flexneri
atgaaataccgcatcgctttagctgtttctctctttgctcttagtgccggtagttatgccactaccctgtgtcaggaaaaggagcaaaatatccttaaggagatcagctatgccgaaaaacaccaaaaccagaatcgtattgacggtctgaataaagccctgagtgaagtccgggccaactgttcagatagccagctgcgtgccgatcatcacaagaaaatcgcaaagcagaaagatgaggtggcggaacgccagcaagatttagccgaggcgaagcaaaaaggcgatgccgatagaacggaaactggcagaagcgcaggaagagctgaaaaagctggaagcgcgcgactactaactcacaatagtcactacttactcacctggagaaaactatgtcgaaagaacacactacggaacatctgcgtgctgagttga

SEQ ID NO: 471972 - DNA, 384 bp, Shigella flexneri; identical to SEQ ID NO: 460922

SEQ ID NO: 471973 - DNA, 663 bp, Shigella flexneri
atggaacttttgacccaattgctgcaagccctgtgggcgcaggattttgaaaccctggccaatccatcgatgattggcatgttgtattttgtcttgtttgtaattttgttccttgaaaatggcttgcttccggcggcctttttaccgggcgacagtttactggtattggtcggcgtgttgattgcgaaaggcgcgatgggttacccgcaaacgattctgctgctgaccgttgccgccagcctcggttgctgggtcagctatattcaggggcgatggctgggcaatacccgcaccgtacaaaactggctatctcatttacccgcgcattatcatcaacgcgcacaccatctttttcataaacacggtttatcggcgctgttaattggtcgctttattgcatttgtcagaacactgctgccgacgattgccgggttatcagggctgaataacgcgcgctttcagttcttcaactggatgagcggtctgctgtgggtattgatcctgacaactctgggttacatgctcggcaaaacgccggtatttttaaagtacgaggaccagctgatgtcatgcctgatgctgctcccggtggtgctgctggtgtttggcctggcaggttctctggtcgtgttatggaaaaagaaatatggaaatcgggggtaa

SEQ ID NO: 471974 - DNA, 777 bp, Shigella flexneri
atggaaatcactgaaccacgccgtttgtatcaacaacttgctgctgacctgaaagagcgcattgaacagggcgtctatctggtgggtgataaactgcctgccgaacgctttattgccgatgaaaagaacgtcagccgaacggtagttcgtgaagccatcatcatgctggaagttgaaggctatgtggaggtgcgtaaaggttcaggtattcatgtggtttccaaccagccgcgtcatcagcaggcggctgacaataatatggaattcgccaattacggtccgtttgagttgcttcaggctcgccagctcatcgaaagtaatattgccgagttcgcggcaactcaggtaacgaaacaagacatcatgaaactgatggccattcaggaacaggcgcgcggcgaacaatgcttccgtgattccgagtgggatttacagttccacattcaggtagccctggcgacgcagaactccgccctggcggccatcgttgaaaaaatgtggacccagcgtagccataacccgtactggaaaaaactacacgaacacattgattcccgtaccgttgataactggtgtgatgaccacgatcaaattctcaaggcgttaattcgcaaagatcctcatgctgctaagctggcaatgtggcagcatctggaaaacaccaaaatcatgttatttaacgaaaccagcgacgatttcgagttcaatgccgaccgctatctgttcgccgaaaacccggtagtgcatctcgatacggccaccagcggcagcaaatga

SEQ ID NO: 471975 - DNA, 339 bp, Shigella flexneri
atggcgcatcggctactcattggtaaaggaatgatcaccttgaatctcaaacggatttttctcaccctcaccttacttcccttgtttgctgttgccgctgatgattgcgcactctcagatccgacgctgaccgtacaggcgtataccgttaatcctcaaacagagcgggtgaaaatgtactggcaaaaagccaatggcgaagcgtggggaacgttacatgctctgctggcggatattaatagtcagggtcaggtgcagatggcgatgaacggcggcatctatgatgaaagctatgcgccgctcggtttgtacatcgaaaacggtcagcagaaggtgtaa

SEQ ID NO: 471976 - DNA, 951 bp, Shigella flexneri
atgctgagcgcatttcaactggaaaataaccgactgacccggctggaagtcgaagagtcacaaccccttgtaaatgcagtatggattgatcttgtcgaaccggacgacgacgagcgactgcgcgtacaatctgaacttggccagagcctggcaacccgcccggaactggaagacatcgaagcatcggcacgtttctttgaagacgacgacggcctgcatattcactccttcttcttctttgaagatgcggaagatcacgccggtaactccactgtggcatttaccatccgtgatggtcgtctgtttactctgcgtgagcgtgaactgcccgcttttcgtctgtatcgtatgcgtgcccgtagccagtcgatggtagacggtaacgcctacgagttgctgctggatctgttcgaaaccaaaatcgaacagttggcagatgaaattgaaaatatctatagcgacctggagcagttgagccgggtgattatggaagggcatcagggcgatgagtacgacgaggcgctctccacgctggcggaactggaagatatcggctggaaagttcgcctgtgtctgatggatacccagcgcgctctcaacttcctggtgcgtaaagcgcgtttaccgggtgggcaactggagcaggcgcgtgaaatcctgcgcgatatcgaatccctgctgccgcataacgaatccctgttccagaaggtgaacttcctgatgcaggcggcaatgggttttatcaacatcgagcagaaccgcatcatcaaaattttctcggtggtatccgtcgtgttcctgccgccaacgctggttgcttccagctacgggatgaactttgagtttatgccagaactgaagtggagtttcggctaccctggcgcgattatctttatgatcctcgcgggcctggcaccgtatctgtactttaagcggaagaactggttgtaa

SEQ ID NO: 471977 - DNA, 381 bp, Shigella flexneri
atgagtaaggaatatatgaacgatgattcattaagtgaaaaatggaaataccgatttaatttttatgatcaacatggctttcctggattctggggagcaacaccagaatataaagcagcatttaaagcattaaaagtaagacaacgattaactattcaaatgaatttcattgctttcttctgttcctggatctatttatttgttctgggcttatggaaaaaagcaattatagttctattacttggcattctatctctatttgttggtgcattaattggcgttaacattctgggaattgccgtagcagcctatgttgctgttaacacgaacaaatggttttatgagaaagaggtaaaagggttaaatacctggagcctttga

SEQ ID NO: 471978 - DNA, 381 bp, Shigella flexneri
atgttacgtatgtttatcccaacatctaacggtaagatttccagacaccgatatatatttttatttattttaataaatttcatttttgcctttcttattatcttttttaacgatggggaagcaggttttcttgttatagtctctaccatcgcactccattatctcgtcatcaacatgaattgccaacgactccgtgatagtggtttcatatatataaaaatttatgtttttggtacattagcagtatatatcatctctatcatcacaatgatagccgaagattttacctgttcaggcaatggttcgatgatttttttgatttgttatttttccactttcagtatgctaatgcttgcacctactgattcatcaaaacaatag

SEQ ID NO: 471979 - DNA, 891 bp, Shigella flexneri
atggatgcaaaacaaacgcggcagggcgtattactcgctcttgccgcttattttatttggggtattgcgccagcatacttcaagctgatttactacgtgcccgccgatgagatcctgacgcatcgcgtgatctggtcgtttttctttatggtggtgctgatgagcatttgccgccagtggtcctatttaaaaacgctgattcagacgccacagaaaatttttatgctggcagtctctgccgtactgattggtggcaactggctactgtttatctgggcggtgaacaatcaccatatgctggaagcgagccttggttactttattaacccgctggtgaacattgtgctggggatgattttcctcggcgagcgattccgccggatgcaatggctggcggtgattctggcgatatgtggcgtgttggtccagctgtggacttttggttcgctacctattatcgcgctggggctggcatttagttttgccttctacggcctggtgcgcaagaagattgcggtagaagcacaaaccggcatgttaattgaaaccatgtggctgctgcccgtggcggcgatttacctgtttgctattgccgacagttcaaccagccatatggggcaaaacccgatgtcgctgaatttactgctgatcgccgccggtattgtcactaccgtaccgctgttgtgttttactgccgctgccacgcgcctgcgtctctcaacgttaggcttttttcagtacattggcccgacgctgatgttcctgctggctgtgacgttttatggtgaaaaaccgggtgccgataagatggtgactttcacctttatttgggtggcgctggcaatttttgtgatggacgcgatttatacgcagcgtagaacgtccaaataa

SEQ ID NO: 471980 - DNA, 468 bp, Shigella flexneri
atgtctgccgtactgaccgctgaacaagccctgaaattagtgggtgagatgtttgtttatcacatgccatttaaccgcgcattggggatggaactggagcgttacgaaaaagagttcgcacagctggcctttaaaaatcagccgatgatggtgggtaactgggcgcaaagcattttgcacggaggagtcattgcgtcggcgctggatgtcgccgccggtctggtgtgcgtgggaagtaccttaacccgccacgaaaccatcagtgaagatgaactacgccagcggctatcgcggatggggaccattgatcttcgcgttgattatctgcgcccaggcaggggcgagcgttttactgctaccagtagcctgttgcgtgcaggcaataaagtcgccgtcgcccgcgttgaattacacaatgaagaacagctttatattgccagtgccaccgccacctatatggtaggttga

SEQ ID NO: 471981 - DNA, 870 bp, Shigella flexneri
atgcggactctgcagggctggttgttgccggtgtttatgttgcctatggcagtatatgcacaagaggcaacggtgaaagaggtgcatgacgcgtcagcggtgcgtggcagtattatcgccaatatgctgcaggagcatgacaatccgttcacgctctatccttatgacaccaactacctcatctacacccaaaccagcgatctgaataaagaagcgattgccagttacgactgggcggaaaatgcgcgtaaggatgaagtaaagtttcagttgagcctggcatttccgctgtggcgtgggattttaggcccaaactcggtgttgggtgcgtcttatacgcaaaaatcctggtggcaactgtccaatagcgaagagtcttcaccgtttcgtgaaaccaactacgaaccgcaattgttcctcggttttgccaccgattaccgttttgcaggttggacgctgcgcgatgtggagatggggtataaccacgactctaacgggcgttcagacccgacctcccgcagctggaaccgcctttatactcgcctgatggcagaaaacggtaactggctggtagaagtgaagccgtggtatgtggtgggtaatactgacgataacccggatatcaccaaatatatgggttactaccagcttaaaatcggctatcacctcggtgatgcggtgctcagtgcgaaaggacagtacaactggaacaccggctacggcggcgcggagttaggcttaagttacccgatcaccaaacatgtgcgcctttatactcaggtttacagcggctatggcgaatcgctcatcgactataacttcaaccagacccgtgtcggtgtaggggttatgctaaacgacttgttttga

SEQ ID NO: 471982 - DNA, 1836 bp, Shigella flexneri
gtgaatgtggcgcaggcggaagtgttgaatctggagtccggagctaaacaggttttacaagaaacctttggctaccaacagtttcgccccggccaggaagaaattatcgacactgtgctttccggtcgcgattgcctggttgttatgcccactggtggcggaaaatccctttgctatcaaattcctgccttattgctaaacggccttaccgtggttgtttcaccgctgatttcgttgatgaaagatcaggtggatcaactacaggccaacggcgtggcggcggcgtgccttaactcgacgcaaacccgcgaacagcaacttgaagtgatgacaggctgccgcaccgggcaaattcgcttactgtatatcgccccggaacgcctgatgctggataactttcttgagcatctggcgcactggaatccggtgttattagccgtcgatgaagcgcactgtatctcccaatggggccacgatttccgcccggaatatgccgcgctcggtcagttgcgccagcggttcccgacgctgccgtttatggcgctgaccgccacagccgacgacaccacgcgccaggatatcgtgcgcctgctggggctgaacgatccgctgattcaaatcagcagttttgaccgtccgaatattcgctacatgctgatggagaaattcaaaccgctcgatcagttgatgcgctacgtgcaggaacagcgcggtaagtctggcattatctactgcaacagccgggcgaaagtagaagacaccgctgcgcgcctgcaaagcaggggtattagcgcggcggcctatcatgccgggctggaaaataatgtccgcgccgacgtgcaggagaaattccagcgcgatgatctgcaaattgtggtggcgacggtggcgttcggcatgggcatcaataaaccaaacgttcgcttcgtggtccactttgatattccgcgcaatatcgaatcctattatcaggaaaccggtcgcgccgggcgtgatggcctgcctgcggaagcgatgctgttttacgatccggctgatatggcgtggctgcgccgttgtctggaagagaagccgcaggggcagttgcaggatatcgagcgccacaaactcaatgcgatgggcgcgtttgccgaagcgcaaacttgccgtcgtctggtattgctgaactattttggcgaagggcgtcaggagccgtgcgggaactgcgatatctgcctcgatccgccgaaacagtacgacggttcaaccgatgctcagattgccctttccaccattggtcgtgtgaatcagcggtttgggatgggttatgtggtggaagtgattcgtggtgctaataaccagcgtatccgcgactatggtcatgacaaactgaaagtctatggtatgggccgtgataaaagccatgaacattgggtgagcgtgatccgccagctgattcatctcggcctggtgacgcaaaatattgcccagcattctgccctacaactgacagaggccgcgcgcccggtgctgcgcggcgaatcctctttgcaacttgccgtgccgcgtatcgtggcgctcaaaccgaaagcgatgcagaaatcgttcggcggcaactatgatcgcaaactgttcgccaaattacgcaaactgcgtaaatcgattgccgatgaaagtaatgtcccgccgtacgtggtgtttaacgacgcaaccttgattgagatggctgaacagatgccgatcaccgccagcgaaatgctcagcgttaacggcgttgggatgcgcaagctggaacgctttggtaaaccgtttatggcgctgattcgtgcgcatgtcgatggcgacgacgaagagtag

SEQ ID NO: 471983 - DNA, 621 bp, Shigella flexneri
atgttgatgttatttctcaccgtcgccatggtgcacattgtggcgcttatgagccccggtcccgatttcttttttgtctctcagaccgctgtcagtcgttcccgtaaagaagcgatgatgggcgtgctgggcattacctgcggcgtaatggtttgggctgggattgcgttgcttggcctgcatttgattatcgaaaaaatggcctggctgcatacgctgattatggtaggcggtggcctgtatctctgctggatgggttaccagatgctacgcggtgcactgaaaaaagaggctgtatctgcgcctgcaccacaggttgagctggcgaaaagcgggcgcagtttcctgaaaggcttactgaccaatctcgccaatccgaaagcgattatctattttggttcggtattctcattgtttgtcggcgataacgttggcactaccgagcgctggggcattttcgcgttgattattgtcgaaacactggcgtggtttaccgtcgttgccagtctgtttgccctgccgcaaatgcgccgtggttatcaacgtctggcgaagtggattgatggttttgccggggcgttatttgccggatttggcattcatttgattatttcgcggtga

SEQ ID NO: 471984 - DNA, 621 bp, Shigella flexneri
atgaccttagaatggtggtttgcctacctgctgacatcgatcattttaagcctgtcgccaggctctggtgcaatcaacactatgaccacctcgctcaaccacggttatcgcggcgcggtggcgtctattgctgggcttcagaccggactggcgattcatattgtgctggttggcgtggggttggggacgctattttcccgctcagtgattgcgtttgaagtgttaaagtgggcaggcgcggcttacttgatttggctgggaatccagcagtggcgcgccgctggcgcaattgatcttaaatcgctggcctctactcaatcgcgtcgacatttgttccagcgcgcagtttttgtgaatctcaccaatcccaaaagtattgtgtttctggcggcgctatttccgcaattcatcatgccgcaacagccgcaactgatgcagtatatcgtgctcggcgtcaccactattgtggtcgatattattgtgatgatcggttacgccacccttgctcaaaggattgctctatggattaaaggaccaaagcagatgaaggcgctgaataagattttcggctcgttgtttatgctggtgggagcgctgttagcatcggcgaggcatgcgtga

SEQ ID NO: 471985 - DNA, 1023 bp, Shigella flexneri
atgtttcagcagcaaaaagactgggaaacaagagaaaacgcgtttgctgcttttaccatgggaccgctgactgatttctggcgtcagcgtgatgaagcagagtttactggtgtggatgacattccggtgcgctttgtccgttttcgcgcacagcaccatgaccgggtggtagtcatctgcccggggcgtattgagagctacgtaaaatatgcggaactggcctacgacctgttccatttggggtttgatgtcttaatcatcgaccatcgcgggcagggacgttccggtcgcctgttagccgatccgcatctcgggcatgttaatcgctttaatgattatgttgatgatctggcggcattctggcagcaggaggttcagcccggtccgtggcgtaaacgctatatactggcacattcgatgggcggtgcgatctccacattatttctgcaacgccatccaggtgtatgtgacgccattgcgctaactgcgccaatgtttgggatcgtgattcgtatgccgtcatttatggcacggcagatcctcaactgggccgaagcgcatccacgtttccgtgatggctatgcaataggcaccgggcgctggcgcgcgttgccgtttgctatcaacgtactgacccacagcagacagcgatatcgacgtaacttacgcttctatgctgatgacccaacgattcgcgtcggtgggccgacctaccattgggtacgcgaaagtattctggctggcgaacaggtgttagccggtgcgggtgatgacgccacgcaaacgcttctcttacaagctgaagaggaacgcgtggtggataaccgcatgcacgaccgtttttgtgaactccgcaccgccgcgggccatcctgtcgaaggaggacggccgttggtaataaaaggtgcttaccatgagatcctttttgaaaaggacgcaatgcgctcagtcgcgctccacgccatcgttgattttttcaacaggcataactcacccagcggaaaccgctctacagaggtttaa

SEQ ID NO: 471986 - DNA, 801 bp, Shigella flexneri
atgtaccaggttgttgcgtctgatttagatggcacgttactttctcccgaccatacgttatccccttacgccaaagaaactctgaagctgctcaccgcgcgcggcatcaactttgtgtttgcgaccggtcgtcaccacgttgatgtggggcaaattcgcgataatctggagattaagtcttacatgattacctccaatggtgcgcgcgttcacgatctggatggcaatctgatttttgctcataacctggatcgcgacattgccagcgatctgtttggcgtagtcaacgacaatccggacatcattactaacgtttatcgcgacgacgaatggtttatgaatcgccatcgcccggaagagatgcgcttttttaaagaagcggtgttcaaatatgcgctgtatgagccgggattactggagccggaaggcgtcagcaaagtgtttttcacctgcgattcccatgaacaactgctgccgctggagcaggcgattaacgctcgctggggcgatcgcgtcaacgtcagtttctctaccttaacctgtctggaagtgatggcgggcggcgtgtcgaaaggccatgcgctggaagcagtggcgaagaaactgggctacagcctgaaggattgtattgcgtttggtgacgggatgaacgacgccgaaatgctgtcgatggcggggaaaggctgcattatgggcagtgcgcaccagcgtctgaaagatctgcatccggagctggaagttattggtactaatgccgacgacgcggtgccgcattatctgcgtaaactctatttatcgtaa

SEQ ID NO: 471987 - DNA, 900 bp, Shigella flexneri
gtggcgttacttatcatcaccacgattctgtgggccttctcctttagcttttatggcgagtaccttgcggggcacgtcgatagctattttgcggtgctggtgcgcgttggcttggcggcactcgtttttctgccgtttctgcgtacccgtagcaatagcctgaaaacggtcggcctgtatatgctggtgggcgcgatgcagctcggcgtgatgtatatgctgagtttccgcgcttatctctacctgacggtctccgaattgttgctgttcaccgtactgacgccgctctacatcacgctgatttatgacatcatgagtaagcgccgtctgcgctggggctatgcttttagcgccttgctggcggtgattggtgccgggattattcgctatgatcaggtcaccgaccatttctggactggcttgttgctggtgcaactctccaatatcacttttgccatcggcatggtgggttacaaacgcctgatggaaactcgcccgatgccgcagtataacgcctttgcgtggttctatcttggcgcgttcctggtggcggtaattgcatggttcttgctgggaaatgcgcagaaaatgccgcaaaccacgttgcaatggggcattctggtgtttcttggcgtggtggcttccgggattggctactttatgtggaactacggcgcgacgcaggtggacgccggaacgctgggcattatgaataatatgcacgttccggcagggctgctggtaaacctggctatctggcaccaacagccgcactggccaacgtttattacaggcgcgctggtgatcctggcctcactgtgggtgcatcgtaagtgggtcgctccgcgctcttcacaaacggcagatgatcgcaggcgtgattgcgcgctgagcgaataa

SEQ ID NO: 471988 - DNA, 954 bp, Shigella flexneri
atgatcgaagtaaaacacctgaaaacgctacaagcgttgcggaactgcggctcgctcgcagccgctgcggcaacgttgcatcagacgcaatccgccctgtctcaccagtttagcgatctggaacaacgccttggcttccggctatttgtgcgtaagagccagccgctacgctttacaccgcagggagaaatcctgttgcaactggcaaaccaggtgctgccgcaaatcagccaggcactgcaagcctgcaatgaaccgcagcagacgcgtctgcgcattgccattgagtgccatagctgtattcagtggctgacacccgctttagaaaatttccataagaactggccgcaggtagagatggattttaaatcgggcgtgacgtttgacccgcagcccgcgttgcaacagggcgagctggatctggtgatgacctccgatatcctgccgcgcagtggcctgcattattcgccgatgttcgattatgaagtacgcctggtgttagcacctgaccatccactggcggcaaaaacgcgtattacaccggaagatctcgccagcgagacgctattaatttatccggtgcagcgtagtcgactggatgtctggcggcattttcttcagccggcaggcgtcagcccgtcactgaaaagcgtcgataacaccttattgttgattcaaatggttgccgcgcggatgggtattgccgcgctaccgcattgggtagtagagagttttgagcgccagggtctggtggtgaccaaaaccctgggcgaaggcttgtggagccgactgtacgccgccgtgcgcgatggcgagcagcgtcagccagttacggaagcgtttattcgctcagcgcgcaatcacgcctgcgatcatctgccgtttgtgaagagcgcggagcgacccacttacgatgcacccacagtgaggccaggatcaccagcgcgcctgtaa

SEQ ID NO: 471989 - DNA, 2262 bp, Shigella flexneri
atgacaatattgaatcacaccctcggtttccctcgcgttggcctgcgtcgcgagctgaaaaaagcgcaagaaagttattgggcggggaactccacgcgtgaagaactgctgacagtagggcgtgaactgcgtgctcgtcactgggatcaacaaaagcaagcgggtatcgacctgctgccggtgggcgattttgcctggtacgatcatgtactgaccaccagtttgctgctgggtaatgttccgccacgtcatcagaacaaagacggttcggtagatatcgacaccctgttccgtattggtcgtggacgtgcgccgactggcgaacctgcggcggcagcggaaatgaccaaatggtttaacaccaactatcactacatggtgccggagttcgttaaaggccaacagttcaaactgacctggacgcagctgctggaggaagtggacgaggcgctggcgctgagccacaacgttaagcctgtgctgctggggccggttacttacctgtggctggggaaagtgaaaggtgaacagtttgaccgccttagcctgctgaacgacattctgccggtttatcagcaagtgctggcagaactggcgaaacgcggcatcgagtgggtacagattgatgaacccgcgctggtactggaactaccacaggcgtggctggacgcatacaaacccgcttacgacgcgctccagggacaggtgaaactgctgctgaccacctattttgaaggcgtaacgccaaatctcgacacgattactgcgctgcctgttcaggggctgcatgtggaccttgtacatggtaaagataacgttgttgaactgcacaagcgcctgccttctgactggctgctgtctgcgggtctgatcaatggtcgtaacgtctggcgcgccgatcttactgagaaatatgcgcaaattaaggacattgtcggcaaacgtgatttgtgggtggcatcttcctgctcgttgctgcacagccccatcgacctgagcgtggaaacgcgtcttgatgcagaagtgaaaagctggtttgccttcgccctacaaaaatgccatgaactggcactgctgcgcgatgcgctgaacagtggtgacacggcagctctggcagagtggagcgccccaattcaggcgcgtcgtcactctactcgtgtacataatccggcggtagaaaagcgtctggcggcgatcaccgcccaggacagccagcgtgcgaatgtctatgaagtgcgtgctgaagcccagcgtgcgcgttttaaactgccagcgtggccgaccaccacgattggttccttcccgcaaaccacggaaattcgtaccctgcgtctggatttcaaaaagggcaatctcgacgccaacaactaccgcacgggcattgcggaacatatcaagcaggccattgttgagcaggaacgtttgggactggatgtgctggtacatggcgaggccgagcgtaatgacatggtggaatactttggcgagcacctcgacggatttgtctttacgcaaaacggttgggtacagagctacggttcccgctgcgtgaagccaccgattgtcattggtgacattagccgcccggcaccgattaccgtggagtgggcgaagtatgcgcaatcgctgaccgacaaaccggtgaaagggatgctgacggggccggtgaccatactctgctggtcgttcccgcgtgaagatgtcagccgtgaaaccatcgccaaacagattgcgctggcgctgcgtgatgaagtggccgatctggaagccgctggaattggcatcatccagattgacgaaccggcgctgcgcgaaggtttaccgctgcgtcgtagcgactgggatgcgtatctccagtggggcgtagaggccttccgtatcaacgccgccgtggcgaaagatgacacacaaatccacactcacatgtgttattgcgagttcaacgacatcatggattcgattgcggcgctggacgcagacgtcatcaccatcgaaacctcgcgttccgacatggagttgctggagtcgtttgaagagtttgattatccaaatgaaatcggtcctggcgtctatgacattcactcgccaaacgtaccgagcgtggaatggattgaagccttgctgaagaaagcggcaaaacgcattccggcagagcgcctgtgggtcaacccggactgtggcctgaaaacgcgcggctggccagaaacccgcgcggcactggcgaacatggtgcaggcggcgcagaatttgcgtcgggggtaa

SEQ ID NO: 471990 - DNA, 816 bp, Shigella flexneri
atggcaacaacacaacaatctggatttgcacctgctgcatcgcctctcgcttcgaccatcgttcagaccccggacgacgcgattgtggcgggcttcacctctatcccttcacaaggggataacatgcctgcttaccatgccagaccaaagcaaagcgatggcccactgccagtggtcattgtagtgcaggaaatttttggcgtgcatgaacatatccgcgacatttgtcgccgtctggcgctggaggggtatctggctatcgcacctgaactttacttccgcgaaggcgatccgaatgattttgccgatatccccacgttgcttagcggtctggtagcaaaagtgcctgactcgcaggtgctggccgatctcgatcatgtcgccagttgggcttcccgcaacggcggcgatgttcatcgtttaatgatcaccggattctgctggggtggacgtatcacctggctgtatgccgcgcataatccacagctaaaagccgcagtggcgtggtacggcaaactgacgggcgacaagtcgctgaattcaccgaaacaacctgttgatatcgcaaccgatcttaacgcgccggttctcggcttatatggtggtcaggataacagcattccgcaggagagcgttgaaacgatgcgccaggcgctgcgggctgctaatgcgaaagcagagattatcgtgtacccggatgccgggcatgcattcaacgctgattatcgcccgagctatcatgccgaatctgcgaaagatggctggcagcgtatgctggaatggtttaagcagtatggtgggaagaagtcgctgtaa

SEQ ID NO: 471991 - DNA, 762 bp, Shigella flexneri
atgtccaagtctgatgtttttcatctcggcctcactaaaaacgatttacaaggggctacgcttgccatcgtccctggcgacccggatcgtgtggaaaagatcgccgcgctgatggataagccggttaagctggcatctcaccgcgaattcactacctggcgtgcagagctggatggtaaacctgttatcgtctgctctaccggtatcggcggcccgtctacctctattgctgttgaagagctggcacagctgggcattcgcaccttcctgcgtatcggtacaacgggcgctattcagccgcatattaatgtgggtgatgtcctggttaccacggcgtctgtccgtctggatggcgcgagcctgcacttcgcaccgctggaattcccggctgtcgctgatttcgaatgtacgactgcgctggttgaagctgcgaaatctattggcgcgacaactcacgttggcgtgacagtttcttctgataccttctacccaggtcaggaacgttacgatacttactctggtcgcgtagttcgtcactttaaaggttctatggaagagtggcaggcgatgggcgtaatgaactatgaaatggaatctgcaactctgctgaccatgtgtgcaagtcagggcctgcgtgccggtatggtagcgggtgttatcgttaaccgcacccagcaagagatcccgaatgctgagacgatgaaacaaaccgaaagccatgcggtgaaaatcgtggtggaagcggcgcgtcgtctgctgtaa

SEQ ID NO: 471992 - DNA, 1428 bp, Shigella flexneri
gtggatttctcaatcatggtttacgcagttattgcgttggtgggtgtggcaattggctggctgtttgccagttatcaacatgcgcagcaaaaagccgagcaattagctgaacgtgaagagatggtcgcggagttaagcgcggcaaaacaacaaattacccaaagcgagcactggcgtgcagagtgtgaattgctcaataacgaagtgcgcagcctgcaaagtattaacacctctctggaggccgatctgcgtgaagtaaccacgcggatggaagccgcacagcaacatgctgacgataaaattcgccagatgattaacagcgagcagcgcctcagtgagcagtttgaaaacctcgccaaccgtatttttgagcacagcaatcgccgggttgatgagcaaaaccgtcagagtctgaacagcctgttgtcgccgctacgtgaacaactggacggtttccgccgtcaggttcaggacagcttcggtaaagaagcacaagaacgccataccctgacccacgaaattcgcaatctccagcaactcaacgcgcaaatggcccaggaagcgatcaacctgacgcgcgcgctgaaaggcgacaataaaacccagggcaactggggcgaggtagtattgacgcgggtgctggaggcttccggtctgcgtgaagggtatgaatatgaaacccaggtcagcatcgaaaatgacgcccgctcgcggatgcagccggatgtcatcgtgcggctgccgcagggaaaagatgtggtgatcgacgccaaaatgacgctggtcgcctatgaacgctattttaacgccgaagacgactacacccgcgaaagcgcgctacaggaacatatcgcgtcggtgcgtaaccatatccgtttgctgggacgcaaagattatcaacagctgccggggctgcgaactctggattacgtgctgatgtttattcccgttgaacccgcttttttactggcgcttgaccgccagccggagctgatcaccgaagcgttgaaaaacaatatcatgctggttagcccgactacgctgctggtggcgttgcgtactattgccaacctgtggcgttatgagcatcaaagccgtaacgcccagcaaatcgccgatcgtgccagcaagctgtacgacaagatgcgtttgttcatcgatgacatgtccgcgattggtcaaagtctcgacaaagcgcaggataactaccgccaggcaatgaaaaaactctcttcaggtcgcggaaatgtgctggcgcaggcagaagcgtttcgcggtttaggagtagaaattaaacgcgagattaatccggatttggctgaacaggcggtgagccaggatgaagagtatcgacttcggtcggttccggagcagccgaatgatgaagcttatcaacgcgatgatgaatataatcagcagtcgcgctag

SEQ ID NO: 471993 - DNA, 756 bp, Shigella flexneri; identical to SEQ ID NO: 459126

SEQ ID NO: 471994 - DNA, 606 bp, Shigella flexneri; identical to SEQ ID NO: 459127

SEQ ID NO: 471995 - DNA, 1641 bp, Shigella flexneri
atgacgccaggtgaagtacggcgcctatatttcatcattcgcacttttttaagctacggacttgatgaactgatccccaaaatgcgtatcaccctgccgctacggctatggcgatactcattattctggatgccaaatcggcataaagacaaacttttaggtgagcgactacgactggccctgcaagaactggggccggtttggatcaagttcgggcaaatgttatcaacccgccgcgatctttttccaccgcatattgccgatcagctggcgttattgcaggacaaagttgctccgtttgatggcaagctggcgaagcagcagattgaagctgcaatgggcggcttgccggtagaagcgaggtttgacgattttgaaatcaagccgctggcttctgcttctatcgcccaggttcataccgcgcgattgaaatcgaatggtaaagaggtggtgattaaagtcatccgcccggatattttgccggtcattaaagcggatctgaaacttatctaccgtctggctcgctgggtgccgcgtttgctgccggatggtcgccgtctgcgcccaaccgaagtggtgcgcgagtacgaaaagaccttgattgatgaactgaatttgctgcgggaatctgccaacgccattcagcttcggcgcaattttgaagacagcccgatgctctacatcccggaagtttaccctgactattgtagtgaagggatgatggtgatggagcgcatttacggcattccggtgtctgatgttgcggcgctggagaaaaacggcactaacatgaaattgctggcggaacgcggcgtgcaggtgttcttcactcaggtctttcgcgacagctttttccatgccgatatgcaccctggcaacatcttcgtaagctatgaacacccggaaaacccgaaatatatcggcattgattgcgggattgttggctcgctaaacaaagaagataaacgctatctggcagaaaactttatcgccttctttaatcgcgactatcgcaaagtggcagagctacacgtcgattctggctgggtgccaccagataccaacgttgaagagttcgaatttgccattcgtacggtctgtgaacctatctttgagaaaccgctggccgaaatttcgtttggacatgtactgttaaatctgtttaatacggcgcgtcgcttcaatatggaagtgcagccgcaactggtgttactccagaaaaccctgctctatgtcgaaggggtaggacgccagctttatccgcagctcgatttatggaaaacagcgaagcctttcctggagtcgtggattaaagatcaggtcggtattcctgccctggtgagagcatttaaagaaaaagcgccgttctgggtcgaaaaaatgccagaactgcctgaactggtttacgacagtttgcgccagggcaagtatttacagcacagtgttgataagattgcccgcgagcttcagtcaaatcatgtacgtcagggacaatcgcgttattttctcggaattggcgctacgttagtattaagtggcacattcttgttggtcagccgacctgagtgggggctgatgcccggctggttaatggcaggtggtctgatcgcctggtttgtcggttggcgcaaaacacgctga

SEQ ID NO: 471996 - DNA, 270 bp, Shigella flexneri; identical to SEQ ID NO: 262597

SEQ ID NO: 471997 - DNA, 516 bp, Shigella flexneri
gtgtttgatatcggttttagcgaactgctattggtgttcatcatcggcctcgtcgttctggggccgcaacgactgcctgtggcggtaaaaacggtagcgggctggattcgcgcgttgcgttcactggcgacaacggtgcagaacgaactgacccaggagttaaaactccaggagtttcaggacagtctgaaaaaggttgaaaaggcgagcctcactaacctgacgcccgaactgaaagcgtcgatggatgaactacgccaggccgcggagtcgatgaagcgttcctacgttgcaaacgatcctgaaaaggcgagcgatgaagcgcacaccatccataacccggtggtgaaagataatgaagctgcgcatgagggcgtaacgcctgccgctgcacaaacgcaggccagttcgccggaacagaagccagaaaccacgccagagccggtggtaaaacctgctgcggacgctgaaccgaaaaccgctgcaccttccccttcgtcgagtgataaaccgtaa

SEQ ID NO: 471998 - DNA, 777 bp, Shigella flexneri
atgtctgtagaagatactcaaccgcttatcacgcatctgattgagctgcgtaagcgtctgctgaactgcattatcgcggtgatcgtgatattcctgtgtctggtctatttcgccaatgacatctatcacttggtatccgcgccattgatcaagcagttgccgcaaggttcaacgatgatcgccaccgacgtggcctcgccgttctttacgccgatcaagctgacctttatggtgtcgctgattctgtcagcgccggtgattctctatcaggtgtgggcatttatcgccccagcgctgtataagcatgaacgtcgcctggtggtgccgctgctggtttccagctctctgctgttttatatcggcatggcattcgcctactttgtggtctttccgctggcatttggcttccttgccaataccgcgccggaaggggtgcaggtatccaccgacatcgccagctatttaagcttcgttatggcgctgtttatggcgtttggtgtctcctttgaagtgccggtggcaattgtgctgctgtgctggatggggattacctcgtcagaagacttacgcaaaaaacgcccgtatgtgctggttggtgcattcgttgtcgggatgttgctgacgccgccggatgtcttctcgcaaacgctattggcgatcccgatgtactgtctgtttgaaatcggtgtcttcttctcacgcttttacgttggtaaagggcgaaatcgggaagaggaaaacgacgctgaagcagaaagcgaaaaaactgaagaataa

SEQ ID NO: 471999 - DNA, 783 bp, Shigella flexneri
atgtttgatatcggcgttaatttgaccagttcgcaatttgcgaaagaccgtgatgatgttgtagcgcgcgcttttgacgcgggagttaatgggctactcatcaccggcactaacctgcgtgaaagccagcaggcgcaaaagctggcgcgtcagtattcgtcctgttggtcaacggcgggcgtacatcctcacgacagcagccagtggcaagctgcgactgaagaagcgattattgagctggccgcgcagccagaagtggtggcgattggtgaatgtggtctcgactttaaccgcaacttttcgacgccggaagagcaggaacgcgcttttgttgctcagctacgcattgccgcagaattaaacatgccggtatttatgcactgtcgcgatgcccacgagcggtttatgacattgctggagccgtggctggataaactgcctggtgcggttcttcattgctttaccggcacacgcgaagagatgcaggcgtgcgtggcgcgtggaatttatatcggcattaccggttgggtttgcgatgaacgacgcgggctggagctgcgggaattgttgccgttgattccggcggagaaattgctgatcgaaacagatgcgccgtatctgctcccgcgcgatctcacgccaaagccatcatcccggcgcaacgagccagcccatctgccccatattttgcaacgtattgcgcactggcgtggagaagatgccgcatggctggctgccaccacggatgccaatgtcaaaacactgtttgggattgcgttttag

SEQ ID NO: 472000 - DNA, 489 bp, Shigella flexneri
atgcaatcctggtatttactgtactgcaagcgcgggcaacttcaacgtgcccaggaacaccttgagagacaggcggttaattgcctcgctccgatgatcaccctggaaaaaatcgtacggggtaaacgtaccgcagtcagtgaaccgttattccctaactacctgtttgtggaatttgatccagaagtgattcataccacgaccatcagcgctacgcgtggcgtcagccactttgtgcgctttggcgcgtcgccagcgatagtcccatcggcggtaattcatcagctatcggtatataaaccgaaagacattgtcgatccggcccccccttatccgggtgataaggtgattattaccgaaggcgcgttcgaaggctttcaggccattttcaccgaacccgatggtgaggctcgctccatgctattgcttaatcttattaataaagagattaagcacagtgtgaagaacaccgagttccgcaaactctaa

SEQ ID NO: 472001 - DNA, 1494 bp, Shigella flexneri
atggacgccatgaaatataacgatttacgcgacttcctgacgctgcttgaacagcagggtgagctaaaacgtatcacgctcccggtggatccgcatctggaaatcactgaaattgctgaccgcactctgcgtgctggtgggcctgcgctgttgttcgaaaaccctaaaggctactcaatgccggtgctgtgcaacctgttcggtacgccaaagcgcgtggcgatgggcatggggcaggaagatgtttcggcgctgcgtgaagttggtaaattattggcgtttctgaaagagccggagccgccaaaaggtttccgcgacctgtttgataaactgccgcagtttaagcaggtgttaaacatgccgacaaagcgactgcgtggtgcgccctgccaacaaaaaatcgtctctggcgatgacgtcgatttcaatcgcattcccattatgacctgctggccggaagatgccgcgccgctgattacctgggggctgaccgtaacgcgcggcccgcataaagagcggcagaatctgggcatttatcgccagcagctgattggtaaaaacaaactgattatgcgctggctgtcgcatcgcggcggcgcgctggattatcaggagtggtgtgcggcgcatccgggcgaacgtttcccggtttctgtggcgctgggtgccgatcctgccacgattctcggtgcagtcacccccgttccggatacgctttcagagtatgcgtttgccggattgctacgcggcaccaaaaccgaagtagtaaagtgtatttccaatgacctcgaagtgccagccagtgccgaaatcgtcctggaagggtatatcgatcctggtgagatggcgccggaagggccgtatggtgaccacacaggttactataatgaagtcgatagtttcccggtgtttaccgtgacgcatattacccagcgtgaagatgcgatttaccattccacctataccgggcgtccgccagatgagcccgcggtactgggcgtggcgttgaacgaagtgtttgtaccgattctgcaaaaacagttcccggaaattgtcgatttttacctgccgccggaaggctgttcttatcgtctggcggtagtgacgatcaaaaaacagtacgccggacacgcgaagcgcgtcatgatgggcgtctggtcgttcttacgccagtttatgtacactaaatttgtgatcgtttgcgatgatgacgtcaacgcacgcgactggaacgatgtgatttgggcgattaccacccgtatggacccggcgcgggatactgttctggtagaaaatacgcctattgattatctggattttgcctcgcctgtctctgggctgggttcaaaaatggggctggatgccacgaataaatggccgggggaaacccagcgtgaatggggacgtcccatcaaaaaagatccagatgttgtcgcgcatattgacgccatctgggatgaactggctatttttaacaacggtaaaagcgcctga

SEQ ID NO: 472002 - DNA, 702 bp, Shigella flexneri
atgacaaccttaagctgtaaagtgacctcggtagcagctatcacggataccgtatatcgtgtccgcatcgtgccagacgcggccttttcttttcgtgctggtcagtatttgatggtagtgatggatgagcgcgacaaacgtccgttctcaatggcctcgacgccggatgaaaaagggtttatcgagctgcatattggcgcttctgaaatcaacctttacgcgaaagcagtcatggaccgcatcctcaaagatcatcaaatcgtggtcgaccttccccacggagaagcgtggctgcgcgatgatgaagagcgtccgatgattttgattgcgggcggcaccgggttctcttatgcccgctcgattttgctgacagcgttggcgcgtaacccaaaccgtgatatcaccatttactggggcgggcgtgaagagcagcatctgtatgatctctgcgagcttgaggcgctttcgttaaagcaccttggtctgcaagtggtgccggtggttgaacaaccggaagcaggctggcgtgggcgtactggtaccgtgttaacggcggtattgcaggatcatggtacgctggcagagcatgatatctatattgccggacgttttgagatggcgaaaattgcccgtgacctgttttgcagtgagcgtaatgcgcgggaagatcgcctgtttggcgatgcgtttgcatttatctga

SEQ ID NO: 472003 - DNA, 1164 bp, Shigella flexneri
atggaacaggttgtcattgtcgatgcaattcgcaccccgatgggccgttcgaagggcggtgcttttcgtaacgtgcgtgcggaagatctctccgctcatttaatgcgtagcctgctggcgcgtaacccggcgctggaagcggcggccctcgacgatatttactggggttgtgtgcaacagacgctggagcagggttttaacatcgcccgtaacgcggcgctgctggcagaagtgccgcactctgtcccggcggttaccgtcaatcgcttgtgtggttcatccatgcaggcactgcatgacgcagcacgaatgatcatgactggcgatgcgcaggcatgtctggttggcggcgtggagcatataggccatgtgccgatgagtcacggcgtcgattttcaccccggcctgagccgcaatgtcgccaaagcggcgggcatgatgggcttaacggcagaaatgctggcgcgtatgcacggtatcagccgtgaaatgcaggatgcctttgccgcgcggtcacacgcccgcgcctgggccgccacgcagtcggccgcatttaaaaatgaaatcatcccaactggtggtcacgatgccgacggcgtcctgaagcagtttaattacgacgaagtgattcgcccggaaaccaccgtggaagccctcgccacgctgcgtccggcgtttgatccagtaaacggtacggtaacggcgggcacatcttctgcactttccgatggcgcagctgccatgctggtgatgagtgaaagccgcgcccatgaattaggtcttaagccgcgcgctcgtgtgcgttcgatggcggtcgttggttgtgacccatcgattatgggttacggcccggttccggcctcgaagctggcgctgaaaaaagcggggctttctgccagcgatatcggcgtgtttgagatgaacgaagcctttgccgcgcagatcctgccgtgcattaaagatctcgggctaatggagcagattgacgagaagatcaacctcaatggtggtgcgatcgcgctgggtcatccgctgggttgttccggtgcgcgtatcagcaccacgctgctgaatctgatggaacgcaaagacgttcagtttggtctggcgacgatgtgtatcggtctgggtcagggtattgcgacggtgtttgagcgggtttaa

SEQ ID NO: 472004 - DNA, 2190 bp, Shigella flexneri
atgctttacaaaggcgacaccctgtaccttgactggctggaagatggcattgccgaactggtatttgatgccccaggttcagttaataaactcgacactgcgaccgtcgccagcctcggcgaggccatcggcgtgctggaacagcaatcagatctaaaagggctgctgctgcgttcgaacaaagcagcctttatcgtcggtgctgatatcaccgaatttttgtccctgttcctcgttcctgaagaacagttaagtcagtggctgcactttgccaatagcgtgtttaatcgcctggaagatctgccggtgccgaccattgctgccgtcaacggctatgcgctgggtggtggctgcgaatgcgtgctggcgaccgattatcgtctggcgacgccggatctgcgcatcggtctgccggaaaccaaactgggcatcatgccgggctttggcggttctgtacgtatgccacgtatgctgggcgctgacagtgcactggaaatcattgccgccggtaaagatgtcggcgcggatcaggcgctgaaaatcggtctggtggatggcgtagtcaaagcagaaaaactgattgaaggggcgatggcgattttacgccaggccattaacggcgacctcgactggaaagcgaaacgtcagccgaagcaggaaccgctaaaactgagcaagattgaagccaccatgagcttcaccatcgctaaaggaatggtcgcgcaaacggcggggaaacattatccggcccccatcaccgcagtaaaaaccattgaagctgcggcccgttttggtcgtgaagaagccttaaatctggaaaacaaaagttttgtcccgctggcgcataccaacgaagctcgcgcactggtcggcattttccttaacgatcaatatgtaaaaggcaaagcgaagaaactcaccaaagacgttgaaaccccgaaacaggctgctgtgctgggcgcaggcatcatgggtggcggtatcgcttaccagtccgcgtggaaaggcgtgccggttgtcatgaaagatatcaacgacaagtcgttaaccctcggcatgaccgaagccgcgaaactgctgaacaagcagcttaagcgcggcaaaatcgatggtctgaaactggctggcgtgatctccacgatccacccaacgctcgactacgccggatttgaccgcgtggatattgtggtagaagcggttgttgaaaacccgaaagtgaaaaaagccgtactggcagaaaccgaacaaaaagtacgccaggataccgtgctggcgtctaacacttcaaccattcctatcagcgaactggccaacgcgctggaacgcccggaaaacttctgcgggatgcacttctttaacccggtccaccgaatgccgttggtagaaattattcgcggcgagaaaagctccgacgaaaccatcgcgaaagttgtcgcctgggcgagcaagatgggcaagacgccgattgtggttaacgactgccccggcttctttgttaaccgcgtgctgttcccgtatttcgccggtttcagccagctgctgcgcgacggcgcggatttccgcaagatcgacaaagtgatggaaaaacagtttggctggccgatgggcccggcatatctgctggacgttgtgggcattgataccgcgcatcacgctcaggctgtcatggcagcaggcttcccgcagcggatgcagaaagattaccgcgatgccatcgacgcgctgtttgatgccaaccgctttggtcagaagaacggcctcggtttctggcgttataaagaagacagcaaaggtaagccgaagaaagaagaagacgccgccgttgaagacctgctggcagaagtgagccaaccgaagcgcgatttcagcgaagaagagattatcgcccgcatgatgatcccgatggtcaacgaagtggtgcgctgtctggaagagggcattatcgccactccggcggaagcggatatggcgctggtctacggcctgggcttccctccgttccacggcggcgcgttccgctggctggacaccctcggtagcgcaaaatacctcgatatggcacagcaatatcagcacctcggcccgctgtatgaagtgccggaaggtctgcgtaataaagcgcgtcataacgaaccgtactatcctccggttgagccagcccgtccggttggcgacctgaaaacggcttaa

SEQ ID NO: 472005 - DNA, 1332 bp, Shigella flexneri
atggaatcactggcctcgctctataaaaatcatatagctaccttacaagaacggactcgcgatgcgctggcgcgcttcaagctggatgcattacttattcactccggcgagctgttcaacgtttttctcgacgatcatccctatccgtttaaagtgaacccgcaattcaaagcgtgggtgccggtaactcaggtgccaaactgctggttgctggtggatggcgtgaacaagccgaaactgtggttctatctgccggttgattactggcacaacgtcgaaccgctgccgacctccttctggactgaagatgtggaagtgatcgcgctgccgaaagccgatggcattggtagcctgctgcctgctgcgcgcggcaatatcggttatatcggtccggtgccggaacgtgcgctgcaactgggtattgaggccagcaacatcaacccgaaaggggtgatcgactacctgcattattaccgctccttcaaaaccgagtacgaactggcctgtatgcgtgaagcgcagaaaatggcggtcaatggtcatcgtgcggcagaagaagcgttccgttctggcatgagcgagttcgatatcaatattgcctatctgaccgcgaccggtcatcgtgataccgacgtaccttacagcaacattgtggcgcttaacgaacacgctgcggtgttgcattacaccaaactggaccaccaggcaccggaagagatgcgcagcttcctgctggatgccggggccgaatataacggctatgcggctgacctgacccgtacctggtcggcaaaaagcgacaacgactacgcacagctggtgaaagacgtaaatgatgaacaactggcgctgatcgccaccatgaaagcaggcgtcagctatgtggattaccacatccagttccatcagcgcatcgccaaactgctgcgtaaacatcaaatcatcaccgatatgagtgaagaagcgatggtcgaaaacgatctcaccggaccgtttatgccgcacggtattggccatctgctgggcctgcaggtgcatgacgtcgccggttttatgcaggatgatagcggtacacacctcgcggcaccggcaaaatatccgtacctgcgctacacccgtattctccagccgggcatggtgttaaccatcgaaccgggtatctacttcattgaatcgcttctggcaccgtggcgtgaagggcagttcagcaagcacttcaactggcagaaaattgaagcactgaaaccgttcggcggcattcgtatcgaagacaacgtggtgatccacgaaaacaacgtggaaaacatgacccgggatctgaaactggcgtga

SEQ ID NO: 472006 - DNA, 615 bp, Shigella flexneri; identical to SEQ ID NO: 459139

SEQ ID NO: 472007 - DNA, 1452 bp, Shigella flexneri
atgcattttcgcgccattacccgaatcgttggactactggtcatcttattttcagggaccatgattatccctgggctggtagcactcatctaccgggatggagcgggccgcgcttttacccagaccttttttgtcgccctcgccattggctctatgctgtggtggccgaaccgcaaagagaagggcgaactgaaatcccgtgaggggtttctgatagtggtgctgttttggaccgtgctgggtagtgtcggtgcgctcccttttatcttctcggaaagcccgaacctcacgattaccgatgcgttttttgaatctttctctggcctgaccaccaccggggccactacgctggtggggctggattcgctccctcatgccatcctcttttatcgccagatgctgcaatggtttggcgggatggggatcatcgtgttagcggttgcgatactgcctatcctcggcgtgggtgggatgcagctctatcgcgcagaaatgcccggcccgctgaaagataacaaaatgcgcccgcgaattgcggaaacggcgaaaactctgtggttgatttatgtcttgctgaccgtcgcctgtgcgctggcgttgtggtttgccggaatggatgcctttgatgccatcggccatagctttgcgactatcgctattggcggcttctcgacacatgatgccagtatcggttatttcgacagtccgactattaacactatcattgctatcttcctgctgatctccggctgtaactacggtctgcacttttcactgttaagtgggcgtagtctgaaggtttattggcgcgatccggaatttcgcatgtttatcggcgtacagtttacgctggtggttatttgtacactcgtactgtggtttcataatgtctacagttcggcgctgatgacaattaaccaggcgtttttccaggtggtatcgatggcgacaaccgccgggtttacgactgacagcattgcccgctggccgctctttttgccggtactgcttttatgttcagcttttatcggcggttgcgccgggtcaacgggcggtggcctgaaagtgatccgcatcctgctgctgtttaagcaggggaaccgtgagctgaaacgactggtgcatccgaacgccgtctatagcattaagctggggaatcgcgcactgccggaacgtatcctcgaagccgtttggggatttttctccgcctatgcattggtgtttattgtcagtatgctggcgattatcgccacgggcgtggatgatttttctgcctttgcctcagttgttgcgacattgaataacctggggccagggcttggcgtggttgctgataactttaccagtatgaacccggtggctaaatggatcctgattgccaacatgctgtttggtcgtctcgaggtctttacattactggtgctctttaccccgactttctggcgtgaatga

SEQ ID NO: 472008 - DNA, 546 bp, Shigella flexneri
gtgaaaacattaattcttttctcaacaagggacggacaaacgcgcgagattgcctcctacctggcttcggaactgaaagaactggggatccagacggatgtcgccaatgtgcaccgcattgaagaaccacaatgggaaaactatgaccgtgtggtcattggtgcttctattcgctatggtcactaccactctgcgttccaggaatttgtcaaaaaacatgcgacgcgactgaattcgatgccgagcgccttttattccgtaaacctggtggcgcgcaaaccggagaagcgtactccacagaccaacagctacgcgcggaagtttctgatgaactcgcaatggcgtcccgatcgctgcgcggtcattgccggggcgctgcgttacccacgttatcgctggtacgaccgttttatgctcaagctgattatgaagatgtcaggcggtgaaacggatacgcgcaaagaagttgtctataccgattgggagcaggtggcgaatttcgcccgagaaatcgcccatttaaccgacaaaccgacgctgaaataa

SEQ ID NO: 472009 - DNA, 1278 bp, Shigella flexneri
atgctcgaattgctttacaccgcccttctctaccttattcagccgctgatctggatacggctctgggtgcgcggacgtaaggctccggcctatcgaaaacgctggggtgaacgttacggtttttaccgccatccgctaaaaccaggcggcattatgctgcactccgtctccgtcggtgaaactctggcggcgatcccgttggtgcgcgcgctgcgtcatcgttatcctgatttaccgattaccgttacaaccatgacgccaaccggttcggagcgcgtacaatcggctttcgggaaggatgttcagcacgtttatctgccgtatgacctgcccgatgcgctcaaccgtttcctgaataaagtcgaccccaaactggtgttgattatggaaaccgaactatggcctaacctgattgcggcgctacataaacgtaaaattccgctggtgatcgctaacgcgcgactctctgcccgctcggccgcaggttatgccaaactgggtaaattcgtccgccgcttgctgcgtcgtattacgctgattgctgcgcaaaatgaagaagatggtgcacgttttgtggcgctgggcgcaaaaaataaccaggtaaccgttaccggtagcctgaaattcgatatttctgtaactccgcagttggctgctaaagccgtgacgctacgccgccaatgggcaccacaccgcccggtatggattgccaccagcactcacgaaggtgaagagagcgtggtcattgccgcacatcaggcattgttacagcaattcccgaatttattgctcatcctggtaccccgtcatccagaacgcttcccggatgcgattaaccttgtccgccaggctggactaagctatatcacacgctcttcaggggaagtcccctccaccagcacgcaggttgtggttggcgatacgatgggcgagttgatgttactgtacggcattgccgatctcgcctttgttggcggttcactggttgaacgtggtgggcataatccgctggaagctgccgcacacgctattccggtattgatggggccgcatacttttaactttaaagacatttgcgcgcggctggagcaggcaagcgggcttattaccgttaccgatgccactacgcttgcaaaagaggtttcctctttactcaccgacgccgtttaccgtagtttctatggccgtcatgccgttgaagtactgtatcaaaaccagggcgcgctacagcgtctgcttcaactgctggaaccttacctgccaccgaaaacgcattga

SEQ ID NO: 472010 - DNA, 480 bp, Shigella flexneri
atgcaaaaacgggcgatttatccgggtactttcgatcccattaccaatggtcatatcgatatcgtgacgcgcgccacgcagatgttcgatcacgttattctggcgattgccgccagccccagtaaaaaaccgatgtttaccctggaagagcgtgtggcactggcacagcaggcaaccgcgcatctggggaacgtggaagtggtcgggtttagtgatttgatggcgaacttcgcccgtaatcaacacgctacggtgctgattcgtggcctgcgtgcggtggcggattttgaatatgaaatgcagctggcgcatatgaatcgccacttaatgccggaactggaaagtgtgtttctgatgccgtcgaaagagtggtcgtttatctcttcatcgttggtgaaagaggtggcgcgccatcagggcgatgtcacccatttcctgccggagaatgtccatcaggcgctgatggcaaaattagcgtag

SEQ ID NO: 472011 - DNA, 810 bp, Shigella flexneri
atgcctgaattacccgaagttgaaaccagccgtcgcggcatagaaccgcatctcgttggtgcaaccattcttcatgcggtggtgcgcaacggacgcttgcgctggccggtttcagaagagatctaccgattaagcgatcaaccagtgcttagcgtgcagcggcgggctaaatatctgctgctggagctgcctgagggctggattatcattcatttggggatgtctggcagcctgcgcatccttccagaagaacttccccctgaaaagcatgaccatgtggatttggtgatgagcaacggtaaagtgctgcgctacaccgatccgcgccgctttggtgcctggctgtggaccaaagagctggaagggcataatgtgctggcccatcttggaccggagccgcttagcgacgatttcaatggtgagtatctgcatcagaagtgcgcgaagaaaaaaacggcgattaaaccgtggctgatggataacaagctggtggtaggggtagggaatatctatgccagcgaatcactgtttgcggcggggatccatccggatcggctggcgtcatcactgtcgctggcagagtgtgaattgttagctcgggtgattaaagcggtgttgctgcgttcgattgagcagggtggtacaacgctgaaagattttctgcaaagtgatggtaaaccgggctatttcgcgcaggaattgcaggtttacgggcgaaaaggtgagccgtgtcgggtgtgcggtacgccgattgtggcgactaaacatgcgcagcgggcaacgttttattgtcggcagtgccagaagtaa

SEQ ID NO: 472012 - DNA, 168 bp, Shigella flexneri
atggctaaaggtattcgtgagaaaatcaagctggtttcttctgctggtactggtcacttctataccactacgaagaacaaacgtactaagccggaaaaactggaactgaaaaaattcgatccagttgttcgtcagcacgtgatctacaaagaagcgaaaatcaaataa

SEQ ID NO: 472013 - DNA, 237 bp, Shigella flexneri; identical to SEQ ID NO: 1747

SEQ ID NO: 472014 - DNA, 435 bp, Shigella flexneri
gtgaaaaacaatgcacagctgttgatgccgcgcgaaaaaatgctgaagtttggtattagcgccttaacggatgtcgagctgctggcgctatttctgcgtaccggaacgcgcggtaaagatgtattaaccctggcaaaagagatgctggagaatttcggctctctttatggcttgttaacctctgaatatgaacaatttagtggtgttcatggaattggcgtagcgaaatttgcccagttaaaggggattgctgaactggcgcgacgttactacaacgtgcggatgcgtgaagaaagccctttactcagcccggagatgacgcgggaatttttacaaagccagctcacgggtgaggagcgggagatctttatggtgatctttctcgactcacaacaccgggttataacgcatagccgtctttttccggcacgctaa

SEQ ID NO: 472015 - DNA, 1221 bp, Shigella flexneri
atgagcctggccggtaaaaaaatcgttctcggcgttagcggcggtattgctgcctataaaacccctgaactggtgcgtcgtttgcgcgatcgcggggccgacgtccgcgtagccatgaccgaagcggcaaaagcctttatcaccccacttagcttgcaggcggtttctggttatcccgtttccgacagtctgcttgacccggcagccgaagccgctatgggccatattgagctgggtaaatgggctgatttagtgattctcgcccctgccacggcagatttgattgcccgtgttgctgccggaatggcgaatgacctggtatcgacgatttgtctggctacacctgcgcctgtagccgtgctccccgccatgaaccagcagatgtaccgtgccgctgccacgcagcataatttagaggtgcttgcttcccgtggtttgctcatctgggggccagacagtggcagtcaggcttgtggtgatatcggtcctggacgaatgctcgatccgttaaccattgtggatatggcggtggcgcatttttcgcccgtcaacgacctgaaacatctgaacattatgattaccgccggtccgacgcgtgaaccgctcgatccggtgcgttatatctctaatcacagctccggcaagatgggttttgctatcgccgccgctgctgcccgtcgtggcgcgaacgtcacgctggtatcaggtccagtttcactaccgacgccaccgtttgttaaacgtgttgatgtgatgaccgcgctggaaatggaagccgccgtgaatgcttctgtacagcagcaaaatatttttatcggttgcgccgccgtggcggattatcgcgcagctaccgtggccccagaaaaaatcaaaaagcaggccacgcagggtgatgaattaacaataaaaatggttaaaaaccccgatatcgtcgcaggcgttgccgcactaaaagaccatcgaccctacgtcgttggatttgccgccgaaacaaataatgtggaagaatacgcccggcaaaaacgtatccgtaaaaaccttgatctgatctgcgcgaacgatgtttcccagccaactcaaggatttaacagcgacaacaacgcattacaccttttctggcaggacggagataaagtcttaccgcttgagcgcaaagagctccttggccaattattactcgacgagatcgtgacccgttatgatgaaaaaaatcgacgttaa

SEQ ID NO: 472016 - DNA, 459 bp, Shigella flexneri
atgatgaaaaaaatcgacgttaagattctggacccgcgcgttaggaaggaatttccgctcccgacttatgccacctctggctctgccggacttgacctgcgtgcctgtctcgacgacgccgtagaactggctccgggtgacactacgctggttccgaccgggctggcgattcatattgccgatccttcactggcggcaatgatgctgccgcgctccggattgggacataagcacggtatcgtgcttggtaacctggtaggattgatcgattccgactatcagggccagttgatgatttccgtgtggaaccgtggtcaggacagcttcaccattcaacctggcgaacgcatcgcccagatgatttttgttccggtagtacaggctgaatttaatctggtggaagatttcgacgccaccgaccgcggtgaaggcggctttggtcactctggtcgtcagtaa

SEQ ID NO: 472017 - DNA, 597 bp, Shigella flexneri
atggcagaaaaacaaactgcgaaaaggaaccgtcgcgaggaaatacttcagtctctggcgctgatgctggaatccagcgatggaagccaacgtatcacgacggcaaaactggccgcctctgtcggcgtttccgaagcggcactgtatcgccacttccccagtaagacccgcatgttcgatagcctgattgagtttatcgaagatagcctgattactcgcatcaacctgattctgaaagatgagaaagacaccacagcgcgcctgcgtctgattgtgttgctgcttctcggttttggtgagcgtaatcctggcctgacccgcatcctcactggtcatgcgctaatgtttgaacaggatcgcctgcaagggcgcatcaaccagctgttcgagcgtattgaagcgcagctgcgccaggtattgcgtgaaaagagaatgcgtgagggtgaaggttacaccaccgatgaaaccctgctggcaagccagatcctggccttctgtgaaggtatgctgtcacgttttgtccgcagcgaatttaaataccgcccgacggatgattttgacgcccgctggccgctaattgccgcgcagttgcagtaa

SEQ ID NO: 472018 - DNA, 642 bp, Shigella flexneri
atgaaaccatatcagcgccagtttattgaatttgcgcttagcaagcaggtgttaaagtttggcgagtttacgctgaaatccgggcgcaaaagcccctatttcttcaacgccgggctgtttaataccgggcgcgatctggcactgttaggccgtttttacgctgaagcgttggtggattccggcattgagttcgatctgctgtttggccctgcttacaaagggatcccgattgccaccacaaccgctgtggcactggcggagcatcacgacctggacctgccgtactgctttaaccgcaaagaagcaaaagaccacggtgaaggcggcaatctggttggtagcgcgttacaaggacgcgtaatgctggtagatgatgtgatcaccgccggaacggcgattcgcgagtcgatggagattattcaggccaatggcgcgacgcttgctggcgtgttgatttcgctcgatcgtcaggaacgcgggcgcggcgagatttcggcgattcaggaagttgagcgtgattacaactgcaaagtgatctctatcatcaccctgaaagatctgattgcctatctggaagagaagccggaaatggcggaacatctggcggcggttaaggcctatcgcgaagagtttggcgtttaa

SEQ ID NO: 472019 - DNA, 717 bp, Shigella flexneri
atgcgtccagcaggccgtagcaataatcaggtgcgtcccgttaccctgactcgtaactatacaaaacatgcagaaggctcggtgctggtcgaatttggcgataccaaagtattgtgtaccgcctctattgaagaaggcgtgccgcgcttcctgaaaggtcagggccagggctggatcaccgcagagtacggcatgctgccacgttctacccacacccgtaacgctcgtgaagcggcgaaaggtaagcagggtggacgcacaatggaaatccagcgtctgatcgcccgtgctcttcgcgcggcagtagatttgaaagcgctgggtgagttcaccattacgctggactgcgacgtgcttcaggctgatggtggcactcgtaccgcgtcgattacgggtgcctgcgtggcgctggcagatgcgctacagaagctggtggaaaacggcaagctgaaaaccaacccgatgaaagggatggtagccgcagtttctgtcggtattgtaaacggtgaagcaatttgcgatctggaatacgttgaagactcagccgcagagaccgacatgaacgtagtgatgaccgaagacgggcgcatcattgaagtgcaggggacggcagaaggcgagccgttcacccatgaagagctactcaccttgttggcgctggccagagggggaatcgaatccattgtagcgacgcagaaggcggcgctggcaaactga

SEQ ID NO: 472020 - DNA, 864 bp, Shigella flexneri
atgatccgcagtatgaccgcctacgcccggcgtgaaatcaagggtgaatgggggagcgcaacctgggaaatgcgctcggtaaaccagcgttatctggaaacttactttcgtctgccggagcagttccgtagccttgaacctgtcgttcgcgagcgtattcgttctcgcctgacgcgcggtaaagtggaatgtaccctgcgctatgagccagatgttagcgcacaaggtgagctgatcctcaatgaaaaactggctaaacagctggtaactgccgcgaactgggtaaaaatgaagagtgacgaaggggaaatcaacccggttgatattctacgctggccgggcgtgatggcagcccaggagcaggatctcgacgcgattgccgctgaaattctcgcggcgttggatggtacgctggacgactttatcgtcgcgcgcgaaaccgaaggtcaggcactgaaagcattgatcgagcagcgtctggaaggcgtcaccgccgaagtggtcaaagtccgcgcccatatgccggaaattctgcaatggcagcgtgagcgtctggtcgcgaagctggaagatgctcaggttcagttggaaaacaaccgtctggagcaggagttggttctgctggcacaacgaattgacgttgccgaagagctggaccgcctcgaagcgcatgttaaagagacgtacaacattctgaagaaaaaagaagcggttggtcgtcgtctggactttatgatgcaggagttcaaccgtgagtcgaacactcttgcgtcgaaatctatcaatgccgaagtgacaaactccgccatcgagctgaaagtgttgattgagcagatgcgcgagcagattcagaatattgagtaa

SEQ ID NO: 472021 - DNA, 825 bp, Shigella flexneri
atgaacgaacatcatcaaccttttgaagagataaaactgattaatgcaaacggagcagaacaatggtcagcaagacaacttgggaaactactgggttattcagagtatcgtcactttatacctgtattaacgcgcgccaaagaggcctgtgagaacagtggtcacacaattgatgaccatttcgaggagatcctcgatatggtcaaaattggctcaaatgccaaaagagcattaaaagacatcgtactctcccgctatgcctgttacctggtagtacaaaacggcgaccccgcgaaaccggtcattgcggcagggcagacttattttactatccagacccgacggcaggagcttgctgacgatgaagcatttaagcaacttcgtgaagacgaaaagcgtctgtttctgagaaatgagttgaaagaacataacaaacaattggttgaggcagcacagcaagctggggtagcgacagctactgatttcgccatatttcagaatcatggttaccaggggctgtatggtggattagatcagaaagccatccaccaactgaaggggctgaaaaagagtcagaagatcctggatcatatgggttcaacagaactggcggctaatctctttcgagctacccaaacagaagaaaaactcaagcgggatagcgtgaattcaaaacagcaagctaataccacacactttgacgtgggtagcaaggtgaggcaaaccattcaggaacttggcggaaccatacctgaggagttgccgaccccgcaggtcagcatcacgcagttggaaaacagtgtaaaaattacagagaagaaatag

SEQ ID NO: 472022 - DNA, 618 bp, Shigella flexneri
atgctgttacacattttgtatttggttggcattactgccgaagccatgacgggggcgctggcggccgggcgacggcgcatggatacatttggcgtaattattattgcaaccgccaccgcaattggcggagggtcagtgcgcgatattctgctgggccactatccgctcggctgggtcaaacacccggaatatgtgattatcgtcgctaccgccgcagtactcaccactatcgttgctcctgtaatgccttacctgcgcaaagtgtttctggtgctcgatgcgctcggactggtggtcttttctatcatcggcgcacaggttgcactggatatggggcacggcccaattattgccgttgtcgcggcggtaaccaccggtgtatttggcggcgttttgcgcgatatgttctgtaaacgcattccgctggtctttcaaaaagagttgtatgccggtgtctcatttgcctccgccgtgctgtacatcgcgctgcaacactatgtttctaaccatgatgtggtgattatctccaccctggtattcggcttttttgctcgtttactggcgctacgtcttaagctgggattaccggtcttttactacagccacgaaggtcactaa

SEQ ID NO: 472023 - DNA, 1683 bp, Shigella flexneri
atgaaagtatggatggcgatattaataagtatcttgtgctggcaatcatctgtgtgggcggtctgtccggcctggtcgccagccagagcacaggaagaaatttcccgcctgcaacagcaaataaaacagtgggacgatgactactggaaggaaggaaaaagtgaggtggaagacggtgtttacgatcagttaagcgcccgtcttacgcagtggcaacgctgctttgtgagcgagccccgcgacgtgatgatgccgcctttaaatggtgcggttatgcatccggttgcccatacgggtgtacgcaaaatggcggataaaaacgcattaagtctgtggatgcgagaacgtagcgatctttgggtgcagccaaaagttgatggcgttgcggtaaccctggtttatcgggacgggaaactgaacaaagcaatcagtcgcggtaatggcctgaaaggcgaggactggacgcagaaagttagcttaatttccgctgtgccgcaaaccgttagcgggcctttagccaacagtacgcttcagggggaaatatttctccagcgcgaggggcatatccaacaacaaatggggggaataaatgcccgcgcaaaagttgctggcctgatgatgcgccaggggaatagcgacacgctaaactcactggctgtttttgtctgggcatggccggatggaccgcagttaatgaccgatcgtttaaaggagctggctaccgcaggttttactctaacgcagaggtatacccgtgcggttaaaaatgctgatgaggttgcgcgcgtacgcaatgagtggtggaaagcgaaattacccttcgtcaccgatggcgtggttgtgcgaggggctaaggaacccgaatcccgtcattggctaccgggccaggcggagtggctggtggcctggaaatatcaacctgtagctcaggttgccgaagtgaaggcgattcagtttgcggtgggtaagagcggtaaaatatcggtggttgcgtcactcgcacctgtcatgctggatgataaaaaagtccagcgggtgaatattggttccgtcaggcgctggcaggagtgggatattgcgcctggtgatcagatcctcgtcagccttgccggtcagggtattcctcgcattgatgatgtggtctggcgcggtgcagaacgtacaaaaccgacaccaccagaaaaccgctttaacccgttgacctgctactttgcttctgatgtttgtcaggaacagttcatttcacgcttagtctggctggggtcaaaacaggttctggggctggatggcattggtgaggccggttggcgcgcgctgcatcagactcatcgctttgagcatatcttttcctggcttttattaacgccagagcaattacagaacacgccggggatcgcgaaaagtaaaagtgcgcagttatggcatcagtttaatctggctcgtaaccagccttttactcgctgggtgatggcaatgggaataccgctaacccgggcggcgcttaatgccagtgatgaacggtcctggtcgcaacttttatttagcacggagcagttctggcagcagctgccggggactggatctgggcgcgccagacaggttattgaatggaaggaaaatgcgcaaatcaagaagctgggcagttggctggctgcccagcagatcacaggttttgaaccttag

SEQ ID NO: 472024 - DNA, 624 bp, Shigella flexneri
atggctcaaggcacgctttatattgtttctgcccccagtggcgcgggtaaatccagcctgattcaggctttattaaaaacccaaccgttgtatgacacccaggtttctgtttcacacaccacacgccaaccgcgtcctggtgaagtccacggtgaacattatttctttgttaatcatgatgaatttaaagaaatgattagcagagatgcgttcctcgaacacgcagaagtttttggtaattactatggcacttcgcgtgaggccattgagcaagtactggcgaccggtgtcgatgtttttctcgatatcgactggcagggcgcgcagcaaattcgccagaagatgccgcacgcgcggagtatctttattttaccgccgtccaaaattgaactggaccgccgtctacgcggtcgcggtcaggacagcgaagaggtcattgcaaagcgtatggcgcaagctgttgcagaaatgagccattacgccgaatatgattatctgattgtgaatgatgacttcgataccgcgttgaccgatttgaagaccattattcgcgccgaacgtctgcgcatgagccgccaaaagcagcgtcatgacgctttaatcagcaaattgttggcagactga

SEQ ID NO: 472025 - DNA, 276 bp, Shigella flexneri
atggcacgcgtaactgttcaggacgctgtagagaaaattggtaaccgttttgacctggtactggtcgccgcgcgtcgcgctcgtcagatgcaggtaggcggaaaggatccgctggtaccggaagaaaacgataaaaccactgtaatcgcgctgcgcgaaatcgaagaaggtctgatcaacaaccagatcctcgacgttcgcgaacgccaggaacagcaagagctggaagccgctgaattacaagccgttaccgctattgctgaaggtcgtcgttaa

SEQ ID NO: 472026 - DNA, 2109 bp, Shigella flexneri
ttgtatctgtttgaaagcctgaatcaactgattcaaacctacctgccggaagaccaaatcaagcgtctgcggcaggcgtatctcgttgcacgtgatgctcacgaggggcaaacacgttcaagcggtgaaccctatatcacgcacccggtagcggttgcctgcattctggccgagatgaaactcgactatgaaacgctgatggcggcgctgctgcatgacgtgattgaagatactcccgccacctaccaggatatggaacagctttttggtaaaagcgtcgccgagctggtagagggggtgtcgaaacttgataaactcaagttccgcgataagaaagaggcgcaggccgaaaactttcgcaagatgattatggcgatggtgcaggatatccgcgtcatcctcatcaaacttgccgaccgtacccacaacatgcgcacgctgggctcacttcgcccggacaaacgtcgccgcatcgcccgtgaaactctcgaaatttacagcccgctggcgcaccgtttaggtatccaccacattaaaaccgaactcgaagagctgggttttgaggcgctgtatcccaaccgttatcgcgtaatcaaagaagtggtgaaagccgcgcgcggcaaccgtaaagagatgatccaaaaaatcctctcggaaatcgaagggcgtttgcaggaagcgggaattccctgccgcgtcagtggtcgcgagaagcatctttattcgatttactgcaaaatggtgctcaaagagcagcgttttcactcaatcatggacatctacgctttccgcgtgatcgtcaatgattccgacacctgttatcgcgtgctcgggcaaatgcatagcctgtacaagccgcgtccgggtcgcgtgaaagactacatcgccattccaaaagcgaacggctatcagtctttgcacacctcgatgatcggcccgcacggtgtgccggttgaggtccagatccgtaccgaagatatggatcagatggcggagatgggtgttgccgcgcactgggcttataaagagcacggcgaaaccagcaccaccgcgcaaatccgcgcccagcgctggatgcaaagcctgctggagctgcaacagagcgccggtagttcgtttgaatttatcgagagcgttaaatccgatctcttcccggatgagatttacgttttcacaccggaagggcgaattgtcgagctgcctgccggtgcaacgcccgtcgacttcgcttatgcagtgcataccgatatcggtcatgcctgcgtgggcgcacgcgttgaccgccagccttacccgctgtcgcagccgcttaccagcggtcaaaccgttgaaatcattaccgcaccgggcgctcgcccgaatgccgcgtggctgaactttgtcgttagctcaaaagcgcgcgccaaaattcgtcagttgctgaaaaacctcaagcgtgatgattctgtaagcctgggccgtcgtctgctcaaccatgctttgggtggtagccgtaagctgaatgaaatcccgcaggaaaatattcagcgcgagctggatcgcatgaagctggcaacgcttgacgatctgctggcagaaatcggacttggtaacgcaatgagcgtggtggtcgcgaaaaatctgcaacatggggacgcctccattccaccggcaacccaaagccacggacatctgcccattaaaggtgccgatggcgtgctgatcacctttgcgaaatgctgccgccctattcctggcgacccgattatcgcccacgtcagccccggtaaaggtctggtgatccaccatgaatcctgccgtaatatccgtggctaccagaaagagccagagaagtttatggctgtggaatgggataaagagacggcgcaggagttcatcaccgaaatcaaggtggagatgttcaatcatcagggcgcgctggcaaacctgacggcggcaattaacaccacgacttcgaatattcaaagtttgaatacggaagagaaagatggtcgcgtctacagcgcctttattcgtctgaccgctcgtgaccgtgtgcatctggcgaatatcatgcgcaaaatccgcgtgatgccagacgtgattaaagtcacccgaaaccgaaattaa

SEQ ID NO: 472027 - DNA, 690 bp, Shigella flexneri
atgaacccaacacgttatgcacgcatctgcgaaatgctcgccaggcggcagcctgatctgaccgtctgcatggagcaggtccacaaacctcataacgtttctgcgattattcgtaccgcagatgccgttggcgtacatgaagttcacgccgtctggcctggtagccgcatgcgcaccatggcttcggcagcggcgggtagtaacagctgggtacaggtgaaaacacaccgcaccattggcgatgccgtcgctcatctcaaaggccagggcatgcagattctggcaacccatctttctgataatgctgtcgatttccgcgaaattgattacactcgcccgacctgcattttgatgggacaggagaaaacgggcatcacgcaggaagcattggccctggcggatcaggacatcatcattccgatgatcggcatggtgcagtcgctgaatgtttccgttgcctcagccctcattctttacgaagcccagcgtcagcggcaaaatgcaggcatgtacctgcgtgaaaacagcatgttgccggaagcagagcaacaacgcctgttgtttgaaggcggctatccggtgctggcgaaagtcgcaaaacgcaaaggcctgccttatccccacgtcaatcagcaaggcgagatcgaagctgatgccgactggtgggctactatgcaggctgcagggtaa

SEQ ID NO: 472028 - DNA, 2082 bp, Shigella flexneri
atgaaaggtcgcctgttagatgctgtcccactcagttccctaacgggcgttggcgcagcacttagtaacaaactggcgaaaatcaacctgcataccgtgcaggatctactcttacaccttcccctgcgctacgaagatcgcacccatctctaccccatcggagaactactgccgggcgtttatgccacggtggaaggcgaagtgctgaactgcaatatctccttcggcggtcggcggatgatgacctgccagatcagcgacggttccggcatcctcaccatgcgctttttcaatttcagcgcggcaatgaaaaatagcctggcgacgggccgccgtgtactggcttatggcgaagcaaagcgcggtaaatatggtgcggagatgatccacccggaataccgcgtgcagggcgatctcagcacgccagaattacaggaaacgctcacgccggtttatccaacaacggaaggcgtaaagcaggccacgctgcgtaaattaaccgaccaggcgctggatctgctcgacacctgcgccattgaagaactcctgccgccggaactgtcacaaggaatgatgacgctaccggaagcgttgcgcactttgcaccgcccgccaccgacgctacagcttagcgatctggaaaccgggcagcatccggcgcaacgtcgtctgattctggaagaactgctggcgcacaacctcagcatgttagccttacgtgccggagcacagcgttttcatgcccagccgctgagcgccaatgacacgctgaaaaataaactcctcgccgccttaccgttcaagccaacgggcgcacaggcacgcgtagtggcggagatcgagcatgatatggcgctggatgtgccgatgatgcgcctggtacagggcgatgtaggttccggtaaaacgctggtcgccgccctcgccgcgctgcgtgcgattgcccacggcaaacaggtggcactgatggcaccaaccgaattactcgccgagcagcacgccaataacttccgcaactggtttgcaccgctcggtatcgaagtgggctggctcgccggtaagcagaaaggcaaagcgcgactgtctcagcaggaagccatcgccagcggtcaggtgcagatgattgtcggtacacacgccatcttccaggaacaggtgcagtttaacggcctggcgctggtgattatcgacgaacagcatcgttttggcgtgcatcagcgtctggcattgtgggagaaaggccagcagcagggcttccatccgcatcagttgatcatgaccgccacgccgatcccccgcacgctggcaatgacggcgtatgccgatctcgatacctcggtgatagatgagctgccgccaggccgcacgccagtgactacggtcgctattcctgatacccgccgtaccgacatcattgaccgcgtgcgccacgcctgcataactgaaggtcgtcaggcgtactgggtttgtacgttgattgaagagtcagagttactggaagcgcaggcggcggaagctacctgggaagagttgaaactggcgctaccagaattgaatgttggcctggtacacgggcggatgaaaccagccgagaaacaggcggtgatggcgtcgtttaaacaaggtgagctacatctgctggttgccactaccgttattgaagtcggtgttgatgtgcctaacgccagcctgatgattatcgaaaaccctgagcgtctgggtctggcgcagttacaccagctgcgcgggcgcgtaggtcgtggcgcggtggcttctcactgcgtgctgctctacaaaacgccgctttctaaaacggcgcaaattcgcctgcaagtgctgcgcgacagtaacgacggttttgtgattgcgcaaaaagatctggagattcgcggccctggcgaattgttaggcacgcgtcagacgggtaatgctgaatttaaagtggcggatttactgcgcgatcaggcgatgatcccggaagttcagcgcctggcgcgacatattcacgaacgttacccacaacaggcaaaagccttgatagaacgctggatgccggagacagaacgttactcgaatgcgtaa

SEQ ID NO: 472029 - DNA, 1206 bp, Shigella flexneri
atgtttcatctcgatactttagcaacgcttgttgccgcaacgctgacgttgctgctcgggcgtaagttggtccattccgtctcctttttgaagaaatacaccataccggaacctgttgcgggtggtttgttggtggcgctggcgctactagtactgaaaaaaagcatgggctgggaagtcaactttgatatgtccctgcgcgatccgttaatgctggctttcttcgccaccattggcctgaacgccaacattgccagtttgcgtgccggtgggcgtgtggttggcatcttcttgattgtggttgttggtctgttggtgatgcaaaatgccattggcattggtatggctagcctgttagggcttgatccgctgatggggctgttggccggttctattacgctttccggcggtcacggtacgggcgctgcgtggagtaaattgttcattgaacgttatggcttcaccaatgcgacggaagtggcgatggcctgtgcaacgttcggtctggtgctgggcggcttgattggcggtccggtggcgcgctatctggtgaaacactccaccacgccgaacggtattccggatgaccaggaagtcccgacggcgtttgaaaagccggatgtgggacgcatgatcacctcgttggtgctgattgaaactatcgcgctgattgctatctgcctgacggtggggaaaattgttgcgcaacttttggctggcactgcttttgaactgccgaccttcgtctgtgtactgtttgttggcgtgattctgagcaacggtctgtcaataatgggcttttaccgcgtctttgagcgtgcggtatccgtgctgggtaacgtaagcttgtcgttgttcctggcgatggcgttgatggggctgaaactgtgggagctggcttcgctggcgctgccgatgctggcgattctggtggtacagaccatcttcatggcgttgtatgccatcttcgttacctggcgcatgatgggcaaaaactacgatgcggcagtgctggctgcgggtcactgtggttttggcctcggtgcaacgccaacggcaatcgccaacatgcaggcgatcactgaacgctttggcccgtcgcacatggcgtttttggtggtgccgatggtcggtgcgttctttatcgatatcgtcaatgcgctggtgattaagctgtatttaatgttgccgatttttgccggttaa

SEQ ID NO: 472030 - DNA, 1392 bp, Shigella flexneri
atgtctgtttccaccctcgagtcagaaaatgcgcaaccggttgctcagactcaaaacagcgaactgatttaccgtcttgaagatcgtccgccgcttcctcaaaccctgtttgccgcctgtcagcatctgctggcgatgttcgttgcggtgatcacgccagcgctattaatctgccaggcgctgggtttaccggcacaagacacgcaacacattattagtatgtcgctgtttgcctccggtgtggcatcgattattcaaattaaggcctggggtccggttggctccgggctgttgtctattcagggcaccagcttcaactttgttgccccgctgattatgggcggtaccgcgctgaaaaccggtggtgctgatgttcctaccatgatggcggctttgttcggcacgttgatgctggcaagttgcaccgagatggtgatctcccgcgttctgcatctggcgcgccgcattattacgccgctggtttctggcgttgtggtgatgattatcggcctgtcgctaattcaggtggggctgacctccattggcggcggttacgcagccatgagcgataacaccttcggcgcaccgaaaaatctgctgctggcaggcgtggttttagccttaattatcctgcttaaccgtcaacgtaacccttacttacgcgtggcctcactggtaattgcgatggcggccggatatgcgctggcgtggtttatgggcatgttgccagaaagcaacgaaccgatgacgcaagaactgattatggtgccaacgccgctctattacggtcttggcattgaatggagtctgctgctgccgctgatgctggtctttatgatcacttcgctggaaaccattggcgatatcacggcgacctctgacgtttccgaacagccagtgtccggtccgctgtacatgaaacgcctgaaaggcggcgtgctggcaaacggcctgaactcgtttgtttcggcggtgtttaacaccttcccgaactcctgcttcgggcaaaacaacggagtgatccagttgactggtgttgccagccgctatgtcggttttgtcgtcgcgctgatgttgatcgtgctgggtctgttcccggcagtgagcggttttgtacaacacattccagaaccggttctgggcggcgcaacgcttgtaatgtttggcaccatcgccgcctccggtgtgcgtatcgtttctcgtgagccgctgaaccgtcgggcgattctgattatcgcgctgtcgctggcggttggtctgggcgtgtctcagcagccgctgattttgcagtttgcccctgaatggctgaaaaacctgctctcctccgggatcgccgcgggcggtattactgccatcgtgctgaatctgattttcccaccagaaaaacagtaa

SEQ ID NO: 472031 - DNA, 1710 bp, Shigella flexneri
atgaaatttattgggaagctgcttctctacattctcatcgctctgttagtggtgatcgctggcctctattttcttctgcaaacccgctggggagcagaacatatcagcgcatgggtttccgagaatagcgactatcatctggccttcggggcgatggatcaccgtttttccgcgccatctcatatcgtgctggagaatgtcacgtttggtcgtgatggtcagcccgcgcccctggtggcaaaaagtgtcgacattgcgctaagcagtcgccaactgaccgaaccacgccatgtcgataccatcctgctggaaaacgggacgctgaatctcaccgaccagaccgcgccgctaccgttcaaagccgatcgtctgcaactgcgtgatatggcgtttaatagcccgaatagcgaatggaaactgagcgcgcagcgggtaaatggcggcgtggttccgtggtcaccagaagccggtaaagtgctgggtacgaaggcgcagattcagtttagtgccggatcgctttcgctcaatgatgttcctgccaccaatgtactgattgaaggcagtattgataacgatcgcgttacgctgactaacctgggtgccgacatcgcccgcgggacattaaccggaaacgcgcagcgtaacgccgacggcagctggcaagtggaaaatctgcgcatggcggatatccgtctacaaagcgaaaaatcgctaaccgacttctttgcgccattacgctctgtcccgtcgttgcagattggtcgcttggaagtcatcgatgctcgtctgcaaggtccggactgggcggtgaccgacctcgatctcagcttgcgcaacatgaccttcagtaaagatgactggcagacacaggaaggcaaactgtcgatgaacgccagcgagttcatttatggttcgctgcatttatttgacccgattataaacgcggaattttccccgcagggcgtagcgctgcgccagttcaccagccgctgggaagggggtatggtcagaacgtcagggaactggctgcgtgacggtaaaacgttgatccttgatgatgcggcaattgccgggctggaatataccttgccgaaaaactggcaacagttgtggatggaaacgacacccggttggttaaacagcctgcaactgaagagatttagcgccagccgcaatctgatcattgatatcgaccctgacttcccgtggcagctcaccgcgctcgatggttacggtgccaacctgacgctggttaccgatcataaatggggcgtctggagtggctcggcgaatctgaatgccgccgccgcgacattcaatcgtgttgatgttcgtcgcccgtcgctggcgctgaccgccaacagcagcacggtgaatatcagcgaactgagtgcatttactgaaaaaggcattctggaagccaccgcaagtgtttcacaaacgccacaacgtcagacccatatcagcctgaatggacgcggtgtgccggtgaatattttgcaacaatggggatggcctgaattaccgttgactggcgacggcaatattcagcttaccgccagtggagatattcaggccaatgccccgctgaaacctacggttagcgggcaattgcatgccgtgaacgccgcaaagcagcaagtgactcaaaccatgaatgcgggcgtcgtttccagcggtgaagttacatcgacggagccggtgcggtaa

SEQ ID NO: 472032 - DNA, 2319 bp, Shigella flexneri
atgaaaattagcgatggaaactggttgattcaacctggcctcaatttgattcacccgcttcaggtattcgaggttgaacagcaggataatgaaatggtggtctatgctgccccccgtgatgtgcgtgaacgtacctggcagcttgatacgcctttatttacgctgcgctttttctccccacaggaaggtattgtcggtgtgcggattgagcattttcagggggcgctgaataacggtcctcattatccgctcaatattttgcaggacgtgaaggtcacaatcgaaaacacagaacgttatgctgagtttaaaagtggcaacttaagcgcgcgtgtcagcaaaggtgagttctggtcactggattttctgcgcaacggcgaacgtattaccggtagtcaggtgaaaaataatggctacgtgcaggacacgaataatcaacgcaattatatgtttgagcggcttgatcttggcgttggcgaaacagtttacggtctgggagagcgctttactgccctggtgcgcaatggccagacggtagagacctggaaccgggacggcggcacaagtactgaacaggcgtataaaaatatcccgttctacatgactaaccgtggttatggggtactggtcaatcatccccagtgtgtctcttttgaagtgggatcggagaaagtctccaaagtgcagttcagcgttgagagtgaatatctcgaatactttgttatcgacggcccgacgccgaaagcggtacttgatcgttatacccgctttactggtcgtccggcgctgccgcccccgtggtccttcggcctgtggctaaccacttcatttaccaccaactacgacgaagcgacggtaaacagctttatcgatggtatggcggaacgcaatctgccgctgcatgttttccactttgactgtttctggatgaaagccttccagtggtgcgattttgagtgggacccgctgactttccctgacccggaagggatgatccgccgcctgaaagcgaaagggctgaaaatctgcgtctggattaacccctatatcggtcaaaaatcccccgtctttaaagagttacaagagaaaggctatttactcaaacgcccggacggttcgctatggcagtgggataaatggcagccaggtctggcgatttatgactttaccaatccggatgcctgcaaatggtacgccgacaaactgaaaggtctggtcgcgatgggcgttgattgctttaagaccgactttggcgaacgtatcccaattgatgttcagtggtttgacggttccgatccgcagaaaatgcataaccattatgcgtacatctacaacgaactggtgtggaacgtgctcaaggacaccgttggtgaggaagaagctgtcttgtttgcccgctcggcctccgtcggtgcgcagaaattcccggtacactggggtggcgattgttacgctaactacgaatcaatggcggaaagcctgcgcggtggtttgtctattggcctttcaggttttggcttctggagccacgatatcggcggctttgaaaataccgctccggcgcacgtttacaaacgctggtgcgcgtttggtttgctctccagccatagccgtttacacggtagcaaatcttatcgtgtgccgtgggcctacgatgatgagtcctgtgatgtggtgcgcttcttcacgcaactgaaatgccgcatgatgccgtatctgtatcgtgaagctgcgcgtgcgaacgcgcggggtacgccgatgatgcgggccatgatgatggagttcccggacgatccggcttgtgattaccttgaccgtcaatacatgttaggcgacaacgtgatggttgcgccggtgttcactgaagcgggcgatgtgcagttctacctgccggaaggtcgctggacacacctgtggcacaacgatgaactcgacggtagtcgctggcataaacagcagcacggcttcctgagtctgcccgtttatgtgcgtgataacactctactggcgctgggcaacaacgatcaacgtcccgattacgtgtggcacgaaggcacggcattccacctctttaatctgcaagacgggcatgaagccgtctgtgaagtgcctgctgctgacggatcggtgatctttactttaaaagcagcacgtactggcaacacgattactgtgactggtgcgggcgaggcgaagaactggacgctgtgcttgcgcaatgttgtgaaagtaaatggtctgcaaggcggttcgcaggctgaaagtgagcaggggctggtggtgacgcctcaagggaatgcgctgacaattacgttgtaa

SEQ ID NO: 472033 - DNA, 987 bp, Shigella flexneri
ttgggtggtgtaatcaccaatgacccgactcagcgtatctcgctgcaatcctggcgttttgtgctggcgaccgcgggaggcatgctttctactgttctgatgatgccactggttaatttaattggcggtgataataaaccactcggtttccagggcggtatcgtggtcctttccgtggtggcattcatgatgctggcattttgtttcttcaccactaaagaacgcgttgaagcaccatctacaacaacgtctatgcgggaagatttacgtgatatctggcaaaacgaccagtggcggattgtcggtttactaaccattttcaatatcctggcggtgtgcgtacgcggtggggcgatgatgtattacgtcacatggattttgggcacgccggaagtgtttgtcgcttttctcaccacttattgcgtgggtaacctgattggttccgcactggcaaaacctctgaccgactggaaatgtaaagtcactatcttctggtggacgaacgccctgctggcagtgattagcctcgcgatgttctttgttcccatgcaggccagcatcactatgtttgtcttcatcttcgtgattggtgtgttgcatcaactggtgacacctatccagtgggtaatgatgttcgataccgtcgactacggcgagtggtgcaatggtaaacgcctgaccgggatcagttttgctggcacgctgtttgtgctcaaactggggttggccttcggcggcgctcttatcggctggatgctggcttatggcggatatgatgcggcagaaaaagcgcagaacagcgccacgattagcatcattattgcgctattcacgattgttccggcgatctgttatttgctgagcgcgattatcgctaaacgctactactcactcacgacgcacaatctgaaaaccgttatggaacagctggctcagggtaaacgccgttgccagcaacaattcacctctcaagaagtgcagaactaa

SEQ ID NO: 472034 - DNA, 420 bp, Shigella flexneri
atgaggagtgaagtgttgtccgttaaagagaaaattggttatggcatgggagacgccgccagccacattattttcgataacgtaatgttatatatgatgttcttttataccgatatttttggcattcctgccggatttgtcggaaccatgtttttggtcgctcgtgcactggatgcgatttccgatccttgcatggggttgttggccgatcgaacgcgctctcgctggggtaaatttcgtccgtgggtactgtttggcgcactgccattcgggatcgtctgtgtactggcctatagcacgccagatctcagtatgaacggcaaaatgatctatgcagcaattacttacaccctaacttaccttactttataccgtcgtcaatatcccttactgcgcattgggtggtgtaatcaccaatga

SEQ ID NO: 472035 - DNA, 1185 bp, Shigella flexneri
atggcattaaccgatatcaaagtgaaaaccgcaaaacccaaagacaaaccctataagcttgctgatggcggcggtatgtatctactgattaacactaatggttctaaatactggcgcatgaagtaccgctttgctggtaaagaaaagatgctttctattggcgtataccccgatgtaacgctagccgatgctcgcgagaaacgcagtgaagccaggaaactcctcgctgctggaggcgatccaggggaggcaaaaaaggaagaaaaaatcgcgcagcaaatgagtctgaaaaatacgttcgaggctattgctcgcgaatggcaccagttaaaagctgatcggtggtcattacgctatcgtgatgaaatcattgatacctttgaaaaagacatttttccctacattggcaagcgccctattgccgaaatcaaaccaatgaagttactggaagcactgcgtaaaatggaaaaacgtggagctctggagaaaatgcgcaaggtccgccagcgctgtggtgaggtgttccgctatgcaattgttactggccgggcagactataacccagcccccgatcttgccagtgctttagctacaccgaaaaaagtacattttccctttcttactgctaatgaacttccccacttcctcaacgatctggcgggttataccggaagtataatcactaagacagctactcagatcattatgttaaccggcgtacgaacacaagaactgcgttttgcacgctgggaagatatcgattttgagacaaaattgtgggagatcccggcagaagtaatgaagatgaagcgacctcatattgtgccgctctctgagcaggtcattatgctatttaagcagcttgaaccaatctcaaaacatcatcccctagtctttatcggtagaaatgatccccgcaaaccaattagtaaggaaagcattaaccaagtaattgaattacttggatataagggaagactcacagggcacggtttcagacacaccatgagtacaattctgcatgaacaaggctttaattccgcctggattgaaatgcagttagctcatgtggataaaaattccatcaggggtacctataatcatgccctgtatctcgatggccgccgtgaaatgatgcaatggtacgctgattacattgattcactctccagccgggaaagttaa

SEQ ID NO: 472036 - DNA, 1044 bp, Shigella flexneri
atgaacgatagattatgctttgaagtgcacgataacaagggttatttcgtatttccggatacctggtttggcccattgctgggggagtttgaagaagtgcttgatgcatacgacgctgatgaaatcagcgagacgagttacatcaacaaactccgacgccttgctcaacgggagccggactttattgatatacacgctcatctggcatatgcatttctggaacagaatgccccgcgtaaggcactgaacgccgctcttaaaggactggcggcaggtaatcgtatcatcccggaaagtttctgtggtgaaataatctggatgcatcccgaaaaccggccttatctgcgcgcgctttatgcagcaattctcgcaaatgtgcacttacagcgccatcaggatgcggttatgctcactgataaaatactggcatacaatcctgaagataatcagggggctcgctggttgttgggttcagagctgttacgcaccggcgatcatgagcgagccttcagtgtactgaaagagcatgctgatgaattttcaccttactggtatgaactcggtctcctgcattttctgaacggggaacatgttaaggccgccacagcttttcgccatggctttgccacaaacacttacatcgcagaaatgctgtgcggaaatctgcatccatttccacttgctgtgtggcatgacttctccggctctctggatacggcagaagattactatgcaacatactcaccattatggggacaatatccggaagcattgctgtttgtaaactggctctataaccattcctccgtgctgcatgaacgatcagaaatcattaaatgcgccgaaatgctgattcaggaagatgatttcgaaatatgcgaaagtattttaagacagcaggagcacctgtggaaaagaattgacaagacactttctgaggaaattgtacagaaatgcagaaatatgaacggtgaatatatctggccctggatattgcccttttccgcagcagggatgaaacattcaagcatccagtatcagtag

SEQ ID NO: 472037 - DNA, 462 bp, Shigella flexneri
atggatgaaaatgctttaaggtttgcctcatactggcgcaactcgcttgcagatgctgagtcaggaaagggctgttttgaacggaaagacgcccaaaatttcactcactggcatgggatagcggcgggacgtcttgacgaagcgattgtcaataaattttttaagggagaaaaagacgatgtcgaaactgtcaatgtcatcttacgcccaaaagtttatttccggttactgcagcatggtaaggaccgttccgcaggcacgcctgatattgttacaccgatagtgacgccagccttgctaagccgtgagggttttttatatccgacgccagcgacctccattcccagagacctgcttgaacctttgccaaaaggagcattttcgattggtgagattgggcagtatgacaaatacaagacgacccatactgatcctacccacgtaatgtggacacggccctaa

SEQ ID NO: 472038 - DNA, 492 bp, Shigella flexneri
gtggcccgaaaccagaagtgggcgggtgacatcacgtacttgcgtaccgatgagggctggttgtatctcgcagtagtcatcgacctgtggtcacgcgccgtcattggctggtcgatgtcaccgcgaatgacagcacaactggcctgtgatgcactgcaaatggcgttgtggcggagaagacgcccggaaagcgtcattgttcatacggaccgtggtggtcaatactgttcaggggattatcaggcaatgctgaagcgacacaacctgcgtggcagtatgagtgcgaaaggctactgttatgacaatgcctgtgtggaaagcttctttcattcgctgaaggtggaatgtatccacggggaacgctttagcagccgggaaataatgcgggcaacggtgtttaattatatcgagtgtgattacaatcgctggcgtcgtcacagtgcctgtggcggtctcagcccggaacaatttgaaaaccataatctcgcttag

SEQ ID NO: 472039 - DNA, 393 bp, Shigella flexneri
atgaagtatgtctttatcgaaaatcatcgggcagagttcagcatcaaagcgatgtgtcgtgtacttcgggttgcccgcagcggctggtatgtctggctcaggcgtcgtcaccagatgagcctgcgccaacagtttcggctcacctgcgatgccgctgtccataaggcattctttgaggcaaagcagcgatacggtgctccccgccttgctgacgaactgccggagttcaatattaaaaccattgccgccagcctgcgtcgtcaggggctgcgggcgaaagccagccggaagttcagcccggtcagctaccgtgcacatggcctgcccgtattggagaatctgctggagcaggacttcagcgccagtggcccgaaaccagaagtgggcgggtga

SEQ ID NO: 472040 - DNA, 300 bp, Shigella flexneri
atgacaaaaccagtatcaatcagcaagaagccccgtaaacaacatacgcctgaatttcgtaacgaagccctgaaactcgctgaacgcatcggtgtggccgccgcagcccgtgaactcagcctgtatgaatctcagctttatgcctggcgcagtaaacagcagcaacaaatgagttcgtcagagcgcgaaagcgaactggccgctgaaaatgtccgccttaaacgacaactggcggagcaggctgaggaactgtccatcctccaaaaggccgcgacatacttcgcgaagcgcctgaaatga

SEQ ID NO: 472041 - DNA, 519 bp, Shigella flexneri
atgatgctgttcagtattataataatgttattatcaccaaagataactcatgcaaatgagaaagtaatatgtcaaaacagtgcatcctttgtgaccaaagagtttatctgcggcactatacttgtctcattaatactcagttctctattttgctacatatcaatatcaccatcaattttcatgcatacttatggcctgagtacttttagttactcaattattttctccttctcagttttatttttcataatcggaaatcaattatcaaagattgaaaaattatccaacctatggtttttattacccaatagccaattttatcgcattacaaataaatggttcaaaaacaggatttgccgcatctattacaggttttactcaaacaataagcgctggtacaatcagtttcctgtcagtaaccgtaagcgacaacggtgttggtcccggaactactttaggtcttggttcactaataacttcattactgtcaatagccgtaatcgccattgcaggaaataa

SEQ ID NO: 472042 - DNA, 372 bp, Shigella flexneri; identical to SEQ ID NO: 471761

SEQ ID NO: 472043 - DNA, 225 bp, Shigella flexneri
atgtcgcgtaaaggtaactgttacgacaacgctccgatggaaagcttctggggaacgctgaaaaatgagagcctgagccactatcgttttaataaccgggatgaagccatctcagtaatacgggaatacattgagattttctacaatcgtcagcgccgtcactctcgtctggggaatatctccccggcagccttcagggaaaaatatcatcagatggctgcttaa

SEQ ID NO: 472044 - DNA, 1392 bp, Shigella flexneri
atgaatatattcgatcactatcgccagcgatatgaagctgccaaggacgaagagttcacactgcaggagtttcttaccacttgtcggcaagatcgcagtgcttatgccaacgcggctgagcggctattgatggctatcggtgagcctgtcatggtcgatacagcccaggaccccagactttctcgactcttttctaaccgggtcattgcacgttatccggcatttgaagagttttacggcatggaagacgcgattgaacagattgtctcttatctgaaacacgcggctcaggggctggaagagaagaaacaaatcctgtatctgctggggcctgtgggtgggggtaaatcatcgcttgctgagcgactgaaatcattaatgcagctcgtaccgatttatgtattgagcgccaacggtgagcgtagcccggtcaacgatcatccgttctgtcttttcaatccgcaggaagatgctcagattctggaaaaagagtatggcattcctcgccgttatctcggcaccatcatgtcgccatgggcggcaaaacgcctgcatgaatttggtggcgatatcactaagttccgggtagtgaaggtctggccgtcaattctgcaacaaattgctatcgccaaaacggaacccggtgatgagaacaaccaggacatctccgcgctggttgggaaagtcgatattcgtaaactcgaacactacgcgcagaatgacccggacgcctacggctattccggtgcgctgtgccgcgccaatcaggggatcatggaattcgttgagatgtttaaagcaccgataaaagtgctgcatcccttgttaaccgccactcaggaaggtaactacaacgggacggaaggtatctccgccctgccgttcaacgggattattctcgcccactcgaacaagtccgaatgggtcactttccgtaataacaaaaacaacgaagccttcctcgaccgtgtttacatcgtgaaggtgccgtattgcttgcgcatttccgaagagatcaaaatctacgagaaattgcttaatcacagtgaattgactcacgccccatgcgcccctggcacgctcgaaacactgtcacgtttttccattctttcgcgcctgaaagagccagaaaactccagcatttattcaaagatgcgggtttatgatggcgaaagtctgaaagacaccgatccgaaagccaagtcgtatcaggaatatcgtgactacgatcgtgactacgccggtgtcgatgaagggatgaacggtctgtcgacgcgttttgcgtttaagatcctctcccgcgtgttcaacttcgatcatgtagaagtggcggcaaacccggtccatctgttctacgtcctggaacagcagattgaggtgtactggcaatag

SEQ ID NO: 472045 - DNA, 747 bp, Shigella flexneri
gtgaccaaactcaaacttctggcacttggagtgcttatcgcaacgtctgcaggcgtagcgcacgctgaaggtaaattttccctgggcgcaggcgtaggtgtcgttgagcacccatataaagattacgataccgatgtttacccagtaccggtaatcaactatgaaggcgataacttctggttccgtggcttaggtggtggttactacctgtggaatgacgcaacggataaactttcaattaccgcttactggtcgccgctttacttcaaagcgaaagacagtggcgatcaccaaatgcgtcacctggatgaccgtaagagcaccatgatggctggtctgtcttatgctcactttacccagtacggttacctgcgtaccaccctggctggcgataccctggataacagcaacggcattgtctgggatatggcctggttgtatcgttacaccaacggtggcctgaccgtgactccgggtattggtgtgcagtggaacagcgaaaaccagaacgaatactattatggcgtatcgcgcaaagagtccgctcgcagcggtctgcgtggctataacccgaatgacagctggagcccttaccttgagctgagcgccagctacaacttcctcggcgactggagtgtttacggtaccgcgcgctacacccgtctgtctgatgaagttactgacagcccgatggtggataaatcctggactggcctgatttctaccgggatcacctacaaattctga

SEQ ID NO: 472046 - DNA, 762 bp, Shigella flexneri
atgcaacaaaaaatgattcaatttagtggcgatgtctcactgccagccatagggcagggaacatggtatatgggcgaagatgccagtcagcgcaaaacagaagttgctgcactacgcgcaggcattgaactcggtttaaccctcattgataccgccgaaatgtatgccgatggcggtgccgaaaaggtggttggggaagcattaaccggtctgcgagagaaggtctttctcgtctctaaagtctatccgtggaatgctggcgggcaaaaagcgataaatgcatgcgaagccagtttacgccgtctcaatactgactatctcgatctctacttattacactggtctggcagtttcgcttttgaagagactgttgctgcgatggaaaaattgatcgcccagggaaaaatccgtcgctggggcgtttctaaccttggttatgccgatatgcaggaactctggcagctgccggggggaaatcagtgtgccactaatcaggtgctttaccatctcggttcacgagggattgagtacgatctactcccctggtgccagcaacagcagatgccggtgatggcttacagtccattagcccaggccgggcggttgcgcaatggactgttaaaaaacgcggtagtcaacgaaattgcacatgtccaacaacatgcagctgcgcttgaggtcgaactttcgtcagcggaattagctatgctggataaggcatatccggcaccaaaaggaaaaactgcgctggatatggtgtga

SEQ ID NO: 472047 - DNA, 885 bp, Shigella flexneri
atgattaagaaaatttttgcccttccggtcatcgaacaaatctcccctgtcctctcccgtcgtaaactggatgaactggacctcattgtggtcgatcatccccaggtaaaagcctcttttgcattacagggcgcacaccttctctcgtggaaacctgcgggtgaagaagaagttctgtggttgagcaacaacacaccgttcaaaaatggcgtcgctattcgcggtggcgtaccggtttgctggccgtggtttggtccggcggcacaacaaggtctgcctgcgcacggttttgcccgcaacctgccgtggacgctgaaatcacatcatgaagatgctgatggcgtagcgctgacttttgaattgacacaaagcgaagagacgaaaaaattctggccgcacgactttacgctgttagcgcatttccgcgtgggtaaaacctgtgaaatcgatcttgaatcacatggcgaatttgaaaccacctctgccctgcatacctactttaacgtgggtgatatcgctaaggtaagcgtcagtgggctgggcgatcgcttcattgataaagtgaatgacgcgaaagaagatgtactgaccgacggtattcagaccttccctgaccgtaccgatcgcgtgtatctgaatccgcaagattgcagcgtgattaatgatgaagcgctgaatcgtattatcgccgtaggccaccagcatcatctgaacgttgtcggctggaacccgggaccggcgctttcagttagcatgggcgacatgccggacgatggctacaagacctttgtttgtgtagaaacggcttacgcttcagaaacgcaaaaagtcaccaaagagaaacctgcacatctggcgcaatccattcgcgttgccaaacgttaa

SEQ ID NO: 472048 - DNA, 996 bp, Shigella flexneri
atgactatcaaagtaggtatcaacggttttggccgtatcggtcgcattgttttccgtgctgctcagaaacgttctgacatcgagatcgttgcaatcaacgacctgttagacgctgattacatggcatacatgctgaaatatgactccactcacggccgtttcgacggtaccgttgaagtgaaagacggtcatctgatcgttaacggtaaaaaaatccgtgttaccgctgaacgtgatccggctaacctgaaatgggacgaagtgggtgttgacgttgtcgctgaagcaactggtctgttcctgactgacgaaactgctcgtaaacacatcaccgctggtgcgaagaaagtggttatgactggtccgtctaaagacaacactccgatgttcgttaaaggcgctaacttcgacaaatatgctggccaggacatcgtttccaacgcttcctgcaccaccaactgcctggctccgctggctaaagttatcaacgataacttcggcatcatcgaaggtctgatgaccaccgttcacgctactaccgctactcagaaaaccgttgatggcccgtctcacaaagactggcgcggcggccgcggcgcttcccagaacatcatcccgtcctctaccggtgctgctaaagctgtaggtaaagtactgccagaactgaatggcaaactgactggtatggcgttccgcgttccgaccccgaacgtatccgtagttgacctgaccgttcgtctggaaaaagctgcaacttacgagcagatcaaagctgccgttaaagctgctgctgaaggcgaaatgaaaggcgttctgggctacaccgaagatgacgtagtatctaccgatttcaacggcgaagtttgcacttccgtgttcgatgctaaagctggtatcgctctgaacgacaacttcgtgaaactggtatcctggtacgacaacgaaaccggttactccaacaaagttctggacctgatcgctcacatctccaaataa

SEQ ID NO: 472049 - DNA, 414 bp, Shigella flexneri
atggcgaataaaccttcggcagaagaactgaaaaaaaatttgtccgagatgcagttttacgtgacgcagaatcatgggacagaaccgccatttacgggtcgtttactgcataacaagcgtgacggcgtatatcactgtttgatctgcgatgccccgctgtttcattccgaaaccaagtatgattccggctgtggctggcccagtttctacgaaccggtgagtgaagaatccattcgttatatcaaagacttgtcacatggaatgcagcgcatagaaattcgttgcggtaactgtgatgcccatctggggcatgtctttcccgacgggccgcaaccaacaggcgaacgttattgtgttaactctgcttctttacgcttcactgatggcgaaaacggcgaagaaatcaacggttga

SEQ ID NO: 472050 - DNA, 273 bp, Shigella flexneri
atgaatcttgatgacattatcaacagcatgacgcctgaggtataccagcgtttgtcgaccgccgttgaactggggaaatggcctgatggcgttgcgttgaccgaggaacaaaaagagaattgcctgcaactggtgatgctgtggcaagcccgccataataccgaagcacagcatatgacaattgacacaaatggtcagatggtcatgaagagcaaacagcagttaaaagaagattttggtatctcagcaaagcctattgccatgtttaagtaa

SEQ ID NO: 472051 - DNA, 1077 bp, Shigella flexneri
atgaaagcactggctcggtttggcaaggcctttggcggctacaagatgattcatgtcccacaacccatttgtggcccggaagacgtagtgattgaaattaaagccgcggcaatctgcggcgcagacatgaagcactacaatgtcgatagcggttctgatgagtttaactctatccgcggccatgagttcgcaggttgtattgcgcaggttggtgaaaaagtcaaagactggaaagtggggcaacgcgtcgtgtcggataacagcggtcacgtttgcggcgtttgtccggcctgtgaacagggtgattttctgtgttgtacagaaaaagtaaaccttggtctggataacaatacctggggcggtggtttttccaaatattgtctggttcctggtgaaattctcaaaattcatcgtcatgcgttgtgggaaatccctgatggtgttgattatgaggacgcagccgtacttgaccctatctgtaatgcctataaatccatcgcgcagcaatcgaaattccttcctggtcaggatgttgtcgtcattggcactggcccactcgggctgttttccgtacaaatggcgcggattatgggggcggtaaatatcgtcgtcgttggtctgcaagaagatgtggcggtccgcttcccggttgcaaaagaactgggggcgacggcagtagtaaatggttctaccgaagatgtggtggcgcgctgccagcaaatttgtggcaaagataatctgggactggtgattgaatgctccggtgccaatatcgcactgaaacaagccatcgaaatgctccgcccgaatggggaagtggtacgcgttggaatgggcttcaaacctcttgatttctcgattaatgacattaccgcctggaataaaagcatcattgggcatatggcctatgactccacctcatggcgtaacgctatccggctattagccagcggcgctatcaaagtcaaaccgatgatcacgcatcgtatcggcctgtcgcaatggcgcgaagggtttgatgcgatggtcgataaaaccgcaatcaaagtgatcatgacttacgactttgatgaataa

SEQ ID NO: 472052 - DNA, 1380 bp, Shigella flexneri
atggaacagataacaaaaccgcattgtggtgcacggctggatcgcttaccggattgccgctggcattcgtcaatgtttgccatcgtcgcgtttggcttgcttgtctgctggagtaatgccgttggtggcttgatcctcgcgcagctgaaagcgttgggctggacagataattccactacagccacattctcagcaatcacgaccgccggaatgtttctcggtgcgctggtgggcggcatcattggcgacaaaaccggtcgcagaaatgcgttcatcctctatgaggccattcatattgcctcgatggttgtcggtgctttctcaccgaatatggattttcttattgcctgccgttttgtgatggacgttgggctgggagctttactggttacactgtttgctggtttcaccgaatatatgcccggtagaaatcgcggaacgtggtccagtcgggtttcctttattggcaactggtcatatccgctctgctcactgattgcgatgggactcacgccgctgattagtgcagagtggaactggcgggtacaactgcttattcctgcaatattgtcgcttatcgctacggcgctggcctggcgctactttcctgaatccccgcgctggctggaatcgcgcggacggtatcaggaagccgagaaagtcatgcggagtatagaagaaggcgtcatacgccagacgggtaaacctttgccgcctgtggttattgctgatgacggtaaagcgccacaagcggtgccgtattcagccttactgacaggagtattactgaaacgcgtgatattaggctcttgtgtgctgattaccatgaacgttgtgcagtacacactaattaactggttgccaacaatattcatgacccaggggattaatttaaaagactcgattgttttaaataccatgagtatgtttggcgcgccatttggtatttttattgccatgctggtgatggataaaattccgcgtaaaacaatgggtgtggggctattaatcctgattgcggtgctcggatatatctattcactgcaaaccagtatgttgctcataacgctgattggtttcttcctgattactttcgtctatatgtacgtttgctatgcctcggcagtgtatgtccctgaaatctggccgacagaggccaaactccgtggctccggtctggcgaatgcggtagggcgaatcagtggtattgccgcaccttatgccgttgcagtgctgctcagtagttatggtgtaacgggagtctttattcttctgggggctgtttcaaatattgtcgcaattgctatcgccaccattggaattgaaaccaaaggtgtctccgttgaaagtttaagtattgatgcagtagccaataaataa

SEQ ID NO: 472053 - DNA, 777 bp, Shigella flexneri
atgaaaaattcaaaagcaatattgcaggtgccgggcacaatgaaaattatttcagcagaaataccagtgcctaaagaagatgaagttttgattaaagtagaatatgtcggtatttgtggttcagatgtacatggttttgaatcaggcccgtttattccgcctaaagacccaaatcaagaaattggcctgggtcatgaatgcgccgggacggttgtggctgtgggaagccgcgtgcgcaaatttaaaccgggggatcgggtaaatatcgaacctggcgttccttgcggtcactgtcgttactgtctggaaggcaaatataacatctgcccggacgttgattttatggcgacacaacccaactaccgcggcgcattaacgcactatctgtgtcatccggagagctttacttacaaactgcccgacaatatggacacgatggaaggggcgctggtggagcctgccgcagtcgggatgcatgccgcgatgctggcagatgttaaaccgggtaagaagataattattctgggagcaggttgtattggtttgatgacgttgcaagcgtgcaaatgcctgggcgcaacggaaattgccgtcgttgatgtactggaaaaacgtctggcaatgggggaacagcctggtgcgacagtggttattaatggcgcaaaagaggacactattgcacgctgtcagcaatttaccgaagacatgggcgcagatattgttttcgaaacagcgggttctgcggtcaccgttaaacaggcacctttaatctggtaa

SEQ ID NO: 472054 - DNA, 270 bp, Shigella flexneri
atgcgcggcggtaaaattatgattgttggtactgtacccggcgattcggcaatcaatttcctcaaaatcaatcgcgaagtcactatccagacggtattccgctatgccaatcgttatccggtcacgattgaagctatttcttcagggcgattcgatgtgaaatcgatggtgacgcatatttacgattatcgggatgtacaacaggcatttgaagagtcagttaacaacaaacgcgacattattaaaggcgttattaaaattagcgattaa

SEQ ID NO: 472055 - DNA, 837 bp, Shigella flexneri
atgctcgcagatatcagatattgggaaaacgatgccacaaataaatattatgcaattgcccattttaacgtatggaatgcagaaatgttgatgggcgttaaagacgcagccgaagaagcgaaatccccggttattatttcttttagtacaggttttgtcggtaacacctcatttgaagatttctctcacatgatggtatcaatggcacaaaaagcaacggtgccggtaataactcattgggatcatggtcggagtattgagattattcataacgcctggactcatggtatgaattcattaatgcgtgatgcttctgcatttgatttcgaagaaaatattcgtttaaccaaagaggctgttgatttctttcatccgctgggtattccggtagaggcggaattagggcatgtcggtaatgaaaccgtttatgaggaagcgctggcgggctatcactataccgatcctgaccaggcggctgaatttgttgaacgtacgggctgtgactcattggctgtcgccatcggcaaccagcatggggtttatacgtcagagccgcaattgaactttgaggtcgtcaaacgcgtacgcgatgctgtttctgttccgctggttttgcatggcgcatcggggatcagtgatgccgacattaaaactgcaatttcgttgggtattgcgaaaatcaacattcatacggagctctgtcaggccgcaatggtagcagtgaaagaaaaccaggatcagcctttcctgcatttagaacgtgaagtacgtaaagctgtaaaagaacgggcattggaaaaaattgaactgttcggttctgatggcaaagcggaataa

SEQ ID NO: 472056 - DNA, 948 bp, Shigella flexneri
atggataatctcgacgttatttgtataggtgccgctattgttgatattccattacaaccggtcagtaaaaatatctttgatgtagattcttatcctcttgaaagaatcgcaatgagcaccgggggcgatgcaataaatgaagcaacaattatttctcgtctggggcatcgtaccgcattaatgagccgcattggtaaagatgcctcagggcaatttattctcgaccattgtcgcaaagagaatattgatattcaaagcctgaaacaggacgtcagcatagatacatctattaacgttggactggtgacggaggatggcgagcggacgtttgtcacgaaccgtaacggcagtttgtggaaattaaatattgacgatgttgattttgcgcggtttcctcaggcgaaattattatcactggccagtattttcaacagtcctctattggatggtaaagcgctaacagaaatttttacgcaagcgaaagcccggcagatgatcatttgtgccgatatgatcaaaccgcggttgaatgaaacgctggatgatatttgcgaagcattgagttatgtcgattatctgtttccaaattttgccgaggaaaaattactcacagggaaagagacactggatgaaattgctgactgctttcttgcgtgcggcgtaaaaacggtggtgattaaaacgggtaaagacggctgctttatcaagcgtggtgacatgacgatgaaggtgccggcggtcgcaggaataaccgccatcgacaccattggcgcgggcgataactttgcttcaggttttattgcggcactgttagaaggcaaaaatctgcgtgaatgcgcacgctttgccaatgcaacggcggctatctcggttctaagcgtcggtgccaccaccggcgtaaaaaacagaaagctggtcgaacaattgctggaagaatacgaaggataa

SEQ ID NO: 472057 - DNA, 981 bp, Shigella flexneri
atgaaaaagatacctttaggcacgacggatataacgctttcgcgaatggggttggggacatgggccattggcggcggtcctgcatggaatggcgatctcgatcggcaaatatgtattgatacgattcttgaagcccatcgttgtggcattaatctgattgatactgcgctaggatataactttggcaatagtgaagttatcgtcggtcaggcgttaaaaaaactgccccgtgaacaggttgtagtagaaaccaaatgcggcattgtctgggaacgaaaaggaagtttattcaacaaagttggcgatcggcagttgtataaaaacctttccccggaatctatccgcgaagaggtagaagccagcttgcaacgtctgggtattgattacatcgatatctatatgacgcactggcagtcggtgccgccattttttacgccgatagctgaaactgtcgcagtgcttaatgagttaaaggctgaagggaaaattcgcgctataggcgctgctaacgtcgatgctgaccatatccgcgagtatctgcaatatggtgaactggatattattcaggcgaaatacagtattctcgaccgggcaatggaaaacgaactgctgccgctatgtcgtgataatggcattgtggttcaggtttattccccgctagagcagggattgttgaccggcaccatcactcgtgattacgttccgggcggcgctcgggcaaataaagtctggttccagcgtgaaaacatgctgaaagtgattgatatgcttgaacagtggcagccactttgtgctcgttatcagtgcacaattcccactctggcactggcgtggatattaaaacagagtgatttaatctccattcttagtggggctactgcaccggaacaggtacgcgaaaatgtcgcggcactgaatatcaacttatcggatgcagacgcaacattgatgagggaaatggcagaggccctggagcgttaa

SEQ ID NO: 472058 - DNA, 759 bp, Shigella flexneri
gtggcggcaaaagacaggattcaggcaattaagcaaatggttgccaacgataaaaaggtgacagtctcaaatttgagtgggatttttcaggtaaccgaagaaaccattcgccgcgatcttgagaagctggaagatgaaggctttttgaccagaacctatggtggtgctgttttaaatacagcggtgttgacggagaatatccatttttataagcgcgcttcatcgttttatgaagagaagctgcttattgcacgcaaggcactaccctttatcgacaataaaaccaccatggcagccgattccagtagtaccgtaatggaattgctcaaattgttacaggaccgtagtgacctgacgttgctaaccaactcggcggaagcgattcatgttctggctcagtcagaaattaaagtcgtttcaacgggtggggaactaaacaaaaatacactttccctgcaaggaagaattactaaagagatcatcagccgctaccatgtcgatatcatggtaatgagttgtaaaggtcttgatattaacagcggcgcgctggactctaatgaagcggaagctgaaatcaaaaagacaatgatccgtcaggcgacagaagttgcgttattggttgatcactctaagtttgatcgtaaagcttttgtccagttagctgactttagtcatattaattatataataactgataaatcaccgggtgcagagtggatagcattttgcaaagacaataatatccagctggtgtggtaa

SEQ ID NO: 472059 - DNA, 1359 bp, Shigella flexneri
atggaacaatatgatcaaattggcgcaagactggaccgcttgcctttggcccggtttcattatcgtatatttggtataataagctttagtctgttattaacggggtttttgagttactcaggtaatgtcgtcttagcaaagctggtaagcaatggatggtcaaataatttcctctatgccgcctttacctcggcattaatgtttggttatttcatcggctcacttactggtgggtttattggtgactactttgggcggcgcagggcgtttcgcataaatcttctcatcgtcggtattgctgcaacaggggccgcttttgtccctgatatgtactggctcattttctttcgcttcctgatgggaacaggaatgggggcgctgattatggttggctatgcctcatttacggagtttatccccgcgacggtgcgtggaaaatggtccgcgcggctctcatttgttggtaactggtcgcccatgctgtctgcggcgataggcgtggtggttatcgctttttttagttggcgaataatgtttcttctgggtggtattggcatactgttagcctggtttctctcaggtaaatactttatcgagtcgccacgatggctggaagggaaagggcaaatcgccggtgcagaaagccaacttcgtgaagtagagcagcaaattgaaagggagaagagtattcgtttaccccagcttactttgaaccagagcaacagcaaggttaaggtaatcaagggtaccttcaggctcctgtttaaaggggaaatgttacgacgtacattagttgcgataactgttttaattgcaatgaacatttcgctttataccattaccgtatggataccgaccatatttgttaactccggcattgatgtcgataaatcaatattaatgaccgctgttattatgattggtgctccggtaggaatatttattgcggcattaattattgatcattttcctcgtcgattatttggctccgccttacttattattattgccgtgttaggctatatctattcaagtcagactacagagtgggcgattttaatctatggtctggtgatgatcttctttttatacatgtatgtttgcttcgcgtcggcggtttatatcccggagctttggccaacgcatttacgcctgcgcggttcgggtttcgttaatgccgtcggacggatcgtcgcagttttcacgccctatggcgttgcggcattattaacacattatgggtcgatcacggtgtttatggtgcttggtgtcatgttagtgctctgtgcgctggttctctccatttttggcatcgaaacgcggaaggtgtcgctggaagagatttctgaggtgaattaa

SEQ ID NO: 472060 - DNA, 642 bp, Shigella flexneri
atgccccatcgcgccctgttactggtcgatttacaaaatgatttctgtgctggtggcgcgctcgccgtaccggaaggtgacagtacggtggaggttgctaaccgccttattgactggtgccagtcgcgcggagaagcggttatcgccagccaggactggcatccggcgaatcacggcagctttgccagccagcacggcgtagagccttatacgccaggccaactcggcggcctgcggcaaactttctggcctgaacactgtgtgcagaacagtgaaggcgcacaattacatccgttactgaatcaaaaagagatcgcagcggtgttccataaaggcgaaaatcctttagttgacagttacagtgccttttttgataacggacgtcggcagaaaaccgcgcttgatgactggttgcgcgatcatgaaatcgatgaattgatcgttatgggcctggctactgactattgcgtgaagtttaccgtgctggacgcgttacagttaggttataaggtaaacgtgattaccgatggctgtcgtggcgtgaatatccagccccaggacagtgcacacgcgtttatggagatgtcagcagctggggcaacgctatatacgctggcagactgggaagagacgcaggggtaa

SEQ ID NO: 472061 - DNA, 1017 bp, Shigella flexneri
atgcaaaagaaatcaatttacgtcgcctacacgggcgggaccatcgggatgcagcgttccgagcagggttatattccggtgtcaggtcatctacaacgccaactggcgctgatgccggaattccatcgcccggagatgccagatttcaccattcatgaatatacgccgttgatggattcttctgatatgacgccggaagactggcagcatattgctgaagatattaaagcgcactatgacgactatgatggttttgtcattctacacggtaccgacacgatggcgtataccgcctctgcgctgtcgttcatgctcgagaatctcggtaaaccggtcattgtgacagggtcacaaatcccgctggctgagttacgctctgacggacaaattaatctgctgaatgcgttgtacgttgcggcgaattatccgatcaacgaagtaacgctctttttcaataaccgattgtatcgcggcaaccgcactaccaaagcccatgccgatggttttgatgcgtttgcctctccaaaccttcctccgttactggaagctggtatccatattcgtcgtttgaatacgccacccgccccgcacggtgaaggggaattaatcgttcatccaatcacgccacaaccaattggcgtggtgacgatttatccagggatttctgctgacgtcgtgcgcaattttctgcgccaaccggtgaaagcattgattctgcgctcctatggcgtgggtaatgcgccacaaaacaaagccttcctgcaggaattacaagaagccagcgatcgcggtattgtggtggtcaacctgacacaatgtatgtccggtaaagtgaatatgagtggttatgccaccggtaacgccctcgcccatgccggcgttattgacggtgcagatatgactgtagaagccacgctaaccaaactgcattacctgctgagccaggaactggatactgaaaccattcgcaaggccatgagccaaaacctgcgcggcgaactgacgccggatgattaa

SEQ ID NO: 472062 - DNA, 1857 bp, Shigella flexneri
atgcgaaccctttggcgatttattgccggattttttaaatggacgtggcgtctgctgaatttcgtccgtgaaatggtacttaacctgttctttattttcctcgtactggttggtgtggggatctggatgcaggtcagtggtggtgattcgaaagaaacggccagtcgtggcgcactgctgctggacatttctggtgtgatcgtcgataaaccagacagttctcagcggtttagtaaattaagccgccagctgcttggtgccagttccgatcgtctgcaggaaaactcactgtttgatatcgtcaacaccattcgccaggcgaaggacgaccgcaatatcaccggtatcgtgatggatctgaaaaacttcgcaggcggcgaccagccgtctatgcagtacatcggcaaagccctgaaagagtttcgtgacagcgggaaaccggtttatgccgttggcgagaactacagccaggggcaatattatctcgccagtttcgccaataaaatttggctgtcaccgcaaggcgtggttgatctgcacggttttgctaccaacggtctgtactacaaatcgttgctggataagctgaaagtttccacccatgtgttccgcgtgggtacgtataaatctgccgttgaaccgtttattcgtgatgatatgtcaccggcagcccgcgaagctgacagccgctggattggtgagctgtggcaaaactatctgaatactgttgccgctaaccggcagatccctgctcagcaggtattccctggcgcgcaagggttgcttgagggtttaaccaaaaccggtggcgataccgcgaaatatgcactggaaaacaagctggtcgatgcactggcatcgagtgccgaaatcgaaaaagctctgaccaaagagttcggctggagtaagactgataaaaattatcgcgccatcagttattacgattacgcattgaaaacgccggcagataccggtgacagcatcggtgtcgtcttcgctaatggcgcaattatggatggcgaggaaactcaggggaatgttggcggtgataccactgcggcacaaatccgcgacgctcgccttgacccgaaagtgaaagcgattgtcctgcgtgttaatagcccaggcggcagcgttaccgcgtctgaagtgattcgcgctgaactggcagcagcccgggcagcgggtaagtctgtggttgtatcgatgggcggcatggcggcatctggtggttactggatttccacgccagctaattacattgtggctaaccccagcaccctgaccggttctatcggtatcttcggcgtgatcaccaccgtagaaaatagtctggattcgattggtgttcatactgatggtgtctcaacttcaccgctggcggatgtttctatcaccagggcactgccgccggaagcgcagcagatgatgcaattaagcattgagaatggctataaacgctttatcacgctggttgctgatgcgcgtcattcgacgccggagcaaattgataaaatcgcccagggccacgtctggaccggtcaggatgcaaaagctaacgggctggtcgatagtctcggggatttcgatgatgcggttgccaaagcagcagagctcgcaaaagtgaaacagtggcatctggaatactacgttgatgaaccgaccttcttcgacaaagtgatggacaacatgtctggttctgtccgggcaatgttgccagatgcgttccaggccatgttacctgcaccgcttgcctcggtagcctctaccgttaaaagtgaaagcgacaagctggccgcgtttaacgacccacaaaaccgttatgcgttttgcctgacctgcgccaacgtgcgttaa

SEQ ID NO: 472063 - DNA, 552 bp, Shigella flexneri
atggatgcactcgaactattgatcaatcgccgtagcgcctcccgcctggctgaacccgcgccaacgggtgaacaactgcaaaacatcctgcgtgcgggtatgcgtgcgccggaccataagtccatgcaaccgtggcatttttttgtgattgaaggggaagggtgcgagcgtttcagcgccgtactggaacagggggcgattgctgccggtagtgatgataaagctatcgacaaagcccgtaatgcgccgttccgcgcaccgctcatcatcacggtggtggcgaaatgcaaagaaaatcataaagtcccgcgatgggaacaggaaatgtctgccggatgcgcggtcatggcgatgcaaatggcagccgttgcccagggatttggcggcatctggcgcagtggcgcattaactgaaagtccggtagtgcgtgaagcattcggttgccgtgagcaggataaaattgtcggttttctctacctcggcacgccgcagttgaaagcatctacgtcgattaacgtcccggacccgacgccgtttgtaacttatttctga

SEQ ID NO: 472064 - DNA, 1044 bp, Shigella flexneri
atgagcgagaactcgattcgtttgacccaatacagccacggagctggttgcggctgtaaaatttccccaaaagtgttggaaaccatcctgcacagtgagcaggcgaagtttgttgatccgaatttgcttgtgggtaatgaaacccgcgacgatgcggcggtgtacgatctgggcaatggcaccagcgttatcagtaccaccgacttctttatgccgatcgttgataatcctttcgattttggccgcattgcggcgactaacgccatcagcgatatcttcgcgatggggggcaaaccgattatggcgattgcgatcctcggctggccgattaacaaactttccccggaaattgcccgcgaagtaaccgaaggtggacgctatgcatgccgtcaggcgggtattgcgctggctggcggtcactccatcgatgcgccggagccgatttttggtctggcggtaacggggatcgtaccgaccgagcgggtgaagaaaaacagtaccgcacaagccggatgcaaactgttcctgacgaaaccgctggggatcggcgttcttaccacggctgagaaaaaatcactgttgaaaccagaacatcagggactggcgacggaagtgatgtgccggatgaacatcgcaggcgcgtcctttgccaacatcgaaggcgtaaaagcgatgaccgacgttacgggctttggtctgctgggccacttgagcgaaatgtgtcagggggctggtgtgcaggcacgcgtcgactatgaagcgatcccgaaactccccggtgttgaagagtacattaagttgggcgcagtacctggcggcactgaacgtaactttgccagctacggtcatctgatgggtgaaatgccgcgtgaagtgcgcgatctgctgtgcgatccgcaaacttctggcggtttgctgctggcggtcatgccggaagcagaaaatgaggttaaaactacagccgccgagtttggcattgaactgacggcgattggcgaactggtgccagcgcgcggcggtcgtgccatggttgagatccgttaa

SEQ ID NO: 472065 - DNA, 1962 bp, Shigella flexneri
atgcggttgtttattgccgaaaaaccgagtctggcgcgcgccattgctgatgtcctgcccaaaccgcaccggaaaggcgatggctttatcgagtgcggtaatggtcaggtggtgacttggtgtatcggtcacctgcttgagcaggcgcagccagacgcctacgacagccgctatgcgcgctggaatcttgcggatttgccgattgtcccggaaaagtggcaattacagccacgaccctccgtgaccaaacaacttaacgtcatcaaacgcttcctgcatgaagccagcgaaatcgttcacgccggggacccggatcgtgaagggcaattgctggtggatgaagtgctggactatctgcaactggcaccggaaaagcgccagcaggtgcagcgttgcttgataaacgacctgaacccgcaggcggttgagcgggcgatcgaccgtcttcgttccaacagtgagtttgtgccattgtgcgtttctgcgctggcgcgagcgcgtgccgactggctgtacggcatcaatatgacccgtgcgtataccattctcggtcgcaatgccggttatcagggcgtactttccgtgggacgcgtgcagacacccgtgctcgggctggtggtgcgccgcgatgaagagattgaaaacttcgtggcgaaagacttctttgaagtcaaagcacatatcgtgacacctgccgatgagcggtttaccgctatctggcaaccgagcgaagcgtgtgaaccgtaccaggatgaagaagggcgcttgttacatcgtccactggcggagcatgtggttaaccgcattagtggtcaaccggctattgtcaccagctataacgataaacgggaatcagaatccgcgccgctgccgttttcgctttcggcgttgcagattgaagcggcaaaacgcttcggtctgagcgcgcagaacgtgcttgatatctgccagaagctgtacgaaacgcacaagctaatcacttatccgcgttccgattgtcgctatttgccagaagaacattttgccggacgccacgcggtgatgaatgccatcagcgttcatgcaccggatctgttgccgcagccagtggtagatccagatatacgcaaccgctgttgggatgacaaaaaggtcgatgcgcaccacgccatcatcccgaccgcacggagttctgcgatcaacctgacggagaacgaagcgaaggtctataacctgattgcccgtcaatacctgatgcagttctgcccggatgcggtgttccgcaagtgtgttatcgaactggacattgccaaaggcaaatttgtcgctaaagcccgttttcttgctgaagcaggctggcgcacgctgttaggcagcaaagagcgcgatgaagaaaacgacggcacgccattgcctgtggtggcgaaaggcgatgagttgctgtgtgaaaaaggtgaagtggtagagcggcaaacccagccgccgcgccattttaccgatgcaacactgctttcggcgatgaccgggatcgcgcgctttgtgcaggacaaagatctgaaaaaggtccttcgtgcgaccgatggtctggggacagaagcaacccgtgccgggattattgaactgctgttcaagcgtggttttctgaccaaaaaagggcgctatatccactccaccgacgccggaaaagcgttattccattcgctgccagaaatggcgacgcgaccggacatgaccgcgcactgggaatcggtgctgacgcaaatcagcgaaaagcagtgtcgctatcaggactttatgcagccgctggtggggacgctatatcagcttattgatcaagccaaacgtacgccggtgcggcagtttcgcggcattgtggctccgggcagtggtggcagtgctgataagaaaaaggctgcaccgcgtaaacgtagtgcgaaaaaaagtccgccagcagatgaagccggaagcggggcgatagcgtaa

SEQ ID NO: 472066 - DNA, 1041 bp, Shigella flexneri
atgaaaaaagttttattgcaaaaccatcctgggagcgagaagtattcttttaatggctggggaatatttaatagtaattttgaacgggtgattaaagaaaataaggccatgctgctttgtaagtgggggttttatttaacatgtgttgtcgctgtaatgtttgtattcgcagcgataacatccaacggtttgaatgaaagaggcctgattaccgcgggatgctcttttctttatctattaattatgatggggcttattgttcgggccggttttaaagcaaaaaaagaacaactgcattattatcaggctaaaggtattgagccgctcagtatcgagaagttacaggcgctacaattgatcgcaccttatcgattctatcataagcaatggtctgaaacgctagagttctggccgcgaaagcctgaacctggcaaagataccttccaatatcatgtgcttccttttgactcgatcgatatcatcagtaaaagacgcgagtctttagagaatcaatggggtatcgaagatagcgaaagttattgtgccttaatggagcattttctttctggcgaccatggagccaatacctttaaagcaaacatggaggaagccccagagcaggttatcgccttgttgaataaatttgctgtttttccctcagactatatctctgattgcgctaataatcgctccggtaaatcctcggcgaagctaatatgggcggcggaattatcatggatgatctcgatatcaagcacagcttttcaaaacgggacaattgaagaagaactggcctggcattatataatgcttgcttctcgaaaggcgcacgagttgttcgaaagcgaagaagattatcaaaaaaatagtctaatgggatttctttactggcatatctgctgctatcgcagaaagttaacggatgctgaacttgaagcgtgttatcgttacgacaagcagttttgggagcactacagtaagaaatgccgttggcccataagaaatgttccctggggagcatcatccgttaaatactcataa

SEQ ID NO: 472067 - DNA, 681 bp, Shigella flexneri
atgttaaaacgccacggtatgggttttgaagggatgagcgtttccgtttctggctccggcaacgtcgcccagtacgctatcgaaaaagcgatggaatttggtgctcgtgtgatcactgcgtcagactccagcggcactgtagttgatgaaagcggattcacgaaagagaaactggcacgtcttatcgaaatcaaagccagccgcgatggtcgagtggcagattacgccaaagaatttggtctggtctatctcgaaggccaacagccgtggtctgtaccggttgatatcgccctgccttgcgccacccagaacgaactggatgttgacgccgcgcatcagcttatcgccaatggcgttaaagccgtcgctgaaggggcaaatatgccgaccaccatcgaagcgactgaactgttccagcaggcaggcgtactgtttgcaccgggtaaagcggctaatgctggcggtgtagcaacgtcgggcctggaaatggcacaaaacgctgcgcgcctgggctggaaagccgagaaagttgacgcacgtttgcatcacatcatgctggatatccaccatgcctgtgttgagcatggtggtgaaggtgagcaaaccaactacgtgcagggcgcgaacattgccggttttgtgaaggttgccgatgcgatgctggcgcagggtgtgatttaa

SEQ ID NO: 472068 - DNA, 666 bp, Shigella flexneri
atggatcagacatattctctggagtcattcctcaaccatgtccaaaagcgcgacccgaatcaaaccgagttcgcgcaagccgttcgtgaagtaatgaccacactctggccttttcttgaacaaaatccaaaatatcgccagatgtcattactggagcgtctggttgaaccggagcgcgtgatccagtttcgcgtggtatgggttgatgatcgcaaccagatacaggtcaaccgtgcatggcgtgtgcagttcagctctgccatcggcccgtacaaaggcggtatgcgcttccatccgtcagttaacctttccattctcaaattcctcggctttgaacaaaccttcaaaaatgccctgactaccctgccgatgggcggtggtaaaggcggcagcgatttcgatccgaaaggaaaaagcgaaggtaaagtgatgcgtttttgccagacgctgatgactgaactgtatcgccacctgggcgcggataccgacgttccggcaggtgatatcggcgttggtggtcgtgaagtcggctttatggcggggatgatgaaaaagctctccaacaataccgcctgcgtcttcaccggtaagggcctttcatttggcggtagtcttattcgcaagctaccggctacggtctggtttatttcacagaagcaatgttaa

SEQ ID NO: 472069 - DNA, 273 bp, Shigella flexneri
gtgagtcgagcattgttcgccgtagtattagcatttccattaattgcactggctaacccgcattatcgtccggacgtggaggtaaacgtaccgccagaagtgttcagttcaggcgggcagtcagcgcagccctgtactcagtgctgcgtttatcaggatcaaaattattctgaaggggcggtaattaaagccgaaggaatactgctgcaatgccagcgtgatgacaaaacccttagcactaatccgctgctctggcggcgcgtaaagccataa

SEQ ID NO: 472070 - DNA, 408 bp, Shigella flexneri
atgaaaatgattgaagttgttgccgccatcattgaacgtgatggcaaaattttactcgcgcaacgccccgcccagagcgatcaggcgggattatgggagtttgccggaggtaaagtcgagctggatgaaagccagcagcaggtgctggtgcgtgagttaaacgaagaattggacatcgaagcaactgtgggtgagtatgttgccagccatcagcgagaagtttcgggccggattatccatcttcatgcctggcacgtacccgacttccacgggacgttacaggcacatgaacatcaggcgctggtctggtgctcacctgaagaggcgctgcaatatccgctggcccctgctgacattccattattagaggcgtttatggctttacgcgccgccagagcagcggattag

SEQ ID NO: 472071 - DNA, 621 bp, Shigella flexneri
gtgctagaccgccatcttcatccccggattaaaccgttgttgcatcagtgcgtgcgggttcttgataaaccgggcattacgccagatggtttaacattagtgggatttgccatcggcgtgctggctctgccgtttctggcgctgggctggtatctggcggcgctagtcgtcattttgttgaacaggctgcttgatggtctggacggtgcgctggcgcggcgcagagggcttaccgacgcgggcggctttcttgatatttctctcgattttctcttttacgcgctggtgccgtttggctttattcttgctgcaccggagcaaaatgcgctggcaggcggctggttgttgtttgcgtttatcggcacgggcagcagttttctcacctttgctgcactggcagcaaaacatcagattgataaccccggttatgcacataagtcgttttactatctggggggattaaccgaaggcacagaaacgatcttactgtttgtgctgggatgtttattccctgcatggtttgcgtggtttgcgtggatcttcggtgcgttgtgctggatgacgacctttacgcgggtgtggagtgggtatctgacgctgaagtcgctccagcgtcagtaa

SEQ ID NO: 472072 - DNA, 720 bp, Shigella flexneri
gtggaaagcgaaccgctgtggaacaaagtttctgatgaacaactaaaagcgatgctggcaaaacacggcattcgccatgacaccacggtcattctgtacgggcgtgacgtatacgctggagcgcgtgtggcgcaaattatgctctacgcaggcgtgaaagatgtgcgtctgctggatggcggctggcaaacctggtccgacgcgggactgcctgttgagcgaggaacgccaccgaaagtgaaagcggaaccggatttcggcgtgaagatcccggcacaaccgcagttgatgctcgatatggaacaggcccgtggactgctgcatcgccaggatgcatcgctggtgagcattcgttcgtggccagaatttatcggtacgaccagcggttacagctatattaaaccaaaaggtgaaatagccggagcacgttggggacacgctggtagcgactcgacgcatatggaagatttctataacccggatggcaccatgcgtagcgccgatgatattaccgctatgtggaaagcatggaatatcaaaccagatcagcaagtttcattctactgcggcaccggctggcgcgcgtccgaaacctttatgtacgcacgcgccatgggttggaagaatgtttccgtgtatgacggcggctggtacgaatggagcagcgatccaaaaaatccggttgcaaccggtgaacgcggcccgggcagtagcaaataa

SEQ ID NO: 472073 - DNA, 525 bp, Shigella flexneri
atgaaacgtgtttctcaaatgaccgcgctggcaatggctttagggctggcttgcgcttcttcgtgggccgctgaactggcgaagcctcttacacttgaccaacttcagcaacaaaatggcaaagcgatagatactcgccccagcgcgttttataacggctggccacaaaccttaaatggcccttctggtcatgaacctgccgccttaaacctctctgctagctggctcgacaaaatgagcaccgaacagctcaacgcgtggatcaagcaacataacctgaaagccgatgccccggtggcgctgtacggtaatggcaaagatgtcgacgccgtcaaaacgcgactgcaaaaagcaggttttacgcatatctccattctgagtgacgcgctaagcgaaccttcccgtctacaaaaactgccgcactttgagcagctggtttatccgcaatggctgcatgacctgcaacaaggtaaagaggttacggcgaaacctgtcggtgactggaaagtcattgaagcggcctag

SEQ ID NO: 472074 - DNA, 654 bp, Shigella flexneri
atgctctgcgtgaaaaatgtttcgctacgtttaccagaaagccgcttgctgacaaacgttaactttacggttgataaaggtgacatcgtcacgttaatggggccgtctggctgtggaaaatccactctgttttcatggatgattggtgcactggccggacagttttcttgtacaggtgagctatggctcaatgagcaacggattgacatgctacccaccgcacagcgtcagattggcattctttttcaggatgcactgttatttgaccagttcagcgtcgggcaaaatttactgctggcgctaccggcgacacttaaggggaatgcccgacgtaatgccgtgaatgatgcacttgagcgttcaggccttgacggagctttccatcaggatcctgccactttgtctggcggtcagcgagcgcgcgttgctctactacgcgcccttctcgcccagccaaaagcgttactcctggatgagccattcagccgtcttgatgtggctctgcgcgataattttcgccagtgggtgttcagcgaagttcgcgccctggcgatccccgtcgttcaggtaacgcacgatctccaggatgttcctgctgatagttctgttctggatatggcgcagtggtcagaaaattacaacaaactgcgataa

SEQ ID NO: 472075 - DNA, 654 bp, Shigella flexneri
gtgctgtgtgtggttctgctggcgatcctcgcggatcagtcgacgatcaatagtgaagcactcatcaacagtctgacaatggggctggtagcaacattcatcgctttgctcctgttactgctgtggctggaatggggggcacagcgtcgccagttgtggctatggttgcccattctattgcccgctctgccactggtggcgggccagtacacgctggcgctatggctgaacctggatggaagctggacggcggtggtctgggggcatctgctgtgggtaatgccgtggatgctgtttatcctgcaacccgcctggcagcgcattgattcacggttaattttgattgcgcaaacactgggctggtcgcgggccaaaatcttcttttacgtgaaatgcccactcatgttgcgccctgtgctgactgccttcgcggtgggattttcagtcagtattgcgcagtatatgccgacgctgtggctgggcgcggggcgttttccgacgctcaccactgaggcggtggcattaagcagcggcggcagcaacggtattctcgccgcccaggcgttatggcaactgttgttaccgcttattatttttgccctgaccgcgttagtcgcaaaatgggtaggttatgtcagacaaggaatccgctaa

SEQ ID NO: 472076 - DNA, 423 bp, Shigella flexneri
atggttacgccgttacggtacgcattaatctttttgctgtgggcgatggtggcggtgatttatgcaccgctgatcccggcagctctcacgctgatatcgcctgcgttgtcgttgacacgctggcaggcgttatttgccgatccacagttaccgcaggcattactggcaacgctggtgtcgacaaccatcgcggcggtcggggcattgttgattgccctgctggtgattgtggcgctatggcctgggccgaaatggcagcgtatgtgcgcccgtctgccgtggctgctcgccattccccatgtggcttttgccaccagcgccctgctgctctttgctgacggagggctgctatatgactatttcccgtatttcactccgccaatggaccgatttggatcggtctgggcctcacccttgcagtga

SEQ ID NO: 472077 - DNA, 414 bp, Shigella flexneri
atggatgctctgctgaaagccggcacattgcgcctgtcgctgacctttaaccccgcacatgcgcagcaaaaaatcgccagcggcgatttgccggcaagcagttacagttttggctttcgcgaggggatgattggcaacgtgcatttcgtcaccattccagccaacgcgaatgccagtgctgcggcgaaggtagttgccaatttcctgctctcacccgatgcgcaactgcgtaaagcagatcccgttgtctggggcgatccttctgttctcgatccgcaaaaactgcctgacgggcagcgcgaaatattgcaatcaagaatgccgcaggatctgccgccggtactggctgaaccgcacgcaggatgggtgaatgcactggaacaagaatggttacgccgttacggtacgcattaa

SEQ ID NO: 472078 - DNA, 960 bp, Shigella flexneri
ttgtttccatttcgtcgtaacgttcttgcatttgccgctctgttggcgctctcctcccccgtacttgctggcaaacttgccatcgtcattgatgattttgggtatcgcccgcacaacgaaaaccaggtgctggcgatgccttccgctatctccgtcgctgtattacccgattcaccgcacgccagagagatggcgaccaaagcgcataacagcggtcacgaagtgttgattcatctcccgatggcaccgttgagtaaacagccgctggagaaaaatacgctacgcccggagatgagcagcgacgaaattgagcgcattattcgtagtgcggtcaataacgtgccctatgccgtggggatcaacaaccacatgggcagcaagatgacctctaacctgtttggtatgcagaaagtgatgcaggcgctggagcgttacaatctttacttcctcgacagcgtaaccatcggtaatacccaggcgatgcgcgccgcgcaaggtactggcgtgaaggtgatcaaacggaaggtgttcctcgacgattcgcagaacgaagcggacatccgtgtgcaatttaatcgcgcaattgatctggcgcgtcgcaacggttcaaccattgccattgggcatcctcacccttcaacggtacgcgtgctacaacagatggtttataacctgccgccagacattacgctggtgaaagccagcagcttgctgaatgaaccgcaggttgatacttctacaccgccgaaaaacgctgtgcctgatgcaccgcgtaatccgttccgtggcgtgaagctgtgcaaaccgaagaaaccgatagaacctgtttatgctaatcgcttctttgaagtattaagcgaaagcatcagccagagcacgctgatcgtttacttccagcatcagtggcaaggctggggcaaacagcccgaagcggcgaagtttaacgctagcgcaaattaa

SEQ ID NO: 472079 - DNA, 1260 bp, Shigella flexneri
atgacacgggccgtgaaaccgcgcaggtttgcaatcaggcccatcatctacgccagcgttcttagcgctggcgtattgttgtgcgccttttccgcccacgcggatgagcgtgaccaactcaaatctattcaggccgatatcgccgcaaaagagcgcgcggtacgccaaaagcaacaacaacgcgcaagcctgctcgcacaattgaaaaagcaggaagaagcgatctctgaagccacccgtaagctgcgcgaaacgcaaaacacgctcaatcaactcaataaacagattgatgagatgaacgcgtcgattgccaaactggagcagcaaaaagccgcccaggagcgcagcctcgccgcacaactggatgccgcattccgtcagggcgagcataccggtattcagctaattctcagcggtgaagaaagccagcgtggacagcgtttacaggcttatttcggctatctcaaccaggcgcgacaagaaaccattgcccagttgaagcaaacgcgtgaagaagtcaccatgcagcgtgctgaactggaagagaaacaaagcgagcaacaaacgctgttatatgaacagcgcgcccaacaggcgaaactgactcaggctctgaacgagcgtaaaaagacgctggcggggctggaatcttccatccagcaaggtcagcagcagctaagtgaactgcgtgccaacgaatcccgtctgcgtaacagcattgcccgtgcggaagccgcggcgaaagcgcgtgctgaacgagaagcgcgtgaggcccaggcggttcgcgagcgccagaaagaagcgacgcgcaaaggcaccacctacaaaccgaccgaaagcgaaaaatcgctgatgtcccgaactggtggcctgggtgcgccgcgtggtcaggcattctggccggttcgcgggccgacgctgcatcgctatggcgagcagctacagggtgaattacgctggaaagggatggttatcggtgcctctgaaggtactgaagttaaagcaattgccgacggtcgagtgattctggctgactggctgcaaggttacggtctggtggtggtggttgagcacggtaaaggcgacatgagtctttacggctataatcagagcgcactggtgagcgttggttcgcaggttcgcgcgggccagccaattgcactggtgggcagcagtggcggtcagggtcggccttcactctatttcgaaattcgccgccagggtcaggcggtcaatccacagccgtggttgggaagataa

SEQ ID NO: 472080 - DNA, 1545 bp, Shigella flexneri
atgtcggtttctaaaaaacctatggtactggtgattctggatggctatggctatcgtgaagaacagcaggataacgccatttttagtgctaaaaccccggtaatggatgcactgtgggccaatcgtccgcataccctgatcgacgcttccggtctggaagtcggtctgcctgaccgtcagatgggtaactccgaagtaggccacgttaacctgggtgccggccgcatcgtgtatcaggacctgactcgtctggacgttgaaatcaaagatcgcgctttctttgctaatccagtgctggctggcgcggtacataaagcgaaaaacgcaggtaaagcagtacacattatgggtctgctctccgcaggcggcgtacacagccacgaagatcacatcatggcgatggtagaactggcagctgaacgcggcgcagaaaaaatctacctgcacgcattccttgacggtcgcgacaccccgccgcgcagtgctgaatcctcgctgaaaaaatttgaagagaaatttgctgcgctgggtaaaggccgcgtagcgtccatcattggtcgttactacgcgatggaccgcgataaccgttgggatcgcgttgaaaaagcctatgacctgctgactctggcgcagggtgagttccaggccgatactgccgttgctggtttgcaggcagcttatgctcgcgacgaaaacgacgagttcgtgaaagcgaccgttattcgtgcagaaggtcagccagatgcggcaatggaagacggcgatgcgctgattttcatgaacttccgtgctgaccgcgcgcgtgaaatcactcgtgcattcgtgaacgctgatttcgatggcttcgcgcgtaagaaagtggttaacgtcgatttcgtgatgctgaccgaatacgccgctgacatcaaaactgcggttgcttacccacccgcttccctggttaacaccttcggcgagtggatggcgaaaaacgacaaaactcagttgcgtatttccgaaaccgaaaaatatgcccacgttactttcttcttcaacggtggcgtagaagagtcgttcaaaggcgaagatcgcattctgatcaactcaccgaaagtggctacctacgatctgcaaccggaaatgagctccgcagagctgaccgaaaaactggttgcggccatcaagagcggcaaatacgacaccattatctgtaactatccgaacggcgacatggtaggtcacaccggggtgatggaagcggcggttaaagcggttgaagcactggatcactgcgtggaagaagtcgcgaaagcggttgagtccgtgggtggacaactgctgatcaccgctgaccacggtaacgctgaacagatgcgcgatccggcaacgggtcaggcacacacggcacacaccaacctgccagttccgctgatttacgttggtgataagaacgtgaaagcggttgcaggcggcaaactttctgacatcgcgccgaccatgttgtcgctgatgggtatggaaatcccgcaagagatgactggtaagccgctgttcatcgtggaataa

SEQ ID NO: 472081 - DNA, 432 bp, Shigella flexneri
atgcaagaaattatgcaatttgttggccgtcatcccatactgagtatcgcctggatcgcgttactggtggcggttcttgtgactacgtttaagagcctgacctcgaaagtgaaggtgattactcgtggtgaagctacgcgtctgatcaacaaagaagacgctgtggttgtggatttacgtcagcgtgatgacttccgtaaaggccatatcgcaggttctatcaatctgttgccgagcgaaatcaaagccaacaatgttggtgagcttgagaagcacaaagacaaatcggttatcgtggtagacggttctggcatgcagtgccaggagcctgcaaacgcgctgacgaaagctggttttgcgcaagtattcgtgctgaaagagggcgttgctggctgggctggcgaaaacttgcctctggtgcgcggcaaataa

SEQ ID NO: 472082 - DNA, 252 bp, Shigella flexneri
atggccaatgttgaaatctataccaaagaaacctgcccgtattgccatcgtgcaaaagcactgctgagcagcaagggcgtgagtttccaggagttgccgatcgatggcaatgccgccaagcgtgaagagatgatcaaacgcagcggttgcaccacggttccccagatttttattgacgcacagcacattggcggctgtgatgacttgtatgcattggatgcacgtggtggactggatcccctgctgaaataa

SEQ ID NO: 472083 - DNA, 468 bp, Shigella flexneri
atgtcagaacaaaacaacactgaaatgactttccagatccaacgtatttataccaaggatatctctttcgaagcgccgaacgcgccgcacgttttccagaaagattggcaaccagaagttaaacttgatctggatacggcatcttcccaactggcagatgacgtatacgaagtggtactgcgtgttaccgtaacggcctccttgggcgaagaaaccgcgttcctgtgtgaagttcagcagggcggtattttctccatcgcgggtatcgaaggcacccagatggcacattgcctgggcgcatactgcccgaacattctgttcccgtatgctcgtgagtgcatcaccagcatggtatcccgcggtacattcccgcaactgaaccttgcgccggttaacttcgatgcgctgttcatgaactatttgcagcagcaggctggcgaaggtactgaagaacatcaggatgcctga

SEQ ID NO: 472084 - DNA, 1020 bp, Shigella flexneri
atgaaccaacgtaatgcttcaatgactgtgatcggtgccggctcgtacggcaccgctcttgccattaccctggcaagaaatggccacgaggttgtcctctggggccatgaccctgaacatatcgcaacgcttgaacgcgaccgctgtaacgccgcgtttctccccgatgtgccttttcccgatacgctccatcttgaaagcgatctcgccactgcgctggcagccagtcgtaatattctcgtcgtcgtacccagccatgtctttggtgaagtgctgcgccagattaaaccgctgatgcgtcctgatgcgcgtctggtgtgggcgaccaaagggctggaagcggaaaccggacgtctgttacaggacgtggcgcgtgaggccttaggcgatcaaattccgctggcggttatctctggcccaacgtttgcgaaagaactggcggcaggtttaccgacagctatttcgctggcctcgaccgatcagacctttgccgatgatctccagcagctgctgcactgcggcaaaagtttccgcgtttacagcaacccggatttcattggcgtgcagcttggcggcgcggtgaaaaacgtcattgccattggcgcggggatgtctgacggtatcggttttggtgcgaatgcgcgtacggcgctgatcacccgtgggctggctgaaatgtcgcgtcttggtgcggcgctgggtgccgatcctgccacctttatgggcatggcggggctgggcgatctggtgcttacctgtaccgacaaccagtcgcgtaaccgccgttttggtatgatgctcggtcagggcatggatgtacaaagcgcgcaggagaagattggtcaggtggtggaaggctaccgcaatacgaaagaagtccgcgaactggcgcatcgcttcggcgttgaaatgccaataaccgaggaaatttatcaagtattatattgcggaaaaaacgcgcgcgaggcagcattgacattattaggtcgtgcacgcaaggacgagcgcagcagtcactaa

SEQ ID NO: 472085 - DNA, 822 bp, Shigella flexneri
atgtcgtgtgaagaactggaaattgtctggaacaatattaaagccgaagccagaacgctggcggactgtgagccaatgctggccagtttttaccacgcgacgctactcaagcacgaaaaccttggcagtgcactgagctacatgctggcgaacaagctgtcatcgccaattatgcctgctattgctatccgtgaagtggttgaagaagcctacgccgctgacccggaaatgatcgcctctgcggcctgtgatattcaggcggtgcgtacccgcgacccggcagtcgataaatactcaaccccgttgttatacctgaagggttttcatgccttgcaggcctatcgcatcggtcactggttgtggaatcaggggcgtcgcgcattggcaatctttctgcaaaaccaggtttctgtgacgttccaggtcgatattcacccggcagcaaaaattggccgtggcattatgctcgaccacgccacgggcatcgttgtgggtgaaacggcggtaattgaaaacgacgtatcgattctgcaatctgtgacgcttggcggtacgggtaaatctggtggtgaccgtcacccgaaaattcgtgaaggtgtgatgattggcgcgggcgcgaaaatcctcggcaatattgaagttggtcgcggcgcgaagattggcgcaggttccgtggtgctgcaaccggtgccgccgcatacaaccgccgctggcgttccggttcgtattgtcggtaaaccagacagcgataagccatcaatggatatggaccagcatttcaacggtattaaccatacatttgagtatggggatgggatctaa

SEQ ID NO: 472086 - DNA, 474 bp, Shigella flexneri
atgctaaacatcgtactttacgaaccagaaattccgccaaatactggcaacatcatccgtctttgcgctaataccggctttcgtctacatatcatcgaaccgatgggatttgcctgggacgacaagcgcctgcgccgcgcggggctggactatcacgagtttaccgccgttacgcgtcatcatgactatcgcgcgttcctcgaagcagaaaatccccagcgcctgtttgccctcaccacgaaaggtacgcctgctcacagcgccgtaagctatcaggatggcgattatctgatgttcggcccggaaacacgcggcctgccagcgagcattcttgatgccctgcccgctgaacaaaaaattcgcattccgatggtgccggacagccgcagcatgaatctgtccaatgcggtgtcggtagtggtgtatgaagcctggcggcagctgggatatccgggagcgttgttgagagattag

SEQ ID NO: 472087 - DNA, 1191 bp, Shigella flexneri
atgattatttccgcagccagcgattatcgcgccgcagcgcaacgcattctgccgccgttcctgttccactatatggatggtggtgcatattctgaatacacgctgcgccgcaacgtggaagatttgtcagaagtggcactgcgccagcgtattctgaaaaacatgtccgacttaagcctggaaacgacgctgtttaatgagaaattgtcgatgccggtagcactggcaccggtgggtttgtgtggcatgtatgcgcgtcgtggcgaagttcaggcagccaaagcggcggacgcgcatggcattccgtttactctctcgacggtttccgtttgcccgattgaagaagtcgcgccagccatcaagcgcccaatgtggttccagctttatgtactgcgcgatcgcggctttatgcgtaacgcgctggagcgagcaaaagcagcgggttgttcgacgctggttttcaccgtggatatgccgacaccgggcgcacgctaccgtgatgcgcattcaggtatgagcggcccaaatgcggcaatgcgccgctacttgcaggcggtgacgcatccgcaatgggcgtgggatgtgggcctgaacggtcgtccacatgatttaggtaatatctcagcttatctcggcaaaccgaccggactggaagattacatcggctggctggggaataacttcgatccgtccatctcatggaaagaccttgagtggatccgcgatttctgggatggcccgatggtgatcaaagggatcctcgatccggaagatgcgcgcgatgcagtacgttttggtgctgatggaattgtggtttctaaccacggtggccgccagctggacggtgtactctcttccgctcgtgcgttgcccgctattgcagatgcggtgaaaggtgatatcgccattctggcggatagcggaattcgtaacgggcttgatgtcgtgcgtatgattgcgctcggtgccgacaccgtactgctgggtcgtgctttcctgtatgcgctggcaacagcgggccaggcgggtgtagctaacctgctaaatctgatcgaaaaagagatgaaagtggcgatgacgctgactggcgcgaaatcgatcagtgaaattacgcaagattcgctggtgcaggggctgggtaaagagttgcctacggcactggctccgatggcgaaagggaatgcggcatag

SEQ ID NO: 472088 - DNA, 777 bp, Shigella flexneri
atgattgttttacccagacgcctgtcagacgaggttgccgatcgtgtgcgggcgctgattgatgaaaaaaacctggaagcgggcatgaagttgcccgctgagcgccaactggcgatgcaactcggcgtatcacgtaattcactacgcgaggcgctggcaaaactggtgagcgaaggcgtgctgctcagtcgacgcggcggcgggacgtttattcgctggcgtcatgacacatggtcggagcaaaacatcgtccagccgctaaaaacgctgatggccgatgatccggattacagtttcgatattctggaagcccgctacgccattgaagccagcaccgcatggcatgcggcaatgcgcgccacacctggcgacaaagaaaagattcagctttgctttgaagcaacgctaagtgaagacccggatatcgcctcacaagcggacgttcgttttcatctggcgattgccgaagcctcacataacatcgtgctgctgcaaaccatgcgcggtttcttcgatgtcctgcaatcctcagtgaagcatagccgtcagcggatgtatctggtgccaccggttttttcacaactgaccgaacaacatcaggctgtcattgacgccatttttgctggtgatgccgacggggcgcgtaaagcaatgatggcgcaccttagttttgttcacaccaccatgaaacgattcgatgaagatcaggctcgccacgcacggattacccgcctgcccggtgagcataatgagcattcgagggagaaaaacgcatga

SEQ ID NO: 472089 - DNA, 1656 bp, Shigella flexneri
atgaatctctggcaacaaaactacgatcccgccgggaatatctggctttccagtctgatagcatcgcttcccatcctgtttttcttctttgcgctgattaagctcaaactgaaaggatacgtcgccgcctcatggacggtagcaatcgcccttgccgtggctttgctgttctataaaatgccggtcgctaacgcgctggcctcggtggtttatggcttcttctatggtttgtggcccatcgcgtggatcattattgcagcagtgttcgtctataagatctcggtgaaaaccgggcagtttgacatcattcgctcgtctattctttcgataacccctgaccagcgtctgcaaatgctgatcgtcggtttctgtttcggcgctttccttgaaggagccgcaggctttggcgcaccggtagcaattaccgccgcattgctggtcggcctgggttttaaaccgctgtacgccgccggactgtgcctgattgttaacaccgcgccagtggcatttggcgcgatgggcattccaatcctggttgccggacaagtaacaggcatcgacagctttgagattggccagatggtggggcgtcagctaccgtttatgaccattatcgtgctgttctggatcatggcgattatggacggctggcgcggtatcaaagagacgtggcctgcggtcgtggttgcaggcggctcgtttgccatcgctcagtaccttagctctaacttcattgggccggagctgccggacattatctcttcgctggtatcactgctctgcctgacgctgttcctcaaacgctggcaaccagttcgcgtattccgcttcggtgacttgggggcgtcacaggttgatatgacgctggcccacaccggttacaccgcgggtcaggtgttacgtgcctggacaccgttcctgttcctgaccgctaccgtaacactgtggagcatcccgccgtttaaagccctgttcgcatcgggtggtgcgctgtatgagtgggtgatcaacattccggtgccgtacctcaataaactggttgcccgtatgccaccagtggtcagcgaggctacagcctatgccgccgtgtttaagtttgactggttctctgccaccggcaccgccattctgtttgctgcactgctctcgattgtctggctgaagatgaaaccgtctgacgctatcagcaccttcggcagcacgctgaaagaactggctctacccatctactccatcggcatggtgctggcgttcgcctttatctcgaactattccggactgtcatcaacactggcactggcactggcgcacaccggtcatgcattcaccttcttctcgccgttcctcggctggctgggggtattcctgaccgggtcggatacctcatctaacgccctgttcgccgcgctgcaagccaccgcagcacaacaaattggcgtctctgatctgttgctggttgccgccaataccaccggtggcgtcaccggtaagatgatctccccgcaatctatcgctatcgcctgtgcggcggtaggcctggtgggcaaagagtctgatttgttccgctttactgtcaaacacagcctgatcttcacctgtatggtgggcgtgatcaccacgcttcaggcttatgtcttaacgtggatgattccttaa

SEQ ID NO: 472090 - DNA, 3057 bp, Shigella flexneri
gtggcgacgaataccaccaatatcgccaataacacttccaatattgccactaacaccaccaacatctctaacctgactgagacggtgactaatcttggtgaggatgcgctgaaatgggataaggacaatggtgtattcacggcagctcatggcaccgagaccaccagcaaaataaccaacgttaaagatggcgacctgacgactggcagcaccgatgccgttaacggctctcagctgaaaaccaccaacgatgccgtggcgacgaataccaccaatatcgccactaacaccaccaacatctctaatctgactgagacggtgactaatcttggtgaggatgcgctgaaatgggataaggacaatggtgtcttcactgcagctcatggcaacaataccgccagcaaaatcaccaatatcctggacggcacagtcactgcaaccagttccgatgccattaacggtagccagctttatgacttaagcagcaatatcgccacctacttcggcggcaatgcttctgtgaatactgacggtgtgtttaccggtccaacctacaaaatcggtgaaacaaattattataacgtcggcgatgcactggctgcgattaactcctcatttagcacgtctctcggcgatgctctgctttgggatgccaccgcaggtaaattcagtgccaaacacggtactaatggtgacgcaagcgtgatcactgatgtcgcagatggtgaaatttcagactccagttctgacgcagtaaacggctcacaactccacggcgtgagcagttatgttgttgatgcgctggggggtggtgccgaagtcaatgcagacggcaccatcactgcgccgacgtacaccattgctaatgctgattacgataatgtcggtgatgccctgaatgctatcgataccactcctgacgacgctctgctctgggatgcggacgccggtgaaaatggtgcatttagcgccgctcacggaaaagataaaactgccagtgtaatcactaacgtcgctaacggtgcaatctctgctgccagcagcgacgcgattaacggctcacaactctataccaccaataagtacatcgctgatgcgctgggtggtgacgcagaagtcaacgctgacggcaccatcaccgcaccgacttacaccattgcgaacgccgagtacaacaacgtcggtgacgccctggatgcgcttgatgataacgccctgctgtgggataagactgccaatggcggtgctggagcctacaatgccagccatgacggtaaagccagcatcatcactaatgtcgctaatggcagtattagtgaggacagtaccgatgcagtgaacggttctcagttgaatgcgacgaatatgatgattgagcagaacacccaaattatcaatcagctcgctggtaacaccgacgcaacctatatcgaagaaaatggcgctggtatcaactacgttcgtactaacgacaacgatttagcctttaacgatgcaagcgcctctggtgtcggcgctacagctgtaggttataacgctgtcgcgtctggtgccagcagcgtagccattggtcagaacagcagcagcaccgttgataccggtattgcgctgggtagcagctccgtttccagccgtgtgattgccaaaggttctcgtgacactagcgtaacggaaaatggcgtggtgattggttatgacaccactgacggcgaactgctaggtgcattgtcaattggtgatgacggtaaataccgccaaatcatcaacgtagctgatggttcagaagcccatgacgccgttacggttcgccagttgcagaacgctattggagcggtcgccactacgccaaccaagtactttcacgccaactcaacggcagaagactcactggccgttggtgaagactcgctggcaatgggtgcgaaaactgtcgttaatggtaatgcaggtattggtatcggtttgaacactctggttctggctgatgcgatcaacggcattgctatcggcagtaacgcacgcgcaaaccatgcaaacagtatcgcaatgggtaacggttctcagaccacccgtggtgcacagactggctacaccgcctacaacatggacgcaccgcagaactctgtaggtgagttttctgtcggtagtgaagacggtcaacgtcagatcacaaacgtcgcagctggttcagcggataccgatgcggttaacgtgggtcagttgaaagtcactgatgagcgcgtagcgcaaaatacccagagcattactaacctgaacaatcaggtcactaatctggatactcgcgttactaatatcgaaaacggtattggcgacattgtcaccaccggtagcaccaagtacttcaagaccaacaccgatggcgtagatgccaacgcccagggtaaagatagcgttgctattggttctggttccattgctgccgctgacaacagcgtcgcactgggtaccggttccgttgcagaggaagaaaatacaatctctgtaggttcttctactaaccaacgccgtatcaccaacgtagctgccagtgttaatgccaccgatgcggttaacgtgtcgcagctgaaatcttctgaagcaggcggagtgcgctacgacaccaaagctgatggttctatcgactatagcaatatcaccctcggtggtggcaacggcagtacgactcgtatcagcaacgtctccgctggcgtcaacaacaacgacgcggtgaactacgcgcagttgaagcaaagcgcgcaggaaacgaagcaatacaccgatcagcggatggttgagatggataacaaactgtctaaaactgaaagcaagttgagcggtggtatcgcttctgcaatggcaatgaccggtctgccgcaggcttatacaccgggtgccagcatggcttctattggtggcggtacttacaacggtgaatcggcagttgctttaggtgtatcgatggtgagcgccaatggtcgttgggtctacaaattacaaggtagtaccaatagccagggtgaatactccgccgcactcggtgccggtattcagtggtaa

SEQ ID NO: 472091 - DNA, 1149 bp, Shigella flexneri
atgaacaaaatatttaaagttatctggaaccctgcgacagggaattatactgttaccagcgaaacggcaaaaagccgtggcaagaaatctgggcgcagtaagctgttaatttctgcgctggttgcgggtggaatgttgtcgtcgtttggggcattggcgaatgccgggaatgacaacggtcagggtgttgattacggtagtggatcagctggcgacggctgggttgctataggcaaaggggcgaaagcaaatacttttatgaacaccagtggttccagtactgctgtgggttatgacgctatagctgaaggccaatatagctctgccatcgggtcaaaaacccatgcgattggtggtgcatcaatggcctttggggttagtgcaatatcagaaggcgatagaagtatagcactgggtgcctcttcgtattcattgggccaatactcaatggccctcggccgttattcaaaagcattgggtaaattgtctattgctatgggggactcttccaaagcggaaggagcaaacgccattgccctggggcgtagcagtgtagctagcggtactgacagcctcgcatttggcagacaatcacttgccagcgcagcgaacgctattgcgataggtgctgagaccgaagccgctgaaaatgcaactgctattggcaataatgcgaaggcaaaagggactaatagcatggcaatggggttcggaagccttgccgataaagtcaatactatcgcattaggaaatggcagccaggctctggcagataatacaatcgccataggccagggcaacaaagctgatggcgtggatgccatcgctctgggtaatggtagccagtcgagaggcttaaacaccattgccttaggcacagccagtaatgcaactggtgataagagtcttgcgcttggtagtaatagcagtgccaacggtattaactctgtcgcgctgggcgcagattccattgcggatttagacaataccgtctctgtcggcaatagttcattaaaacgcaagatcgttaatgtgaaaaatggcgcgatcaagtctgacagttacgatgccattaatggttcacagctttatgccattagcgactcggtagcaaaaaaggcttggaggaggggctgcagtagatgttga

SEQ ID NO: 472092 - DNA, 684 bp, Shigella flexneri
atgaacttgaagaagatttttttcagtgctgtcactgtttcagttctctgcgcattaacgggatgtgactacattgaagaaggcaagccagaaagtagtttactgaaacaacaagaagaacataataataaaattgtgctacttgaaaaacaacaagcacagctaaagagtcaactcgaaactattcaaaaacaacaaactggcataataaacagtacaaagactttaactcacgtaattaaatccgttaaagaccaacaaaatacttttatttttaccgagtttaacccagcaaaaacgaagtatttcatcctgaacaacggttcggtggctttagcgggtcgagtgttatccattgacgccacagagaatggtagtgttattcatatctcactggtcaacttattaagtacacctatctcaaacattggttttaatgcgacatggggtggtgaaaaacctgtcgatgccaaagagtttgcccggtggcaacaattacttttcaacacatcaatgaaatccacattgaaattattaccaggtcaatggcaagacattaatttgaccctgaagggtgtatcgcccaataacctgggatatctgaagttagccatcaacatggaaaatattcagttcgacaatcttccctctgctgaaaatcggcagaaaagaagcaaaaaataa

SEQ ID NO: 472093 - DNA, 363 bp, Shigella flexneri
atgaaagaagtcgaaaaaaacgaaatcaagcgtctcagcgatcgcctggacgccatccgccaccagcaggccgatctgtcgctggttgaagccgcagacaaatatgccgagctggaaaaagagaaagccacgctggaagcagaaattgctcgcctgcgtgaggttcatagccaaaaactgagtaaagaagcacagaagctgatgaagatgccgttccagcgcgcaattaccaaaaaagagcaggctgatatgggcaagctgaagaaaagtgttcgcggactggtggttgtgcacccaatgaccgcgctggggcgcgaaatgggcctggaagagatgactggattttctaagactacgttttaa

SEQ ID NO: 472094 - DNA, 210 bp, Shigella flexneri
atgggcaaattaggtgaaaacgttccgcttcttatcgataaagccgtagatttcatggcatcaagccaggcgttccgggagtatctgaaaaaacttcctccccgtaacgcgattccgtccggaatacccgatgaaagcgtgccgttatatctacaacgtctggagtattatcgtcggctttatcggccgaagcaggtagaggggcagtaa

SEQ ID NO: 472095 - DNA, 588 bp, Shigella flexneri
atggtggaccaggcgcaggacaccctgcgcccgaataacagattgtcagatatgcaggcaacaatggaacaaacccaggccgttgaaaaccgtgtgcttgagcgtctgaatgctggcaaaaccgtgcgaagctttctgatcaccgccgtcgagcttttgaccgaggcggtaaatcttctggtgcttcaggtattccgcaaagacgattacgcggtgaagtatgctgtagaaccgttactcgacggcgacggtccgctgggcgatctttctgtgcgtttaaaactcatttacgggttgggcgtcattaaccgccaggaatacgaagatgcggaactgctgatggcattgcgtgaagagctaaatcacgacggcaacgagtacgcctttaccgacgacgaaatccttggaccctttggtgaactgcactgcgtggcggcgttaccaccgccgccacagtttgaaccagcagactccagtttgtatgcaatgcaaattcagcgctatcaacaggctgtgcgatcaacaatggtcctttcactgactgagctgatttccaaaatcagcttaaaaaaagcctttcaaaagtaa

SEQ ID NO: 472096 - DNA, 1149 bp, Shigella flexneri
atgaaagcattacattttggcgcaggtaatatcggtcgtggctttatcggtaaactgctggcagacgcgggtatccaactgacgtttgccgatgtcaatcaggtggtacttgatgccctgaatgcccgtcatagctatcaggttcatgtggtcggtgaaaccgagcaggtagataccgtttccggcgtcaatgctgtcagcagcattggtgatgatgtcgttgatctgattgctcaggtcgatttagtcactaccgccgttggcccggttgtgctggaacgtattgctccggctatcgccaaagggctggtgaaacgcaaagaacaaggtaatgaatccccgctgaacatcatcgcctgtgaaaacatggtacgcggcaccacgcagctgaaaggtcatgtgatgaacgccctgccggaagacgccaaagcgtgggtagaagagcacgttggctttgtcgattccgccgttgaccgcatcgtaccgccttcggcttcggcaactaacgatccgctggaagtgacggtagaaactttcagcgaatggattgtcgataaaacgcagttcaaaggcgcactgccgaacatcccaggcatggagttaaccgacaacctgatggcatttgtcgaacgtaaactcttcaccctgaacacgggtcatgctataaccgcgtacctcggaaaactggccggtcatcagaccattcgtgacgctattctcgacgagaaaatccgcgcggtggtaaaaggtgcgatggaagaaagtggtgcggtactgatcaagcgctacggctttgacgcagacaaacatgcggcgtacatccagaaaatcctcggtcgttttgagaacccgtatctgaaagatgatgtagagcgcgtaggccgtcagccgctgcgtaaactgagtgctggcgaccgtctgatcaagccactgctcggtacgctggaatacagccttccgcacaagaatctgattcaggggattgctggtgcaatgcacttccgcagtgaagatgatccgcaggctcaggaactggcagcactgatcgctgacaaaggtccgcaggcggcgctggcacagatttccggtcttgatgccaacagcgaggttgtatccgaggcggtaaccgcttataaagcaatgcaataa

SEQ ID NO: 472097 - DNA, 1914 bp, Shigella flexneri
atgtcatccgatattaagatcaaagtgcaaagctttggtcgtttcctcagcaacatggtgatgccaaatatcggcgcgtttatcgcgtggggtatcatcaccgcgttatttattccaacagggtggttaccgaacgagacgctggcgaagctggtcgggccgatgatcacttatctcctaccgctgctgatcggttataccggtggtaagctggtaggcggcaaacgtggtggcgtagtcggtgccattaccaccatgggcgttatcgtcggcgcagacatgccgatgttcctcggttctatgattgcaggtccgctgggcggctggtgcattaagcacttcgaccgctgggtagacggtaagatcaaatccggttttgagatgctggtgaataacttctccgcaggcatcatcgggatgatcctcgctattctggcattcctcggcattggcccgattgttgaagccctgtccaaaatgctggctgcgggcgttaacttcatggttgtccatgacatgctgccgctggcgtctatctttgttgaaccggcgaaaatcctgttcctcaacaacgccattaaccacggtatcttctcgccgctgggtattcagcagtcccatgaactgggtaaatcaatcttcttcctgattgaagctaacccaggtccaggtatgggcgtgctgctggcgtacatgttctttggtcgtggtagcgctaaacagtctgcgggcggtgcggcaatcatccacttcctgggtggtatccacgaaatctacttcccgtatgtgctgatgaatccgcgtctgatcctcgcagtcatcctcggcggtatgactggcgtgttcacgctgactatcctgggcggtggtctggtttctccggcatctccgggttctatccttgctgtactggcgatgacaccaaaaggtgcttatttcgctaacatcgcgggtgtgtgtgcggcgatggctgtctccttcgttgtctctgctattttgctgaaaaccagcaaagtgaaagaagaagatgatattgaagcagcaactcgtcgtatgcaggacatgaaagctgagtctaaaggcacatctccgctatctgcgggcgatgtgactaacgacctgagccacgtacgtaaaatcatcgttgcctgtgacgccggtatgggttcaagtgcgatgggcgcaggcgtgctgcgtaagaaaattcaggatgcaggtctgtcgcagatttcggtcactaacagcgcgatcaacaacctgccgccagatgtggacctcgtcatcactcaccgtgacctgaccgaacgcgctatgcgccaggttccgcaggcacagcatatttcgctgaccaacttcctcgacagcggcctgtacaccagcctaaccgaacgtctcgttgctgcccagcgccatactgaaaacgaagtgaaagtgaaagacagtctgaaagacagctttgacgattccagtgctaacctgttcaaactgggcgcggagaacatcttcctcggtcgcaaagcagcaaccaaagaagaagcgattcgttttgctggcgagcagctggtgaaaggcggttacgttgagccggaatacgttcaggcgatgctggatcgtgaaaaactgaccccgacttatctgggtgagtctatcgcggtgccacacggtacggttgaagcgaaagatcgcgtactgaaaacgggcgtggtgttctgccagtacccggaaggcgtgcgcttcggtgaagaagaagatgacattgcccgtctggtgattggtattgcagcccgtaacaacgagcacattcaggttatcaccagcctgaccaatgcactggatgatgagtccgtcatcgagcgtctggcacacaccaccagcgtggatgaagtgctggaactgctggcaggtcgtaagtaa

SEQ ID NO: 472098 - DNA, 363 bp, Shigella flexneri
atgtttctaaactatttcgcgttgggagtgctgatcttcgtctttctggtgattttttatggaatcatcgcgatacatgacatcccttatctgattgccaaaaagcgcaatcacccccatgccgacgctattcatacggcgggctgggtgagcctgtttactctgcatgttatctggccgtttctgtggatctgggcgacgctctatcaaccggagcgtggctggggtatgcagtcacatgttgcgtcgcaggagaaagcgactgaaccggaaatcgccgcactttctgaccgaatttcccggctggagcatcaactcgccgccgagaaaaagactgactattccacgttcccggagatctaa

SEQ ID NO: 472099 - DNA, 1086 bp, Shigella flexneri
atggatctattgattgttttaacttacgtggcgctggcgacggcggcgctgggaggcgtgtttctggtgagtggtttgattttgttgatgaactacaaccacccttacacttttaccgcgcaaaaggcagtgatagcgatccctatcacgccacaggtgacgggaattgttactgaagtcactgacaagaataatcagcttattcaaaagggcgaggtgctttttaagctcgacccggttcgttaccaggcgcgagttgacagacttcaggctgacctgatgacggcgacgcataatataaagacgctgcgtgcgcagctcactgaagcgcaggccaacaccacccaggtttcagcggagcgcgaccgtctgtttaaaaattatcaacgttacctgaaaggcagccaggcggcggtgaatccgttctcggaacgtgacatcgacgatgcgcggcaaaatttcctcgcgcaggatgcgttagtgaaaggctcggtggcggagcaggcgcagatccagagtcagctcgacagtatggtcaacggcgagcaatcgcagattgtgagcttaagagcgcaacttactgaagcaaaatataatcttgagcagactgtcattcgcgcaccaagcaatggctacgtcactcaggtactgatccgcccaggtacatacgcagctgccttgccgctgcgtccggtgatggtcttcatccccgagcaaaaacggcaaattgtcgcccaatttcggcaaaactcgctgttacgtctgaaacctggcgatgatgcggaagtggtgtttaacgcgctacctgggcaggtgttccacggcaaattgactagtattttacctgtcgtgccaggcggttcttatcaggcgcagggggtattgcaatcattaacggtcgttcccggcacggacggtgtgctgggaaccattgaactggaccctaacgatgatatcgatgccttacccgacggcatctacgcccaggtggcggtttactccgaccatttcagccatgtttcggtgatgcggaaagtgctgctaagaatgaccagttggatgcattatctttatttggatcattga

SEQ ID NO: 472100 - DNA, 609 bp, Shigella flexneri
atgaaactcgtcggtagctacaccagcccgtttgtacgcaaactttctattctgttgttagaaaagggcataactttcgaatttattaatgaactgccctataacgcggataacggcgtggcgcaatttaacccgttagggaaagtgccggtgctggtgaccgaagagggcgaatgctggtttgattcgccgatcatcgctgaatatattgagttaatgaatgtcgctccggcgatgttgccgcgcgatccgctggagtcgttgcgggtgcgcaaaattgaggcgctggcggatggcattatggatgccgggctggtatcggtgcgtgaacaggcgcgtccggcagcgcagcagtctgaagatgaattgttacgccagcgggagaaaatcaaccgcagtctggatgtgctggaaggatatctggtcgatggcacactcaaaaccgatacggtcaatctggcgactatcgccattgcctgtgctgtcggatatctcaatttccgccgcgttgcgccaggttggtgtgtcgaccgcccacacttagtcaaactggtcgaaaacctgtttagccgcgaaagttttgctcgcaccgaaccgccaaaggcttga

SEQ ID NO: 472101 - DNA, 1392 bp, Shigella flexneri
atgacaaccgaaacgcgttccctctatagtcaacttccggctattgatcgcttattgcgcgatagctccttcctttctttgcgtgatacttatggtcacacccgcgtggtggaattgttgcgtcagatgctcgacgaagcgcgagaagtgattcgtggcagccagacgctgcctgcgtggtgtgaaaactgggcgcaagaagtcgatgcccggttgacgaaagaggcgcagagcgcgctgcgtccggtgatcaacctgacgggaaccgtgctgcataccaaccttgggcgagctttacaggcggaagccgcggtggaagccgttgcgcaggctatgcgttcgccagtgaccctcgagtacgatctggacgacgccggacgcggacatcgcgatcgggcgctggcgcagctgctgtgccgtattacgggggcggaagatgcctgtatcgtcaataacaatgcggcggcggtgttattgatgttggcggccactgccagcgggaaagaggtggtggtatctcgcggcgaactggtggagattggcggcgcgtttcgtattcccgatgttatgcgtcaggcaggctgcaccctacacgaagtagggaccaccaaccgcacgcacgcgaatgattatcgtcaggcggtgaatgaaaataccgcactgttgatgaaagtacataccagtaactacagcattcaggggttcaccaaagcgatagacgaagctgaactggtggcgctcggcaaagagctggatgttccagtggtgactgatttaggcagtggctcgctggtcgatcttagccagtacggtttgccgaaagagccaatgccgcaggagttgattgcggcgggcgtcagtctggtgagcttctccggcgacaagttgttaggcgggccgcaggccgggattatcgttggtaaaaaagagatgatcgcccgcctgcaaagccacccgctgaagcgtgcattacgcgcggataaaatgaccctcgcggcgctggaagccacgttgcgtctttatttacaccctgaagctctgagtgaaaaattaccgaccctgcgcctgcttacccgcagcgcagaggccattcaaatccaggcacaacgtttacaggctccccttgtcgcacattacggcgcggagtttgcggtacagattatgccatgtctttcgcagattggcagtggttcgctgccggttgatcgcctgccgagcgcggcattaacgtttacaccccatgatggacgcggtagccaccttgagtcattagccgcccgctggcgtgaattgccagtgccggtgattggtcgtatttatgacggacgattgtggctggatttacgctgccttgaagatgagcaacggtttttggagatgttgttgaaatga

SEQ ID NO: 472102 - DNA, 1845 bp, Shigella flexneri
atgattattgcgactgccggacacgttgaccacggcaaaacaaccttattgcaggcgattactggcgtaaatgctgaccgtctgccggaagaaaaaaagcgcggcatgaccatcgatctcggctatgcctactggccgcagccggatggtcgcgtgcctggttttatcgacgttcccggtcatgaaaagtttctttccaacatgctggcgggcgttggtggtatcgatcacgcgctgttggtggtggcgtgcgatgacggcgtgatggcacagacccgtgagcatctggcgattttgcagctgaccggtaacccgatgctgacagtggcgctgaccaaagccgatcgcgtggacgaagcgcgtgttgatgaggttgaacgccaggtaaaggaggttctgcgggaatacggttttgctgaggcaaaactgtttatcaccgcagcaaccgaaggtcggggaattgatgccctgcgcgagcatctgcttcagttgccggaacgcgagcacgccagccaacatagtttccgcctcgcgattgaccgcgcatttaccgtaaaaggtgccgggctggtcgtcaccggtacggcgttaagcggggaagtgaaggtaggcgattcactctggctgactggtgtaaataaaccgatgcgtgtacgtgcgctgcatgcgcaaaaccagccaacagaaaccgccaatgccgggcagcgtatcgcgcttgacatcgcgggtgatgcggaaaaagagcagattaaccgtggcgactggctgcttgccgatgtgccgccagagccgttcacacgggtgattgtcgagcttcaaacccatgcaccgctgacccagtggcagccgctgcatattcaccacgccgccagccacgtcacgggacgcgtttcactgctggaagataaccttgctgaactggtcttcgacaccccgttatggctggcagataacgaccgcctggtattgcgcgatatctctgcccgcaacacgctggccggagcgcgcgtcgtgatgcttaacccgccgcgtcgcggtaaacgtaaaccagagtatctgcaatggctggcttccctcgccagggcacagaatgatagcgaagcgttagccgttcacctgcaacgcggcgcggttaatcttcctgatttcgcctgggcgcgccagctcaacggcgaagggatgcgcgaactgctgcaacagcctggctatattcaggctggttatagcttgttgaatgcgccggttgccgctcgctggcaacggaaaattctcgacacattagcgacttatcatgagcaacatcgcgatgaacctgggcctgggcgcgaacgtctgcgacgtatggcgttgccaatggaagatgaagcgctagtactgttgctgattgaaaagatgcgcgaaagcggcgacatcctcagtcatcacggttggctgcatctgccggatcacaaagcgggcttcagcgaagagcagcaggccatctggcaaaaagcagagccgctgtttggtgacgagccgtggtgggtgcgtgatctggcaaaagagacgggtaccgacgagcaggcaatgcgcctgacgctacgccaggcggcgcagcaaggaataattaccgcgatcgtcaaagatcgttattaccgtaacgatcggattgtcgaatttgccaatatgatccgcgatctcgatcaggagtgtggttcaacctgcgcggcggatttccgcgatcgcttaggcgtaggccgaaagctggcaattcagattctggaatattttgaccgcattggctttacgcgtcgtcgtggaaatgatcatttattgcgcgacgcattattatttccggaaaaataa

SEQ ID NO: 472103 - DNA, 1050 bp, Shigella flexneri
atggcatcttcaactttctttattccttctgtgaatgtcatcggcgctgattcattgactgatgcaatgaatatgatggcagattatggatttacccgtaccttaattgtcactgacaatatgttaacgaaattaggtatggcgggtgatgtgcaaaaagcactggaagaacgcaatatttttagcgttatttatgatggcacccaacctaaccccaccacggaaaacgtcgccgcaggtttgaaattacttaaagaaaataattgcgatagcgtgatctccttaggcggtggttctccacacgactgcgcaaaaggtattgcgctggtggcagccaatggcggcgatattcgcgattacgaaggcgttgaccgctctgcaaaaccgcagctgccgatgatcgccatcaataccacggcgggtacggcctctgaaatgacccgtttctgcatcatcactgacgaagcgcgtcataacaaaatggcgattgttgataagcacgtgactccgctgctttctgtcaatgactcctctctgatgattggtatgccgaagtcactgaccgccgcaacgggtatggatgccttaacgcacgctatcgaagcgtatgtttctattgccgccacgccgatcactgacgcttgtgcactgaaagccgtgaccatgattgccgaaaacctgccgttagccgttgaagatggcagtaatgcgaaagcgcgtgaagcaatggcttatgcccagttccttgccggtatggcgttcaataatgcttctctgggttatgttcatgcgatggcgcaccagctgggcggtttctacaacctgccacacggtgtatgtaacgccgttctgctgccgcatgttcaggtattcaacagcaaagtcgccgctgcacgtctgcgtgactgtgccgctgcaatgggcgtgaacgtgaaagaagaagatttcgcggttctggcgactaatgccctgaaagatgcctgtggctttactaacccgatccaggcaactcacgaagaaattgtggtgatttatcgcgccgcaatgtaa

SEQ ID NO: 472104 - DNA, 1539 bp, Shigella flexneri
atgaccaataatcccccttcagcacagattaagcccggcgagtatggtttccccatcaagttaaaagcccgctacgacaactttattggcggtgaatgggtagcccctgccgatggtgagtattaccagaatctgacgccggtgaccgggcagctgctgtgcgaagtggcgtcttcgggcaaacgagacatcgatctggcgctggatgctgcgcacaaagtgaaagataaatgggcgcacacctcggtgcaggatcgcgcggcgattctgtttaagattgccgatcgaatggaacaaaacctcgagctgttagcgacagctgaaacctgggataacggcaaacccattcgcgaaaccagtgctgcggatgtaccgctggcgattgaccatttccgctatttcgcctcgtgtattcgggcgcaggaaggtgggatcagtgaagttgatagcgaaaccgtggcctatcatttccatgaaccgttaggcgtggtggggcagattatcccgtggaacttcccgctgctgatggcgagctggaaaatggctcccgcgctggcggcgggcaactgtgtggtgctgaaacccgcacgtcttaccccgctttctgtactgctgctaatggaaattgtcggtgatttactgccgccgggcgtggtgaacgtggtcaatggcgcaggtggggaaattggcgaatatctggcgacctcgaaacgcatcgccaaagtggcgtttaccggctcaacggaagtgggccaacaaattatgcaatacgcaacgcaaaacattattccggtgacgctggagttgggcggtaagtcgccaaatatcttctttgctgatgtgatggatgaagaagatgcctttttcgataaagcgctggaaggctttgcactgtttgcctttaaccagggcgaagtttgcacctgtccgagtcgtgccttagtgcaggagtcaatctacgaacgctttatggaacgcgccatccgccgtgtcgaaagcattcgcagcggtaacccgctcgacagcgtgacgcaaatgggcgcgcaggtttctcacgggcaactggaaaccatcctcaactacattgatatcggtaaaaaagagggcgctgacgtgctcacaggcgggcggcgcaagctgctggaaggtgaactgaaagacggctactacctcgaaccgacgattctgtttggtcagaacaatatgcgggtgttccaggaggagatttttggcccggtgctggcggtgaccaccttcaaaacgatggaagaagcgctggagctggcgaacgatacgcaatatggcctgggcgcgggcgtctggagccgcaacggtaatctggcctataagatggggcgcggcatacaggctgggcgcgtgtggaccaactgttatcacgcttacccggcacatgctgcgtttggtggctacaaacaatcaggtatcggtcgcgaaacccacaagatgatgctggagcattaccagcaaaccaagtgcctgctggtgagctactcggataaaccgttggggctgttctga

SEQ ID NO: 472105 - DNA, 675 bp, Shigella flexneri
atgaattcccagacaacaaaagatattccctgcttccgttcttatttgcctgatgccctgcgtttaagatttgaagataaactgaccatccgggccatcgctcagcgtctgggtctcagtcattccacaatacatacgctttttcagcgatttcttgcatccggtatcgcatggccattgcccgattcagtttcattcgctcaacttgacgccatcctttatgccaacagaaagaaggaattaacagagcctcaaatcagagaaggctcatggcgaaaagaacggcgaaccagctatagccgtgaatttaaggtccgtctggctaagcaggcattacagcctggggctgttgttgcccggatcgccagagaacacgatatcaatgataacctgctgtttaaatggaaaagccagtacgaggacggcttactgagcgatgatgacatacaggaatgcatgcctgtcccggtggcactgactgatacgccggagccgaccagaccagttacaaatcccttctggcgtaacaagcatgatgagcgccctgagggggctcccggaaacgtcccacggtgcgagctgcatcttaaatcaggtgtggtaaaactgtttgaccctctcactccggaactgttacgggcgctaatccgcgaaatgaaagggggtatccgatga

SEQ ID NO: 472106 - DNA, 1149 bp, Shigella flexneri
atgtccacgtatacccggcctgtcatgcttttgctgtctggcctgcttttgttgactctggcgatcgcggtgttaaatacactcgtgccgctttggctcgcccaggaacacatgtccacatggcaggtaggcgttgtcagctcatcctattttaccggcaaccttgtcggtacattgctgacagggtatgtcattaaacgcattggctttaaccgcagctattatctgtcctccttcatttttgctgctggctgtgccggccttggcctgatgattggtttctggagctggttggcgtggcgttttgtcgcgggcgtcggctgtgccatgatttgggtggttgttgagagcgcgctgatgtgcagtgggacgtcacgtaaccgtgggcgtttgcttgctgcgtatatgatggtttattacgtgggaacgtttttaggccagttactggtcagcaaagtctcaaccgagctgatgagcgtattgccgtgggttacaggtttgacattggcagggatcttaccgctgttgtttacgcgtgtcctgaatcagcaggctgaaaaccatgattcgacgtcaattacggcaatgctaaaactccgtcaggcgcggcttggcgtgaatggctgcattatctcaggaatcgttctgggatctctatatggcctgatgcctctgtacctcaatcacaaaggggtgagcaatgccagtattggtttctggatggcggtactggtcagtgcgggtatcctcggacaatggccgattggacgtctggcggataagtttggtcgactgctggttttgcgtgttcaggtctttgtcgtcattctcggcagtattgcgatgcttagccaggcggcgatggccccagcgttattcatcctcggtgccgctggctttacgctatatccggtggcgatggcctgggcttgtgagaaagttgaacatcatcaactggtggcgatgaaccaagccttactgttgagctataccgtgggaagtctgcttggcccgtcatttagcgctatgctaatgcagaatttctccgataatttattgtttatcatgatcgccagcgtatcgtttatctatttgctgatgctgcttcgcaacgccggtcatacgccgaaacccgttgctcacgtgtaa

SEQ ID NO: 472107 - DNA, 627 bp, Shigella flexneri
atgaccaaaccgtatgttcgtcttgataaaaatgatgctgccgttttgcttgttgatcaccaggctggtttactttcccttgtacgggatatcgaacccgataagtttaaaaataacgtgctggcgctgggtgacctggctaagtatttcaacttaccaactattcttaccaccagttttgaaaccggtcctaacggcccattagttctagaactgaaagcacaattccccgatgcaccttacattgctcgcccgggcaatattaacgcctgggataacgaagattttgtaaaagcagtcaaagcaacaggtaaaaaacagttaattattgccggtgtggtaaccgaagtttgcgtggcattcccggcgctttcagccattgaagaagggtttgatgtctttgtcgtgactgatgcatcagggacctttaatgaaattacccggcattcggcgtgggatcgcatgtcgcaagctggtgcgcaattgatgacatggttcggcgtggcttgcgagctgcaccgtgactggcgtaatgatattgaaggactggcgacgttgttctctaaccatattcctgattatcgtaatttgatgaccagttatgacacgttaacgaagcagaaataa

SEQ ID NO: 472108 - DNA, 792 bp, Shigella flexneri
atgggaagtggatggcatgaatggccgctgatgatcttcacggtcttcgggcaatgtgtggcgggtggttttatcgttctggctttggcgctgctcaaaggcgacctgcgagcagaagcccagcagcgtgttatcgcctgcatgtttggcttatgggtactgatgggcattggctttatcgcctctatgctccatcttggttcaccgatgcgcgcctttaactcgctcaaccgggtaggggcttcagcactcagtaacgaaatcgccagcggttcgatcttttttgctgtaggcggcatcggctggttgctggcaatgctgaaaaagctgtcaccggcattgcgtacgctatggctggtggtgacgatggttcttggcgtcgtctttgtctggatgatggtgcgtgtgtataacagcattgataccgttccgacctggtacagcatctggacgccgatgggctgggcgatgcgtctgctgccagccatttctgtactggcactggtggtgagtggcgtgatgtcagtgatgcagggcacagagctggcaactattcatagttctgtgcagcaggccgcagcgctggtgccggactatggtgcgctgatgtcctggcggatcgtgcttttggccgttgccctgtgcttgtggattgcaccacagctaaaaggttatcagcctgcggttccgctactatccgtctcattcattctgcttctggcaggggaattaatcggtcgcggcgtattctatggtttgcatatgaccgtggggatggccgtcgcaagctaa

SEQ ID NO: 472109 - DNA, 618 bp, Shigella flexneri
atgacaacccagtatggattttttattgattccagccgttgcaccggttgcaaaacctgtgagctggcttgtaaagactacaaagatttgacgccagaagtcagtttccgccgcatttatgaatatgctggcggcgactggcaggaagataacggtgtctggcaccagaacgtgtttgcctactatctgtcgatttcgtgcaaccactgcgaagatccggcttgtactaaagtctgcccgagcggtgcgatgcataaacgcgaagatggttttgttgtggtcgatgaagatgtatgcattggctgccgttactgtcatatggcttgcccgtatggcgcaccgcaatataacgaaacgaaaggccatatgaccaaatgcgatggttgttatgaccgtgttgcggagggtaaaaagccgatctgtgttgaatcttgcccgctgcgggcgctggatttcggccctatcgacgagctgcgtaaaaaacatggcgatctggcggccgttgcgccgttgccgcgagctcactttaccaaaccgaatattgtgatcaaacccaatgccaatagccgcccgaccggggataccactggctatctggcaaacccgaaggaggtgtga

SEQ ID NO: 472110 - DNA, 2118 bp, Shigella flexneri
atgcgtcaccgtgtctacaatccggaccgcctgaaatatccgatgaaacgagtcggggcgcgcggtgaaggcaaattcgagcgcattagctgggaagaagcctacgacatcatcgcgaccaatatgcagcgcctgatcaaagagtacggcaacgagtctatctatctgaactatggcaccggtacgctgggcggcaccatgacccgctcctggccgccgggaaataccctggtcgcgcgcctgatgaactgctgcggcggttatcttaaccattacggtgactactcttccgcgcaaattgcggaaggtttgaaccatacctacggcggctgggcagatggtaacagcccgtcggatatcgaaaacagtaaattggtagtgctgtttggtaataacccaggcgaaacgcgaatgagtggcggtggggtgacttactatcttgaacaggcacgccagaaatctaatgctcgcatgatcatcatcgatccgcgctataccgacaccggtgccgggcgcgaagatgagtggatccctattcgtccaggaacagatgccgcactggttaacggtctggcgtacgtcatgatcactaaaaacctggtggatcaggcattcctcgataaatattgcgttggctatgacgagaaaaccctgcccgccagtgcgccgaaaaatggtcattataaagcttatattctgggtgaagggccagatggcgtggctaaaacaccggaatgggcctcgcaaatcaccggtgttccggcagacaaaatcatcaaactggctcgtgaaatcggcagtaccaaaccggcgtttatcagccagggatggggcccgcagcgtcacgctaacggtgaaatcgcaacccgtgctatctcgatgctggcgattctgaccggtaacgttggtattaatggagggaacagcggcgcgcgtgaaggttcatacagcttaccgtttgtccgtatgccgaccttggaaaacccgatccagaccagcatttcgatgtttatgtggaccgatgccattgaacgtggcccggaaatgacggcgctgcgtgatggtgtgcgcgggaaagataagctggatgtgccgatcaaaatgatctggaactatgccggtaactgcctgattaaccagcattctgaaatcaaccgtacccatgaaatcctccaggatgataagaagtgcgagctgattgtggttatcgactgccacatgacctcatcggcgaaatatgctgacatcctgctgcctgactgcaccgcttccgaacagatggactttgcactggatgcatcctgcgggaatatgtcttacgtgattttcaacgatcaggtgattaaaccgcgctttgaatgtaagaccatctatgaaatgaccagcgaactggcaaaacgtcttggcgttgagcaacagtttactgaaggccgtacccaggaagagtggatgcggcatctgtatgcccagtcgcgggaagcgattcctgaactgccaacgtttgaagagttccgcaagcaggggatctttaaaaagcgcgacccacaagggcatcacgttgcttataaagccttccgtgaagatccgcaggcaaacccactgactacgccatcgggcaaaattgagatttattcgcaggcgctggctgacattgccgctacctgggaattgccagaaggcgatgtgatcgatccactgccgatctacacgccgggctttgaaagttatcaggatccgctgaacaaacagtatccgctgcagcttacaggtttccactataaatctcgcgttcactcaacttacggcaacgttgatgtgctgaaagcggcttgccgtcaggaaatgtggatcaacccgcttgatgcccaaaaacgcggtatccacaacggcgataaagtcaggatctttaacgatcgtggtgaggttcatattgaggcgaaagtgacgccacgaatgatgccgggcgtggtcgcactgggtgaaggcgcctggtatgacccggatgcaaaacgtgtcgataagggcggttgtatcaacgtactgaccactcaacgtccgtctcctctcgctaaggggaatccgtcacatacaaaccttgttcaggttgaaaaggtgtaa

SEQ ID NO: 472111 - DNA, 300 bp, Shigella flexneri
atgaaaacgaaaatccctgatgcggtattggctgctgaggagagtcgccgtggtttggtaaaaacgacagcgatcggcggcctggcaatggccagcagcgcattaacattaccttttagtcggattgcgcacgctgtcgatagcgccattccaacaaaatcagacgaaaaggttatctggagcgcctgtacagttaactgtggtagtcgctgcccgctacgtatgcacgtcgtggacggtgaaatcaaatatgtcgaaacggacaataccggcgatgacaattacgacggcctacactag

SEQ ID NO: 472112 - DNA, 1293 bp, Shigella flexneri
atgctcgatcccaatctgctgcgtaatgagccagacgcagtcgctgaaaaactggcacgccggggctttaagctggatgtagataagctgggcgctcttgaagagcgtcgtaaagtattgcaggtcaaaacggaaaacctgcaagcggagcgtaactcccgatcgaaatccattggccaggcgaaagcgcgcggggaagatatcgagcctttacgtctggaagtgaacaaactgggcgaagagctggatgcagcaaaagccgagctggatgctttacaggctgaaattcgcgatatcgcgctgaccatccctaacctgcctgcagatgaagtgccggtaggtaaagacgaaaatgacaacgttgaagtcagccgctggggtaccccgcgtgagtttgactttgaagttcgtgaccacgtgacgctgggtgaaatgcactctggcctcgactttgcagctgcagttaagctgactggttcccgctttgtggtaatgaaagggcagattgctcgcatgcaccgcgcactgtcgcagtttatgctggatctgcataccgaacagcatggctacagtgagaactatgttccgtacctggttaaccaggacacgctgtacggtacgggtcagctgccgaaatttgctggcgatctgttccatactcgtccgctggaagaagaagcagacaccagtaactatgcgctgatcccaacggcagaagttccgctgactaacctggtgcgcggtgaaatcatcgatgaagatgatctgccaattaagatgaccgcccacaccccatgcttccgttctgaagccggttcatatggtcgtgacacccgtggtctgatccgtatgcaccagttcgacaaagttgaaatggtgcagatcgtgcgcccagaagactcaatggcggcgctggaagagatgactggtcatgcagaaaaagtcctgcagttgctgggcctgccgtaccgtaaaatcatcctttgcactggcgacatgggctttggcgcttgcaaaacttacgacctggaagtatggatcccggcacagaacacctaccgtgagatctcttcctgctccaacgtttgggatttccaggcacgtcgtatgcaggcacgttgccgcagcaagtcggacaagaaaacccgtctggttcataccctgaacggttctggtctggctgttggtcgtacgctggttgcagtaatggaaaactatcagcaggctgatggtcgtattgaagtaccagaagttctgcgtccgtatatgaacggactggaatatattggctaa

SEQ ID NO: 472113 - DNA, 1344 bp, Shigella flexneri
gtgagcaatctgtcgctcgatttttcggataatacttttcaacctctggccgcgcgtatgcggccagaaaatttagcacagtatatcggtcagcaacatttgctggctgcggggaagccgttgccgcgcgctatcgaagccgggcatttgcattctatgatcctctgggggccaccgggtaccggcaaaacaaccctcgctgaagtgattgcccgctatgcgaacgctgatgtggaacgtatttctgccgtcacctctggcgtgaaagagattcgcgaggcgatcgagcgcgcccggcaaaaccgcaatgcaggtcgccgcactattctttttgttgacgaagttcaccgtttcaacaaaagccagcaggatgcatttctgccacatattgaagacggcaccatcacttttattggcgcaaccactgaaaacccgtcgtttgagcttaattcggcactgctttcccgtgcccgtgtttatctgttgaaatccctgagtacagaggatattgagcaagtactaactcaggcgatggaagacaaaacccgtggctatggtggtcaggatattgttctgccagatgatacacgacgtgccattgcagaactggtgaatggcgacgcgcgccgggcgttaaatacgctggaaatgatggcggatatggccgaagtctatgatagcggtaagcgggtcctgaagcctgaattactgaccgaaatcgccggtgaacgtagcgcccgctttgataacaaaggcgatcgcttttacgatctaatttccgcactgcataagtcggtacgtggtagcgcacccgatgcggcgctgtactggtatgcgcgaattattaccgctggtggcgatccgttatatgtcgcgcgtcgctgtctggcgattgcgtctgaagacgtcggtaatgccgatccacgggcgatgcaggtggcaattgctgcctgggattgctttactcgcgttggcccggcggaaggtgaacgcgccattgctcaggcgattgtttacctggcctgcgcgccaaaaagcaacgctgtctacactgcgtttaaagccgcgctggccgatgctcgcgaacgcccggattatgacgtgccggttcatttgcgtaatgcgccgacgaaattaatgaaggaaatgggctacgggcaggaatatcgttacgctcatgatgaagcaaacgcttatgctgccggtgaggtttacttcccgccggaaatagcacaaacacgctattatttcccgacaaacaggggccttgaaggcaagattggtgaaaagctcgcctggctggctgaacaggatcaaaatagccccataaaacgctaccgttaa

SEQ ID NO: 472114 - DNA, 612 bp, Shigella flexneri
atgaaaaaaattgctatcacctgtgcattactctcaagcttagtagcaagcagcgtttgggctgatgccgcaagcgatctgaaaagccgcctggataaagtcagcagcttccacgccagcttcacacaaaaagtgactgacggtagcggcgcggcggtgcaggaaggtcagggcgatctgtgggtgaaacgtccaaacttattcaactggcatatgacacaacctgatgaaagcattctggtttctgacggtaaaacactgtggttctataacccgttcgttgagcaagctacggcaacctggctgaaagatgccaccggtaatacgccgtttatgctgattgcccgcaaccagtccagcgactggcagcagtacaatatcaaacagaatggcgatgactttgtcctgacgccgaaagccagcaatggcaatctgaagcagttcaccattaacgtgggacgtgatggcacaatccatcagtttagcgcggtggagcaggacgatcagcgcagcagttatcagctgaaatcccagcaaaatggggctgtggatgcagcgaaatttaccttcaccccgccgcaaggcgtcacggtagatgatcaacgtaagtag

SEQ ID NO: 472115 - DNA, 4029 bp, Shigella flexneri
ttgagccaggaatacactgaagacaaagaagtcacattgacaaagttaagtagcggccgccgccttctggaggcattgctgatccttattgtcctgtttgccgtctggttgatggctgccttactaagctttaacccttcggaccccagctggtcgcaaacggcctggcatgaacctatccataatttaggtgggatgcccggtgcgtggttggcagatacgctgttctttatttttggcgtgatggcttacaccattcccgtcattattgtcggcggttgttggtttgcctggcgtcatcagtccagcgacgaatacattgattattttgccgtttcgctacgcatcattggcgttttggcgctcatccttacctcctgtggtctggcggcaatcaacgctgacgatatctggtattttgcctccggtggcgtcattggcagcttactaagcactacgctacaaccactgctacacagtagcgggggaactattgcgctgctctgcgtttgggcagcgggcctgacgttgttcaccggttggtcatgggtgaccattgctgaaaaactcggcggctggattttaaacattctcaccttcgccagtaatcgtacccgtcgcgatgatacctgggtcgatgaagatgagtatgaagacgacgaagagtatgaagatgaaaatcacggcaaacagcatgaatcacgccgtgcccgtattcttcgcggcgcgctagcgcgtcgtaaacggttggcggaaaaattcattaatccgatggggcggcaaacagacgctgcgttgttctccggtaagcggatggatgatgacgaagagattacctacactgcacgcggtgtggctgccgacccggacgacgtcctattttcgggcaatcgtgcaacgcagccagaatatgacgaatacgatccattattaaacggtgcgccaattaccgaacctgtcgctgtagcagctgctgctaccacggcgacacaaagctgggctgcgccggttgaacctgtgactcagacgccgcctgttgcctctgttgatgttccaccttcgcaacctacagtagcctggcagcctgtaccgggtccacaaacgggagagccggttattgctcctgcaccggaaggttacccacagcagtcacaatatgcgcagcctgcagtgcaatataatgagccgctgcaacaaccagtacagccgcagcagccgtattatgcacctgcagctgaacaacctgcgcaacagccgtattatgcccctgcgccagaacaaccggtggcaggtaacgcctggcaagccgaagagcagcaatccacttttgctccacagtctacataccagactgagcaaacttatcagcagccagccgctcaggagccgttgtaccaacagccgcaacccgttgaacagcagcctgttgtggagcctgaacccgttgtagaagagacaaaacccgcgcgtccgccgctttactattttgaagaagtggaagagaagcgagcccgtgaacgtgaacaacttgcggcctggtatcaaccgattccagaaccggttaaagaaccagaaccgatcaaatcttcgctgaaagcaccttctgttgcagcagtacctccagtagaagccgctgccgctgtttctccgctggcatctggcgtgaaaaaagcgacactggcgacgggggctgccgcaaccgttgccgcgccagtcttcagtctggcaaatagcggtggaccgcgtccgcaggtcaaagaggggattggcccgcagttgccacgaccgaaacgtatccgcgtgccaactcgtcgtgaattggcgtcttacggtattaagctgccctcacagcgtgcggcggaagaaaaagcccgtgaagcccagcgcaatcagtatgattctggcgatcagtataacgatgatgaaatcgatgcgatgcagcaggatgaactggcacgtcagttcgcccagacacagcagcaacgctatggcgaacagtatcaacatgatgtgcccgtaaacgcagaagatgcagatgctgcggcagaggctgaactggctcgtcagtttgcgcaaactcaacaacaacgttattccggcgaacaaccggctggggcgaatccgttctcgctggatgattttgaattttcgccaatgaaagcgttgctggatgatggtccacacgaaccgctgtttacgccaattgttgaacctgtacagcagccgcaacaaccggttgcaccacagcagcagtatcagcagccacaacagccggttgcgccacagccgcagtatcagcagccacaacagcaggttgcgccgcagccacaatatcagcagccgcaacaaccggttgcgccacagcagcaatatcagcagccgcaacaaccagttgcgccgcagccgcagtatcaacagccgcaacaaccggttgcaccgcagccgcagtatcagcagccacaacagccagttgcgccacagccgcaggataccctgcttcatccgctgttgatgcgtaatggcgacagccgtccgttgcacaaaccgacgacgccgctgccttctctggatttgctgacaccgccgccgagcgaagtggagccggtagatacctttgcgcttgaacaaatggcgcgtctggtggaagcgcgtctggctgatttccgtattaaagccgatgtcgttaattactctccggggccagttatcactcgctttgaacttaacctggctcctggcgtaaaagcggcgcgcatttctaacttgtcacgggaccttgcccgttcactttcgacggtggcggtgcgtgtcgttgaagttattcctggcaaaccctatgtaggtctggagttaccaaataaaaaacgacaaaccgtttatctgcgcgaagttttggataacgccaaattccgcgataatccgtcgccattaaccgtggtgctgggtaaagatatcgccggtgagccggtggttgccgatctggcgaaaatgccgcacttgttggttgcggggactaccggttccggtaaatctgtcggtgtgaacgcgatgatcctgagcatgctttataaagcacagccagaagatgtgcgtttcatcatgatcgacccgaaaatgctggagctttcggtttatgaaggcattccgcacctgttaacggaagtcgttactgatatgaaagatgccgccaacgcgctgcgctggtgtgttaacgagatggagcgtcggtataaactgatgtctgcgctgggtgtgcgtaatctggcgggttataacgaaaaaattgctgaagccgatcgcatgatgcgtccgattccagacccgtactggaagccgggtgacagtatggatgcccagcatccggtgctgaaaaaagaaccatacattgtcgtgttggttgacgaatttgccgacctgatgatgacggtaggtaaaaaagtggaagagctgatagctcgtctggcgcaaaaagcccgtgccgcgggtatccacctcgtactggcaactcagcgtccatcggttgatgttattactggtctgattaaagcgaatattccgacccgtatcgcctttaccgtatccagtaagattgactcacgtaccattcttgatcaggctggcgcggaatcactgctgggtatgggggatatgctctactctgggccgaactccacgttgccggtacgtgtccatggtgcttttgttcgcgatcaggaagttcatgccgtggtgcaggactggaaagcgcgtggtcgcccacagtatgttgatggcatcacctccgacagcgaaagcgaaggtggtgcgggtggtttcgatggcgctgaagaactggatccgttgttcgatcaggcggtgcagtttgtcactgaaaaacgcaaagcgtcaatttctggcgtacagcgtcagttccgcattggttataaccgtgcagcgcgtattatcgaacagatggaagcgcaggggattgtcagcgaacaggggcacaacggtaatcgtgaagtgctggccccaccgccgtttgactaa

SEQ ID NO: 472116 - DNA, 495 bp, Shigella flexneri; identical to SEQ ID NO: 458595

SEQ ID NO: 472117 - DNA, 966 bp, Shigella flexneri
atgggcacgaccaaacacagtaaactgcttatcctgggttcaggcccggcgggatacaccgctgctgtctacgcggcgcgcgccaacctgcaacctgtgctgattaccggcatggaaaaaggcggccaactgaccaccaccacggaagtggaaaactggcctggtgatccaaacgatctgaccggtccgttattaatggcgcgcatgcacgaacatgccaccaagtttgaaactgagatcatttttgatcatatcaacaaggtggatctgcaaaaccgtccgttccgtctgaatggcgataacggcgaatacacttgcgacgcgctgattattgccaccggagcttctgcacgctatctcggcctgccctctgaagaagcctttaaaggccgtggggtttctgcttgtgcaacctgcgacggtttcttctatcgcaaccagaaagttgcggtcatcggcggcggcaataccgcggttgaagaggcgctgtatctgtctaacatcgcttcggaagtgcatctgattcaccgccgtgacggtttccgcgcggaaaaaatccttattaagcgtctgatggataaagtggagaacggcaacatcattctgcacaccaaccgtacgctggaagaagtgaccggcgatcaaatgggtgtcactggcgttcgtctgcgcgatacgcaaaacagcgataacatcgagtcactcgacgttgccggtctgtttgttgctatcggtcacagcccgaatactgcgattttcgaagggcagctggaactggaaaacggctacatcaaagtacagtcgggtattcatggtaatgccacccagaccagcattcctggcgtctttgccgcaggcgacgtgatggatcacatttatcgccaggccattacttcggccggtactggctgcatggcagcacttgatgcggaacgctacctcgatggtttagctgacgcaaaataa

SEQ ID NO: 472118 - DNA, 1767 bp, Shigella flexneri
atgaataaatctcgtcaaaaagagttaacccgctggttaaaacagcaaagcctcatctcccaacgttggctgaatatttctcgtctgctgggctttgtaagcggcatattgatcattgcccaggcctggttcatggcgcgaattctgcaacatatgattatggagaatattccccgtgaagccctgctgcttccctttacgttactggttctgacctttgtattgcgcgcatgggtggtctggttacgcgaacgggtgggttatcacgccgggcagcatatccgctttgccatccgccgtcaggttctcgaccgtctgcaacaagcagggccagcgtggattcagggtaaacctgcggggagctgggcgacgctggtactcgagcaaattgacgatatgcatgattactatgcacgctatctgccgcaaatggcgctggcagtgtcggtgccgttgctgattgtggtggcgatcttcccctctaactgggctgcggcgctcattctgctgggcacagcaccgctaattccgttgtttatggcgctggttggaatgggggctgccgatgctaaccggcgtaactttctcgctcttgctcgcttaagtgggcatttcctcgatcgcctgcgcggcatggaaacattgcgtatttttggtcgtggtgaagctgaaattgaaagtattcgttctgcttcggaagatttccgccaacggacaatggaagtgctacgactggcgtttttatcctccggcattctcgaattttttacctcgctgtcaattgctctggtggcggtctactttggtttttcctatctcggcgagctggattttggtcactacgatactggggtgacgctggctgcaggttttctggccctgatccttgcgccagagtttttccagccattacgcgatctcggtacgttttatcatgctaaagcccaggctgttggtgcagctgacagtctgaaaacgtttatggaaaccccgctcgcccatccgcagcgcggtgaggcggaattagcattgaccgatccgctgaccattgaggccgaggatctgtttatcacgtcgccggaaggtaaaacgctggccggaccgctgaactttactttgccagcaggccaacgtgcagtgttggttggccgcagcggttcaggtaaaagctcactgctgaacgcgctttctggttttctctcatatcagggatcattacgaatcaacgggatagaattacgtgatttatcaccagaatcatggcgtaaacatctctcctgggttgggcaaaacccacaattaccggcagcaaaattgcgggataacgtactactggcgcgacctgatgccagcgaacaagaattacaagcagcgctggataacgcctgggtcagcgagtttctaccgctcctgccacaaggcgttgatacacctgttggcgaccaggctgcccgcctttccgtggggcaggcgcagcgcgtggcggtggcccgtgcgttactaaatccctgttcgctattactgttggatgaacccgctgccagccttgatgctcacagtgaacagcgcgtaatggaggcgctgaatgccgcctctctgcgccagacaacgttaatggtcacccaccagttagaagatcttgctgactgggatgtcatttgggttatgcaggatggccggattattgagcaaggacgttacgcggaattaagtgtggctggtggcccattcgccacattactggcccatcgtcaggaggagatttaa

SEQ ID NO: 472119 - DNA, 1722 bp, Shigella flexneri
atgcgcgctttgctaccctatctggcactgtataaacgtcataaatggatgttaagtcttggtattgtgctggcaattgtgacgctgctcgccagtatcggtctgttgacactttccggctggttcctctcggcctcagcggttgcgggggttgccggactgtacagcttcaactatatgctacccgctgcgggcgtgcgtggtgccgcaatcacccgtactgccgggcgttattttgaacgtctggtaagtcacgacgcgactttccgcgtgttgcagcatctgcgcatttacaccttcagcaaattgttgcccctctcccctgccggactggcgcgctatcgtcagggcgaattgctcaaccgcgtggtggcggatgttgatacgctcgatcatctttacctgcgcgttatctcgccgctggtgggcgcttttgtggtgattatggtggtgacaatcgggttaagtttccttgatttcaccctcgcctttacgctgggcagcgttatgttactgacgcttttcctgatgccaccgctgttttatcgtgcgggaaaaagcaccgggcaaaatctgactcatcttcgcggacagtatcgccaacaactgacggcctggctgcaagggcaagctgagctgaccatttttggtgccagcgatcgttatcgcacgcaactagagaatacagaaattcaatggctggaagcgcaacgccgtcaatctgaactgaccgcattgtcgcaagcgataatgctgctcattggcgcgttagcggtgatcctgatgctgtggatggcgtctggcggcgttggcggcaatgctcaacccggcgcattaattgccctgtttgtcttttgtgcgttagccgcgtttgaagcactggcaccagtaacgggtgcatttcagcatctggggcaagtcattgcctctgccgtacgtatctctgacttaacggatcaaaaaccggaggtcaccttccctgatacccaaactcgtgttgccgatcgcgtttcgctgacattacgggatgttcagttcacttatccggagcaatcccaacaggcacttaaagggatttctcttcaggtaaacgccggggaacatatagcgattctcgggcgaaccggatgcggcaaatcaacactgttacaactgctgacccgcgcatgggacccgcaacagggcgagattttgcttaacgatagccccatagccagcctgaatgaagcggctctacgacagaccatcagcgttgttcctcagcgagtgcatctgtttagcgccacgctgcgtgataatctgttactcgcctcgcctggcagtagtgatgaggctctgtcggagatcttgcgtcgcgttggtctggagaagctgctcgaggatgcaggtctcaacagttggttaggtgaaggcggacgccagctctccggtggtgaactgcgccgtctggctatcgcccgtacgctgttacatgatgcgccactggtgttgctggatgaacctaccgaaggcttagatgccacaaccgaaagccagatccttgaattgcttgcaaaaatgatgcgtgagaaaacggtgttaatggtcacccatcgacttcgcggactctctcgtttccaacaaataatagtgatggacaacgggcaaattattgagcaaggtactcacgcagaactgcttgccagacaggggcgttattaccagttcaagcagggtttgtaa

SEQ ID NO: 472120 - DNA, 705 bp, Shigella flexneri
atgcgcttggttcagctttctcgccattcaatagccttcccttccccggaaggcgcattacgtgagcctaacggcctgctggcacttgggggcgatcttagccctgcgcgcctgttaatggcttaccagcgtggtatttttccgtggttttctccaggcgaccccatcctctggtggtcgcccgatccccgcgcggtgctatggccagaatcactgcatatcagccgtagtatgaagcgatttcataaacgctcgccctatcgtgtcacgatgaattacgcttttggtcaggtcattgaaggctgtgccagcgatcgcgaagaaggaacctggatcacgcgtggcgtggtcgaagcctaccatcgccttcacgaactcggtcatgcccactccattgaagtctggcgtgaagatgagcttgtcggcggtatgtacggcgtggcccagggaacgctattttgtggcgagtccatgttcagccggatggaaaatgcgtctaaaacggcgcttctggtattctgtgaggaatttatcggtcatggcggtaagcttatcgactgccaggtccttaacgatcacacagcatcgcttggtgcctgcgaaattccccgccgggattaccttaattatctcaatcaaatgcgcctcggacgattgccgaataatttctgggtaccacggtgcttgttttcaccacaagaatga

SEQ ID NO: 472121 - DNA, 219 bp, Shigella flexneri; identical to SEQ ID NO: 848

SEQ ID NO: 472122 - DNA, 2277 bp, Shigella flexneri
atgctcaatcaagaactggaactcagtttaaatatggctttcgccagagcgcgcgagcaccgtcatgagtttatgaccgtcgagcacttgttactggcgctgctcagtaacccatctgcccgggaggcgctggaagcgtgttctgtggatttggttgcgctccgtcaggaactggaagcctttattgaacaaaccacacccgttctgcctgccagtgaagaggagcgcgacacacagccgacgctgagttttcagcgtgtactgcaacgtgcggtcttccatgtccagtcctccggtcgcaatgaggttaccggtgcaaacgttctggtcgctatcttcagcgaacaggagtcgcaggcggcatatctgttgcgtaaacatgaagtcagccgtctcgatgtggtgaactttatctctcatggcacgcgtaaagacgagccgacacagtcttctgatcctggcagccagccaaacagcgaagaacaagctggtggggaggaacgtatggagaatttcacgacgaacctgaaccagcttgcgcgtgtgggcggaatcgacccactaattggtcgtgagaaagagctggagcgtgctattcaggttctctgccgtcgccgtaaaaacaacccgctgctggtgggggaatctggtgtcggtaaaaccgcgattgcagaaggtcttgcctggcgaattgttcagggtgatgtgccggaagtgatggctgactgtacgatttactctctcgatatcggttctctgttagcgggcacaaaatatcgcggcgactttgaaaaacgttttaaagcgttgctcaagcagctggagcaggacactaacagcatcctgtttattgatgagatccacaccattatcggtgcgggtgcagcgtctggtggtcaggtcgatgcggctaacctaatcaaaccgttgctctccagcggtaaaattcgcgtaattggttcgacaacctatcaggagttcagcaacattttcgagaaagaccgtgctctggcgcgtcgcttccagaaaattgatattactgaaccgtcgatcgaagaaactgttcaaatcatcaatggcctgaaaccgaagtatgaagcgcaccacgacgtgcgttataccgcaaaagcggtgcgtgcggcggtagagctggcggtgaaatacattaacgatcgtcatctgccggataaagccattgatgttatcgacgaagcgggcgctcgcgcacgtctgatgccggtaagcaaacgcaagaaaaccgttaatgtggcggatattgagtccgtggtggcccgtattgcacgcattccagagaagagtgtttctcagagtgaccgcgataccctgaaaaaactcagcgatcgcctgaaaatgctggtcttcggccaggataaagccattgaggcgctgactgaagccattaagatggcgcgtgcaggtttaggtcacgaacataaaccggtcggttcgttcctgtttgccggtcctaccggggtcgggaaaacagaggtgacggtacagctttcgaaagcgttgggcattgagcttctgcgctttgatatgtccgagtatatggaacgccataccgtcagccgtctgattggtgcgcctccgggatacgttggttttgatcagggcggtttgctgaccgatgcggtaatcaagcatccacatgcggtgctgctgctggacgaaatcgagaaagcgcatccggacgtgttcaatattctgttgcaggtgatggacaacggtacgctgaccgataacaacggacgcaaagcggacttccgtaacgtggtgctggtgatgaccactaacgccggggtacgggaaactgagcgcaaatccattggtcttatccaccaggataacagcaccgatgcgatggaagagatcaagaagatctttacaccggaattccgtaaccgtctcgacaacattatctggttcgatcatctgtcaactgacgtgatccatcaggtggtggataaattcatcgtcgagttgcaggttcagctggatcagaaaggtgtttctctggaagtgagccaggaagcgcgtaactggctggccgagaaaggttacgaccgggcaatgggcgcacgtccgatggcgcgtgtcatccaggacaacctgaaaaaaccgctcgccaacgaactgctgtttggttcgctggtggacggcggtcaggtgacggttgcgctggataaagagaaaaatgagctgacttacggattccagagtgcacaaaagcacaaggcggaagcagcgcattaa

SEQ ID NO: 472123 - DNA, 321 bp, Shigella flexneri; identical to SEQ ID NO: 458588

SEQ ID NO: 472124 - DNA, 225 bp, Shigella flexneri; identical to SEQ ID NO: 839

SEQ ID NO: 472125 - DNA, 1947 bp, Shigella flexneri
atgacgcctttgctcgaattaaaggatattcgtcgcagctatcctgccggtgatgagcaggttgaggtgctgaagggcatcagcctcaatatttatgcgggtgagatggtcgcgattgttggcgcttcgggttccggtaaatcgaccctgatgaatattctcggctgcctggataaggccaccagcggcacctatcgcgtagccggtcaggatattgccacgctggacgccgatgcgctggcgcaactgcgccgcgagcatttcggctttattttccagcgttaccatttgcttccgcatttaaccgccgagcagaacgttgaagtacccgccgtctatgccggtcttgagcggaaacagcgactgcttcgtgcccaggagttgctgcaacggctggggctggaagaccgtacagagtattatccggcacagctttcgggtggtcagcaacagcgcgtcagcatcgcgcgggcattgatgaacggcggtcaggtaattcttgccgatgaaccgaccggcgcactggacagccattctggcgaagaggtgatggcgatcctgcatcagctgcgcgatcgcgggcatacggtgattatcgtcacccacgatccgcaggtcgctgctcaggccgagcgggtgatcgaaattcgcgacggcgaaattgtgcgcaatcctcccgccattgaaaaagtgaatgttgctggcgggacggagcctgttgtcaatacagtgtctggctggcggcagtttgtcagcggttttaacgaggcgctgacgatggcatggcgggcgctggcagcgaataaaatgcgtactttactgaccatgctggggattattatcggtattgcgtcggtggtttccattgtcgtggtgggtgacgccgccaaacaaatggtgctggcggatattcgttctattggtacgaatactattgatgtctatcccgggaaagattttggcgatgacgatccgcaatatcagcaggcgctgaagtacgacgacttaatcgccatccaaaaacaaccgtgggtcgcctcagccacacctgccgtctcgcaaaacctgcgcctgcgttataacaatgttgatgttgctgccagtgccaatggcgtgagcggcgattattttaatgtctatggcatgaccttcagtgaaggaaacacctttaatcaggagcagctgaacggtcgtgcgcaggtcgtggttctcgacagtaatactcgccgccagcttttcccccataaagcagatgtggttggcgaggtgattctggtcggcaatatgcccgccagagtcattggtgtggcggaagaaaaacagtcgatgtttggtagcagtaaagtgctgcgtgtctggctaccttacagcacgatgtccgggcgagttatgggccagtcgtggcttaactccattactgtcagggtgaaagaaggatttgacagcgccgaggcggaacagcaactcacgcgtttactttcactgcgccacggtaagaaggatttctttacctggaacatggacggcgtcttgaaaactgttgaaaagaccacacgtactttacaactgtttctgacgctggtggcggtgatttcgctggtggtgggcggtattggtgtaatgaatattatgctggtgtcagtgaccgagcggacgcgggaaattggcattcgcatggctgtaggtgcgcgagcaagcgatgttttgcaacagttcctgatcgaagccgtactggtttgcctggtcggtggcgcgttgggaataacactgtcactgttaattgctttcaccttgcagcttttcttacccggctgggagattggtttttcaccgttggcgctgctgctggcgtttctctgctcgacggccaccgggattttatttggctggttacccgcacgaaatgcggcacgactggatccagtagatgctctggcacgggagtaa

SEQ ID NO: 472126 - DNA, 1116 bp, Shigella flexneri
atgaaaaagcggaaaaccgtgaagaagcgttacgttattgcgctggtgatagtcatcgccgaactgattacgttatggagaattcttaacgcacccgtgccgacttatcagacactgattgtgcgccccggtgatttacagcaaagcgtgctggcgaccggaaagctggacgcgctgcgtaaggttgacgtgggcgcgcaggtcagcggtcagttgaaaacgctgtcggtggcgattggcgataaagtaaaaaaagaccagcttttaggggtcattgatcctgaacaggctgaaaaccagatcaaggaggtcgaagcaacgctgatggagctacgcgcgcagcggcagcaggcggaagcggagctgaaactggcgcgggtgacgtattcccgtcagcaacgtctggcacaaacgcaagcggtttcactgcaggatctcgataccgccgcgacggagatggctgtgaaacaggcgcaaattggcaccattgacgcgcaaatcaagcgcaatcaggcctctctcgatacggctaaaaccaatctcgattacacccgtatcgttgccccgatggctggggaagtgacgcaaatcaccactctgcaaggccagacggtgattgccgcacagcaagcaccgaacattctgacgctggcagatatgagcactatgctggtaaaagcgcaggtttctgaagcggatgtaatccacctgaagccggggcaaaaagcctggtttacggtgcttggcgatccactgacgcgctacgaggggcaaatcaaggatgtgctaccgacgccggaaaaggtaaacgacgctattttctattacgcccgttttgaagtacccaaccccaatggtttgctgcggctggatatgaccgcgcaagtgcatattcagctcaccgatgtgaaaaatgtgttgacgatccctctgtcggcgttaggcgatccggttggcgataatcgttataaagtcaaattgttgcgtaatggtgaaacacgcgagcgtgaagtgacgattggcgcacgtaacgataccgatgttgagattgtcaaagggctggaagcgggcgatgaagtggtgattggtgaggccaaaccaggagctgcacaatga

SEQ ID NO: 472127 - DNA, 993 bp, Shigella flexneri
atggtgaaatcgacgtcatgtataaccattgatttcatgaatatgtcgcagctaactgaacggacctttacgccatctgaatctctcagcagcctgtcactttttcttagtctggcacgtggacagtgtcggccgggtaaattctggcatcgctgtagttttcgccagaaatttttgctgcgctcgttgattatgccgcgtttaagcgttgagtggatgaacgaactttcccactggcctaatctcaatgtgttgttaacgcgccagccgcgactgcctgtgcgtctgcatcgcccttaccttgccgcgaatcttagccgtaagcaattgctggaggcgttacgttaccattatgcgttactccgcgggtgtatgtcggcggaagaattcagcttatatttgaatacccccgggctgcaactggctaaactggaaggcaaaaacggtgagcagttcacgcttgagctgaccatgatgatctcaatggataaagaaggtgacagcacaatcctgttccgcaacagcgaaggtattcctctggcagagatcacgtttaccctgtgtgaatatcaggggaaaagaacgatgtttattggcggactgcaaggcgcaaaatgggaaattccacatcaggaaatccagaatgcgacgaaagcctgccacgggctatttcccaaacgcctcgtgatggaagcggcctgtctgtttgcccaacgtttgcaggtagagcagattattgccgtcagcaatgaaacgcatatttaccgcagcctgcgttatcgcgataaagaaggcaagatccatgctgattacaacgcgttctgggagtcggttggcggcgtatgtgatgctgaacgccattaccgccttccagcacagatagcacgaaaagagattgccgaaatcgccagtaaaaaacgggctgaataccgtcggcgctatgagatgctcgacgctattcagccacaaatggccacgatgtttcgcggttaa

SEQ ID NO: 472128 - DNA, 1659 bp, Shigella flexneri
atgattcttgagcgcgttgaaattgtgggttttcgcggtatcaaccgtttgtcgttgatgctcgaacaaaacaacgtcctgattggggagaacgcgtggggtaaatccagcttgctggacgccttaaccctgctgctatcgccagaatcagatctctaccattttgagcgcgacgatttctggttcccgccgggagatatcaacgggcgagaacatcatctgcatattattttgaccttccgcgaatcgctgccaggccgacatcgggttcgccgttatcggccgctggaagcgtgctggacgccatgcaccgatggctatcaccgtattttttatcgtctggaaggggagagtgcggaagacggcagcgtgatgacactgcgcagttttctcgataaagacggacatccgattgatgttgaggatattaacgatcaggcacgccatctggtgcgtttaatgccggtgctgcgcttgcgtgatgcccgttttatgcgccgtattcgtaacggcacggtgccaaatgtccccaatgtggaagtcaccgcgcgccagctcgatttcctcgcccgtgagttgtcctcacatccgcaaaatctctctgatggacagattcgtcagggactttccgcaatggtgcagttgcttgagcattatttctctgagcagggggctggacaggcgcgatatcgtttaatgcggcggcgggccagcaatgagcaacgaagctggcgctatctggacatcatcaaccggatgattgaccgacctggagggcgctcgtatcgggttattttgctcggcctgtttgctactttattgcaggcaaaaggcacattgcgactggataaagacgcgcgtccgttattgctaattgaagatccagaaacccgcctgcatccgattatgctttccgttgcctggcatctgttgaatcttttgcctttacagcgtattgctaccaccaactctggcgagctgctttcgttaactccagtggaacatgtttgccgcctggtgcgtgaatcttctcgtgttgccgcctggcgtctggggccaagtggcttgagcaccgaagacagccgccgcatctcttttcacattcgttttaatcgtccgtcatcgctgtttgctcgctgctggttgctggtggaaggggaaacggaaacctgggttatcaatgaactggcgcgtcagtgcggacatcattttgatgccgaagggatcaaggtcattgagtttgcccagtccgggctaaagccactggttaaatttgcccgccgaatggggattgaatggcatgtactggtcgatggcgatgaagcagggaagaaatatgccgctacggtacgcagcctgttgaataacgatcgggaagccgaacgagaacatttaacggcgttaccggcgctggatatggaacattttatgtatcgccagggattttccgatgtgttccaccgcgtggcgcaaatcccggaaaatgtaccgatgaatctacgcaaaattatctcgaaagcgatccatcgctcttccaaacccgatcttgccattgaagtggcaatggaggcaggacgtcgtggtgtggactccgtaccaacgctgctgaaaaaaatgttctcacgcgtgctgtggctggcgcgcggtcgcgcggattaa

SEQ ID NO: 472129 - DNA, 291 bp, Shigella flexneri
atggccgcgataggtagcataccgtttgagcgtggtgacgaagccgaaggatttttgatcgtcactgcggcggcagatcaaggtctggtagatattcatgaccgccgcccgctggttctgtcgccagaagctgcacgggaatggatgcggcaagacattggtggtaaagaagcctcagaaatcgctaccagaagctgtgtgccagcaaaccagttcacctggcaccctgtgtcgcgcacggtgggtaatgtcaaaaaccagggcgcggagttaattcaacctgtttgttga

SEQ ID NO: 472130 - DNA, 393 bp, Shigella flexneri
atgtgtggacgctttgcccaatcccaaacgcgtgaggattaccttgcgcttctcgcggaagatattgaacgcgatattccctacgatcccgaacccattggcagatacaatgtcgcgccgggaaccaaagttcttctgctcagtgaacgtgatgaacaccttcatctggatccggttttctggggatatgctcccggatggtgggataaaccgccgctgattaacgcccgcgtagaaactgcctcaaccagtcgcatgtttaaaccgctctggcaacatggtcgggcaatctgttttgccgatggctggtttgagtggaaaaaagaaggcgacaaaaaaagccttattttatctatcgcgctgacggacaacctgtttttatggccgcgatag

SEQ ID NO: 472131 - DNA, 234 bp, Shigella flexneri
atgaaaaatatcgttcctgattaccgccttgatatggtgggtgaaccctgcccttatccggcagtcgcaacccttgaggcgatgccgcaattaaaaaaaggtgagatcctggaagtggtgagcgactgtccgcagtcgatcaataatattccactggatgcgcgtaatcacggctacacggtgctggatattcagcaagacgggccgaccattcgttatttaattcagaagtaa

SEQ ID NO: 472132 - DNA, 1206 bp, Shigella flexneri
atgtcatggcagcaattcaaacacgcctggttgattaaattctgggcacccatccctgcggtcatcgcggcgggtattctctccacttactattttggcattactggcaccttttgggctgtcacgggtgaatttacccgttggggcggtcagctcctgcagctgtttggcgtccatgctgaagagtggggttattttaaaattatccatctggaaggatcgccattaacccgcatcgacggcatgatgatcctcggtatgtttggcggctgctttgctgctgcgctgtgggccaacaatgtcaaactacgcatgccacgcagccgtatccgcattatgcaggccatcattggcggcattatcgccggttttggcgcgcgtctggcaatgggctgtaacctggcggcgttctttaccggcattcctcagttctcgctgcatgcctggttctttgccatcgccactgccattggttcatggtttggcgcgcgctttaccctgctgcccatcttccgtattcccgtgaaaatgcagaaagtttctgccgcctcaccgctgacgcaaaaaccggatcaggcgcggcgtcgttttcgtctcgggatgctggtctttttcggcatgctgggctgggcgctgctcacggcgatgaaccaaccaaaactggggctggcaatgctgtttggcgtcggctttggtttactgattgaacgtgcgcaaatctgctttacttcggcgttccgcgatatgtggatcaccggacgtacccatatggcgaaagcaatcattatcggtatggcggtgagtgccatcgggatcttcagttacgtacagttaggcgttgaacctaaaatcatgtgggcgggaccaaatgcggtaattggtggtttactttttggttttggcatcgtgctggcaggcggctgcgaaaccggctggatgtaccgcgcggtagaaggccaggtgcactactggtgggtcggtctgggcaacgtgatcggctcaacgattctggcgtattactgggatgatttcgctccggcgctggccaccgactgggacaaaatcaacctgctgaaaacttttggtccgatgggaggcctgctggtgacatatttgctgctgtttgctgcgctgatgttgattatcggctgggaaaaacgcttcttccgccgtgaggcaccgcagactgctaaggagatcgcatga

SEQ ID NO: 472133 - DNA, 414 bp, Shigella flexneri
atgaaaaaactcgcaattgcaggcgcgctcatgttgctggcgggctgtgccgaagtcgaaaactataacaatgtcgtgaaaacccccgcgccggactggctggcgggctactggcagaccaaagggccgcaacgtgcgctggtcagtccggaagcgataggcagcctgattgtcactaaagagggcgataccttggattgccgtcagtggcagcgggggattgccgtgccgggtaagttgacattgatgtctgatgatctcactaacgttaccgtaaaacgtgagctgtacgaggttgagcgtgacggtaacaccattgagtacgatggtatgacgatggagcgtgtggatcgcccgacggcagagtgtgccgccgcgctggataaagcgccgttaccgacgccactgccgtaa

SEQ ID NO: 472134 - DNA, 1488 bp, Shigella flexneri
atgcgtaatcccacgctgttacaatgttttcactggtattacccggaaggcggtaagctctggcctgaactggccgagcgcgcagacggttttaatgatattggtatcaatatggtctggttgccgcccgcctataaaggcgcatcgggcggctattcggtcggctacgactcctatgatttatttgatctaggtgagtttgatcagaaaggcagcatccctactaaatatggtgataaagcacaactgctggccgccattgacgccctgaaacgtaatgacattgcggtgctgctggacgtggtagtcaaccacaaaatgggcgcggatgaaaaagaagctattcgcgtgcagcgtgtaaatgctgatgaccgtacgcaaattgacgaagaaatcattgagtgtgaaggctggacgcgttacaccttccccgctcgtgccgggcaatactcgcagtttatctgggatttcaaatgttttagcggtatcgaccatatcgaacaccctgatgaagatggcatttttaaaattgttaacgactataccggagaaggctggaacgatcaggttgatgatgaactcggtaatttcgattatctgatgggtgagaatatcgattttcgcaatcatgccgtgacggaagagattaaatactgggcgcgctgggtgatggaacaaacgcaatgcgacggctttcgtcttgatgcggtcaaacatattccggcatggttttataaagagtggatcgaacacgtacaggaagttgcgccaaagccgctgtttattgtggctgaatactggtcgcatgaagtcgataaactgcaaacgtatattgatcaggtggaaggcaaaaccatgctgtttgatgcgccgctgcagatgaaattccatgaagcatcgcgcatgggtcgcgactacgacatgacgcagatcttcactgggacgctggtggaagccgatccttttcacgccgtaaccctcgttgccaaccacgacacccaaccgttgcaagccctcgaagcaccggtcgaaccgtggtttaaaccgctggcgtatgccttaattttgttgcgggaaaatggcgttccttcggtgttctatccggacctctacggtgcacattacgaagatgtcggtggtgacgggcaaacctatccgatagatatgccaataatcgaacagcttgatgagttaattctcgcccgtcagcgtttcgcccacggtgtacagacattatttttcgaccatccgaactgcattgcctttagccgcagtggcaccgacgaatatcccggctgcgtggtggtcatgtcgaacggagatgatggcgaaaaaaccattcatctgggagagaattacggcaataaaacctggcgtgattttctggggaaccggcaagagagcgtagtgacagacgaaaacggcgaagcgaccttcttttgcaacggcggcagcgtcagcgtgtgggttatcgaagaggtgatttaa

SEQ ID NO: 472135 - DNA, 366 bp, Shigella flexneri
atgaacaatgcaccgcatttgtatttcgcctggcaacaactcgtcgaaaaaagccagctcatgttacgcctggcaacggaagaacaatgggacgaactcatcgctagcgaaatggcgtatgtgaatgcggtgcaggagatcgcacacctgactgaagaggttgccccgtccactacgatgcaggagcagctccgcccgatgctgcacctgattctcgacaacgaaagcaaggtaaagcagttattacagattcggatggatgaactggcgaaactggtcggtcagtcatcggtgcaaaaatcggtgttaagtgcctatggcgatcagggcggctttgtgctggctccgcaggataacctcttttga

SEQ ID NO: 472136 - DNA, 411 bp, Shigella flexneri
atgtacgcggcaaaaggcacccaggcctatgcacaaattggcgtcgaaagcaccgtaatgagcgccagccaacagcagttggtcaccatgctatttgatggagtgctgagcgcactggttagagcgcgactgtttatgcaggacaacaatcagcaaggcaaaggcgtctctttgtcaaaagcgatcaacatcattgagaacggactgcgggtgagtcttgatgaagagagcaaagacgaattaacccaaaacttaattgctctttatagctatatggtcaggcgtttgctgcaagccaatttacgcaacgatgtctccgcagtcgaagaggtggaagcattaatgcgtaatattgccgatgcctggaaagagtctttactctccccttcttcgattcaggacccagtctga

SEQ ID NO: 472137 - DNA, 1407 bp, Shigella flexneri
atggcaagtatttcatcgctgggagtcgggtcaggtctggatttaagttcaatccttgatagcctcaccgccgcgcaaaaagcgacgctaacccctatttcaaatcagcaatcgtcgtttaccgctaaacttagcgcctacggtacgctgaaaagcgcgctgacgactttccagaccgccaatactgcattgtctaaagccgatcttttttccgccaccagcaccaccagcagcaccaccgcgttcagtgccaccaccgcgggtaacgccatcgccgggaaatacaccatcagcgtcacccatctggcgcaggcgcaaaccctgaccacgcgcaccaccagagatgatacgaaaacggcgatcgccaccagcgacagcaaactcaccattcaacaaggcgacgacaaagatccgattaccattgatatcagcgcggctaactcatcgttaagcgggatccgtgatgccatcaacaacgcaaaagcgggcgtaagtgcgagcatcattaacgtgggtaacggtgaatatcgtctgtcagtcacatcaaatgacaccggccttgataatgcgatgacactctcggtcagcggtgatgatgcgctacaaagttttatgggctatgacgccagtgccagcagcaacggtatggaggtctcggtcgccgcccagaatgcgcagctgacggtcaacaacgtcgccatcgagaacagcagcaacactatcagcgacgcgctggaaaacatcaccctgaacctgaacgatgtcaccacgggcaaccagacgctaaccatcactcaggacacctccaaagcgcaaacggcgattaaagactgggtgaatgcctataactcgctaatagataccttcagcagcctgaccaaatacaccgccgtagatgcgggagctgatagccagagttctagcaatggcgcactgctcggcgactccacgctgcggacgattcagacgcagttgaagtcgatgctgagtaataccgtcagttcttccagctataaaacgctggcgcagattggtatcacgaccgatcccagcgatggcaaactggaactggatgccgacaaactcaccgctgcactgaaaaaagatgccagcggcgtaggtgcattgattgttggcgatggtaaaaaaaccggcatcacaaccaccatcggcagcaacctgaccagttggctttcgacaacgggcattattaaagccgctaccgatggcgttagtaaaaccctgaataagttaactaaagactacaacgccgccagcgatcgcattgatgcgcaggtcgcgcgctacaaagaacaatttacccaactggacgttttaatgacctcgttaaacagcaccagcagctacttaacgcagcagttcgaaaacaacagtaattccaagtaa

SEQ ID NO: 472138 - DNA, 1653 bp, Shigella flexneri
atggcacaagtcattaataccaacagcctctcgctgatcactcaaaataatatcaacaagaaccagtctgcgctgtcgagttctatcgagcgtctgtcttctggcttgcgtattaacagcgcgaaggatgacgccgcgggtcaggcgattgctaaccgttttacttctaacattaaaggcctgactcaggctgcacgtaacgccaacgacggtatttctgttgcacagaccactgaaggcgcgctgtccgaaatcaacaacaacttacagcgtatccgtgagctgacggttcaggcttctaccgggactaactctgattcggatctggactccattcaggacgaaatcaaatcccgtctcgacgaaattgaccgcgtatccggtcagacccagttcaacggcgtgaacgtactggcaaaagacggttcgatgaaaattcaggttggtgcgaatgacggccagactatcactattgatctgaagaaaattgactctgatacgctggggctgaatgggtttaatgtgaatggtggcggggctgtggctaatactgctgcatctaaagctgacttggtagctgctaatgcaacagtggtcggcaacaaatatactgtgagtgcgggttacgatgctgctaaagcgtctgatttgctggctggagttagtgatggtgatactgttcaggcaaccattaataacggcttcggaacggcggctagtgcaacgaattacaagtatgacagtgcaagtaagtcatactcttttgataccacaacggcttcagctgccgatgttcagaaatatttgaccccgggagttggtgataccgctaagggcactattactatcgatggttctgcacaggatgttcagatcagcagtgatggtaaaattacggcaagcaatggagataaactctacattgatacaactgggcgcttaacgaaaaacggctctggtgcttctttgactgaggctagtctgtccacacttgcagccaataataccaaagcgacaaccattgacattggcggtacctctatctcctttaccggtaatagtactacgccggacactattacttattcagtaacaggtgcaaaagttgatcaggcagctttcgataaagctgtatcaacctcgggaaacaatgttgatttcactactgcaggttatagcgtcaacggcacaactggcgctgtaacaaaaggtgttgattcggtttatgttgataacaacgaggcgttgaccacatctgatactgtagatttttacctacaggatgatggttcagtgactaacggcagcggtaaggcagtttataaagatgctgatggtaaattgacgacagatgctgaaacaaaagcagctacgacagccgatcccctgaaagctctggatgaagccatcagctccatcgacaaattccgctcctccctgggtgcggtgcaaaaccgtttggattccgcagtcaccaacctgaacaacaccactaccaacctgtctgaagcgcagtcccgtattcaggacgccgactatgcgaccgaagtgtccaacatgtcgaaagcgcagattatccagcaggccggtaactccgtgctggcaaaagccaaccaggtaccgcagcaggttctgtctctgctgcagggttaa

SEQ ID NO: 472139 - DNA, 720 bp, Shigella flexneri
gtgaattcactctataccgctgaaggtgtaatggataaacactcgctgtggcagcgttatgtcccgctggtgcgtcacgaagcattgcgcctgcaggttcgactgcccgcgagcgtggaacttgacgatctgctacaggcgggcggcattgggttacttaatgctgtcgaacgctatgacgccctacaaggaacggcatttacaacttacgcagtgcagcgtatccgtggcgctatgctggatgaacttcgcagccgtgactgggtgccgcgcagcgtgcgacgcaacgcgcgtgaagtggcacaggcaatagggcaactggagcaggaacttggccgcaacgccacggaaactgaggtagcggaacgtttagggatcgatattgccgattatcgtcaaatgctgctcgacaccaataacagccagctcttctcctacgatgagtggcgtgaagagcacggcgatagcatcgaactggttactgatgatcatcagcgagaaaacccgctacaacaactgctggacagtaatctgcgccagcgggtgatggaagccatcgaaacgttgccggagcgcgaaaaactggtattaaccctctattaccaggaagagctgaatctcaaagagattggcgcggtgctggaggtcggggaatcgcgggtcagtcagttacacagccaggccattaaacggttacgcactaaactgggtaagttataa

SEQ ID NO: 472140 - DNA, 552 bp, Shigella flexneri
atgatggtgcagcacctgaaaagacggccattaagccgctatcttaaagactttaaacacagccagacccattgcgcgcattgccgtaaattactcgatcgcattaccttagttcgcgacggcaaaatagtgaataaaatcgagatttcccgcctggacacgctgcttgatgaaaaaggctggcaaacggaacaacaatcatgggcggcattgtgccgattttgcggtgatttacattgcaaaacgcagagtgattttttcgatattatcggctttaagaaatttctttttgagcaaactgaaatgagcccaggtacggtgcgtgaatatgtcgttcgtctgcgccgtttgggtaatcatctacatgagcaaaatatttccctcgatcagctgcaggacggtttccttgatgaaatcctcgccccgtggctgcccaccaccagcaccaacaattaccgcatcgcattacggaagtatcaacactatcagcgccaaacctgtaccggacttgtgcagaaatcctccagcctgcctgcttctgatatatattaa

SEQ ID NO: 472141 - DNA, 858 bp, Shigella flexneri
gtgtttacaaacaatggctctacactgcaaacagacataacaacattcggggtgaatatgaaattagcacatctgggacgtcaggcattgatgggtgtgatggccgtggcgctggttgcgggcatgagcgttaaaagttttgcagatgaaggtctgcttaataaagtcaaagagagcggcacgctgctggtagggctggaaggcacttatccgccgttcagttttcagggggatgacggcaaattaaccggttttgaagtggaatttgcccaacagctggcaaaacatcttggcgttgaggcgtcactaaaaccgaccaaatgggacggtatgctggcgtcgctggactctaaacgcattgatgtggtgattaatcaggtcaccatttctgacgagcgcaagaaaaaatacgatttctctaccccttacaccatttccggtattcaggcgctggtgaaaaaaggtaacgaaggcaccattaaaacggctgctgatctgaaaggcaaaaaagtgggtgtcggtctgggcaccaactatgaagagtggctgcggcagaatgttcagggtgtcgatgtgcgtacctatgatgatgacccgaccaaatatcaggatctgcgcgtagggcgtatcgatgcgatcctcgttgatcgtctggcggcgctggatctggtgaagaaaaccaacgatacgctggcagtaaccggtgaagcattctcccgtcaggagtctggcgtggcgctgcgtaaaggaaatgaagacctgctgaaagcggtgaatgatgcaattgcggaaatgcaaaaagacggcactctgcaagctctttccgaaaaatggtttggtgctgatgtgaccaaataa

SEQ ID NO: 472142 - DNA, 987 bp, Shigella flexneri
atgccactgcataatttaacccgttttccacggttggagtttatcggcgcgccaacgccgctcgaatatctgccgcgcttttctgattatcttggacgggaaattttcatcaaacgggatgaggtcacccccatggcaatgggcggcaataaattacgtaagctggaatttctcgcggcagatgccctgcgcgaaggtgccgatacgctgattactgccggcgcgatccagtctaaccatgtgcgccagactgccgcagtcgcggcgaaactcggtctgcactgcgtggcgctgctggaaaatcctattggcacaaccgcagaaaactatttaaccaacggcaatcgtttgttgctggatctgttcaatacccagattgaaatgtgcgacgcactgaccgatcccaatgcccaactggaagaactggcgacgcgagtcgaagcacaaggctttcgcccgtatgtcattccggttggcggttctaatgctcttggcgcgctaggttatgtggagagtgcgctggaaatcgcgcaacagtgtgaaggggcggttaatatttcgtcggtggtagtcgcatcgggcagtgccggaactcacgccggactggctgttgggctggaacacctgatgcctgaaagcgaactgattggcgtgaccgtgtcgcgttccgttgccgatcaattgccgaaagtggttaacctacaacaggcgattgcgaaagaactggagctgaccgcatcagcggaaattttactctgggatgactattttgcacctggctacggcgtgccgaacgacgaaggcatggaagcagtgaaattgctggcgcgtctggaaggcattctgcttgatcctgtgtataccggaaaagcgatggcggggctgattgacggtatcagtcagaaacgcttcaaagatgaagggccgattctgtttattcataccggcggcgcgcctgcgctgttcgcctatcatccccacgtttag

SEQ ID NO: 472143 - DNA, 669 bp, Shigella flexneri
atgcaagaaagtatacaactggttattgattccttgccgttcctgttgaaaggggctgggtataccctgcaactcagtatcggcggcatgttttttggcttactactcgggtttattctcgcgctgatgcgcctgtcgccaatctggcccgtgcgctggctggcgcgtttttatatctctatttttcgtggtacgccgctcatcgcacaactgtttatgatctattacggcctgccgcagtttggtatcgaattagatcccattccgtcagcaatgattggtctgtcgctgaacactgccgcctatgccgccgaaacgctgcgtgccgccatttcttctattgataaaggtcagtgggaagccgctgccagtattggtatgacgccgtggcagaccatgcgtcgcgcgattttgccacaggcggcgcgggtggcgttgccgccgctgtcgaacagctttatcagtctggtaaaagatacgtcgctggccgcgacaatccaggtgccggagctgttccgtcaggcgcagttgattacctcgcgcacgctggaggtgttaaccatgtacctggcggcttcgctcatctactggatcatggcgactgtgttatcgacgttgcagaaccattttgagaatcaacttaatcgccaggagagagaaccaaaatga

SEQ ID NO: 472144 - DNA, 753 bp, Shigella flexneri
atgagtgccattgaagttaagaacctggtgaaaaaattccacggtcagacggtgctgcacggtatcgacctcgaggtaaagcctggcgaagtggtggcaattatcggtccgagtggttccggcaaaaccacattgctacgtagcataaatctgctggaacaaccggaagcgggaacgatcaccgttggcgatatcactattgatactgcacgttcattaagtcagcaaaaatcgctgattcgccagttgcgtcagcacgtcgggtttgtcttccagaactttaatttgtttccgcatcgtacggtgctggaaaacattattgaagggccggtgatcgtcaaaggcgaaccgaaagaagaggccacggcgcgcgctcgcgagctgctggcgaaagttgggctggccggtaaagaaaccagctatccacgtcgtttgtctggcggtcaacagcagcgtgttgcgattgcgcgtgcactggcaatgcgtcctgaggtgattttgtttgacgagccaacgtcggcgctggatccagagctggtgggcgaagtcctgaacaccatccgccagctggcgcaggaaaagcgcacgatggtgattgtgacacacgaaatgagctttgcccgggatgttgcggaccgggcgatctttatggaccaggggcggatagtcgagcagggggcagcaaaagcgttatttgccgatccccagcagcctcgcacccgccagttcctcgagaagcttctgctgcaataa

SEQ ID NO: 472145 - DNA, 627 bp, Shigella flexneri
atgcaggatacggattttttcagctggcgtcgcacgatgctgttgcgttttcagaggatggaggccgcagaagaggcctaccatgaaatagagcttcaggctcagcagctggagtacgattactattcgttatgtgttcgccacccggtaccattcacgcgacctaaagtggctttctacaccaattaccctgagtcgtgggttagttattatcaggcaaaaaattttctcgcaattgatcctgtgctgaaccctgaaaactttagtcagggccatttaatgtggaatgatgacttattcagcgaagcacagccattatgggaagccgcgcacgcacatggtttacgccgcggtgtcactcagtatttaatgctgccaaatcgggcgctgggctttttgtccttttcccgttgcagcacgcgcgaaatacccattcttagtgatgaactgcaattaaaaatgcagttactggtgcgcgaaagtctgatggctctgatgcgtttaaatgatgaaatagtgatgacgccagagatgaatttcagcaagcgcgaaaaagaaattctgaaatggacggcggaagggaagacatcagcagagatagcgatgattttgtcaataaccggctga

SEQ ID NO: 472146 - DNA, 225 bp, Shigella flexneri; identical to SEQ ID NO: 1574

SEQ ID NO: 472147 - DNA, 657 bp, Shigella flexneri
ttgatcaacgttctacttgttgatgaccacgaactggtgcgcgcagggatacgacgcattctggaagatattaagggtataaaagtcgtcggagaggcatcgtgcggtgaagacgccgttaagtggtgccggacaaatgccgttgacgtggtgctaatggacatgagtatgccgggcattggcggtcttgaggcgacgcgtaaaatcgcgcgttccacagctgatgttaaaatcatcatgcttacggtccatacagaaaaccctttaccagcgaaagtcatgcaggcaggtgctgctggctacctcagcaaaggcgcggctccgcaggaagtcgtgagtgcgattcgttctgtctattcagggcagcgttacattgcttctgatatcgctcaacaaatggcgttaagccagatcgaaccagaaaaaacagaaagcccatttgccagtttgtctgaacgtgaattgcagattatgctgatgatcactaagggccagaaggtcaatgagatctcagaacagctcaatctcagtccgaaaacggtgaacagctaccgctatcgtatgttcagtaaactaaacattcatggcgatgttgagctgactcacctggcaattcgccatggtctgtgtaatgcggagacattatcaagtcagtga

SEQ ID NO: 472148 - DNA, 1833 bp, Shigella flexneri
gtgagtgatcagtttgacgcaaaagcgtttttaaaaaccgtaaccagccagccaggcgtttatcgcatgtacgatgctggtggtacggttatctatgtcggcaaagcgaaagacctgaaaaaacggctttccagctatttccgcagcaacctcgcttcgcgcaaaaccgaagcgctggtcgcccagatccagcaaattgatgtaacggttacgcatacagaaaccgaagcgctgttgctggaacacaactacatcaaactctatcagccgcgttacaacgttttgctacgcgatgataaatcttatccttttatcttcctgagtggcgatacccacccgcgtctggcgatgcatcgtggtgcaaagcatgccaaaggtgaatatttcggcccgttcccgaatggctatgccgtacgtgaaacactggcgctactgcaaaagattttccccattcgccagtgcgaaaatagtgtttatcgcaatcgctcgcgtccgtgtctgcaataccagatagggcgctgtctgggaccgtgcgttgaaggactggtgagtgaagaagaatacgctcagcaggtcgagtatgtgcgcctgtttttgtctggcaaagatgatcaggtgcttacgcaactcattagccgtatggaaactgccagccagaatctggagtttgaagaagcggcatgtattcgcgaccaaattcaggcggtgcgacgcgtcaccgaaaaacagtttgtttccaataccggcgacgaccttgacgttattggtgtggcgttcgatgcgggcatggcttgtgtccacgtattgttcattcgtcagggcaaagtgctcggcagccgcagctatttcccgaaagtgcctggcggtacggaactgagcgaggtggtagaaaccttcgtaggtcagttctatttacaaggcagccagatgcgcaccttaccgggtgagatcctgctcgattttaatcttagcgataaaacgctgctcgccgattccctttcagaactggcgggacgcaagattaatgttcaaaccaaacctcgcggcgatagggcgcgttatctgaaactcgcgcgcaccaatgcggcgacggccttaaccagcaaactttcgcagcaatctaccgttcaccagcgactgaccgcgcttgccagcgtgttgaaattgccggaagtgaagcggatggagtgctttgacatcagccataccatgggcgaacaaaccgtcgcttcctgtgtggtgtttgatgctaacggcccgctgcgtgcggagtatcggcgctataacattacaggcatcacgccgggcgatgattatgcggcgatgaatcaggtgctgcgtcggcgttatggtaaagccattgacgacagtaagatcccggatgtgatccttatcgacggcggcaaaggccagcttgcgcaggcgaaaaatgtcttcgccgaactggatgtctcatgggataaaaatcatccgctgctacttggcgttgccaaaggagcagatcgtaaggctggactggaaacgctgttctttgagccggaaggtgagggatttagtttgccgccagattcacccgcgctgcatgttatccagcatattcgcgatgaatcacatgatcacgcgattggcgggcaccgtaaaaaacgggcgaaggtcaaaaataccagttccctggaaaccattgaaggcgtcgggccaaaacgtcggcaaatgttgttgaaatatatgggcggtttgcaaggtttacgtaacgccagcgtcgaggaaattgcaaaagtgccgggtatttcgcaaggtctggcagaaaagatcttctggtcgttgaaacattga

SEQ ID NO: 472149 - DNA, 549 bp, Shigella flexneri
atgcaatttaatatccctacgttgcttacactgttccgtgtcatccttatcccattctttgtattggtcttttatctgcctgtcacctggtcgccgtttgccgccgcgctcattttctgcgtcgcggcggtgactgactggttcgatggttttctggcacgccgctggaaccagagtacccggtttggtgctttccttgaccctgtggcagataaagttctcgtggctatcgccatggtgctggtaaccgagcattatcacagctggtgggtgacattaccggcggcaacgatgatcgcccgtgaaattattatttctgcgctacgcgaatggatggcggagttgggtaaacgcagtagcgtggccgtctcctggattgggaaagtgaaaaccactgcccagatggtggcgttggcctggctgctgtggcgtccgaacatttgggttgagtacgtcggtattgcacttttctttgtggctgcggtactgactctgtggtcaatgttgcaatatttgagcgctgcgcgtgcagatttgcttgatcagtga

SEQ ID NO: 472150 - DNA, 666 bp, Shigella flexneri
atgaaaacgggaccgttaaacgaaagtgagttggaatggctggacgatattctgaccaaatacaacactgaccacgccatccttgatgtggcggagctggacggtttattgacggcggtgttgagttctccgcaagagattgaaccagaacagtggctggttgccgtgtggggtggggctgactatgtgccgcgttgggcgtcagagaaagagatgacgcgctttatgaacctggcttttcaacatatggccgataccgcagagcgtctgaacgaattcccggagcagtttgagccgttattcggcttgcgagaagttgatggcagcgagctgacgattgttgaggagtggtgctttggctatatgcggggcgtggcactttctgactggtcaacgttgcccgattctttaaaaccagcgctggaggcgattgcgctgcacggtactgaggaaaacttcgagcgggtagagaaaatgtcgccagaagcgtttgaagagagcgtagatgccattcgactggcggcgcttgatttacatgcatactggatggcgcatccgcaggaaaaagctgttcagcaaccgatcaaagcagaagagaaaccggggcgtaacgatccttgtccgtgcggcagtggtaagaaatttaagcagtgctgcctgcattaa

SEQ ID NO: 472151 - DNA, 1212 bp, Shigella flexneri
gtgaaaaacagaaccctgggaagtgtttttatcgtggcgggaaccacaattggcgcaggcatgctggcaatgccgctggctgcggccggtgttggttttagcgttacgttaatcttgttgattgggctttgggcgttgatgtgctacacggcgctattactgctggaggtgtaccagcatgttccggcagataccggtctgggcacgctggcaaaacgctatctgggacgctacggtcaatggctgacgggcttcagtatgatgttcttaatgtatgctctgactgcagcatacatcagcggtgccggtgaattgttggcctccagcatcagcgactggacaggtatttcaatgtcggcaaccgctggcgtgctgttgttcacttttgttgccggtggcgtggtttgtgttggaacatcgctggtcgatttatttaaccgttttctgttcagcgccaaaattatttttctggtggtgatgctggtattgctgctaccgcatattcacaaagtgaatcttttaaccctgccgttgcaacaggggctggcactgtctgcaatcccggtgatttttacgtcgtttggttttcacggtagcgtgccgagtattgtcagctatatggatggcaacattcgtaagctacgctgggtgtttataatcggtagtgccatccccctggtggcatatattttctggcaggtggcgacgcttggcagcattgattcaacaacctttatgggattgctggctaatcatgctggattaaacgggctgttacaggcgttacgcgaaatggtggcctctccgcatgttgagctggcggtgcatttatttgctgatttagccctcgccacgtcatttctcggcgttgcgttaggcttatttgattatctggctgatttgtttcagcgttcaaataccgttggtggacgattgcaaactggtgcaattacctttctgccgccgttggcgtttgcactgttttatccacgaggatttgtgatggcgctgggttacgccggtgtggcgctggcggtactggcattgattatcccttcactattgacctggcaaagcagaaagcacaatcctcaggcgggttaccgggtcaaaggtggtcgtccggcgctggtggtggtgtttctctgtggtattgctgtgattggcgtgcaatttttgattgcggcagggttgttaccagaagtggggtga

SEQ ID NO: 472152 - DNA, 240 bp, Shigella flexneri
atggactctattcacggtcatgaagtgttaaatatgatgattgaatcaggcgagcaatatacgcatgccagtctggaagctgcgattaaagcgcgttttggtgaacaggcacgttttcacacgtgctcggcagaaggggtgacagcgggagagctggtagcgtttctggcagcaaaaggcaaatttataccttcagaagaaggtttttcgaccgatcagagtaagatttgccgtcactga

SEQ ID NO: 472153 - DNA, 498 bp, Shigella flexneri
atgctgaaaccagaaatgattgaaaaacttaatgagcagatgaacctggaactgtactcttcactgctttatcagcaaatgagcgcctggtgcagctatcataccttcgaaggtgctgccgcgttcctgcgccgtcacgcccaggaagagatgacgcatatgcagcgtctgtttgattacctgactgataccggcaatttaccgcgtattaataccgttgaatctccgtttgctgaatattcctcacttgatgaattattccaggaaacctataaacacgaacaattaatcacccagaaaattaacgaactggctcatgctgcaatgaccaatcaggactacccaacatttaatttcctgcagtggtatgtttctgagcagcatgaagaagagaaactgttcaaatcgattattgataaattaagcctggcaggcaaaagcggcgaaggtctgtattttatcgacaaagaactctctaccctcgacacacaaaactaa

SEQ ID NO: 472154 - DNA, 324 bp, Shigella flexneri
atgagacttctgattctgactctttcattaataacgctggcggggtgtacggttactcgccaggcccatgtgagcgaagttgacgcggcaacaggtattgtacggttggtttatgaccaggcttttttgcagcatgcccataccgatcgttatgtcagtcgcgggatcgccgatcgcgcatgccagcaggaaggctatacccacgcgatcccctttggtcagccagtaggcaactgtagcctttttgcgggttccttatgtttgaatacggaattcactttgtcatatcagtgccatcattccgccttccctgtctttctctaa

SEQ ID NO: 472155 - DNA, 252 bp, Shigella flexneri
atgtcccagccgctgaatgccgatcaggaactggtttctgatgtggtagcttgccagttggttatcaaacaaattctggatgttctcgatgtaatcgcgcccgttgaagttcgtgaaaaaatgtccagtcagctgaagaatatcgactttactcatcatcccgctgccgcagacccggtcaccatgcgggcaatccaaaaagccatcgcgctgattgaactcaagtttaccccacagggtgaatcccattaa

SEQ ID NO: 472156 - DNA, 504 bp, Shigella flexneri
atggcaaccgctggaatgcttctcaaactcaactctcaaatgaaccgcgagttttacgcatccaatctctaccttcacctgagtaactggtgttctgaacagagtctgaacggcaccgccactttccttcgcgcccaggcacagagtaatgtgacccaaatgatgcgcatgtttaactttatgaagagtgtcggcgctacccccatcgttaaagccattgatgttccaggtgaaaaactgaactctctggaagaactgttccaaaaaacgatggaagaatacgagcaacgttcaagcactctggcgcagttagccgatgaagcgaaagaactgaatgatgattcaaccgtcaatttcctgcgcgatctggaaaaagaacagcagcatgatggcctgttgctgcaaaccattcttgatgaagtgcgcagtgcgaaacttgcgggtatgtgccctgtgcagaccgaccaacatgttctgaatgtcgtgtcacaccagctgcattga

SEQ ID NO: 472157 - DNA, 426 bp, Shigella flexneri
atgcacaaatttactaaagccctggcagccattggtctggcagccgttatgtcacaatccgctatggcggagaacctgaagctcggttttctggtgaagcaaccggaagagccgtggttccagaccgaatggaagtttgccgataaagccgggaaggatttagggtttgaggttattaagattgccgtgccggatggcgaaaaaacattgaacgcgatcgacagcctggcagccagtggcgcaaaaggtttcgttatttgtactccggacccgaaactcggctctgccatcgtcgcgaaagcgcgtggctacgatatgaaagtcattgcagtggatgaccagtttgttaacgccaaaggtaagccaatggataccgttcctctggtgatgatggcggcgactaaaattggcgaacgtcagggctag

SEQ ID NO: 472158 - DNA, 1515 bp, Shigella flexneri
atgcaacagtctaccccgtatctctcatttcgcggcatcggtaaaacgtttcccggcgttaaggcgctgacggatattagttttgactgctatgccggtcaggttcatgcgttgatgggtgaaaatggcgcaggaaaatcaactctcttaaaaatcctcagcggcaactatgcgccaaccacgggttctgtagtgattaatgggcaggaaatgtccttttccgacacgaccgcagcacttaacgcgggtgtggcgattatttaccaggaactgcatctcgtgccggaaatgaccgtcgcggaaaacatctatctcggccagctgccgcataaaggcggcattgtgaatcgctcattgctgaattatgaggcgggtttacaacttaaacatcttggtatggatattgacccggacacgccgctgaaatatctcgccattggtcagtggcagatggttgaaatcgccaaagcgctggcgcgtaacgctaaaattatcgcctttgatgagccaaccagctccctttctgcccgcgaaatcggcaatcttttccgcgttattcgtgaactgcgaaaagaggggcgggtgatcttatacgtttctcaccgtatggaagaaatatttgccctcagcgatgccatcactgtctttaaagatggacgttatgtcaaaacctttaccgatatgcagcaggttgaccacgacgcgctggtgcaggcgatggtcgggcgcgacattggcgatatctacggctggcaacctcgtagttatggcgaggagcgcctgcgtcttgatgctgtgaaagcactaggcgtgcgtacgccaataagtctggcggttcgcagtggtgaaattgttgggctgtttggtctggtaggggcggggcgtagcgaattaatgaaaggcttgtttggcgggacgcaaatcaccgccggtcaggtttatatcgaccaacagccgatcgatattcgtaaaccgagccacgccattgccgcaggcatgatgctctgcccggaagctcgcaaagcggaaggcattattcccgtgcactccgttcgcgacaatatcaacatcagtgccagacgcaaacatgtgctcggcggttgtgtaatcaacaacagttgggaagaaaacaatgccgatcagcacattcgttcgctcaacatcaaaacgccgggcgcggagcaactgatcatgaatctctcaggcggaaatcagcaaaaagccattctgggccgctggttatcggaagagatgaaggtcattttgctggatgaacctacgcgcggcattgatgttggcgctaagcacgaaatatataacgtaatttatgcgctggcggcgcagggcgtggcggtgctgtttgcctccagcgacttacctgaagtcctcggcgttgccgaccggattgtggtgatgcgggaaggcgaaatcgccggtgaattgttacacgagcaggcagatgagcgtcaggcactgagccttgcgatgcctaaagtcagccaggcagttgcctga

SEQ ID NO: 472159 - DNA, 987 bp, Shigella flexneri
atgtcttctgtttctacatcggggtctggcgcacctaagtcgtcattcagcttcgggcgtatctgggatcagtacggcatgctggtggtgtttgcggtgctctttatcgcctgtgccatttttgtcccaaattttgccaccttcattaatatgaaagggttgggcctggcaatttccatgtcggggatggtggcgtgtggcatgttgttctgccttgcttccggtgactttgacctttctgtcgcctccgtaattgcctgtgcgggtgtcaccacggcggtggttatcaacctgactgaaagcctgtggattggcgtggcagcgggtttgttgctgggcgttctctgtggcctggtcaatggctttgttatcgccaaactgaaaataaatgctctgatcacgacactggcaacgatgcagattgttcgaggtctggcgtacatcatttcagacggtaaagcggtcggtatcgaagatgaaagcttctttgcccttggttacgctaactggttcggtctgcctgcgccaatctggctcaccgtcgcgtgtctgattatctttggtttgctgctgaataaaaccacctttggtcgtaataccctggcgattggcgggaacgaagaggctgcgcgtctggcgggtgtaccggttgttcgcaccaaaattattatctttgttctctctggcctggtatctgcgatagccggaattattctggcttcacgtatgactagtgggcagccaatgacgtcgattggttatgagcttattgttatctccgcctgcgttttaggtggcgtttctctgaaaggtggcatcggaaaaatctcatatgtggtggcgggtatcttaattttaggcaccgtggaaaacgccatgaacctgcttaatatttctcctttcgcgcagtacgtggttcgcggcttaatcctgctggcagcggtgatcttcgaccgttacaagcaaaaagcgaagcgcactgtctga

SEQ ID NO: 472160 - DNA, 801 bp, Shigella flexneri
gtgacagaaccgttaaccgaaacccctgaactatccgcgaaatatgcctggttttttgatcttgatggaacgctggcggaaatcaaaccgcatcccgatcaggtcgtcgtgcctgacaatattctgcaaggactacagctactggcaaccgcaagtgatggtgcattggcattgatatcagggcgctcaatggtggagcttgacgcactggcaaaaccttatcgcttcccgttagcgggcgtgcatggggcggagcgccgtgacatcaatggtaaaacacatatcgttcatctgccggatgcgattgcgcgtgatattagcgtgcaactgcatacggtcatcgctcagtatcccggcgcggagctggaggcgaaagggatggcttttgcgctgcattatcgtcaggctccgcagcatgaagacgcattaatgacattagcgcaacgtattactcagatctggccacaaatggcgttacagcagggaaagtgtgttgtcgagatcaaaccgagaggtaccagtaaaggtgaagcgattgcagcctttatgcaggaagctccttttatcgggcgaacgcccgtatttctgggcgatgatttaaccgatgaatctggcttcgcagtcgttaaccgactgggcggaatgtcagtaaaaattggcacaggtgcaactcaggcatcatggcgactggcgggtgtgccggatgtctggagctggcttgaaatgataaccgccgcattacaacaaaaaagagaaaataacaggagtgatgactatgagtcgtttagtcgtagtatctaa

SEQ ID NO: 472161 - DNA, 318 bp, Shigella flexneri
atgagtcgtttagtcgtagtatctaaccggattgcaccaccagacgagcacgccgccagtgccggtggccttgccgttggcatactgggggcactgaaagccgcaggcggactgtggtttggctggagtggtgaaacagggaatgaggatcagccgctaaaaaaggtaacattacgtgggcctcttttaacctcagcgaacaggaccttgacgaatactacaaccaattctccaatgccgttctctggcccgcttttcattatcggctcgatctggtgcaatttcagcgtcctgcctgggacggctatctacgcgtaa

SEQ ID NO: 472162 - DNA, 1590 bp, Shigella flexneri
atgcaacaacgtcgtccagtccgccgcgctctgctcagtgtttctgacaaagccggtatcgtcgaattcgcccaggcactttccgcacgcggtgtggagctgctgtctacagggggcactgcccgtctgttagcagaaaaaggtctgccggtaaccgaagtttccgattacaccggtttcccggagatgatggatggacgcgtgaagaccctgcatccgaaagtacatggtggcattctgggccgtcgcggccaggacgatgccattatggaagaacatcagatccagcctatcgatatggtggttgttaacctgtatccgttcgcccagactgttgctcgtgaaggctgctcgctggaagatgcggttgagaacatcgatatcggcggcccgaccatggtgcgctccgccgctaagaaccataaagatgtcgcaatcgtggtgaagagcagcgactacgacgccattattaaagagatggatgacaacgaaggatcgctgacgcttgcaacccgtttcgacctcgccatcaaagccttcgaacacactgccgcctacgacagcatgattgccaactacttcggcagcatggttccggcgtaccacggtgaaagcaaagaagccgccggtcgcttcccacgcacgctgaacctgaacttcattaagaagcaggatatgcgttacggcgagaacagccaccagcaggctgccttctatatagaagagaatgtgaaagaagcctccgttgctaccgcaacccaggttcagggtaaagccctctcttataacaacatcgccgataccgatgcggcgctggagtgcgtgaaagagttcgccgagccggcatgtgtgattgtgaagcacgccaacccttgcggtgtagctatcggcaattccattcttgatgcttacgatcgcgcgtacaaaaccgacccaacctccgcattcggcggcatcattgcctttaaccgcgagctggatgcggaaaccgcacaggccatcatttctcgtcagtttgtcgaagtgattattgcgccttccgccagcgaagaagccctgaaaatcaccgccgccaagcagaacgtacgcgttctgacctgcggtcagtggggcgagcgtgttccggatcttgatttcaaacgcgtgaacggcggtctgctggttcaggatcgtgacctggggatggtcggtgcggaagaactgcgcgtcgtcacccaacgtcagccgaccgaacaggaactgcgtgatgcgctgttctgctggaaagtggcgaaattcgtgaaatccaatgctatcgtctatgccaaaaacaatatgaccatcggtattggcgcgggccagatgagccgcgtgtactccgcgaaaatcgccggtattaaagctgccgatgaaggcctggaagtgaaaggttcctcgatggcttctgacgcgttcttcccgttccgcgacggtattgatgccgccgccgctgcgggcgtgacctgcgtaatccagcctggcggttccatccgtgatgacgaagtgattgccgccgccgacgagcacggtattgcgatgctcttcaccgacatgcgccacttccgccattaa

SEQ ID NO: 472163 - DNA, 1290 bp, Shigella flexneri
atgaaagtattagtgattggtaacggcgggcgcgagcacgcgctggcctggaaagcggcccagtcgccgctggttgagactgtttttgttgctccgggtaatgcaggcactgcgctggaacccgcgctgcaaaacgttgctatcggcgtgaccgatatcccggcgctgttggatttcgcacaaaacgaaaagattgatctgaccatcgtcggcccggaagcgccgctggtgaaaggcgtggtcgataccttccgcgccgccgggctgaaaatcttcggcccaaccgcaggtgcggcccaactggaaggctcaaaagcgtttaccaaagatttcctggcccgccataagatccctacggcggaataccagaacttcaccgaggtagaacctgcgctggtgtatctgcgtgagaaaggcgcgccaatcgtcattaaagcggacggtctggctgccgggaaaggcgttatcgtggcgatgacgctggaagaagcggaagcggctgttcacgatatgctggcgggcaacgcttttggcgacgcgggtcatcgcatcgttatcgaagagttcctcgatggcgaagaagcgagctttatcgtgatggtggacggcgagcatgtgctgccgatggctaccagccaggatcacaaacgcgtaggcgataaagataacggaccaaacaccggcgggatgggcgcttactcccccgcgccggtagtaaccgatgaagttcatcagcgcaccatggaacgtatcatctggccaaccgtgaaaggcatggcggcggaaggcaacacctacaccggttttctctatgcgggcctgatgatcgacaaacagggcaatccgaaggttattgaatttaactgccgctttggcgatccggaaacccagccgattatgctgcgcatgaagtccgatctggttgagctctgcctggcggcctgtgaaggcaaactggacgagaaaacgtcagagtgggatgaacgtgcttctctcagcgtggtgatggctgcgggtggatatccgggcgattaccgcaccggcgatgtgatccacggcctgccgctggaagaagtggctgacggcaaagtgttccacgcgggcacaaaactggcggatgacgagcaggtggtaaccagcggcgggcgcgtactgtgcgtcaccgcgctgggtcataccgtggcagaagcgcagaaacgcgcctacgccttaatgaccgatatccactgggatgattgcttctgccggaaagatatcggttggcgcgccatcgaacgcgagcagaactaa

SEQ ID NO: 472164 - DNA, 1326 bp, Shigella flexneri
atgacgcacgataatatcgatattctggtggtggatgatgacattagccactgcactattttgcaggctttactgcgcggctggggctataacgtcgcgctggcgaacagcgggcgacaggcgctggagcaggtgcgggaacaggtttttgatcttgtgctttgcgatgtgcgaatggcggagatggacggcatcgccacgctgaaagagatcaaagcgttaaacccggcaattccggtgctgattatgactgcgtactccagcgtcgagacggcggtagaggcactgaaaactggggcgcaggattatctcatcaagccgctggatttcgataacctacaggcgacgctggaaaaggcgctcgcgcatacgcacagtattgatgctgaaacacctgcggtgactgccagccagttcggtatggtcggtaaaagcccggcgatgcaacacctgctcagtgaaatcgccctcgtcgcgccatcggaagccacggtgctgatccacggcgattccggcaccggtaaagagctggtcgccagggcgattcacgccagtagcgcacgtagcgaaaaaccgctggtaacgctcaactgtgcggcactcaacgaatccttgctggaatctgaattgttcggtcacgaaaaaggggcgtttactggagccgataaacgccgggaagggcgctttgttgaggcggacggcggcacgctgtttctcgatgaaattggcgatatctcgccgatgatgcaggtgcgtctgctgcgtgcgattcaggagcgcgaagttcagcgtgtcggtagcaaccagactatctcggttgatgtccggctgattgcggcgacccatcgcgatcttgccgcagaggtgaatgccgggcgttttcgccaggatctctactatcgcctgaatgtggtggcgattgaagtaccatcgctgcggcaacggcgggaagatatccctctgctggctggccattttcttcagcgctttgccgagcgtaatcgcaaggcggtaaaaggctttacgccacaggcgatggatttgctgatccactacgactggccgggaaatattcgtgaactggaaaacgcggtggaacgggcggtggtgctgctgaccggggaatatatttccgaacgcgagctgccgctggcgattgccagtacgccgatcccgctggggcaaagtcaggatattcagccgctggtggaagtggaaaaagaggtgattctggcggcgctggagaaaacgggcggcaacaaaaccgaagccgcccgtcagttagggatcacgcgcaaaacgctattggcaaaactgtcgcgttag

SEQ ID NO: 472165 - DNA, 1377 bp, Shigella flexneri
atgcgttttatgcaacgttctaaagactccttagctaaatggttaagcgcgatcctccccgtggtcattgttgggctggtagggttgtttgcggtgacggtgattcgcgattatgggcgcgagactgccgccgccagacaaacgctgctggaaaaaggcagtgtacttattcgcgctcttgaatccggctcgcgcgtcggcatggggatgcgcatgcatcatgcgcagcagcaggccttactggaagaaatggccgggcagcctggagtacgttggtttgcggtcacggatgaacaaggaacaatcgtgatgcatagcaactccggcatggtgggaaaacagctttattcccctcaggaaatgcagcagttacatccgggagatgaagaagcgtggcggcggatcgatagcgcagacggcgagcctgttctggaaatttatcgccagtttcaaccgatgtttgctgctggaatgtaccggatgcgccatatgcagcagtatgccgcgacaccacaagcaattttcatcgctttcgacgccagtaatattgtgagtgccgaagatcgtgagcagagaaacaccctgattattctcttcgccctggcgacggtcttgctggcaagcgtattgtcattcttctggtatcgccgctatctgcgctcgcgccagcttctacaagatgaaatgaagcgcaaagagaagctggtggcgctggggcatcttgcggcaggcgttgcccacgaaatccgtaacccactttcctcgattaaaggactggcgaaatactttgccgagcgcgcgcctgcagggggagaagcgcatcaactggcgcaggtgatggcgaaagaggccgaccgtttaaaccgcgtggtaagcgagttgctggaactggttaagccaacgcatctggctttgcaggcggtggatctcaacacgctgattaaccactcattacagctggtaagccaggatgcaaacagccgggagatccagttacgctttaccgccaacgacacattaccggaaattcaggccgatccggacaggctgactcaggtcctgttgaatctctatctcaatgctattcaggcgattggtcagcatggcgtgattagcgtgacggccagcgaaagcggcgcgggcgtgaaaatcagcgttaccgacagcggtaagggaattgcggcagatcagcttgaagccatcttcactccgtacttcaccaccaaagccgaaggcaccggattggggctggcggtcgtgcataatattgttgaacaacacggtggtacaattcaggtcgcaagccaggagggaaaaggctcaacgttcaccctctggcttccggtcaatattacgcgtaaggacccacaaggatga

SEQ ID NO: 472166 - DNA, 129 bp, Shigella flexneri; identical to SEQ ID NO: 459475

SEQ ID NO: 472167 - DNA, 426 bp, Shigella flexneri; identical to SEQ ID NO: 459476

SEQ ID NO: 472168 - DNA, 636 bp, Shigella flexneri
atgctggcaggtgcgctgtttctcactgcctgtagccacaactcttcacttcctccctttaccgccagtggatttgctgaagaccagggcgcggtacgcatctggcgaaaagacagcggcgataatgtgcatctgcttgccgtgtttagcccgtggcgcagtggcgataccacgacgcgagagtatcgctggcagggcgataacctcacgctcatcaatatcaatgtttacagcaaaccgccggtgaacattcgcgcgcgttttgacgatcgcggcgatctgagctttatgcaacgtgaatccgatggggaaaagcagcagctttctaacgaccaaatcgatttataccgttatcgtgctgatcagatccgccagattagcgatgccttacgtcaggggagagtcgtgctgcgccaggggcgctggcatgcgatggaacagaccgtgaccacctgcgaagggcaaaccattaaacctgatttagattcgcaggcgatagcgcatatcgagcgccgccagagccgctcttctgttgatgtcagcgtggcatggctggaagcgcccgaaggttcgcaattactgttagtggcaaactctgatttctgtcgctggcaacccaacgagaaaacgttctga

SEQ ID NO: 472169 - DNA, 273 bp, Shigella flexneri
atgaacaagactcaactgattgatgtaattgcagagaaagcagaactgtccaaaacccaggctaaagctgctctggagtccactctggctgcaattactgagtctctgaaagaaggcgatgctgtacaactggttggtttcggtaccttcaaagtgaaccatcgcgctgagcgtactggccgcaacccgcagaccggtaaagaaatcaaaattgccgcagctaacgtaccggcatttgtttctggcaaggcactgaaagacgcagttaagtaa

SEQ ID NO: 472170 - DNA, 591 bp, Shigella flexneri
atgttacaaaacccaattcatctgcgtctggagcgcctggaaagctggcagcatgtcactttcatggcttgcttatgcgaacgcatgtaccccaattacgccatgttctgccagcaaaccggttttggtgatgggcaaatttaccgtcgtattctcgatctcatctgggaaacgctgaccgttaaagacgcaaaagtaaatttcgacagccaactggagaaatttgaagaagcgattccttcagccgacgatttcgatctgtacggcgtttatccggcaatcgatgcctgcgtggcgttaagtgaactggtccattcgcgtttgagtggtgaaacgctcgaacacgcggtggaagtgagtaagacctccatcacgaccgttgcgatgctggaaatgactcaggctggtcgcgaaatgggcgatgaagagcttaaagaaaacccagctgtagagcaagaatgggacattcagtgggaaatattccgacttttagctgagtgcgaagaacgcgatatcgagctgataaaaggccttagggcagacctgcgtgagtcgggtgagagcaatattggtataatttttcagcaataa

SEQ ID NO: 472171 - DNA, 672 bp, Shigella flexneri
atggatctcgcgtcattacgcgctcaacaaatcgaactggcttcttctgtgatctgcgaggatcgactcgataaagatccaccggatctgatcgccggagccgatgtcgggtttgagcagggcggagaagtgacgcgagcggcgatggtgctgctgaaatatccctcgcttgagctggtggagtataaagttgcccgcatcgccaccaccatgccttacattccaggttttctttccttccgcgaatatcctgcgctgctggcagcgtgggagatgctgtcgcaaaagccggatttagtgtttgtcgatggtcatgggatctcgcatcctcgccgtcttggcgtcgccagccattttggcttattggtggatgtgccgaccattggcgtggcgaaaaaacggctctgcggtaaattcgaaccgctctccagcaaaccgggcgcgctggccccactgatggataaaggcgagcagctggcctgggtctggcgcagcaaagcgcgctgtaacccgttgtttatcgctaccggccatcgggtcagcgtggacagcgcgctggcgtgggtacaacgctgcatgaaaggctatcgtctgccggagccaacgcgctgggcggacgcggtggcctcggaacgtccggcgttcgtgcgctatacagcaaatcagccctaa

SEQ ID NO: 472172 - DNA, 1065 bp, Shigella flexneri
atgaccgaacttaaaaacgatcgttatctgcgggcgctgctgcgccagcccgttgatgtcactccagtatggatgatgcgccaggcgggtcgctatctaccggaatataaagccacgcgcgcccaggcgggcgattttatgtcgctgtgcaaaaacgccgagctggcgtgcgaagtgactttgcaaccgctgcgtcgctacccgctggatgcggcgatcctcttttccgatatcctcaccgtgccggacgcgatggggttagggctctattttgaagccggagaaggtccgcgttttacctcgccagtcacctgcaaagccgacgtcgataaactgccaattccggacccggaagatgagctgggttacgtgatgaacgcggtgcgtaccattcgtcacgaactgaaaggcgaagtgccgctgattggtttttccggcagcccgtggacgctggcaacctacatggtggaaggcggcagcagcaaagccttcaccgtgatcaaaaaaatgatgtatgccgatccgcaggcgctgcacgctctgctcgataaactggcgaaaagcgtcactttgtatctgaatgcgcagattaaagccggtgctcaggcagtgatgattttcgacacctggggcggcgtgcttaccgggcgcgattatcaacagttctcgctctattacatgcataaaattgttgatggtttactgcgtgaaaacgacggtcgccgcgtgccagtcacgctgtttaccaaaggcggcggacagtggctggaagccatggctgaaaccggttgcgatgcgctgggcctcgactggacaacggacatcgccgatgcgcgccgccgtgtgggcaataaagtcgcgttgcagggtaatatggatccgtcgatgctgtacgcgccgcctgcccgcattgaagaagaagtagcgactatacttgcaggtttcggtcacggcgaaggtcatgtctttaaccttggtcacggcattcatcaggatgtgccgccagaacatgctggcgtgttcgtggaggcagtgcatcgactgtctgaacagtatcaccgctaa

SEQ ID NO: 472173 - DNA, 774 bp, Shigella flexneri
atggatcgtataattgaaaaattagatcacggctggtgggtcgtcagccatgaacaaaaattatggttgccgaagggagaattgccatatggcgaagcggcaaatttcgatcttgtgggtcagcgcgcactacaaatcggcgaatggcagggggaacctgtttggttaatacaacagcagcggcgtcacgatatggggtcggtacgtcaggtcattgatctcgatgttgggctgtttcaactggccggacgtggcgtgcaactggcggagttttaccgatcgcataaatactgtggttactgcgggcatgaaatgtatccgagcaaaaccgaatgggcgatgctgtgtagccattgccgtgagcgttactacccgcaaatcgccccctgcattattgttgccatccgtcgcgatgattcgctcctcctcgcccagcatacccgccatcgtaacggtgtccatacagtacttgccggattcgtcgaagtgggcgaaaccctcgagcaggcagtcgcgcgggaagtgatggaagagagcggaattaaagttaaaaacttgcgttacgtgacttctcagccgtggccgtttcctcagtctttaatgaccgcgtttatggcggaatatgacagcggcgacatcgtgatcgacccgaaagaattgctcgaggcgaactggtatcgctatgacgatttgccgttactcccgccgcccggcaccgtagcgcgccgtctgatagaagatactgtggcgatgtgtcgggcagagtatgagtga

SEQ ID NO: 472174 - DNA, 477 bp, Shigella flexneri; identical to SEQ ID NO: 459483

SEQ ID NO: 472175 - DNA, 1896 bp, Shigella flexneri
atgtctgcaacaaaactgacccgccgcgaacaacgcgcccgggcccaacattttatcgacaccctggaaggcaccgcctttcccaactcaaaacgcatttatatcactggcacacaccccggcgtgcgcgtgccgatgcgtgagatccagcttagcccgacgctaattggcggtagcaaagaacagccgcagtacgaagaaaacgaagcgattccggtctacgacacctccggcccgtatggtgatccgcagatcgccattaacgtgcagcaagggctggcaaaactacgccagccgtggatcgatgcgcgcgccgataccgaagaacttaccgtgcgcagttccgattacaccagaacgcggctggcagatgatggtctcgacgagctacgttttagcggcttattaacgccaaaacgcgccaaaacaggacgccgtgtcacccaactgcactacgcccgccagggcatcatcacgccggacatggaattcatcgccatccgcgagaatatgggccgcgagcgcatccgtagcgaggttttacgccaccagcatccgggaatgagctttggcgcacatctgccggaaaatatcactgcggaatttgtccgtgatgaagttgctgccggacgtgcgattatcccggccaacattaatcatccggaatcggagccgatgattattggccgtaacttcctggtaaaagttaacgccaatatcggcaactcggcggtcacctcttccatcgaagaagaagtggaaaagctggtatggtccacgcgctggggagcggatacggtgatggatctctccaccggtcgctatattcacgaaacccgcgagtggattttgcgtaacagtccggtgccgatcggtacagtgccgatctaccaggcgctggagaaggttaacgggatcgccgaagatcttacctgggaagcgttccgcgacacgctgctggaacaggccgagcaaggtgtggattacttcactatccatgcgggcgtactgctgcgctatgtgccgatgaccgcgaaacgcctgaccggtatcgtctctcgcggcggttcgattatggcgaaatggtgcctctcccatcatcaggaaaatttcctctatcaacacttccgcgaaatttgtgaaatctgtgccgcttatgacgtttcgctgtcgctgggcgacggtctgcgccccggttctattcaggacgccaacgatgaagcgcagtttgccgaattgcatacgctgggcgaactgaccaaaatcgcctgggaatatgacgtacaggtgatgattgaaggcccaggccatgtgccgatgcagatgatccgccgcaatatgaccgaggagttagagcactgccacgaagcgccgttttacactctggggccgctaactaccgatattgcaccgggctatgaccacttcacgtcggggattggtgcggcgatgattggctggtttggctgcgcgatgctctgttacgtaacgccaaaagagcatctgggtctgcccaataaagaagatgttaagcaggggcttatcacttataagattgccgcccacgctgctgacctggcaaaagggcatccgggcgcgcaaattcgcgataacgccatgtcgaaagcccgcttcgaatttcgctgggaagaccagtttaatctggccctcgacccgtttaccgcccgcgcttatcacgatgaaaccctgccccaagagtccggcaaagtcgcccatttttgctccatgtgtgggccaaaattctgctcgatgaaaatcagccaggaagtacgcgattacgccgccgcgcaaaccattgaagtgggaatggcggatatgtcggagaacttccgtgccagaggcggagaaatctacctgcataaggaggaagcgtga

SEQ ID NO: 472176 - DNA, 636 bp, Shigella flexneri
atgtatcagcctgattttcctcctgtaccttttcgtttaggactgtacccggtggtggacagcgtacagtggatcgaacgtctgttggatgcaggcgtacgtactctccagctacgcatcaaagatcggcgcgatgaagaggtggaagccgatgtcgtggcggcaattgcgctgggccgccgctataacgcgcgattgtttatcaacgattactggcggctcgcgatcaagcatcaggcgtatggcgtccatttggggcaggaagatttgcaagccaccgatctcaatgccatccgcgcggcaggcctgcggctgggcgtttcgacacatgacgatatggaaatcgacgtcgcgctggcagcacgcccctcttatatcgcgctgggacatgtgttcccgacgcaaaccaaacagatgccttctgcaccgcaggggctggaacagttggcacggcatgttgagcgcctggcggattatcccaccgtggcgattggcggtatcagtctggcacgcgcgcctgcggtgatagcaacgggtgtcggcagtatcgccgtcgtcagcgccattactcaagccgcagactggcgtttggcaacggcacagttgctggaaattgcaggagttggcgatgaatga

SEQ ID NO: 472177 - DNA, 756 bp, Shigella flexneri
atgaatgaccgtgactttatgcgttatagccgccaaattctgctcgacgatatcgctcttgacgggcagcaaaaactgctcgacagccaggtgctgattattggtcttggcgggctgggtacacctgctgcgctatacctggcaggggctggcgtcgggacgctggtactggcagatgacgacgatgtgcatttaagcaatctgcaacgacaaatcctctttaccactgaagatatcaacagcccgaaatcgcaggtcagccaacagcgactgacacagttgaatcccgacattcaactgacagcattacaacaacggttaacgggtgaggcgttgaaagatgcggttgcacaagccgatgtggtgctcgactgtaccgacaatatggcgactcgccaggagattaatgccgcctgcgtggcactcaacacgccgcttatcaccgccagcgcggtcggatttggcggtcagttgatggtactgacaccgccctgggagcaggggtgttaccgctgcctgtggccagataaccagcagccagaacgcaactgccgcacggcgggcgtggttggcccggtggtcggggtgatgggcactttgcaggcactggaagccattaagttattaagcggtatagagacgcctgcgggagaactccgactgttcgacggtaagtcgagccagtggcgcagcctggcgttgcgccgcgccagtggttgcccggtatgcggaggaagcaatgcagatcctgtttaa

SEQ ID NO: 472178 - DNA, 201 bp, Shigella flexneri; identical to SEQ ID NO: 459488

SEQ ID NO: 472179 - DNA, 771 bp, Shigella flexneri
atgttacgtattgcggacaaaacgtttgattcacatctgtttaccggcacagggaaattcgcttcttcacaactgatggtggaggcgatccgcgcttccggcagccagctggtgacactggcgatgaaacgtgtcgacttgcgccagcacaacgacgctatcctcgaaccgcttatcgcggcgggtgtggccctgctgccgaatacttccggggcgaaaacagcggaagaagccattttcgccgcccatctggcacgtgaagcgttaggcacaaactggctaaaattggagattcaccctgacgcccgctggctgttgcccgatcccatcgaaaccctgaaagccgccgaaacgctggtacaacagggatttgtcgtgctgccttactgcggggccgatccggtattgtgtaaacgtctggaagaagtcggctgtgcagcggtgatgccgctcggcgcgccgattggctcgaatcagggactggaaacccgtgccatgctggagattattatccagcaggccacagttccggtggttgtcgatgctggcatcggcgttcccagccatgccacgcaggcgctggaaatgggggccgacgcggtgttagtgaatacggcgattgccgtcgcggacgatcccgtcaacatggcgaaggcatttcgtctggcggtagaagtaggcctgctggcacgtcagtccggaccgggcagccgcagttattttgctcatgccaccagcccgctgaccggatttctggaggcatcggcatga

SEQ ID NO: 472180 - DNA, 1134 bp, Shigella flexneri
atgaaaaccttcagcaatcgctggcgacaactggactgggacgacatccgcctgcgtatcaacggcaaaacggctgctgacgtagagcgggcgctaaatgcctcgcaactcacccgcgacgacatgatggcgctgttatcgcctgccgccagtggctatctggaacaactggcccaacaggcgcagcgtctgacccgtcagcgatttggcaacacagttagtttctacgtcccgctttatctttccaatctttgcgctaacgactgcacgtactgcggattttccatgagtaatcgcatcaagcgcaaaacgctggatgaagcggatattgccagggaaagcgccgctatacgggagatgggctttgaacatctgctattagtcactggtgaacatcaggcgaaagtggggatggattactttcgtcgtcatctccccgccctgcgtgaacagttctcttcactacaaatggaagtgcaaccgctggcggagacggaatacgccgagttaaagcaacttggtctggatggggtgatggtttatcaggagacatatcacgaggcgacttatacccgccatcatttgaaaggcaaaaaacaggacttcttctggcggctggaaacgccggatcggctggggcgtgcggggattgataagataggcctcggcgcgctaattggcctttccgacaactggcgcgttgactgctatatggttgccgaacatttgctatggctgcaacagcattactggcaaagccgttactctgtctcctttccgcgcctgcgcccgtgtactggcggcattgagcctgcgtcgattatggatgaacgccagttagtgcaaaccatctgcgccttccgactgcttgcaccggagattgaactgtcactctccacgcgggaatcaccgtggtttcgcgatcgcgttattccgctggcgatcaataacgtcagcgccttctcgaaaacgcagccaggtggctatgccgataatcaccccgagttggaacagttctcaccgcacgacgatcgcagaccggaagcggttgctgccgtgttaaccgctcagggtttgcagccggtatggaaagactgggacagctatctgggacgcgcctcgcaaagactatga

SEQ ID NO: 472181 - DNA, 4224 bp, Shigella flexneri
gtgaaagatttattaaagtttctgaaagcgcagactaaaaccgaagagtttgatgcgatcaaaattgctctggcttcgccagacatgatccgttcatggtctttcggtgaagttaaaaagccggaaaccatcaactaccgtacgttcaaaccagaacgtgacggccttttctgcgcccgtatctttgggccggtaaaagattacgagtgcctgtgcggtaagtacaagcgcctgaaacaccgtggcgtcatctgtgagaagtgcggcgttgaagtgacccagactaaagtacgccgtgagcgtatgggccacatcgaactggcttccccgactgcgcacatctggttcctgaaatcgctgccgtcccgtatcggtctgctgctcgatatgccgctgcgcgatatcgaacgcgtactgtactttgaatcctatgtggttatcgaaggcggtatgaccaacctggaacgtcagcagatcctgactgaagagcagtatctggacgcgctggaagagttcggtgacgaattcgacgcgaagatgggtgcggaagcaatccaggctctgctgaagagcatggatctggagcaagagtgcgaacagctgcgtgaagagctgaacgaaaccaactccgaaaccaagcgtaaaaagctgaccaagcgtatcaaactgctggaagcgttcgttcagtctggtaacaaaccagagtggatgatcctgaccgttctgccggtactgccgccagatctgcgtccgctggttccgctggatggtggtcgtttcgcgacttctgacctgaacgatctgtatcgtcgcgtcattaaccgtaacaaccgtctgaaacgtctgctggatctggctgcgccggacatcatcgtacgtaacgaaaaacgtatgctgcaggaagcggtagacgccctgctggataacggtcgtcgcggtcgtgcgatcaccggttctaacaagcgtcctctgaaatctttggccgacatgatcaaaggtaaacagggtcgtttccgtcagaacctgctcggtaagcgtgttgactactccggtcgttctgtaatcaccgtaggtccatacctgcgtctgcatcagtgcggtctgccgaagaaaatggcgctggagctgttcaaaccgttcatctacggcaagctggaactgcgtggtcttgctaccaccattaaagctgcgaagaaaatggttgagcgcgaagaagctgtcgtttgggatatcctggacgaagttatccgcgaacacccggtactgctgaaccgtgcaccgactctgcaccgtctgggtatccaggcatttgaaccggtactgatcgaaggtaaagctatccagctgcacccgctggtttgtgcggcatataacgccgacttcgatggtgaccagatggctgttcacgtaccgctgacgctggaagcccagctggaagcgcgtgcgctgatgatgtctaccaacaacatcctgtccccggcgaacggcgaaccaatcatcgttccgtctcaggacgttgtactgggtctgtactacatgacccgtgactgtgttaacgccaaaggcgaaggcatggtgctgactggcccgaaagaagcagaacgtctgtatcgctctggtctggcttctctgcatgcgcgcgttaaagtgcgtatcaccgagtatgaaaaagatgctaacggtgaattagtagcgaaaaccagcctgaaagacacgactgttggccgtgccattctgtggatgattgtaccgaaaggtctgccttactccatcgtcaaccaggcgctgggtaaaaaagcaatctccaaaatgctgaacacctgctaccgcattctcggtctgaaaccgaccgttatttttgcggaccagatcatgtacaccggcttcgcctatgcagcgcgttctggtgcatctgttggcatcgatgacatggtcatcccggagaagaaacacgaaatcatctccgaggcagaagcagaagttgctgaaattcaggagcagttccagtctggtctggtaactgcgggcgaacgctacaacaaagttatcgatatctgggctgcggcgaacgatcgtgtatccaaagcgatgatggataacctgcaaactgaaaccgttattaaccgtgacggtcaggaagagaagcaggtttccttcaacagcatctacatgatggccgactccggtgcgcgtggttctgcggcacagattcgtcagcttgctggtatgcgtggtctgatggcaaagccggatggctccatcatcgaaacgccaatcaccgcgaacttccgtgaaggtctgaacgtactccagtacttcatctccacccacggtgctcgtaaaggtctggcggataccgcactgaaaactgcgaactccggttacctgactcgtcgtctggttgacgtggcgcaggacctggtggttaccgaagacgattgtggtacccatgaaggtatcatgatgactccggttatcgaggggggtgacgttaaagagccgctgcgcgatcgcgtactgggtcgtgtaactgctgaagacgttctgaagccgggtactgctgatattctcgttccgcgcaacacgctgctgcacgaacagtggtgtgacctgctggaagagaactctgtcgacgcggtaaaagtacgttctgttgtatcttgtgacaccgactttggtgtatgtgcgcactgctacggtcgtgacctggcgcgtggccacatcatcaacaaaggtgaagcaatcggtgttatcgcggcacagtccatcggtgaaccgggtacacagctgaccatgcgtacgttccacatcggtggtgcggcatctcgtgcggctgctgaatccagcatccaggtgaaaaacaaaggtagcatcaagctcagcaacgtgaagtcggttgtgaactccagcggtaaactggttatcacttcccgtaacaccgaactgaaactgatcgacgaattcggtcgtaccaaagaaagctacaaagtgccttacggtgcggtactggcgaaaggcgatggcgaacaggttgctggcggcgaaaccgttgcaaactgggacccgcacaccatgccggttatcaccgaagtaagcggttttgtacgctttactgacatgatcgacggccagaccattactcgtcagaccgacgaactgaccggtctgtcttcgctggtggttctggattccgcagaacgtaccgcaggtggtaaagatctgcgtccggcactgaaaatcgttgatgctcagggtaacgacgttctgatcccaggtaccgatatgcctgcgcagtacttcctgccgggtaaagcgattgttcagctggaagatggcgtacagatcagctctggtgacaccttggcgcgtattccgcaggaatccggcggtaccaaggacatcaccggtggtctgccgcgcgttgcggacctgttcgaagctcgtcgtccgaaagagccggcaatcctggctgaaatcagcggtatcgtttccttcggtaaagaaaccaaaggtaaacgtcgtctggttatcaccccggtagacggtagcgatccgtacgaagagatgattccgaaatggcgtcagctcaacgtgttcgaaggtgaacgtgtagaacgtggtgacgtaatttccgacggtccggaagcgccgcacgacattctgcgtctgcgtggtgttcatgctgtgactcgttacatcgttaacgaagtacaggacgtataccgtctgcagggcgtaaagattaacgataaacacatcgaagttatcgttcgtcagatgctgcgtaaagctaccatcgttaacgcgggcagctccgacttcctggaaggcgaacaggttgaatactctcgcgtcaagatcgcaaaccgcgaactggaagcgaacggcaaagtgggtgcaacttactcccgcgatctgctgggtatcaccaaagcgtctctggcaaccgagtccttcatctccgcggcatcgttccaggagaccactcgcgtgctgaccgaagcagccgttgcgggcaaacgcgacgaactgcgcggcctgaaagagaacgttatcgtgggtcgtctgatcccggcaggtaccggttacgcgtaccaccaggatcgtatgcgtcgccgtgctgcgggtgaagctccggctgcaccgcaggtgactgcagaagacgcatctgccagcctggcagaactgctgaacgcaggtctgggcggttctgataacgagtaa

SEQ ID NO: 472182 - DNA, 4029 bp, Shigella flexneri
atggtttactcctataccgagaaaaaacgtattcgtaaggattttggtaaacgtccacaagttctggatgtaccttatctcctttctatccagcttgactcgtttcagaaatttatcgagcaagatcctgaagggcagtatggtctggaagctgctttccgttccgtattcccgattcagagctacagcggtaattccgagctgcaatacgtcagctaccgccttggcgaaccggtgtttgacgtccaggaatgtcaaatccgtggcgtgacctattccgcaccgctgcgcgttaaactgcgtctggtgatctatgagcgcgaagcgccggaaggcaccgtaaaagacattaaagaacaagaagtctacatgggcgaaattccgctcatgacagacaacggtacctttgttatcaacggtactgagcgtgttatcgtttcccagctgcaccgtagtccgggcgtcttctttgactccgacaaaggtaaaacccactcttcgggtaaagtgctgtataacgcgcgcatcatcccttaccgtggttcctggctggacttcgaattcgatccgaaggacaacctgttcgtacgtatcgaccgtcgccgtaaactgcctgcgaccatcattctgcgcgccctgaactacaccacagagcagatcctcgacctgttctttgaaaaagttatctttgaaatccgtgataacaagctgcagatggaactggtgccggaacgcctgcgtggtgaaaccgcatcttttgacatcgaagctaacggtaaagtgtacgtagaaaaaggccgccgtatcactgcgcgccacattcgccagctggaaaaagacgacgtcaaactgatcgaagtcccggttgagtacatcgcaggtaaagtggttgctaaagactatattgatgagtctaccggcgagctgatctgcgcagcgaacatggagctgagcctggatctgctggctaagctgagccagtctggtcacaagcgtatcgaaacgctgttcaccaacgatctggatcacggcccatatatctctgaaaccttacgtgtcgacccaactaacgaccgtctgagcgcactggtagaaatctaccgcatgatgcgccctggcgagccgccgactcgtgaagcagctgaaagcctgttcgagaacctgttcttctccgaagaccgttatgacttgtctgcggttggtcgtatgaagttcaaccgttctctgctgcgcgaagaaatcgaaggttccggtattctgagcaaagacgacatcattgatgttatgaaaaagctcatcgatatccgtaacggtaaaggcgaagtcgatgatatcgaccacctcggcaaccgtcgtatccgttccgttggcgaaatggcggaaaaccagttccgcgttggcctggtacgtgtagagcgtgcggtgaaagagcgtctgtctctgggcgatctggataccctgatgcctcaggatatgatcaacgccaagccgatttccgcagcagtgaaagagttcttcggttccagccagctgtctcagtttatggaccagaacaacccgctgtctgagattacgcacaaacgtcgtatctccgcactcggcccaggcggtctgacccgtgaacgtgcaggcttcgaagttcgagacgtacacccgactcactacggtcgcgtatgtccaatcgaaacccctgaaggtccgaacatcggtctgatcaactctctgtccgtgtacgcacagactaacgaatacggcttccttgagactccgtatcgtaaagtgaccgacggtgttgtaactgacgaaattcactacctgtctgctatcgaagaaggcaactacgttatcgcccaggcgaactccaacctggatgaagaaggccacttcgtagaagacctggtaacttgccgtagcaaaggcgaatccagcttgttcagccgcgaccaggttgactacatggacgtatccacccagcaggtggtatccgtcggtgcgtccctgatcccgttcctggaacacgatgacgccaaccgtgcattgatgggtgcgaatatgcaacgtcaggccgttccgactctgcgcgctgataagccgctggttggtactggtatggaacgtgctgttgccgttgactccggtgtaactgcggtagctaaacgtggtggtgtcgttcagtacgtggatgcttcccgtatcgttatcaaagttaacgaagacgagatgtatccgggtgaagcaggtatcgacatctacaacctgaccaaatacacccgttctaaccagaacacctgtatcaaccagatgccgtgtgtgtctctgggtgaaccggttgaacgtggcgacgtgctggcagacggtccgtccaccgacctcggtgaactggcgcttggtcagaacatgcgcgtagcgttcatgccgtggaatggttacaacttcgaagactccatcctcgtatccgagcgtgttgttcaggaagaccgtttcaccaccatccacattcaggaactggcgtgtgtgtcccgtgacaccaagctgggtccggaagagatcaccgctgacatcccgaacgtgggtgaagctgcgctctccaaactggatgaatccggtatcgtttacattggtgcggaagtgaccggtggcgacattctggttggtaaggtaacgccgaaaggtgaaactcagctgaccccagaagaaaaactgctgcgtgcgatcttcggtgagaaagcctctgacgttaaagactcttctctgcgcgtaccaaacggtgtatccggtacggttatcgacgttcaggtctttactcgcgatggcgtagaaaaagacaaacgtgcgctggaaatcgaagaaatgcagctcaaacaggcgaagaaagacctgtctgaagaactgcagatcctcgaagcgggtctgttcagccgtatccgtgctgtgctggtagccggtggcgttgaagctgagaagctcgacaaactgccgcgcgatcgctggctggagctgggcctgacagacgaagagaaacaaaatcagctggaacagctggctgagcagtatgacgaactgaaacacgagttcgagaagaaactcgaagcgaaacgccgcaaaatcacccagggcgacgatctggcaccgggcgtgctgaagattgttaaggtatatctggcggttaaacgccgtatccagcctggtgacaagatggcaggtcgtcacggtaacaagggtgtaatttctaagatcaacccgatcgaagatatgccttacgatgaaaacggtacgccggtagacatcgtactgaacccgctgggcgtaccgtctcgtatgaacatcggtcagatcctcgaaacccacctgggtatggctgcgaaaggtatcggcgacaagatcaacgccatgctgaaacagcagcaagaagtcgcgaaactgcgcgaattcatccagcgtgcgtacgatctgggcgctgacgttcgtcagaaagttgacctgagtaccttcagcgatgaagaagttatgcgtctggctgaaaacctgcgcaaaggtatgccaatcgcaacgccggtgttcgacggtgcgaaagaagcagaaattaaagagctgctgaaacttggcgacctgccgacttccggtcagatccgcctgtacgatggtcgcactggtgaacagttcgagcgtccggtaaccgttggttacatgtacatgctgaaactgaaccacctggtcgacgacaagatgcacgcgcgttccaccggttcttacagcctggttactcagcagccgctgggtggtaaggcacagttcggtggtcagcgtttcggggagatggaagtgtgggcgctggaagcatacggcgcagcatacaccctgcaggaaatgctcactgttaagtctgatgacgtgaacggtcgtaccaagatgtataaaaacatcgtggacggcaaccatcagatggagccgggcatgccagaatccttcaacgtattgttgaaagagattcgttcgctgggtatcaacatcgaactggaagacgagtaa

SEQ ID NO: 472183 - DNA, 366 bp, Shigella flexneri; identical to SEQ ID NO: 460074

SEQ ID NO: 472184 - DNA, 498 bp, Shigella flexneri; identical to SEQ ID NO: 460075

SEQ ID NO: 472185 - DNA, 705 bp, Shigella flexneri
atggctaaactgaccaagcgcatgcgtgttatccgtgagaaagttgatgcaaccaaacagtacgacatcaacgaagctatcgcactgctgaaagagctggcgactgctaaattcgtagaaagcgtggacgtagctgttaacctcggcatcgacgctcgtaaatctgaccagaacgtacgtggtgcaactgtactgccgcacggtactggccgttccgttcgcgtagccgtatttacccaaggtgcaaacgctgaagctgctaaagctgcaggcgcagaactggtaggtatggaagatctggctgaccagatcaagaaaggcgaaatgaactttgacgttgttattgcttctccggatgcaatgcgcgttgttggccagctgggccaggttctgggtccgcgtggcctgatgccaaacccgaaagtgggtactgtaacaccgaacgttgctgaagcggttaaaaacgctaaagctggccaggttcgttaccgtaacgacaaaaacggcatcatccacaccaccatcggtaaagtggactttgacgctgacaaactgaaagaaaacctggaagctctgctggttgcgctgaaaaaagcaaaaccgactcaggcgaaaggcgtgtacatcaagaaagttagcatctccaccaccatgggtgcaggtgttgcagttgaccaggctggcctgagcgcttctgtaaactaa

SEQ ID NO: 472186 - DNA, 429 bp, Shigella flexneri
atggctaagaaagtacaagcctatgtcaagctgcaggttgcagctggtatggctaacccgagtccgccagtaggtccggctctgggtcagcagggcgtaaacatcatggaattctgcaaagcgttcaacgcaaaaactgattccatcgaaaaaggtctgccgattccggtagtaatcaccgtttacgctgaccgttctttcactttcgttaccaagaccccgccggcagcagttctgctgaaaaaagcggcaggtatcaagtctggttccggtaagccgaacaaagacaaagtgggtaaaatttcccgcgctcagctgcaggaaatcgcgcagaccaaagctgccgacatgactggtgccgacattgaagcgatgactcgctccatcgaaggtactgcacgttccatgggcctggtagtggaggactaa

SEQ ID NO: 472187 - DNA, 546 bp, Shigella flexneri
atgtctgaagctcctaaaaagcgctggtacgtcgttcaggcgttttccggttttgaaggccgcgtagcaacgtcgctgcgtgagcatatcaaattacacaacatggaagatttgtttggtgaagtcatggtaccaaccgaagaagtggttgaaatccgtggcggtcagcgtcgcaaaagcgaacgtaaattcttccctggctacgtcctcgttcagatggtgatgaacgacgcgagctggcacttggtgcgcagcgtaccgcgtgtgatgggcttcatcggcggtacttccgatcgtcctgcgccaatcagcgataaagaagtcgatgcgattatgaaccgcctgcagcaggttggtgataagccgcgtccgaaaacgctgtttgaaccgggtgaaatggtccgtgttaatgatggtccgttcgctgacttcaacggtgttgttgaagaagtggattacgagaaatctcgtctgaaagtgtctgtttctatcttcggtcgtgcgaccccggtagagctggacttcagccaggttgaaaaagcctaa

SEQ ID NO: 472188 - DNA, 384 bp, Shigella flexneri
atgagtgcgaataccgaagctcaaggaagcgggcgcggcctggaagcgatgaagtgggtcgttgtggtggcattgctcctggcggcgattgtcggcaactacctttatcgcgacattatgctgccgctgcgtgcgctggccgtagtaattctgattgctgcagcgggtggtgtcgcgctgttaacgacaaaaggtaaagctaccattgcttttgcccgtgaagcgcgtaccgaagtccgtaaggtcatttggccgactcgccaggaaacattgcacaccacgctgattgtggctgcggttaccgcagtaatgtcactgatcctgtggggactggatggtattctggttcgcctggtatcctttatcactggcctgaggttctga

SEQ ID NO: 472189 - DNA, 819 bp, Shigella flexneri
ttgtgctatatcactgaagtaacagtgaaaatctttaaatacaccccggaaaacaacctcttctacggctatatcctggaagacatgaaaaccggcttcaacatcctgcgtgaaatcatggtggaagggtatcgtccgtcgatcgctcgtttgtatgacgctgaagatggcacccaacacttcacccattttgccgacggaaaatgtgtgctgatctttatggctgaaggtaaccctcgcattgcgaaggcgacgggcgaagggattgcggaaatcgttgcccgctacccgcagtgccagcgcgtggacagcaaactgattgaaacctggtttaacaacctgaactggggaccggataaagtggctgccgaacgtgtgcagatcctcaaaaccggcaacatgggctttaccaccgaagtgtccggctgctggagctgcatccacgaaatctacgaaagcgttattaaccgtattcgtactgagttcccgcacgccgacgacatcaccatgctgggcggtcactcctctcatagctatcagaacggcaccaacatgtacttcgtctatgactacaacgttgttgactgtaagccggaagaggaaatcgacaagtaccacaatccgctcaacaaaatcatctgcgaagaaaccattcgcctcggcggttcgatggtgcaccaccatggcattggtaaacatcgcgttcactggagcaagctggaacacggcagcgcgtgggcgttgctggaagggctgaaaaagcagttcgatcctaacggcattatgaatacgggtactatctatccgattgaaaaataa

SEQ ID NO: 472190 - DNA, 1410 bp, Shigella flexneri
atgacggggcgttgccttttcggcttctcaggcgagaagccgttcttattaccggacaatgaaggggtaaagatgaacacttcaccggtgcgaatggatgatttaccgcttaaccgttttcactgtcgaattgctacgctcactttcggcgcacacctgaccgacggttatgttctaggcgtcattggttacgccattattcaacttacgcccgccatgcaactgacgctgtttatggcgggaatgatcggcggctcggcgctccttggtttgtttcttggcagcctggttcttgggtggatctccgaccatattggtcggcaaaaaatcttcaccttcagctttttgctgattacgctcgcttcgttcttgcaattttttgccaccacgccagagcatcttattgggctgcgcattttgatcggcattggtctgggaggcgattactcagtaggtcacaccttgctggctgaattttccccgcgccgccatcgcggtattttgctgggcgcattcagcgtggtgtggaccgtaggctatgtgttggcaagtattgccggacatcactttatttccgaaaacccggaggcctggcgctggttgctggcatcggcagctctgcccgcgttgttgattacgttattacgctggggaacgccagaatcgccacgttggctactgtgccaggggcgttttgcagaagctcacgctatcgtgcatcgctattttggtccccatgttttactgggcgatgaagtggtaacggcgacccataaacacatcaaaaccttgttctcttcgcgttactggcggcgcacggcgtttaacagcgtcttctttgtctgcctcgtaatcccatggtttgtgatttatacctggctgccaactatcgcccagactattggtctggaagatgcgctgactgccagcctgatgcttaatgcgttgttaattgtgggcgcgctgctgggattagttctgacgcacctgctggcacatcgcaaatttttgctgggaagttttttgctgctggcggcaacgctggtagtaatggcctgtttgccttccggcagttcattaacgctgctgctttttgttctcttcagcaccaccatttcggcagtcagtaatctggtgggcattttgcctgcggaaagttttcctactgacattcgctcgctgggcgtcggttttgccaccgccatgagtcgacttggcgcggcggtaagtactggcctgctgccgtgggtgctggcgcagtggggaatgcaagtcaccttattgctcctagcgacagtgttgttggttggttttgttgtgacctggctatgggcaccagaaactaaagccctcccgctggtggtggcgggaaatgtaggaggtgcgaatgaacattctgttagcgtttaa

SEQ ID NO: 472191 - DNA, 780 bp, Shigella flexneri
atgaacattctgttagcgtttaaagccgaaccggatgccggaatgctggcggaaaaagagtggcaggcggcggctcagggtaatagcggaccggatgtttcgctactgcgaagtttactcggtgctgatgaacaggccgctgccgcgctgctgttagcgcagagaaaaaacggtacgccgatgtctttaaccgcgttgagcatgggggatgaacgggcgttgcactggctgcgctatctcatggctcttgggtttgaggaagctgtattgctggagacggcggcagatctgcgctttgcgccggaatttgtcgctcgccatattgccgaatggcagcgtcagaatccgctggatctgataattaccggctgccaaagcagcgaagggcagaatgggcaaacgccatttttgctggcggaaatgctgggctggccctgcttcacccaggtggagcgtttcactctcgacgcgctgtttatcaccctcgaacagcgtactgaacatgggttgcgctgttgccgggttcgcttgcctgcggtgattgccgtgcgtcagtgcggtgaagtggccttgccagtaccgggaatgcgccagcgaatggctgcggggaaagcagaaattatccgtaaaactgttgctgccgaaatgccagcgatgcagtgtctgcaactggcaagagcagagcaacgacgcggagcgacgctgattgatgggcaaacggtagcagaaaaagctcaaaagctatggcaggactatttacgccaaaggatgcagccatga

SEQ ID NO: 472192 - DNA, 861 bp, Shigella flexneri
atgaatatcgcaattgtgacaataaatcaggagaatgccgcaatagcgagctggctggcggcgcaggatttcagcggttgtacgctggcgcactggcaaatagaacctcagcccgtagtggcggaacaggtgctggatgcgatggtggaacagtggcagcgaacgcctgcggacgttgttctctttccgccgggaacgtttggcgatgaactgtcgacccggctggcctggcgtttacatggtgcaagcatctgtcaggtgacttcgttagatattccaaccgtaagcatgcgcaaatcccactggggaaatgcgttaacggcgacgctgcaaacagaaaaacgcccgttatgcctttccctggcgcgtcaggcgggagcagcgaaaaacgccacgttgccctctggaatgcagcaactgaacattgtcccaggtgcgcttcccgactggctggttagcacagaggatctgaaaaatgttagccgcgacccattagctgaggccagacgggtgctggtggtgggacagggcggagaggcagataaccaggaaatcgttatgctggcagaaaagctgggagccgaagtgggctacagtcgggcgcgagtgatgaacggtggcgttgatgctgaaaaagtgattggtatttccggacatctgctggcacctgaggtgtgcattgttgttggcgcttccggcgcagcagcgttaatggcgggcgtacgcaatagcaagtttatggtggcgattaatcatgacgccagcgcagcggtattttcacaggcagatattggcgtggttgatgactggaaagtggtgctggaggcactggtgacaaacattcacgcagaataccaataa

SEQ ID NO: 472193 - DNA, 165 bp, Shigella flexneri
atgcccaaagtgctgggctgggtgacggaaaaaatccgccaaccgctgattgctggcgggctggtatgcgatgaagaagatgcgcgtaatgcgattaacgcgggtgtcgtggcgctttccaccacgaataccggagtctggacgttagcgaaaaaattgctttga

SEQ ID NO: 472194 - DNA, 366 bp, Shigella flexneri
atgcccctcttacacctgctccgccagaatccggtgattgctgccgttaaagataatgccagcctgcaactggccatcgattctgaatgccagtttatttccgtgttgtacggcaatatctgcaccatcagtaatatcgttaaaaagattaagaacgccgggaaatatgcttttattcatgttgatttgctggaaggcgcgtcaaataaagaagtggtgattcagtttttgaaactggtgaccgaggcggatggaattatcagcaccaaagcatcgatgctaaaagcggcaagagcggaagtttttttctgtattcatcacctgtttattgttgattcgatttcgtttcacaacattgataagtaa

SEQ ID NO: 472195 - DNA, 261 bp, Shigella flexneri
atgtctgtagcccgtaatctctggcgcgttgctgatgcgccgcacattgttccggctgactccgttgagcgtcagatggtacaacggttgattaacgcctgtccggtaggtcttttttctctcacacaggaaggtgacttacgtattgactatcgcggctgcctggagtgtggcacctgccgtttgctgtgcgacgaatccacactacaacagtggcgctatccgccttccggattcggcatcacctaccgctttggataa

SEQ ID NO: 472196 - DNA, 1272 bp, Shigella flexneri
atggaagacgactgcgacattattattattggtgccggtattgcaggcaccgcttgcgcgttacgctgcgcgcgagcggatttatccgttttgttactcgaacgcgctgaaatccccggcagcaaaaatctttccggcaggcggttatatacccatgcactcgcggaactcctcccgcaatttcatctgaccgcgcctcttgaacgacgcatcactcacgaaagcctttccctgttaacgccggatggcgcaacgacgttttccagcttacagcccggcggtgaatcctggagtgtattacgtgcacggttcgatccgtggctggttgccgaagccgaaaaagaaggtgtcgaatgcatccccggagcgacggtggatgcactgtatgaagaaaacggcagagtctgtggcgttatttgtggtgacgatattctccgcgcccgttatgtggtgctggcagaaggtgccaacagcgtcctggctgaacgtcacgggttagtgactcgtcctgctggcgaagcgatggcgttggggatcaaagaagtgctgtcgctggaaacatccgctattgaagaacgttttcatctggagaataacgaaggcgcagcgttgctgttcagcggcggaatctgtgatgacttacccggcggcgcatttctttatactaatcaacaaacgctctcgttagggattgtttgcccgctctcttcccttacgcaaagtcgtgttccggcaagcgagctgctgactcgctttaaagcgcatccggcagtgcgcacgcttatcaaaaacacggaatcactggagtatggtgcgcatctggtgccagaaggtggcttgcacagtatgccggtgcaatacgccggtaacggctggctgctggtgggcgatgcgttgcgcagttgcgtcaataccggaatttccgtgcgcggcatggatatggcgctgactggcgcacaggcggcggcacaaacgctaataagcgcctgccagcaccgcgagccgcaaaatctgtttgcgctttatcatcacaacgtagagcgcagcctgctatgggatgttctacaacgttatcagcatgttccggcgcttttgcaacgccctggctggtatcgggcgtggcctgcgttaatgcaggatatttcccgcgatttatgggatcagggtgataaacctgttccaccgctgcgccagttattctggcatcatttacgtcgtcatggcctgtggcatctggcgggcgatgttatcaggagtctgcgatgtctgtag

SEQ ID NO: 472197 - DNA, 366 bp, Shigella flexneri
atgatgtccaccacgttatttaaagatttcaccttcgaagccgctcaccgcttaccacatgtcccggaagggcataaatgtggtcgcctgcacgggcattcctttatggtgcgactggaaattaccggggaagtcgatccgcatacgggctggattatcgatttcgctgaactgaaagcggcgtttaagccaacttatgagcgcctcgatcaccattatctcaatgatattccaggtctggaaaatccaaccagcgaagttttagcaaaatggatttgggatcaggttaaacccgttgtgccgctgttaagtgcggtgatggtaaaagaaacctgcaccgcagggtgtatctatcgcggcgaatga

SEQ ID NO: 472198 - DNA, 1800 bp, Shigella flexneri
atgacgacacaggtcccaccttccgcgttgcttccgttgaacccggagcaactggcacgccttcaggcggccacgaccgatttaacgcctacccagcttgcctgggtttctggctatttctggggcgtgctcaaccagcagcctgttgcgcttgcagtgacgccagcgcccgccgcagaaatgccgggtataacgattatctctgcttcgcaaaccggcaatgcgcgccgggttgctgaagcattacgcgatgatttattagcagcaaaactgaacgttaagctggtgaacgcgggcgactataaattcaaacaaatcgccagcgaaaaactgctcatcgtagtgacgtcaacgcaaggggaaggggaaccgccggaagaagccgtcgcgctgcataagttcctgttctccaaaaaagcgccaaagctggaaaacaccgcgtttgccgtgtttagcctcggcgatagctcttatgaatttttctgccagtccgggaaagattttgacagcaagctggcggaactggggggtgaacgcctgctcgaccgtgtcgattctgatgttgaataccaggctgctgccagcgagtggcgcgcccgcgtggttgatgcgcttaaatcgcgtgcgcctgtcgcggcaccttcgcaatccgtcgctactggcgcggtaaatgaaatccacaccagcccgtacagcaaagacgcgccgctggtggctagcctctctgttaaccagaaaattactgggcgtaactctgaaaaagacgttcgccatatcgaaattgacttaggcgactcgggcctgcgttaccagccgggtgacgcgctgggcgtctggtatcagaacgatccggcactggtgaaagaacttgtcgaactgctgtggctgacaggcgatgaacctgtcactgtcgagggcaaaacgttgcctctgaacgaagcgctacagtggcacttcgaactgaccgtcaacaccgccaacattgttgagaattacgccacgcttacccgcagtgaaacactgctgccgctggtgggcgataaagcgaagttacagcattacgccgcgacgacgctgattgttgacatggtgcgtttctccccggcacagcttgatgccgaagcgctaattaatctgctgcgcccgctgaccccgcgtctctattccattgcctcctcgcaggcggaagtcgagaacgaagtacacgtcaccgttggtgtggtgcgttacgacgtggaaggccgcgcccgtgccggtggtgcctccagcttcctcgctgaccgcgtggaagaagagggcgaagtccgcgtatttatcgaacataacgataacttccgcctgcccgctaacctggaaaccccggtgattatgattggcccaggcaccggtattgcgccgttccgcgcctttatgcagcaacgcgccgctgacgaagcgccaggtaaaaactggctgttctttggcaatccgcattttacggaagacttcctgtatcaggtggagtggcagcgctacgtcaaagagggtgtgctgacgcggatcgatctcgcctggtcgcgcgaccaaaaagaaaaagtttacgtacaagataaactgcgcgaacagggcgcggagctgtggcgctggatcaatgacggtgcccacatttatgtctgcggcgacgctaatcgcatggcgaaagacgttgagcaggcacttctggaagtgattgccgaatttggtggcatggacacccaagcggcggatgaatttttaagtgagctgcgcgtagagcgccgttatcagcgagatgtctactaa

SEQ ID NO: 472199 - DNA, 1713 bp, Shigella flexneri
atgagcgaaaaacatccagggcctttagtggtcgaaggaaaactgacagacgccgagcgcatgaagcttgaaagcaactacctgcgcggcaccattgcggaagatttaaacgacggtctgaccggcggctttaagggcgataacttcctgctgatccgcttccacggcatgtatcagcaggatgaccgcgacatccgcgccgaacgtgctgaacagaagctggagccgcgccacgcgatgctgttgcgctgccgtctgccgggtggagttatcaccaccaaacagtggcaggcgatcgataaatttgccggtgaaaacaccatctatggcagcattcgcctgaccaaccgccagacgtttcagttccacggcattctgaaaaagaacgtcaaaccggtgcaccagatgctgcactcggtcggtcttgatgcgctggcgactgctaacgacatgaaccgtaacgtactctgcacctcgaacccttacgagtcgcagctgcacgcagaagcgtacgagtgggcgaagaagatttctgaacatctgctgccgcgtacccgcgcgtatgcggagatctggctcgatcaggaaaaagtcgccaccaccgatgaagaaccgatccttggtcagacttacctgccgcgtaagttcaaaaccacggtagtgatcccgccgcagaacgatattgatctgcacgccaacgacatgaacttcgtggcgatcgcggaaaacggcaagctggtgggcttcaacctgctggtgggcggtgggctttctatcgaacacggtaacaagaaaacctacgcccgcacggcgagtgagtttggctatctgccgctagagcatacgctagcggtggcggaagccgtcgtgacaactcagcgtgactggggtaaccgaaccgatcgtaaaaatgccaaaaccaaatacacactggagcgcgtgggggttgagacgtttaaagcggaagtggagcgtcgcgcggggatcaaatttgaaccgatccgcccgtatgaatttacaggacgcggcgatcgtattggctgggttaagggcattgatgataactggcacctgacgctgtttatcgaaaatggtcgcatccttgattatccggggcgtccgctgaaaactggcctgctggagatcgcgaagatccacaaaggtgatttccgcattacggcgaaccagaatctgatcatcgccggtgtgccggaaagcgagaaagcgaagatcgagaaaattgccaaagagagcgggttaatgaatgccgtcacgccgcagcgtgaaaactcgatggcctgcgtgtcattcccgacttgcccgctggcgatggcggaagcggagcgtttcctgccgtcttttatcgacaacatcgataatttaatggtgaaacatggtgtcagcgatgagcatatcgtgatgcgtgtaacaggctgcccgaacggttgtggtcgcgcgatgctggcggaagtgggcttggtgggtaaagcaccgggtcgctacaacctgcatcttggcggcaaccgcattgggacacgtatcccacggatgtataaagaaaacatcaccgagccggaaatcctggcgtcgcttgatgaactgatagggcgctgggcgaaagagcgcgaagcgggtgaaggcttcggcgactttacggtgcgtgcgggcatcattcgcccggtgctcgatccggcgcgcgatttgtgggattaa

SEQ ID NO: 472200 - DNA, 735 bp, Shigella flexneri
atgtccaaactcgatctaaacgccctgaacgaactgccgaaggtagatcgcattctggcgctggcagaaactaacgccgaactggaaaaactggacgctgaaggccgcgttgcctgggcgctggataatctgcccggtgaatatgtactttcttccagctttggcattcaggcggcggtgagcctgcatctggtgaatcagattcacccggatattccggtgatcctcaccgacaccggctatctgttcccggaaacctaccgctttattgacgagttaacggacaaactcaagctcaacctgaaagtgtaccgcgctaccgaaagcgccgcctggcaggaagcacgctacggcaaactgtgggaacagggcgttgaaggcattgaaaagtacaatgacatcaacaaagtcgaaccgatgaaccgggcgctgaaagaactgaatgcgcaaacgtggtttgctggcctgcggcgtgaacaatccggcagccgtgccaatttaccggtgctggcaattcagcgtggcgtatttaaagtgctgccgattatcgactgggataaccgaactatttatcagtacctgcaaaaacatggcctgaaatatcacccattatgggacgaaggatatttatcggtgggcgatacccatacaacccgtaaatgggaacccggcatggcggaagaagaaacgcgtttctttggcttaaaaagggaatgtggattacacgaagggtaa

SEQ ID NO: 472201 - DNA, 153 bp, Shigella flexneri
atgctgacaaaatatgcccttgtggcaatcatcgtactgtgttgtacagtactgggattcacgttgatggtaggtgactcgttatgtgagttgagtatcagagaacgtggtatggagtttaaggcagttctcgcttacgaatcgaagaagtag

SEQ ID NO: 472202 - DNA, 1152 bp, Shigella flexneri
atgcgtaaatatcctttaagtttactgaaggataaaaatattgtgactttctttgatttctggggaaaaaaccgacgtggcgagaaagagggtatcgacgactatcaccttctttgctggcatttgctggatgtggccgcaatgggctatttaatggttaaaagaaattgcttcgggctggctgattattttcgtcaattagggatttctgacaaggaacaggcagctcaatttttcgcctggttgctgtgctggcacgatattggaaaatttgcccgctcttttcaacaactttacctgccccctgaattcaagattcaggaaggtgccagaaaaaattacgaaaaaatctctcattcaacgctgggctactggttgtggaatcattatttaagtgaatgtcaggagttacttccttcatcttcgctctctccgcgcaaacttaggcgagtgatagaaatgtggatgcccgtgacgacagggcatcatggtcggccccctgatcgtatggatgaattggataattttctgcctgaagacaaagctgcagcacgagattttctccttgaaatcaagccactgtttccgcgaatagagatccccacattctgggatgatgacgagggcgttgaacttataaaacaactttcctggtatatctctgcaaccgtcgtacttgcagactggacagggtcgtcaacgcgattttttccacgcgtcgcacaggcaatggatattgaagattactggcaaaaggctttagttcaggctcaaaacgcattaaccgtctttccgccacaagcagaaaccgcgcctttcaccggaattaatacgctgtttccttttattgagaatacgacaccgttacagcaaaaggtgctggatctggatatcaatcagccaggaccacagttgtttattctggaagatgtgaccggcgcaggtaaaacagaagcggcgcttatcctggcgcacaggttgatggctgcgggtaacgctcaggggctgttttttggcctgccaacaatggcaacggccaatgccatgtacgatcgactggtcaaaacctggcttgctttctattcgccagaggtgttccccgctccagcggagataaaccggcgcaatacggtgcggttttcccggaagtaa

SEQ ID NO: 472203 - DNA, 1038 bp, Shigella flexneri
atgttttccgcattgcgccaccgtaccgctgccctggcgctcggcgtatgctttattctccccgtacacgcctcgtcacctaaacctggcgattttgctaatacccaggcacgacatattgctactttctttccgggacgcatgaccggaactccagcagaaatgttatctgccgattatattcgccaacagtttcagcaaatgggttatcgcagtgatattcggacatttaatagtcggtatatttataccgcccgcgataatcgcaagaactggcataacgtgacaggaagtacggtgattgccgctcatgaaggcaaagcgccgcagcagatcatcattatggcgcatctggatacttacgccccgctgagcgatgctgacgcagatgccaatctcggcggactgacgttacaaggaatagatgataacgccgcaggtttaggtgtcatgctggaactggcagaacgcctgaaaaatacgcctaccgagtatggtattcgatttgtggcgaccagcggcgaagaggaaggaaaattaggcgctgagaatttactcaagcggatgagtgacaccgaaaagaaaaatacgctgctggtgattaatctcgataacttaattgttggcgataaattgtatttcaacagcggtgtaaaaacccctgaagcagtaaggaaattaacgcgcgacagggcgctggcaattgcacgcagtcacggaatagccgcaacgaccaatccgggtttgaataaaaattatccgaaaggcactgggtgttgtaatgacgcagaaatattcgacaaagcgggcattgctgtactttcggtggaagcgactaactggaatcttggaaataaggatggttatcagcaacgcgcaaaaacacctgccttcccggcgggaaatagctggcatgacgtaagactggataatcaacaacatattgataaggcacttcctggaagaatagaacgtcgctgccgtgacgttatgcggataatgctaccgttggtgaaggagctggcgaaggcgtcttga

SEQ ID NO: 472204 - DNA, 909 bp, Shigella flexneri
atggatcaaaaacgacttactcacctgcggcaactggaggcggaaagcatccacattattcgcgaggtggcggcagaattctcaaatccggtgatgctctactctatcggtaaagattccagcgtcatgctgcatctggcgcgcaaggcgttttatccaggtacgctgcctttcccgttgctgcatgtcgataccggctggaaattccgcgagatgtatgagttccgcgatcgtacggcgaaagcctacggctgcgagctgctggtgcataaaaacccggaaggcgtggcgatggggattaatccattcgtgcacggcagcgcgaaacataccgatattatgaaaactgaaggcctgaaacaggcgctgaacaaatacggttttgatgccgccttcggtggtgcgcgccgtgacgaagagaaatcccgcgctaaagagcgaatctactctttccgtgaccgcttccatcgctgggatccgaaaaatcagcgcccggagctgtggcacaactacaacgggcaaattaacaaaggcgaaagcatccgcgtcttcccgctctctaactggaccgagcaggatatctggcaatacatctggctggaaaatatcgacattgtgccgctgtatctcgctgcggaacgtccggttctggaacgcgacggtatgttgatgatgattgatgacaaccgtatcgacctgcaaccgggcgaagtgatcaaaaaacggatggtgcgtttccgtacgctgggctgctggccgctgaccggtgcggtggagtcaaatgcacaaacactgccggaaatcatcgaagagatgctggtttccaccaccagtgaacgtcagggtcgcgtgattgaccgcgaccaggcgggatccatggagctgaaaaaacgtcaggggtatttttaa

SEQ ID NO: 472205 - DNA, 1428 bp, Shigella flexneri
atgaacaccgtacttgcacaacaaatcgccaatgaaggcggcgtcgaagcctggatgattgcgcaacaacataaaagcctgctgcgttttctgacctgtggtagcgtcgatgacggcaaaagtaccctgattggtcgtctgctgcacgatacccgccaaatctacgaagatcagctctcatcgctgcataacgacagtaagcgtcacggcacccagggcgaaaagctggatctggctctgctggtggacggcctgcaagctgagcgcgaacagggcatcactattgatgtggcctaccgctatttctctaccgagaagcgtaaatttattatcgccgacaccccagggcacgagcagtacactcgcaatatggcgactggcgcatcgacatgtgaactggcgatcttactgattgatgcccgtaaaggcgtgctcgatcaaacccgtcgtcacagttttatctccacactgttggggatcaaacatctggtcgtggcgatcaacaaaatggatctggtggattacagtgaagagacgttcacccgtattcgtgaagattatctgacctttgccgggcagctgccggataatctggatatccgctttgtgccgctctccgcactggaaggtgacaacgtggcttcgcaaagtgaaagtatgccgtggtacagcggtctgacactgctcgaagtgctggaaaccgtggagatccagcgagtggtggatgcccagccaatgcgcttcccggtgcagtacgttaaccgcccaaatctcgattttcgtggctacgccggaatgctggcatccggtcgcgtggaagtcgggcaacgtgtaaaagtgctgccctctggtgtggaatcaaacgtcgcgcggatcgtgacttttgatggtgatcgcgaagaagtctttgccggagaagcgatcaccctggtgctgacggatgagatcgatatcagccgtggtgatctgctgctggcggcagacgaagcgttaccggcggtgcagagtgcgtcggtggatgtggtatggatggcggaacagccgctttccccgggccagagttatgacatcaaaattgccggtaagaagacgcgtgctcgtgttgatggcattcgttatcaggttgatattaataaccttacccaacgcgaagttgaaaacctgccgctgaacggcatcggcctggtggatctcacttttgacgagccactggtgttagatcgctatcagcaaaatccggttaccggtgggctgatttttatcgatcgcctgagcaatgtgaccgtgggtgccggtatggtgcacgagccagttagccaggcaacagctgcgtcatctgaattcagtgcattcgaactggaattgaatgcactggttcgtcgccactttccgcactggggcgcgcgcgatttgctgggggataaataa

SEQ ID NO: 472206 - DNA, 606 bp, Shigella flexneri
atggcgctgcatgacgaaaacgtcgtctggcatagtcatccggtcactgtgcaacaacgcgaactacaccacggtcatcgtggtgtagtgctgtggtttaccggcctctccgggtccggtaaatcaacggtcgccggggcgctggaggaggcgttacataaactcagcgtcagtacgtatctgctggatggcgacaatgttcgccacggattatgcagcgatctcggttttagcgatgccgatcgtaaagagaatatccgtcgcgtcggtgaagtggcgaatttgatggttgaagccggactggtggtgctgaccgcatttatctcgccacaccgcgccgaacgccagatggttcgcgaacgcgtaggagaagggcgctttattgaagtgtttgtcgatacgccgctggcgatttgcgaagcccgcgatccaaaaggcttatataagaaagcgcgtgccggtgaactgcgcaactttacgggaatagattccgtttacgaagcgcctgaatcggcagaaattcatctcaatggtgaacaattagtaacaaatttggtacagcaattattagatctgttgagacagaacgatattatcagatcctga

SEQ ID NO: 472207 - DNA, 324 bp, Shigella flexneri
atgcgtaatagccataacattacactaacaaataacgacagccttactgaggatgaagaaactacatggtcactgcctggtgccgtggtcggttttatctcctggttatttgcgctggcgatgccgatgttgatttatggctctaacacgctgttcttctttctctacacctggcctttctttctggcactgatgcctgtcgcggtagtggtggggattgcgctgcattcattgatggacggaaagctacgctacagtattgttttcaccctggtgacagtaggcattatgtttggcgcactgtttatgtggctactgggctaa

SEQ ID NO: 472208 - DNA, 312 bp, Shigella flexneri
atgggtaaactaacgctgctgttgctggctattctggtctggctacagtattcgctgtggttcggtaagaacggtatacatgactatacccgcgtcaatgatgatgtggcggcactgcaagctacaaacgcgaaacttaaagcgcgaaacgatcaactttttgccgaaattgacgatctcaatggcggccaggaggcgctcgaagagcgtgcgcgtaatgaactcagcatgaccaggccgggcgaaactttttatcgtctggtgcctgacgcgtcgaagcgcgcacagtctgcggggcaaaacaatcgataa

SEQ ID NO: 472209 - DNA, 711 bp, Shigella flexneri
atggcaaccactcatttggatgtttgcgccgtggttccggcggccggatttggccgtcgaatgcaaacggaatgtcctaagcaatatctctcaatcggtaatcaaaccattcttgaacactcggtgcatgcgctgctggcgcatccccgggtgacacgtgtcgtcattgccataagtcctggcgatagccgttttgcacaacttcctctggcgaatcatccgcaaatcaccgttgtagatggcggtgatgagcgtgccgattccgtgctggcaggtctgaaagccgctggcgatgtgcagtgggtattggtgcatgacgccgctcgtccttgtttgcatcaggatgacctcgcgcgattgttggcgttgagcgaaaccagccgcacgggagggatcctcgccgcaccagtgcgcgatactatgaaacgtgccgaaccgggcaaaaatgccattgctcataccgttgatcgcaacggcttatggcacgcgctgacgccgcaatttttccctcgtgagctgttacatgactgtctgacgcgcgctctaaatgaaggcgctaccattaccgacgaagcctcggcgctggaatattgcggatttcatccgcagttggtcgaaggccgcgcggataacattaaagtcacgcgcccggaagatttggcactggccgagttttacctcacccgaaccatccatcaggagaatacataa

SEQ ID NO: 472210 - DNA, 480 bp, Shigella flexneri
atgcgaattggacacggttttgacgtacacgcctttggcggtgaaggcccaattatcattggtggcgtacgcattccttacgaaaaaggattgctggcgcattctgatggcgacgtggcgcttcatgcgttgaccgatgcattgcttggcgcggcggcgctgggggatatcggcaaactgttcccggataccgatccggcatttaaaggtgccgacagccgcgagctgctacgcgaagcctggcgtcgtattcaggcgaagggttatacccttggcaacgtcgatgtcactatcatcgctcaggcaccgaagatgttgccgcacattccacaaatgcgcgtgtttattgccgaagatctcggctgccatatggatgatgttaacgtgaaagccactactacggaaaaacttggatttaccggacgtggggaagggattgcctgtgaagcggtggcgctactcattaaggcaacaaaatga

SEQ ID NO: 472211 - DNA, 1050 bp, Shigella flexneri
atgattgagtttgataatctcacttacctccacggtaaaccgcaaggcaccgggctgctgaaagccaatccggaagactttgtggtggtggaagatttgggctttgagcctgatggtgaaggtgagcatattctggttagaatcctcaaaaacggctgcaatacccgttttgtggcggatgcactggcgaaattcctgaaaattcattcccgtgaagtcagcttcgctgggcaaaaagacaaacatgctgtaacggaacagtggttatgtgctcgcgtgccgggcaaggaaatgcccgatctgagcgcctttcaactggaaggctgccaggtgctggagtatgcgcggcacaagcgcaagctgcgtttaggggcgctgaaaggtaacgcctttaccctggttctgcgcgaagtgagcaatcgcgatgacgttgaacaacgtctgatcgatatttgcgtaaaaggtgtaccgaactacttcggtgcccaacgttttgggattggcggtagcaacttgcagggcgcgctgcgctgggcgcaaaccaatactccggtgcgcgatcgcaataaacggagtttttggttgtcggcagcccgcagtgcgttgtttaatcagattgttgctgagcgcctcaaaaaagcagacgttaatcaagttgttgacggcgatgcgctacaattagccggacgtggtagctggtttgtagcaaccaccgaagaactggcggaattacagcgtcgcgtcaacgataaagagctgatgataaccgccgcattgccgggcagtggcgaatggggaactcagcgtgaagcgctggcattcgaacaagcagctgtcgccgcagaaactgaattacaagctttactggtgcgcgaaaaagttgaagccgcgcgcagagcgatgctgctgtatccgcaacaattaagctggaactggtgggatgacgtcaccgtagagatccgtttctggcttccggcgggtagttttgcaaccagcgttgtcagggaacttatcaacacaacaggtgattatgcgcatattgctgagtaa

SEQ ID NO: 472212 - DNA, 762 bp, Shigella flexneri
atgcgcatattgctgagtaatgatgacggggtacatgcacccggtatacaaacgctggcgaaagccttgcgtgagtttgctgacgttcaggtggtcgcccccgatcgtaaccgcagcggcgcttcaaattctctgacactggaatcctccctgcgcacgtttacctttgaaaatggtgatattgctgtgcaaatgggaaccccgaccgattgtgtctatcttggcgtgaatgctctgatgcgtccgcgcccggacattgttgtgtccggaattaacgccgggccgaatctgggggatgatgttatttattccggtacggtagccgccgcgatggaaggccgtcatttaggttttccggcgctggccgtctcgcttgacgggcataaacattacgacactgccgcggcggtaacctgttcaattttgcgcgcactgtgtaaagagccgctgcgcaccggacgtattcttaatattaacgttcaggatttacccttggatcaaatcaaaggtattcgcgtgacgcgctgcggtacacgacatccggcagatcaggtgatcccgcagcaagatccgcgcggcaatacgctgtactggattggcccgccgggcggtaaatgtgatgccggtccggggaccgattttgctgcggtagatgagggctatgtctccatcacgccgctgcatgtggatttaactgcgcatagcgcgcaagatgtggtttcagactggttaaacagcgtgggagttggcacgcaatggtaa

SEQ ID NO: 472213 - DNA, 627 bp, Shigella flexneri
atggtaagcagacgcgtacaagcacttctggatcaattacgtgcgcaaggtattcaggatgagcaggtgctgaatgcacttgccgccgtgccgcgtgaaaaattcgttgatgaagcgtttgaacaaaaagcctgggacaatatcgccttgccgataggtcaggggcagacaatttcgcagccgtatatggtggcgcgaatgaccgaattactcgagctgacgccgcagtcgcgggtgctggaaattggcactggttcgggatatcaaacggcaatcctggcgcatcttgtccagcatgtttgctcggttgaacggattaaaggcttgcagtggcaggcacgtcgccgcctgaaaaatcttgatttacataatgtttcaacccgtcatggtgatggatggcaaggttggcaggcacgtgcgccgtttgacgctatcattgttacggcggcaccgccggaaattccaactgcgctaatgacgcagctggacgaaggcgggattctcgtcttacccgtaggggaggagcaccagtatttgaaacgggtgcgtcgtcggggaggcgaatttattatcgataccgtggaggccgtgcgctttgtccctttagtgaagggtgagctggcttaa

SEQ ID NO: 472214 - DNA, 1140 bp, Shigella flexneri
atgagcgcgggaagcccaaaattcaccgttcgccgcattgcggctttgtcactggtttcgctatggctggcaggctgttctgacacttcaaatccaccggcaccggtcagctccgttaatggcaatgcgcctgcaaatactaattctggtatgttgattacgccgccgccgaaaatggggacgacgtctacagcgcagcaaccgcaaattcagccggtacagcagccacaaattcaggctactcaacaaccgcaaatccagccagtgcagccagtagctcagcagccggtacagatggaaaacggacgcatcgtctataaccgtcagtatgggaacattccgaaaggcagttatagcggcagtacctataccgtgaaaaaaggcgacacacttttctatatcgcctggattactggcaacgatttccgtgaccttgctcagcgcaacaatattcaggcaccatacgcgctgaacgttggtcagaccttgcaggtgggtaatgcttccggtacgccaatcactggcggaaatgccattacccaggccgacgcagcagagcaaggagttgtgatcaagcctgcacaaaattccaccgttgctgttgcgtcgcaaccgacaattacgtattctgagtcttcgggtgaacagagtgctaacaaaatgttgccgaacaacaagccaactgcgaccacggtcacagcgcctgtaacggtaccaacagcaagcacaaccgagccgactgtcagcagtacatcaaccagtacgcctatctccacctggcgctggccgactgagggcaaagtgatcgaaacctttggcgcttctgaggggggcaacaaggggattgatatcgcaggcagcaaaggacaggcaattatcgcgaccgcagatggccgcgttgtttatgctggtaacgcgctgcgcggctacggtaatctgattatcatcaaacataatgatgattacctgagtgcctacgcccataacgacacaatgctggtccgggaacaacaagaagtgaaggcggggcaaaaaatagcaaccatgggtagcaccggaaccagttcaacacgcttgcattttgaaattcgttacaaggggaaatccgtaaacccgctgcgttatttgccgcagcgataa

SEQ ID NO: 472215 - DNA, 993 bp, Shigella flexneri
atgagtcagaatacgctgaaagttcatgatttaaatgaagatgcggaatttgatgagaacggagttgaggtttttgacgaaaaggccttagtagaagaggaacccagtgataacgatttggccgaagaggaactgttatcgcagggagccacacagcgtgtgttggacgcgactcagctttaccttggtgagattggttattcaccactgttaacggccgaagaagaagtttattttgcgcgtcgcgcactgcgtggagatgtcgcctctcgccgccggatgatcgagagtaacttgcgtctggtggtaaaaattgcccgccgttatggcaatcgtggtctggcgttgctggaccttatcgaagagggcaacttggggctgatccgcgcggtagagaagtttgacccggaacgtggtttccgcttctcaacatacgcaacctggtggattcgccagacgattgaacgggcgattatgaaccaaacccgtactattcgtttgccgattcacatcgtaaaggagctgaacgtttacctgcgaaccgcacgtgagttgtcccataagctggaccatgaaccaagtgcggaagagatcgcagagcaactggataagccagttgatgacgtcagccgtatgcttcgtcttaacgagcgcattacctcggtagacaccccgctgggtggtgattccgaaaaagcgttgctggacatcctggccgatgaaaaagagaacggtccggaagataccacgcaagatgacgatatgaagcagagcatcgtcaaatggctgttcgagctgaacgccaaacagcgtgaagtactggcacgtcgattcggtttgctggggtatgaagcggcaacactggaagatgtaggtcgtgaaattggcctcacccgtgaacgtgttcgccagattcaggttgaaggcctgcgccgtttgcgcgaaatcctgcaaacgcaggggctgaatatcgaagcgctgttccgcaagtaa

SEQ ID NO: 472216 - DNA, 408 bp, Shigella flexneri
atggcgttacgaaataaagcgttccatcagttacgacagctttttcagcagcacacggctcgctggcagcacgagttacctgacctgaccaaaccacagtacgcggtgatgcgcgccattgctgataaacctggtattgaacaggtggcactgatagaagcagcagtcagcaccaaagcaacgctagcagaaatgttggcaagaatggaaaatcgtggcttagtcagacgtgaacatgacgtcgctgacaagcggcgacgctttgtctggctgactgccgaaggagaaaagctacttgctgcggcgatacctattggtgacagcgtggatgaggaatttttggggcgtttgagtggagaagagcaggagctgtttatgcagttggtgcgcaagatgatgagcacatag

SEQ ID NO: 472217 - DNA, 594 bp, Shigella flexneri
atgaaactgatcgtcgggatgacaggggctaccggtgcgcctcttggtgtggcattactgcaagcgctgcgtgagatgccgaatgtcgagactcatctggtgatgtcgaagtgggcgaaaaccaccattgaactggaaacgccttacagcgctcgcgatgttgctgccctcgcagacttcagccataacccggcggatcaggcggcgatcatctcatccggttcttttcgtaccgacggcatgatcgttattccgtgcagtatgaaaacgctcgccggtatccgcgctggttacgccgatggcctggtagggcgcgcggcggacgtcgtgctcaaagaaggccgcaaactggtgctggtgccgcgtgaaatgccgcttagcaccatccatctcgaaaatatgctcgcactttcacgcatgggcgtggcgatggtgccgccgatgcctgccttttataaccatcccgaaacggtagatgacattgtccaccatgtggtagcccgcgtgctggatcaatttggcctcgaacatccccacgccaggcgctggcaaggattaccgcaggcccggaatttttctcaggagaatgaataa

SEQ ID NO: 472218 - DNA, 951 bp, Shigella flexneri
atggcatttgatgatttacgcagctttttacaggcgcttgatgaccacggccagttactgaaaatcagcgaagaagtgaacgctgagccggatctggcagcagcagctaacgccaccgggcgtatcggcgacggcgcgcccgcgctgtggtttgataatattcgcggctttaccgatgcccgcgtggcgatgaataccatcggttcctggcagaaccacgcgatttcccttggcctgccaccaaacaccccggtcaaaaagcagattgatgagtttatccgccgctgggataacttcccgattgccccggagcgccgcgccaatccagcctgggcgcagaacaccgtcgatggcgaagagatcaacctgttcgatattctgccgctgtttcgcctgaatgatggcgatggcggtttctatctcgacaaagcgtgcgtggtttcccgcgatccgctcgacccggataacttcggcaagcagaacgtcggcatctaccgcatggaagtgaagggcaagcgtaagctcggcctgcaaccggtgccgatgcacgatatcgccctgcatctgcataaagcagaagagcgcggtgaagatctgccgattgcgatcacgctcggtaacgatccgatcatcacgctgatgggggccacgccgctgaaatacgatcagtctgagtatgaaatggcaggcgcgctgcgtgaaagcccgtacccgatcgccaccgctccgctgaccggttttgatgtgccgtggggttcagaagtgatcctcgaaggggttatcgaaagccgtaaacgcgaaatcgaagggccgttcggtgagtttaccgggcactactccggtgggcgcaacatgaccgtggtgcgcatcgataaagtctcttatcgcagcaaaccgattttcgaatcactctatctcggtatgccgtggaccgaaatcgactacctatga

SEQ ID NO: 472219 - DNA, 564 bp, Shigella flexneri; identical to SEQ ID NO: 469005

SEQ ID NO: 472220 - DNA, 2097 bp, Shigella flexneri
atgcagtcgtacgttaccgtaaatgacctgctcggcgtaccaggaatgccagccaccacaaaaggcatccgacaggcgttacagcgtttttctcgtgatcttggtgacgttagtcgccgtcgggaaggcacaaaagccattgagtaccacattgattgtctgcctgaaataacacgaaaggcactgcgtgaacgctatgtggaacagctggtggctacagagaacaatgtttctgaagtgaaagctgttaccagaaaaacacgcaatcctgacgctgtccaggcaatcgaagcatatcgcggttctccacaactgatggaagaacgcctgaatgcgctgaccgaaaaccagcgctgggtatctgaagcaagagctgcgctggtggtggaagtgctgaagctggaaagcgccggtaaccccgggcgactgaaagccattaactttcttgttgaaaaagcccgtaaaggtgagctgccggagcgcctgcaacaggccgcagttaacgccaatgcaaaacgtggcgctaatcgtactatcagccgcgatccactttaccagtgggttctgaaatacaaccagtcgcagaacgccgccgaacggctgctgttactggcaccgggaaaacgcgacgaaataaaaccggaagaaatcagctggctgcctgaatttctggcgcagtatcgccaggtgaacggcagacccatgtcagaagcctacgaggattttgtcgcagaatggcagcgtcgccatgcggacgaaccgtacatgctggaggtgatgccttcctatgatgttgtccggtatgccatgaaaaaactgccggaagtggtgaaacaaaaagggcgcgttaccggcagtgaataccgtcagcttgaaggattcacccgccgcgactggacagctatgccggtgaattatgtctggattggtgacggtcacggtatgaagctgaaatgtgcgcatccgatccacgggcgtccattctcaccggaagtcacgtttgtgatcgatggtggaacacggtttgttgttggctggagtcttgaccttgccgaaaacgtgttcgccgttgccggtgcgatacagcacggcattcgcaaccacggaaaaccgttcctgtattactcggataacggttccggtgaaacggctgacatgctggacaaagaggtcgtgggtattctgccacgcctggggattaaacaccctaccggtattgccggtaatccacagggacgcggcattattgaacgcctgaaccggacactgccgatgcgtatagccaggaggtatcgcacctattttggcaagggtgctgaccgggaatcgttgcgtgtacttaaccgtgatctgcgttcagcgtttaacgccctgcaacaggacaagcctctgaacgaccgccagaaagcggcaatgcgcgagctgccatcgtgggcggagcttattgaggctattcgtgaaggcgtggaatggtacaacaaccgcccgcattctgagctgccgatgaaaccgaacggacggcattacagcccgacagagttcagaaaaaaacgccaggcagaagaagacaccgaaattgagtggctgagtgatcttgagctgcgcgacatgttccgcccaatggtggaacgaccggtaagacgctgcgaaattcagtggctgaacaatatttactacgcgccggagttgcgtgacgaacacggtcgcaaagtgcttatcagttatgacattcatgacgccgagcgaattacggtacgtcgcaaggacggcagctttatctgtgaggcgatatggaacggcaataaacgcgcagcctttgctgtcagtgctgaatatcacaaacaacagcagcgtattaaaggaatgcgcaaacgcgctgaggaaaaaattcgtgatgctgaagatgaaggtattcagattctggaacacaaacaggctgaaccctggctgagtaatgtttatcgcccggttggtaatgtggtggcagttcagcaaccggaatatgaagaagagcatgacgaagaatttgaacgcgatttccggctggggatgcaaaaactttttgccatgcaggaagaagatgatccgctggcctga

SEQ ID NO: 472221 - DNA, 255 bp, Shigella flexneri; identical to SEQ ID NO: 461211

SEQ ID NO: 472222 - DNA, 1773 bp, Shigella flexneri
atgcgtacagaatattgtggacagctccgtttgtcccacgtggggcagcaggtgactctgtgtggttgggtcaaccgtcgtcgtgatcttggtagcctgatcttcatcgatatgcgcgaccgcgaaggtatcgtgcaggtatttttcgatccggatcgtgcggacgcgttaaagctggcctctgaactgcgtaatgagttctgcattcaggttacgggcaccgtacgtgcgcgtgacgaaaaaaatattaaccgcgatatggcgaccggcgaaattgaagtgctggcgtcctcgctgactatcatcaaccgcgcagatgttctgccgcttgactctaaccacgtcaacaccgaagaagcgcgtctgaaataccgctacctcgacctgcgtcgcccggaaatggcgcagcgcctgaaaacccgcgctaaaatcaccagcctggtgcgccgttttatggatgaccacggcttcctcgacatcgaaactccgatgctgaccaaagccacgccggaaggcgcgcgtgactacctggtgccttctcgtgtgcacaaaggtaaattctacgcactgccgcaatccccacagttgttcaaacagctgctgatgatgtccggttttgaccgttactatcagatcgttaaatgcttccgtgacgaagacctgcgcgctgatcgtcagcctgaatttactcagatcgatgtggaaacttctttcatgaccgcgccgcaagtgcgtgaagtgatggaagcgctggtgcgtcatttgtggctggaagtgaagggcgtggatctgggcgatttcccggtaatgacctttgcggaagcagaacgccgttatggttctgataaaccggatctgcgtaacccgatggaactgaccgacgttgccgatctgctgaaatctgttgagtttgcagtatttgcggggccggcgaacgatccgaaaggccgtgttgccgctctacgtgttccgggtggcgcatcgctgacccgtaagcagatcgacgaatacggtaacttcgttaaaatctacggcgcgaaaggtctggcttacatcaaagttaacgaacgcgcgaaaggtctggaaggtatcaacagcccggtagcgaagttccttaatgcagaaatcatcgaagccatcctggatcgtactgccgcgcaagatggcgatatgattttcttcggtgccgacaacaagaaaattgttgccgacgggatgggcgcactgctcctgaaagtgggtaaagaccttggtctgaccgacgaaagcaaatgggcaccgctgtgggttatcgacttcccgatgtttgaagacgacggtgaaggcggcctgacggcaatgcaccatccgttcacctcaccgaaagatatgactgctgcagaactgaaagctgcaccggaaaatgcggtggcgaacgcttacgatatggtcatcaatggttacgaagtgggcggtggttcagtacgtatccataatggtgatatgcagcagacggtgtttggtattctgggtatcaacgaagaggaacagcgcgagaaattcggcttcctgctcgacgccctgaaatacggtactccgccgcacgcaggtctggcattcggtcttgaccgtctgaccatgctgctgactggcaccgacaatatccgtgacgttatcgccttcccgaaaaccacggcggcagcgtgtctgatgactgaagcaccgagctttgctaacccgactgcactggctgagctgagcattcaggttgtgaagaaggctgagaataactga

SEQ ID NO: 472223 - DNA, 510 bp, Shigella flexneri
atgagcatagataactatgtgaatgggatgagcgaaggcagtcaacgaagaggcagcgtgaaggataaagtgtataagcgtcccgtttcgatcttagtggtcatctatgcacaagatacgaaacgggtgctgatgttgcagcggcgtgacgatcccgatttctggcagtcggtaaccggcagcgtggaagagggtgaaaccgcgccgcaagctgccatgcgcgaagtaaaggaagaggttaccattgatgttgtcgctgaacaactgaccttaattgactgtcagcgcacggtagagtttgaaattttttcacatttacgtcatcgctatgcgccgggcgtgacgcgtaatacggaatcatggttctgtcttgcgcttccgcacgagcggcagatcgttttcactgaacatctggcttacaagtggcttgatgcgcctgttgcggcggcgctcactaagtcctggagcaaccggcaggcgattgaacagtttgtaattaacgctgcctga

SEQ ID NO: 472224 - DNA, 741 bp, Shigella flexneri
atggcaggtcatagtaaatgggccaacaccagacatcgtaaagctgcgcaggatgctaagcgcggtaaaatcttcactaaaatcattcgtgagctggtaaccgcggctaagctgggcggtggcgatccggacgctaacccgcgtctgcgtgcggcggtggataaagcactgtctaacaacatgacccgtgacacactgaaccgcgcaattgcacgtggtgtgggcggtgatgatgatgcaaacatggaaaccatcatctacgaaggttacggtcctggcggcacggcaatcatgattgaatgtctgtctgacaaccgcaaccgtaccgttgctgaagtgcgtcacgcattcagcaaatgtggcggtaacctcggcactgacggttccgtagcttatctgttcagcaaaaaaggcgtgatctccttcgagaaaggcgacgaagacaccatcatggaagcagctctggaagcaggtgctgaagacgttgtgacatatgatgacggcgcgattgatgtctacactgcatgggaagaaatgggtaaagtgcgcgacgctctggaagcggcaggtctgaaagcagacagcgcggaagtttccatgatcccgtccaccaaagctgatatggatgcagaaaccgcgccgaaactgatgcgtctgatcgatatgctggaagattgcgacgacgtgcaggaagtttaccataacggtgaaatctctgatgaggttgcagcgactctctga

SEQ ID NO: 472225 - DNA, 522 bp, Shigella flexneri
atggctattattctcggcattgacccgggttcgcgcgtgaccggctacggcgtcatccgccaggtaggtaggcaactgtcctacctaggtagcggatgcatacgcaccaaagtggatgatttaccgtctcgtctgaagctcatctatgcgggcgtgacggaaatcatcacccagttccagcctgattatttcgccattgaacaagtctttatggcgaagaacgctgactcagccctgaaactgggccaggcgcgcggcgtggcgattgttgcggcggtgaatcaggaattgccggtatttgaatacgcggcacgtcaggtaaagcaaacggtggtaggtatgggtagtgccgaaaaaagccaggtgcagcatatggtccgcaccttgctgaaactgcccgctaatccacaggcggatgccgccgatgcgctggcgattgccatcacccactgccacgttagtcagaatgcgatgcagatgagcgaatcgcggctgaacctgacgagagggcgactgcgttaa

SEQ ID NO: 472226 - DNA, 603 bp, Shigella flexneri
gtgaatattaattaccctgctgaatatgaaattggagatatcgtctttacatgtataggtgctgccttatttggtcaaatatcagctgcatcaaattgctggagtaatcacgtcgggatcattatcggtcataacggtgaagacttcctggttgcagaaagccgggttcccctttcaaccatcaccacgctatctcgttttattaaacgttcgtctaatcaacgctatgctataaagcgattagacgctgggctgacagaacaacaaaaacaacgaattgttgaacaggttccctcccggctacgcaaactttaccacacgggttttaaatacgaatcttcgcgccagttctgttcaaaatttgtctttgatatttataaagaggcgctatgtattccggtgggtgaaatagagacgtttggacaactgttaaatagcaatccgaatgcaaaactcactttctggaaattctggttcttaggttctattccgtgggagcgtaaaaccgtcacgccagccagtttgtggcatcatccgggtttggtgttgattcacgcggagggagttgaaacgcctcagccggaactgaccgaggcggtataa

SEQ ID NO: 472227 - DNA, 612 bp, Shigella flexneri
gtgataggcagactcagaggcatcatcattgaaaaacaacccccgctggtgttaattgaagtgggcggcgtaggctatgaagtgcatatgccgatgacctgtttttatgaactccctgaagcgggtcaggaagcgatcgttttcacccactttgtggtgcgtgaagacgcgcaactgctgtacggttttaacaataaacaagaacgcacgttgttcaaagagttgatcaaaaccaacggcgtcggcccgaagttggccctggcgatcctctccggaatgtcagcgcagcagttcgttaatgccgttgagcgtgaagaagtgggggcactggtgaaactgccgggtattggcaaaaaaaccgccgaacgcttgattgttgaaatgaaagaccgatttaaaggtttgcatggcgatctctttacgccagccgccgacctggtactcacgtctcctgctagcccggcgaccgacgatgctgaacaagaagcagttgccgcgctggtggcgctaggctataaaccacaagaagcaagccgcatggtgagcaaaatcgctcgccctgacaccagcagtgaaacattaattcgcgaagccctacgcgccgcgttatga

SEQ ID NO: 472228 - DNA, 1011 bp, Shigella flexneri
atgattgaagcagaccgtctgatttctgccggtaccactttgccggaagatgtagcagatcgcgccattcgccctaaattactggaagagtatgttggtcagccgcaggttcgttcacagatggagattttcatcaaagcagcgaaactgcgcggcgatgccctcgatcatttgttgatttttggtcctccggggttgggtaaaactacgcttgccaacattgtcgccaatgaaatgggcgttaatttacgcacgacttctggtccggtgctggaaaaggcgggcgatttggctgcgatgctcactaaccttgaaccgcatgacgtgctgtttattgatgagatccaccgtttatcgccagttgttgaagaagtgctgtacccggcaatggaagactaccaactggatatcatgattggtgaaggtccggcggcacgctccattaaaattgatttgccgccgtttaccctgattggcgcaaccacgcgcgcaggttcgctgacatcaccgttgcgcgaccgttttggtattgtgcaacgtctggagttttatcaggtgccggatctgcaatatatcgtcagtcgcagtgcacgctttatggggcttgagatgagtgatgacggtgcgcaggaagtagctcgtcgcgctcgcggtacgccacgtattgccaaccgtctgctgcgtcgagtgcgtgatttcgccgaagtgaagcacgatggcaccatctcggcagatatcgctgctcaggcgctggatatgttgaatgtcgatgctgaaggtttcgattatatggaccgcaaattgttgctggcggtaatcgataagttctttggtgggccggtaggtctggataacctggcggcagccattggcgaagaacgtgaaaccattgaagatgtactggaaccttatttgattcagcaaggctttttgcagcgtacaccgcgcgggcgtatggcgacgacgcgggcgtggaatcactttggcataacgccgccagaaatgccgtaa

SEQ ID NO: 472229 - DNA, 786 bp, Shigella flexneri
atgattgaattattatttcccggttggttagccgggatcatgctcgcctgtgccgcgggtccgctgggttcgtttgtagtctggcgtcgtatgtcttatttcggtgatacgctggctcatgcctcattacttggtgtcgcgtttggtttgttgctggacgtgaatccattctatgcggtgattgccgttacgctgctgctggcgggcggtctggtatggctggagaagcgtccacagctggcgatcgacacgttattagggattatggcgcacagtgccctgtcgctgggcctagtggtcgttagtctgatgtctaacattcgtgttgatttgatggcttacctgttcggtgatttactggcagtgacgccagaagatctcatctctattgcgattggcgtggtcatcgtggtggctattttgttctggcaatggcgcaatttgctgtcgatgacgattagcccggatctggcgtttgttgatggtgtgaaattacagcaagtgaaattgttgttgatgctggtgacggcattgacgattggtgtagcgatgaaatttgtcggtgcgttgattattacttcgttgctgattattcctgcagctactgcgcgtcgctttgcccgtacgccggaacagatggctggtgtcgctgttttggtggggatggtggcagtaactggcggtttaaccttttccgcgttttacgatacgccggcgggtccgtcggtggtgctatgtgcggcactgttatttattatcagtatgatgaaaaagcaggccagctaa

SEQ ID NO: 472230 - DNA, 756 bp, Shigella flexneri
atgacaagtctggtttccctggaaaatgtctcggtttcttttggccaacgccgcgtcctctctgatgtgtcgctggaacttaaacctggaaaaattttgactttacttgggccaaatggcgcaggtaagtcgacactggtacgggtagtgctcgggctggtaacacccgatgaaggggttatcaagcgcaacggaaaactgcgcatcggctatgtaccgcagaagctgtatctcgacaccacgttgccactgaccgtaaaccgttttttacgcttacgccctggtacacataaagaagatattttgcctgcactgaaacgtgtccaggccgggcacctgattaacgcaccgatgcaaaagctctctggtggcgaaacgcagcgtgtactattagcgcgagcattgttaaattgcccgcaattattagtgctggatgaacccactcaaggcgtggatgtaaatggccaagtggcgttatatgaccttattgaccagttgcgtcgtgaactggattgtggcgttttaatggtttctcacgatctgcatctggtgatggcaaaaaccgatgaagtgctgtgcctgaatcaccacatttgttgttccggcacaccggaagttgtttccctgcatccggagtttatttcaatgtttggtcctcgtggtgctgaacaactgggtatctatcgccatcatcataatcatcgtcacgatttacagggacgaattgttttgcgtcggggaaatgatcgctcatga

SEQ ID NO: 472231 - DNA, 987 bp, Shigella flexneri
atgaaatgttataatatcacacttctcatatttattacgatgattggtcgcattatgttacataaaaaaacgcttcttttcgcagcattatccgccgctctctggggaggtgcaacacaggccgcagatgccgccgttgtcgcttcgcttaaacccgttgggttcatcgcttctgccattgctgatggtgtaacagaaacggaggttttactgcctgacggcgcttcagaacatgattattcactgcgtccatcggatgtaaaacgcttacagaacgcggacttagtcgtttgggttggcccggagatggaagcgtttatgcaaaaaccggtaagcaaattaccagaagcgaagcaggtaacgattgcgcagcttgaagatgtgaaaccgctactgatgaaaagtattcacggcgatgatgatgatcacgaccacgcggaaaaaagtgacgaagatcaccatcacggcgatttcaacatgcatctttggctttccccagagatagcgcgggctacagcggttgcaatccatggaaaattagtggaacttatgccgcaaagtcgagccaaacttgacgccaacctgaaggattttgaggcacaattggcctcaaccgaaacgcaggttggtaacgagctcgcgccgctcaaggggaaaggttatttcgtttttcacgatgcttacggctatttcgaaaaacagttcggactgacaccgcttggtcattttaccgttaaccctgagattcaacctggcgcgcagcgtttacatgaaataagaacacagttggttgagcaaaaagcaacctgcgtttttgctgagccacagttcaggccagcggtcgttgagagcgtcgcacgagggacatccgttcgtatgggaacgttggatcccctggggacgaatatcaaactgggtaaaacaagctattcagaattcctgagtcaattagccaaccagtatgcgagctgcctgaaaggagattaa

SEQ ID NO: 472232 - DNA, 1323 bp, Shigella flexneri
gtgcaacagatagcccgctctgtcgccctggcgtttaataatttaccgcgaccacaccgcgttatgttggggtcgctcaccgttcttactctggccgtcgctgtctggcggccctatgtttatcaccgtgatgccacgccaattgtcaaaaccattgagctggaacagaacgaaattcgttcgctcttacctgaagccagtgagccgattgatcaagctgcacaagaagatgaagccattccccaggacgaactggatgacaaaatcgccggtgaagcgggcgtgcatgaatatgttgtttccactggcgatacgctaagcagcattctcaatcagtatggtattgatatgggtgatatcacccaacttgctgctgccgacaaagaattgcgtaacctgaaaatcggtcaacaactctcctggacattaaccgcggacggcgaactgcagcgcctcacctgggaagtgtctcgtcgtgaaacccgaacctatgaccgtactgccgctaacggttttaaaatgaccagcgaaatgcagcaaggagagtgggttaacaatctgctgaaaggtaccgtcggagggagctttgttgccagcgccagaaacgccggtttaaccagcgccgaagtgagcgcagtgattaaagccatgcagtggcaaatggatttccgcaaactgaaaaaaggcgatgaatttgcggtattaatgtctcgagaaatgcttgatggtaaacgtgagcaaagccagctgctgggcgtacgtttgcgttcagaaggtaaagattattacgcaatccgcgctgaggatggcaaattctacgatcgtaacggtactggtctggcgaaaggattcttgcgattcccgacggcgaaacagttccgtatctcgtctaactttaacccgcgtcgaactaatccggtgacaggtcgcgttgcaccacacagaggtgttgatttcgccatgccacaaggtacgccagtgctttcagtgggtgacggtgaagtggtggttgccaaacgcagtggcgcagcaggttattatgtggctattcgtcatggtcgcagctacaccacgcgttatatgcacttgcgcaagattctggtgaaaccgggacagaaggtgaaacgtggcgaccgtatcgcgctttccggtaataccggacgttcaactgggccgcatctgcactatgaagtatggataaaccagcaggccgtaaacccgctgacggcaaaactgccgcgtaccgaagggctgaccggctccgatcgtcgcgaattcctggcgcaggccaaagagattgtgccgcagctacggtttgattaa

SEQ ID NO: 472233 - DNA, 972 bp, Shigella flexneri
atggaaacgaaaaaaaataatagcgaatacattcctgagtttgataaatcctttcgccacccgcgctactggggagcatggctgggtgtagcagcgatggcgggtatcgctttaacgccgccaaagttccgtgatcccattctggcacggctgggacgttttgccggacgactgggaaaaagctcacgccgtcgtgcgttaatcaatctgtcgctctgctttccagaacgtagtgaagctgaacgcgaagcgattgttgatgagatgtttgccaccgcgccgcaagcgatggcaatgatggctgagttggcaatacgcgggccggagaaaattcagccgcgcgttggctggcaagggctggagatcatcgaagagatgcggcgtaataacgagaaagttatctttctggtgccgcacggttgggccgtcgatattcctgccatgctgatggcctcgcaagggcagaaaatggcagcgatgttccataatcagggcaacccggtttttgattatgtctggaacacggtgcgtcgtcgctttggcggtcgtctgcatgcgagaaatgacggtattaaaccattcatccagtcggtacgtcaggggtactggggatattatttacccgatcaggatcatggcccagagcacagcgaatttgtggatttctttgccacctataaagcgacgttgcccgcgattggtcgtttgatgaaagtatgccgtgcgcgcgttgtaccgctgtttccgatttatgatggcaagacgcatcgtctgacgattcaggtgcgcccaccgatggatgatctgttagaggcggatgatcatacgattgagcggcggatgaatgaagaagtcgagatttttgttggtccgcgaccagaacaatacacctggatactaaaattgctgaaaactcgcaaaccgggcgaaatccagccgtataagcgcaaagatctttatcccatcaaataa

SEQ ID NO: 472234 - DNA, 1443 bp, Shigella flexneri
atgtccaaaaggcttcgcagaacaaaaatcgttaccacgttaggcccagcaacagatcgcgataataatcttgaaaaagttatcgcggcgggtgccaacgttgtacgtatgaacttttctcacggctcgcctgaagatcacaaaatgcgcgcggataaagttcgtgagattgccgcaaaactggggcgtcatgtggctattctgggtgacctccaggggcccaaaatccgtgtatccacctttaaagaaggcaaagttttcctcaatattggggataaattcctgctcgacgccaacctgggtaaaggtgaaggcgacaaagaaaaagtcggtatcgactacaaaggcctgcctgctgacgtcgtgcctggtgacatcctgctgctggacgatggtcgcgtccagttaaaagtactggaagttcagggcatgaaagtgttcaccgaagtcaccgtcggtggtcccctctccaacaataaaggtatcaacaaacttggcggcggtttgtcggctgaagcgctgaccgaaaaagacaaagcagacattaagactgcggcgttgattggcgtagattacctggctgtctccttcccacgctgtggcgaagatctgaactatgcccgtcgcctggcacgcgatgcaggatgtgatgcgaaaattgttgccaaggttgaacgtgcggaagccgtttgcagccaggatgcaatggatgacatcatcctcgcctctgacgtggtaatggttgcacgtggcgacctcggtgtggaaattggcgacccggaactggtcggcattcagaaagcgttgatccgtcgtgcgcgtcagctaaaccgagcggtaatcacggcgacccagatgatggagtcaatgattactaacccgatgccgacgcgtgcagaagtcatggacgtagcaaacgccgttctggatggtactgacgctgtgatgctgtctgcagaaactgccgctgggcagtatccgtcagaaactgttgcagccatggcgcgcgtttgcctgggtgcggaaaaaatcccgagcatcaacgtttctaaacaccgtctggacgttcagttcgacaatgtggaagaagctattgccatgtcggcaatgtacgcagctaaccacctgaagggcgttacggcgatcattaccatgaccgaatcgggtcgtaccgcgctgatgacctcccgtatcagctctggtctaccaattttcgccatgtcgcgccatgaacgtacgctgaacctgactgctctctatcgtggcgttacgccggtgcactttgatagcgctaatgacggcgtagcagctgccagcgaagcggttaatctgctgcgcgataaaggttacttgatgtctggtgacctggtgattgtcacccaaggcgacgtgatgagtaccgtgggttctactaataccacgcgtattttaacggtagagtaa

SEQ ID NO: 472235 - DNA, 870 bp, Shigella flexneri
atgaatatgctggaaaaaatccagtctcagctggaacatttgagcaaatcagagcgcaaagttgccgaggtcattctggcttcgcccgataacgcgatccattcgagtattgctgctctggcgctggaagccaatgttagcgaaccgacggtgaatcgtttctgtcacagcatggacacgcgcggttttcctgattttaaacttcatctggcacaaagtctggcgaatggcactccctatgttaatcgcaacgtcaatgaagatgacagcgttgaatcatacacggggaaaatatttgagtccgcaatggcaacgctcgatcatgtccgtcattcactggataaatctgccatcaaccgcgccgtcgacttgctcactcaggcaaaaaaaatcgcctttttcggattaggctcttctgccgccgttgcccacgatgcgatgaataagttctttcgttttaatgttccggtggtgtactccgatgatatcgtgctgcaacgcatgagttgtatgaattgtagcgacggagacgtggtggtgctgatttctcacacaggaagaacaaaaaatctggtcgagctggcgcagctggcacgcgaaaacgacgccatggtgattgccctcacctctgcgggtaccccgctcgcccgggaagcaacgctggcaattaccctcgacgtaccggaagatactgacatttatatgcccatggtttctcgacttgcacagctgaccgtgatagatgtgctggcgacaggatttactttgcgacgcggtgcaaaattcagagataacttgaagcgggtcaaggaagcgctgaaggaatcgcgttttgataagcagttacttaatttaagtgacgatcgctaa

SEQ ID NO: 472236 - DNA, 150 bp, Shigella flexneri
atgacgatttccgcactgaaagaaatcgaaatgcagttttgtcagatattacgcctgtgtgccgtgttaatgacaaaagcagataaaaaagttgttattttttttcataacatgatcagtgtcagatttttaccgaatggaaaacgatga

SEQ ID NO: 472237 - DNA, 1476 bp, Shigella flexneri
atggcggtaacgcaaacagcccaggcctgtgacctggtcattttcggcgcgaaaggcgaccttgcgcgtcgtaaattgctgccttccctgtatcaactggaaaaagtcggtcagctcaacccggacacccggattatcggcgtagggcgtgctgactgggataaagcggcatataccaaagttgtccgcgaggcgctcgaaactttcatgaaagaaaccattgatgaaggtttatgggacaccctgagtgcacgtctggatttttgtaatctcgatgtcaatgacactgctgcattcaaccgtctcggcgcgatgctggatcaaaaaaatcgtatcactattaactactttgccatgccgcccagcacttttggcgcaatttgcaaagggcttggcgaggcaaaactgaatgctaaaccggcacgcgtagtcatggagaaaccgctggggacgtcgctggcgacctcgcaggaaatcaatgatcaggttggcgaatacttcgaggagtgccaggtttaccgtatcgaccactatcttggtaaagaaacggtgctgaacctgttggcgctgcgttttgctaactccctgtttgtgaataactgggacaatcgcaccattgatcatgttgagattaccgtggcagaagaagtggggatcgaagggcgctggggctattttgataaagccggtcagatgcgtgacatgattcagaaccacctgctacaaattctctgcatgattgcgatgtctccgccatctgacctgagcgcagacagcatccgcgatgaaaaagtgaaagtactgaagtccctgcgccgcatcgaccgctccaacgtacgcgaaaaaaccgtacgcgggcaatatactgcgggcttcgcccagggcaaaaaagtgccgggatatctggaagaagagggcgcgaacaaaagcagcaatacagaaaccttcgtggcgatccgcgtcgacattgataactggcgctgggccggtgtgccattctacctgcgtactggtaaacgtctgccgaccaaatgttctgaagtcgtggtctatttcaaaacacctgaactgaatctgtttaaagagtcgtggcaggatctgccgcagaataaactgactatccgtctgcaacctgatgaaggcgtggatatccaggtactgaataaagttcctggccttgaccacaaacataacctgcaaatcaccaagctggatctgagctattcagaaacctttaatcagacgcatctggcggatgcctatgaacgtttgctgctggaaaccatgcgtggtattcaggcactgtttgtacgtcgcgacgaagtggaagaagcctggaaatgggtagactccattactgaggcgtgggcgatggacaatgatgcgccgaaaccgtatcaggccggaacctggggacccgttgcctcggtggcgatgattacccgtgatggtcgttcctggaatgagtttgagtaa

SEQ ID NO: 472238 - DNA, 837 bp, Shigella flexneri
atgaatccacaattgttacgcgtaacaaatcgaatcattgaacgttcgcgcgagactcgctctgcttatctcgcccggatagaacaagcgaaaacgtcgaccgttcatcgttcgcagttggcatgcggtaacctggcacacggtttcgctgcctgccagccagaagacaaagcctctttgaaaagcatgttgcgtaacaatatcgccatcatcacctcctataacgacatgctctccgcgcaccagccttatgaacactatccagaaatcattcgtaaagccctgcatgaagcgaatgcggttggtcaggttgcgggcggtgttccggcgatgtgtgatggtgtcacccaggggcaggatggaatggaattgtcgctgctaagccgcgaagtgatagcgatgtctgcggcggtggggctgtcccataacatgtttgatggtgctctgttcctcggtgtgtgcgacaagattgtcccgggtctgacgatggcagccctgtcgtttggtcatttgcctgcggtgtttgtgccgtctggaccgatggcaagcggtttgccaaataaagaaaaagtgcgtattcgccagctttatgccgaaggtaaagtggaccgcatggccttactggagtcagaagccgcgtcttaccatgcgccgggaacatgtactttctacggtactgccaacaccaaccagatggtggtggaatttatggggatgcagttgccaggctcttcttttgttcatccggattctccgctgcgcgatgctttgaccgctgccgctgcgcgatgctttgaccgctgccgctgcgcgtcaggttacacgcatgaccggtaa

SEQ ID NO: 472239 - DNA, 1011 bp, Shigella flexneri
atgaccggtaatggtaatgaatggatgccgatcggtaagatgatcgatgagaaagtggtggtgaacggtatcgttgcactgctggcgaccggtggttccactaaccacaccatgcacctggtggcgatggcgcgcgcggccggtattcagattaactgggatgacttctctgacctttctgatgttgtaccgctgatggcacgtctctacccgaacggtccggccgatattaaccacttccaggcggcaggtggcgtaccggttctggtgcgtgaactgctcaaagcaggcctgctgcatgaagatgtcaatacggtggcaggctttggtctgtctcgttatacccttgaaccatggctgaataatggtgaactggactggcgggaaggggcggaaaaatcactcgacagcaatgtgatcgcttccttcgaacaacctttctctcatcatggtgggacaaaagtgttaagcggtaacctgggccgtgcggttatgaaaacctctgccgtgccggttgagaaccaggtgattgaagcgccagcggttgtttttgaaagccagcatgacgttatgccggcctttgaagcgggtttgctggaccgcgattgtgtcgttgttgtccgtcatcaggggccaaaagcgaacggaatgccagaattacataaactcatgccgccacttggtgtattattggaccggtgtttcaaaattgcgttagttaccgatggacgactctccggcgcttcaggtaaagtgccgtcagctatccacgtaacaccagaagcctacgatggcgggctgctggcaaaagtgcgcgacggggacatcattcgtgtgaatggacagacaggcgaactgacactgctggtagacgaagcggaactggctgctcgcgaaccgcacattcctgacctgagcgcgtcacgcgtgggaacaggacgtgaattattcagcgccttgcgtgaaaaactgtccggtgccgaacagggcgcaacctgtatcactttttaa

SEQ ID NO: 472240 - DNA, 642 bp, Shigella flexneri
atgaaaaactggaaaacaagtgcagaatcaatcctgaccaccggcccggttgtaccggttatcgtggtaaaaaaactggaacacgcggtgccgatggcaaaagcgttggttgctggtggggtgcgcgttctggaagtgactctgcgtaccgagtgtgcagttgacgctatccgtgctatcgccaaagaagtgcctgaagcgattgtgggtgccggtacggtgctgaatccacagcagctggcagaagtcactgaagcgggtgcacagttcgcaattagcccgggtctgaccgagccgctgctgaaagctgctaccgaagggactattcctctgattccggggatcagcactgtttccgaactgatgctgggtatggactacggtttgaaagagttcaaattcttcccggctgaagctaacggcggcgtgaaagccctgcaggcgatcgcgggtccgttctcccaggtccgtttctgcccgacgggtggtatttctccggctaactaccgtgactacctggcactgaaaagcgtgctgtgcatcggtggttcctggctggttccggcagatgcgctggaagcgggcgattacgaccgcattactaagctggcgcgtgaagctgtagaaggcgctaagctgtaa

SEQ ID NO: 472241 - DNA, 1179 bp, Shigella flexneri
atgacgttattaggcactgcgctgcgtccggcagcaactcgcgtgatgttattaggctccggtgaactgggtaaagaagtggcaatcgagtgtcagcgtctcggcgtagaggtgattgccgtcgatcgctatgccgacgcaccagccatgcatgtcgcgcatcgctcccatgtcattaatatgcttgatggtgatgcattacgccgtgtggttgaactggaaaaaccacattatatcgtgccggagatcgaagctattgccaccgatatgctgatccaacttgaagaggaaggactgaatgttgtcccctgcgctcgcgcaacgaaattaacgatgaatcgcgagggtatccgtcgcctggcggcagaagagctgcagctgcccacttccacttatcgttttgccgatagcaaaagccttttccgcgaggcggttgccgccattggctatccctgcattgtaaaaccggtgatgagctcttccggcaaggggcagacgtttattcgctctgcagagcaacttgctcaggcatgggaatacgctcagcaaggcggtcgcgccggagcgggccgcgtaattgttgaaggcgtcgttaagtttgacttcgaaattaccctgctaaccgtcagcgcggtggatggcgtccatttctgtgcaccagtaggtcatcgccaggaagatggcgactaccgtgaatcctggcaaccacagcaaatgagcccgcttgcccttgaacgtgcgcaggagattgcccgtaaagtggtgctggcactgggcggttatggtctgtttggtgtcgagctgtttgtctgtggtgatgaggtgattttcagtgaggtctcccctcgtccacatgataccgggatggtgacgttaatttctcaagatctctcagagtttgccctgcatgtacgtgccttcctcggacttcctgttggcgggatccgtcagtatggtcctgcagcttctgccgttattctgccacaactgaccagtcagaatgtcacgtttgataatgtgcagaatgccgtaggcgcagatttgcagattcgtttatttggtaagccggaaattgatggcagccgtcgtctgggggtggtactggctacttcagagagtgttgttgacgccattgaacgcgcgaagcacgccgccggacaggtaaaagtacagggttaa

SEQ ID NO: 472242 - DNA, 123 bp, Shigella flexneri
atggcggttgaagttaaatacgtagtcattcgtgagggcgaagagaaaatgtcgtttaccagcaaaaaggaagccgatgcttatgacaaaatgcttgatacggcggatctgcttgacacctag

SEQ ID NO: 472243 - DNA, 147 bp, Shigella flexneri
atggaagacgagcaacgtgaagccctttcgctatggctggcagaacaaaaagaggtgctgagcaccattctgaaaaccggcaaattaccgtccccacaggtcgtcggtgctgaatccgaagaggaagatgcctcacacgcggcctga

SEQ ID NO: 472244 - DNA, 357 bp, Shigella flexneri
atgaaaaaaagaggggcgtttttagggcggttgttggtttctgcctgcgcatcagttttcgctgccaataatgaaaccagcaagtcggtcactttcccaaagtgtgaaggtctggatgctgccggaattgccgcgagcgtaaaacgtgattatcaacaaaatcgcgtggcgcgctgggcagatgatcaaaaaattgtcggtcaggccgatcccgtggcctgggtcagtttgcaggacattcagggtaaagatgataaatggtcagtaccgctaaccgtgcgtggtaaaagtgccgatattcattaccaggtcagcgtggactgcaaagcgggaatggcggaatatcagcggcgttaa

SEQ ID NO: 472245 - DNA, 207 bp, Shigella flexneri
atgctgattgcccgatgcgacgctgttgcgtcttctcaggcctacgattgtggtgcgttctgggacggacaaggcactcgcgccgcatccgccaacggtcaatcgaattatcagaagccattaacgccgctgatattccgccattcccgctttgcagtccacgctgacctggtaatgaatatcggcacttttaccacgcacggttag

SEQ ID NO: 472246 - DNA, 660 bp, Shigella flexneri
atggctaactggttaaatcaactgcaatccctgcttgggcaaagcagttcttctacctcctcgtctgcggatcagggattgggcaaactgttagtgtcaggcgcattaggcggactggctgggctgctggtcgcaaataaatcagcacgtaaacttcttacgaaatatggcaccaacgcgttactggttggcggcggagcggtagcgggtacggtgctgtggaataaatacaaagataaaattcgcgcggcgcatcaggacgaaccgcagtttggcgcgcaaagtacgccgctggatgagcgtacggaacgtttgatccttgcgctggtctttgccgctaaaagtgatggtcatattgatgccaatgaacgtgcggcaatcgaccagcaattgcgtgaagccggcgtggaagagcaggggcgtgtactcattgagcaggcaatcgaacaaccgctggatccacaacgcctggctaccggggtccgcaatgaagaagaggcgctggaaatctatttcctgagctgcgcggctattgatattgaccattttatggaacgcagttacctgaatgcactgggtgacgcgctgaaaatcccccaggatgttcgtgaaggcattgaacgcgatctcgaacagcaaaaacgcactttggcggaataa

SEQ ID NO: 472247 - DNA, 2061 bp, Shigella flexneri
atgctaccaaaagccgcccgcattccccacgccatgacgcttcatggcgatacgcgcatcgataattactactggctgcgggacgatacgcgttctcagccaaaagtcctggactacctgcaacaagaaaatagttacggtcatcgggtgatggcctcacaacaagccttgcaggatcgcatcttaaaggaaatcatcgaccgcattccgcaaagagaagtttctgcgccctacataaaaaatggctaccgctatcggcatatttatgaaccaggctgtgaatatgctatctaccagcgtcaatcggcattcagcgaagagtgggatgagtgggaaacattgctcgatgccaacaagcgcgcagctcatagtgagttttattcgatgggcggaatggcgattacgcccgataacaccattatggcgctggcagaagattttctttcccgacgccagtacggcattcgttttcgtaatctggaaacaggtaactggtacccggaactgctggataacgttgaacccagctttgtctgggcaaatgactcctggactttctactatgttcgcaagcatccggtgacgctgctgccttatcaggtctggcgtcacgccatcggtacgccagcatcgcaagatacactgatctacgaagaaaaagacgatacctattatgtcagcctgcataaaacgacgtcgaagcactatgtcgtcattcatctggccagcgccaccaccagtgaagttcgcctgctggacgcggaaatggccgatgccgagccgtttgtttttctgccgcgccgcaaagatcacgaatacagccttgatcactaccagcatcgtttttatctgcgttccaatcgccacggcaaaaactttggcttataccgtacccgtatgcgtgatgagcaacagtgggaagagttaattccgccacgcgaaaacatcatgctggaagggtttacgctgtttaccgactggctggtggttgaagagcgtcagcgcgggttaaccagtttgcgccaaattaaccgcaagacccgggaagtcattggcattgcctttgatgatccggcctatgtgacctggattgcctacaatccagaacctgaaaccgcgcgattgcgttatggttattcttccatgaccacaccagacactttgtttgaactggatatggataccggtgagcgtcgtgtattaaaacaaacagaagtgcctggttttgatgcggcgaattaccgcagtgaacacctgtggatagtcgcccgtgatggcgtcgaagttccggtttcgctggtctatcatcgcaaacattttcgcaaaggacacaacccgttgctggtgtatggctatggttcttacggcgcaagtattgatgccgatttcagttttagccgcttgagtttgttagatcgtggctttgtctacgccattgtccatgttcgcggcggtggtgagctggggcaacaatggtacgaagacggtaaatttctgaagaagaaaaatacgtttaatgattatcttgatgcctgcgatgcattgttaaaactgggctatggctctccttcgctctgttatgcgatgggcggaagtgcggggggcatgttgatgggcgttgcaattaatcaacgcccggaattattccacggcgttatcgcccaggtaccgtttgttgatgttgtaacaacgatgcttgatgaatcaattcctcttaccactggtgagtttgaagagtggggaaatccgcaggatccgcaatattacgagtacatgaaaagctacagcccgtatgacaacgtcaccgcacaggcttatccgcatttactggtaacgaccggtttacacgattctcaggtgcaatattgggaaccggcaaaatgggtcgctaaattgcgcgagctgaaaaccgatgaccatcttttattgctctgtaccgacatggactcaggccatggcggtaaatctggccgctttaaatcgtacgaaggcgtagcgatggaatatgcttttctggtcgcgctggcgcagggaacattacccgctacgcctgcggattaa

SEQ ID NO: 472248 - DNA, 663 bp, Shigella flexneri
atgttgcgcattatcgatacagaaacctgcggtttgcagggagggatcgttgagattgcctctgttgatgtcattgacggaaaaatcgtcaaccccatgagcctcctggtgcgccccgatcgtcctattagtccacaagcgatggcgattcatcgcatcaccgaagccatggtcgccgataaaccgtggattgaagatgtgatcccacactattacggtagtgaatggtatgtcgcgcacaacgccagctttgaccgccgcgtactgcctgagatgcccggtgagtggatttgcactatgaaactggcccgtcgtttgtggccagggctcaagtacagcaatatggcgttatataaaacacgcaagctcaatgtacagacaccgccgggcctgcatcatcaccgcgcgttgtatgactgttatatcaccgccgcgttgcttatcgatattatgaacacctccggctggacggcagaacagatggccgatatcaccggacgtccgtcgttgatgacgaccttcacctttggcaaataccgtggcaaagcggtttccgacgttgccgaacgctatccgggctatctgcgctggttatttaataacctggacagcatgagcccggagctgcgtttaacactgaaacattatctggaaaatacttaa

SEQ ID NO: 472249 - DNA, 426 bp, Shigella flexneri
atgaccatcattgccggccttcccgttgaatataacgatcgctttattcgtggaattgcggtgttcgcaccgtggcgaaaaacgcctgggaactaccatcagagtcatggtgcatgtctgggccgtcgttccagaaccatcacggtggtcgatgaacaaccgcaaggtatggatatggacccgacctgttcactgtttacgacagggcaatgtctgggagaacccgacctgctggcgtcggcccgtcgcttacaatttttttcacatcagtactcgattgccgtgctgatggcaaatgcccgtggtaacagtgcactatgggatgaatatggtcgtctcatcgttcgcgccgatcgtggttcattattgttagtcggtcagcgttcatcacagggttggcaaggcgatatcattccattacgctag

SEQ ID NO: 472250 - DNA, 228 bp, Shigella flexneri
atgtcgttctggaaagttgcagcagcgcaatatgagcctcgtaaaacctcactcaccgaacaggtagctcatcatctggagtttgtgagggccgccgccaggcaacaatgtcagctgttagtttttccatcgctttctttactggggtgtgattattcgcgacgtgcccttcctgccccacccgatctttcactgttagacccgctttgttatgccgcaacgacctag

SEQ ID NO: 472251 - DNA, 231 bp, Shigella flexneri
atgctgaagaatctggctaaactggatcaaacagaaatggataaagtgaatgtcgatttggcggcggccggggtggcttttaaagaacgctacaatatgccggtgatcgctgaagcggttgaacgtgaacagccagaacatttgcgcagctggtttcgcgagcggcttattgcccaccgtttggcttcggtcaatctgtcacgtttaccttacgagcccaaacttaaataa

SEQ ID NO: 472252 - DNA, 375 bp, Shigella flexneri
atggcttcaactgcacgctcccttcgctacgcgctggcaatcctgaccacttcgttggtgacaccttccgtctgggcacatgcgcatttaacgcatcagtatcctgcggcaaacgcgcaagtgacagctgccccgcaggcaatcactttaaacttctcggaaggcgttgaaacaggattcagtggtgcaaaaatcacggggccaaaaaacgaaaatattaaaacattaccagcgaagcggaatgagcaggaccaaaagcaactgattgttccactggccgattcgctgaaacccggaacctacaccgttgactggcatgttgtttcggtggacgggcataaaacgaaaggacactacacctttagcgtgaaataa

SEQ ID NO: 472253 - DNA, 495 bp, Shigella flexneri
atgctggtctttggctttgcaatgtatggtgcctggctggcccccttaatgattcgtcgcttgctgacgaagcgttctctgcgtttacaacagcacgctgccgtctggagtttgatcagtgccactgcaatgctcgccgttcagggcgggttgatgggaacgggatggacagatgtattttcgccaaacatttggcaggctgttttgcaaacgcagtttggtggcgtctggttatggcaaattgttctcgccctcgtaacgttgatcgtcgcccttatgcaaccgcggaatatgccacgtttgctgtttatgctcactaccgcgcaatttattctgctggcgggagtggggcatgcgacgctgaatgaaggggtaacagcgaaaatccatcagactaatcacgcgattcacctgatttgtgcggcggcgtggtttgggggattactgccggtgctctggtgtatgcaactcatcaaaggccgttggcgacactag

SEQ ID NO: 472254 - DNA, 312 bp, Shigella flexneri
atgcgtttttcctggtgcgggcattttgcggtgatcggcgtactggcaagcggcgtgcttaatgcattgttgattaccggatttccccccacgcttacgacttactggggccaactcttattgctcaaagccatcctggtgatgattatggtggtcattgcgctggctaatcgttatgttcttgtaccgcgcatgaggcaggatgaagatcgtgcggcaccctggtttgtgtggatgactaaactcgaatgggcgataggtgcggtagtgctggtgatcatcagcctgcttgcgactctcgaacctttttga

SEQ ID NO: 472255 - DNA, 342 bp, Shigella flexneri
atgatgaaaaaaagtattctggcgtttctgttactcaccagttctgcagcggcgctggcggctccacaggtgataaccgtgagtcgttttgaagtgggtaaagacaaatgggcgtttaatcgcgaagaggtaatgctgacttgccgaccgggtaatgctttgtatgtcatcaacccaagtaccctcgtgcagtatcctttaaacgatatcgcacaaaaggaagttgccagtgggaagaccaatgcccaacccatttcggtgattcagattgatgatcctaacaatcccggcgaaaaaatgagtctggcaccgtttatagaacgagctgaaaaactctgttaa

SEQ ID NO: 472256 - DNA, 663 bp, Shigella flexneri
atggcaggatcaatgcgttctgtgttatctgatatgttccgcgaagccattgttgaaggacgtatatctcaaaatccagtaacgccaacaagagcaccgaaaatagtagttacaagagaacggctgaaactaaagacatacaactgcatcagggaggcagcagatcaacttccggcatggttcccattagctatggacttagcccttgtaacaggacaacgtcgcgaagacataacgaatatgcggttcagtgatatttatgatgatcgtctccacatcaagcaaattaagacaggaatgatgattgctatccccctgtcactcagccttcctgtcgctggtttacgacttggtgcagtagttgaacagtgccgcatggtaagtaggggggattatctaatcagtgccgggattagaaaaaacagccctgacggcagcattcacccggacggcctgacaaagaaatttgtcgcagccagaaaattaacaggtatcctgttcagtgaaaacccaccaacttttcacgaaatcagaagcctggctggacgattgtacaaagaaatatgtggagaagaatttgctcagcgtctacttggccacacatcggagaagacaacaaaaatgtatcttgatgagagagaaaaaacgtacttactgctctga

SEQ ID NO: 472257 - DNA, 393 bp, Shigella flexneri
atgcagcggaaaaaatacgatcccaatttgcctagaaacttaacatatcgaaggagagacaaagcatattactggcgcaaccctctgacgaaagaagaatttacactaggtaaaatttcaagaagagatgcagtagcgcaggcaattgaagcaaatcattatatatacaaaaactactctcctgctgccctaattgaaaagcttaaaggggtcgactcatttactatggcaggctggattgaacgttacaaaacgattcttataaggagaaaagcgtccagaaatacttataaaactcgggtaaatcaactggagacaataaaagaaaaattaggaggggttttactgacagaaataaccactcgccatatcgccgagtttcttgatttgtag

SEQ ID NO: 472258 - DNA, 1032 bp, Shigella flexneri
atggaaagtacgccgaaaaaagcacctcgcagtaaattccctgctctgttagtggttgcgttggcgctggttgcccttgttttcgttatctggcgcgtagacagtgcgccatcaactaatgacgcttacgcgtcagcagataccattgatgtggtgccggaagtcagcggtcgcattgtagaactggcggtcaccgacaaccaggcggtgaaacagggcgatttgctgttccgcatcgacccgcgcccgtacgaagccaacctggcgaaagccgaagcctccctcgcggcgctggataagcaaattatgctcacccagcgtagcgttgacgcccaacagtttggtgccgactcggttaatgccacggtagaaaaagcccgtgccgccgcgaaacaggccacagatacattacgccgcaccgagccattactgaaagagggttttgtctcagcagaagacgttgaccgtgcaagaacggcgcagcgcgccgcagaagcggatcttaatgccgtattgttacaggcgcagtcagccgccagcgccgtcagcggcgtcgatgcgctggtggcgcaacgtgcggcggtcgaagcggatattgccctgaccaaactacatctggaaatgacgaccgttcgcgcgccatttgatggccggatcatttccctcaaaacctccgtcgggcaatttgcttctgccatgcgccctatttttaccctcatcgacactcgtcactggtacgtgatcgccaacttccgcgaaaccgatctgaaaaatattcgctcaggtacacccgcaacgattcgcctgatgagtgacagcggcaaaaccttcgagggtaaagtggattcgattggctacggcgtgctaccggatgacggcggcctggtgctgggcggcctgccaaaagtgtctcgttctattaactgggtccgcgttgcccagcgttttccggtcaaaatcatggtcgataaacctgacccggaaatgttccgcatcggcgcttcggcagtcgctaatcttgagccgcaataa

SEQ ID NO: 472259 - DNA, 2043 bp, Shigella flexneri
atgagcgcgctcaactccctgccattaccggtggtcaggctgctggcgttctttcatgaagagttaagcgagcggcgacccggccgcgtgccgcagatcgtgcaactctgggtaggctgcctgctggtgattctgatctcgatgacttttgagatcccttttgtggcgttatcgctggcagtgctgttttacggtattcagtcgaacgcgttttacaccaaatttgtggcgatcttgtttgtggttgccacggtgctggagatcggcagcctgtttttgatctacaaatggtcatacggcgaaccgttgatccgattgatcatcgccgggccgatcctgatgggctgcatgtttttgatgcgcacccatcggctgggactggtctttttcgctgtcgccatttacgggcaaaccttccccgccatgctcgactatccggaagtagtcgtgcgcttaacgctgtggtgtatcgttgttggcctctatccaaccttgctgatgacgttaatcggcgtgctgtggtttcccaatcgtgccattacgcaaatgcatcaagcgcttaatgatcggcttgatgatgccattagccacctgacggacagcctcgcaccgctacccgaaacgcggattgaaagagaggcgctggcgctgcaaaaactgaatgtcttttgtctcgcggacgatgccaactggcgaactcaaagcgcatggtggcaaagctgcgtggcaacggtaacctacatttactcgacgctgaatcgctacgatcccacctcttttgctgattctcaggcaattattgaatttcggcaaaaattagcttcagaaatcaacaagctgcagcatgccgttgctgaaggtcagtgctggcaaagcgactggcggatcagtgaaagtgaagcggtggcggcacgggaatgtaacctggagaatatctgccagacgttgttacaactgggccagatgaacccgaatacgccgccaacgcccgccgccaaaccgccatcaatggtcgccgatgcttttaccaatccagactatatacgctacgcggtaaaaacattgctcgcctgtttgatctgttacaccttttacagcggcgtggactgggaaggcattcacacctgtatgctgacctgcgtgatcgtcgctaatccaaatgtcggttcgtcgtaccagaagatggtgctgcgttttggcggggccttttgcggcgcgattctggcgctgttattcacgctactggtcatgccctggctggacaatattgtcgaattgctgtttgtgctggcaccgattttcctgttggccgcatggattgccaccagctctgaacgctcttcttatatcggcacacagatggtggtcaccttcgcgctcgccacgctcgaaaacgtttttggcccagtgtacgacctggtggaaattcgcgatcgcgccctgggtatcatcattggtaccgtggtgtccgcgatgatttacacctttgtctggcctgaaagtgaagcgcgcacgctgccgcaaaaactggctggcgcgctgggtatgttaagtaaagtaatgcggatcccacgccagcaggaagtcacggctctgcgcacttatctgcaaattcgtatcggtctgcatgcggcgtttaatgcctgtgaagagatgtgccaacgcgtggcgctggagcgtcaactggacagcgaagaacgcgccttactgattgaacgttcgcaaacggttattcgtcagggccgcgatatccttcacgcctgggatgccacctggaattcggcgcaggcgctggataacgcactacagccggacagagcaggtcagtttgccgacgccctggagaaatacgctgccggtctggcaaccgcactcagccgttctcctcaaataacgcttgaagagacacccacctcgcaggccatcctgcccaccttattaaaacaggagcaacacgtctgccagcttttcgcccgcttgccagactggacagccccggcattaacgcccgccacggaacaggcacaaggagccacgcaatga

SEQ ID NO: 472260 - DNA, 1467 bp, Shigella flexneri
atgatcaatcgtcaactttcacgtctgctgttgtgcagcattctcggcagcacgacgctgatttccggctgtgccctggtacgtaaggattctgcgcctcatcaacagctcaaaccggaacaaatcaaactggccgatgatattcatcttgccagctccggctggccgcaggcgcagtggtggaaacaactcaatgacccgcagttggatgccctgatccaacggacgctaagtggttcacacaccctcgccgaagcgaaactgcgggaagaaaaagcgcaatcgcaggccgatttgttagatgccggttcacagttgcaggtggcagcgttagggatgcttaaccgccaacgtgtctcggcgaacggctttttaagcccttatgcgatggatgcgcccgcactggggatggacgggccgtactatacggaagccacagtaggtttgtttgccggactggatcttgatttgtggggtgtgcatcgctcagcggttgccgccgccattggcgcgcataatgccgcgctggcagaaaccgcagcagtagagctatcgctgaccacgggcgtagcgcagctttattacagtatgcaggccagctatcagatgctcgatctgttagaacaaactcgcgatgtgattgattacgcggtgaaagcgcaccaaagtaaagtggcgcacggtctggaagcacaagtgcctttccacggcgcgcgggcacagattctggcggtcgataaacaaattgctgccgtcaaagggcaaatcaccgaaacgagagaatctctgcgcgcattgattggcgcgggagccagcgatatgccggagatcaaacctgtggcattaccacgagtccagaccggcattccggcgacactctcttatgagttgctcgccagacgcccggatctgcaagccatacgctggtatgttcaggcgtcattagatcaggtggattccgcgcgggcgttgttctatccgagctttgatatcaaagcgtttttcggccttgatgccatccacctggataccttattcaaaaaaaccagtcgccagttcaacttcatcccgggtctgaaattgccgctgtttgacggtggacggttgaatgccaatctcgaaggcacgcgcgccgccagcaacatgatgattgaacgttacaaccagtcagtactgaacgcggtgcgtgacgttgccgtcaacggcacgcgtctgcaaacgctcaacgacgagcgagaaatgcaggctgaacacgtggaagcaacgcgcttcacccagcgcgctgccgaggccgcctatcagcgcggcttaaccagccgcttacaggccactgaagcccggttgccagtacttgccgaagagatgtcattactgatgctggacagccgccgggtgatccaaagcattcagttgatgaaatcgctgggcggcgggtatcaggcggctcccgtcgtcgagaaaaaataa

SEQ ID NO: 472261 - DNA, 240 bp, Shigella flexneri
atgaaaaaagtcgtcacggtttgcccctattgcgcatcaggttgcaaaatcaacctggtcgtcgataacggcaaaatcgtccgggcggaggcagcgcaggggaaaaccaaccagggtaccctgtgtctgaagggttattatggctgggatttcattaacgatacccagatcctgaccccgcgcctgaaaacccccatgatccgtcgccagcgtggcggcaaactcgaacctgtttcctga

SEQ ID NO: 472262 - DNA, 1413 bp, Shigella flexneri
atgagcaatgctattaacgaaattgataataccgatttagtgttcgttttcgggtacaacccggcggattcccacccaatcgtggcgaatcacgtaattaacgctaaacgtaacggggcgaaaattatcgtctgcgatccgcgcaaaattgaaaccgcgcgcattgctgacatgcacattgcactgaaaaacggctcgaacatcgcgctgttgaatgcgatgggccatgtcattattgaagaaaatctgtacgacaaagcgttcgtcgcttcccgtacagaaggctttgaagagtatcgtaaaatcgttgaaggctacacgccggagtcggttgaagatatcaccggtgtcagcgccagtgagattcgtcaggcggcacggatgtatgcccaggcgaaaagcgccgccatcctgtggggcatgggtgtaacccagttctaccagggcgtggaaaccgtgcgttctctgaccagcctcgcgatgctgaccagtaacctcggtaagccgcatgcgggtgtaaacccggttcgtggtcagaacaacgtgcagggtgcctgcgatatgggcgcgctgccggatacgtatccgggataccagtacgtgaaagatccggctaaccgcgaaaaattcgccaaagcctggggcgtggaaagcctgcctgctcataccggctatcgcatcagcgagctgccgcaccgcgcagcgcatggcgaagtgcgtgccgcgtacattatgggcgaagatccgctgcaaactgatgcggagctgtcggcagtacgtaaagcctttgaagatctggaactggtcatcgttcaggacatctttataaccaaaaccgcgtcggcggcggatgtcattttgccgtcaacgtcgtggggcgagcatgaaggcgtgtttactgcggctgaccgtggcttccagcgtttcttcaaagcagttgaaccgaaatgggatctgaaaacggactggcaaatcatcagtgaaatcgccacccgtatgggttatccgatgcactacaacaacacccaggagatctgggatgagttgcgtcatctgtgcccggatttctacggtgcgacttacgagaaaatgggcgaactgggcttcattcagtggccttgccgcgatacttcagatgccgatcaggggacttcttatctgtttaaagagaagtttgataccccgaacggtctggcgcagttcttcacctgcgactgggtagcgccaatcgacaaactcaccgacgagtacccgatggtactgtcaacggtgcgtgaagttggtcactactcttgccgttcgatgaccggtaactgtgcggcactggcggcgctggctgatgaacctggctacgcacaaatcaataccgaagacgccaaacgtctgggtattgaagatgaggcattggtttga

SEQ ID NO: 472263 - DNA, 267 bp, Shigella flexneri
gtgcactcgcgtaaaggcaaaattatcacccgtgcgcaggtcagcgatcgtccgaacaaaggggcgatttacatgacctaccagtggtggattggtgcctgtaacgagctggttaccgaaagcttaagcccgattacgaaaacgccggaatacaaatactgcgccgtgcgcgtcgagccgatctccgatcagcgcgccgccgagcagtacgtgattgacgagtacaacaagttgaaaactcgcctgcgcgaagcggcactggcgtaa

SEQ ID NO: 472264 - DNA, 690 bp, Shigella flexneri
atgaaaaaaattatcgcattgatgttgtttttgacattctttgcccacgcgaacgactccgagcctggcagccagtatttaaaggcagcagaggccggggaccgacgtgcacaatattttcttgccgacagctggtttagctccggcgatttgagcaaagccgaatattgggcacagaaagccgccgacagcggtgatgctgatgcctgcgcgctgttggcgcagatcaaaatcaccaatccggtcagtctggactatccacaagcaaaagttcttgcagagaaagcggcgcaagcgggcagtaaagaaggtgaagtaacgctggcgcatattctggtaaatactcaagcgggtaaaccggattatccaaaggcgatttcgctgttagaaaacgcctcggaagatctggagaatgactccgccgtcgatgcccaaatgctgcttggtttgatttacgccaacggcgtgggcattaaggccgacgatgacaaggcaacctggtatttcaaacgcagctctgcaatttcccgaaccggttattccgagtactgggcgggaatgatgttcttaaacggtgaggaaggttttatcgagaagaacaaacaaaaggcgctgcactggttgaacctgagctgtatggaagggtttgataccgggtgtgaagagtttgaaaaattaaccaacggttaa

SEQ ID NO: 472265 - DNA, 1314 bp, Shigella flexneri
atgaaaaatataaaattcagcctggcctggcagattctgtttgctatggtgctgggcattctcctgggaagctacctgcactaccatagcgacagccgcgactggctggtcgtcaatttgctctctccggcgggtgatatcttcatccatctgatcaaaatgattgttgtgccgattgtgatctccacgctggtggtgggtatcgcgggtgttggtgatgccaaacagctcgggcgtattggcgcgaaaaccattatttacttcgaggtgatcaccaccgtcgccatcattttggggatcactctggcgaacgtcttccagcccggtgccggggtggatatgtcgcagctggcgaccgtcgatatctcgaaatatcagagcactacggaagcggtacaaagcagttcccacggcattatgggcacgattttgtcgctggtgccgacgaacattgtggcgtcgatggcgaaaggcgaaatgctgccgatcatctttttctcggtgctgtttggtctggggctttcttccctgcccgcgacgcatcgtgaaccgctggtgaccgtgttccgctccatctctgaaaccatgtttaaagtgactcacatggtgatgcgttatgcaccggtgggtgtgtttgcgctgattgcggtgacggtggctaactttggtttctcgtctctgtggccactggcgaaactggtgctgctggtgcatttcgccattctgttcttcgcgctggtagtgctgggaattgtggcacgtctgtgcgggttaagcgtctggatcctgattcgtattctgaaagatgagctgattctggcgtactccactgccagctctgaaagcgtactgccgcgaattattgagaagatggaagcctacggagcaccggcgtcgatcaccagcttcgtggtgccgaccggttactcttttaaccttgatggttcgacgctgtatcaaagtattgccgctattttcatcgctcagctgtatggcattgacctgtccatctggcaggaaatcattctggtgctgacgctgatggtgacctcgaaagggattgctggcgtggctggcgtgtcgtttgtggtgttgctggcaacgctgggtagcgtaggtattccgctggaaggtctggcgtttattgctggtgttgaccgtatcctcgacatggcgcgtactgcgctgaacgtggtgggtaatgcgctggcggtgctggtgattgccaagtgggaacacaaatttgaccgcaaaaaggcgctggcttatgagcgtgaagtgctgggcaaatttgataaaactgcggatcaataa

SEQ ID NO: 472266 - DNA, 597 bp, Shigella flexneri
atgaaacagcctcaaataccggtgaaaatgctgacaacactcacgatattgatggtattcctctgtgtcggcagttatctgttaagcccaaaatggcaggcggtacgtgcggagtatcagcgtcagcgcgatccgctacatcagtttgccagccagcaaaccccggaagcgcagcttcaggcattgcaggataaaatccgcgctaatccacaaaacagcgaacaatgggcgttactgggcgagtactatctgtggcaaaacgattacagcaattcgctgctggcgtatcgtcaggcgttgcaactacgtggtgagaacgctgaactgtatgcggcgctggcgacggtgctttattaccaggccagccagcatatgaccgcccagactcgcgcaatgatcgacaaagccctcgcgctggactctaacgaaatcaccgctctgatgctgctggcttccgatgcgtttatgcaggcgaattacgcgcaagccatcgaactatggcaaaaagtgatggatctcaactcaccccggatcaaccggacacagctggtcgagtcgattaatatggcaaaactgttgcagcggagatcggattaa

SEQ ID NO: 472267 - DNA, 384 bp, Shigella flexneri
atgaataaagggcttctcacgctactgctgttatttacctgttttgcgcgcgctcaggttgtagacacctggcaattcgccaatccgcaacaacagcaacaggcgttaaatattgccagccagttacgttgtccgcagtgccagaatcaaaacttactcgaatccaatgcgccggtggcggtcagtatgcgccatcaggtttatagcatggtgtcggaggggaagaacgaagtcgaaatcattggctggatgaccgaacgctacggagattttgttcgctataacccaccgttaacgggtcagacgctggtgttgtgggcgctgccagtggtgttgttattgctgatggcactgatcctctggcgagtgagggctaagcgatga

SEQ ID NO: 472268 - DNA, 1623 bp, Shigella flexneri
ttgcgctggcctgccatgatgcgactcacttgcatcggcattctggcgcagttcgcgctcctgctgctcgcctttggcgtactgacgtattgttttctcatcagcgatttctcggtcatttatgtcgcccaacatagctacagcctgctgtcgtgggaactcaaactggcggcggtgtggggcggtcatgaaggttcgctgctgctttgggtgctgctgctttccgcctggagcgcgctgtttgcctggcattatcggcagcaaagcgatccgctatttccgctgacgctagccgttttatctctcatgctcgccgcactgctactgtttgtggtgctgtggtccgatcccttcgtgcggatatttccaccagcaatcgaaggccgcgatctcaatccgatgctgcaacatcccggtcttatctttcatccaccgctgctttaccttggctatggcggtttgatggtagcggcgagcgtggcgctggcgagtctactgcgcggcgagtttgatgcggccagcgcccgaatttgctggcgctgggcgttacctggctggagtgcattaacggcggggatcatcctcggttcctggtgggcctactgcgaactcggctggggcggctggtggttctgggatccggtggaaaacgcctctttattaccctggctttctgccactgcgctgctgcacagtttgtccctgacacgccagcgggggattttccgccactggtcgctgttgctggcgatagttactctgatgctgtcgctgctgggcaccttaattgtccgttctggcattctggtttcggttcatgcgttcgcactggataacgtccgcgccgtgccgttgttcagcctgtttgcactgattagccttgcgtctttggctctgtatggctggcgagcgcgggacggtggcccggcggtgcgtttttcggggttatcgcgggaaatgttaatcctcgctacgctgttgctgttttgcgcagtgctactgatcgtgctggtgggaacgctttatccgatgatttacggcctgctgggctggggacgcctctccgttggcgcgccgtattttaaccgcgcgacgttaccgtttggtctgttgatgctggtggtgattgtgttggcgacgtttgtctctggcaaacgcgtgcagcttccggcgctggtagctcatgctggcgtgctgttatttgccgcggggatcgtggtttccagtgtcagtcgtcaggagatcagcctgaatttacagccgggtcagcaggtgacgctggcaggatacaccttccgttttgagcgactcgatctgcaagccagaggcaattacaccagcgaaaaagcgatagtggcgctgtttgaccatcagcaacgcattggtgaattaacgccggagcggcgtttttatgaagcacgccgtcagcaaatgatggaaccgtcaattcgctggaacggcatccatgactggtatgcggtcatgggtgaaaaaaccagagcggatcgttacgcttttcgtttgtatgtacaaagcggtgtgcgctggatctgggggggaggattgttgatgattgcgggcgcattgttaagcggatggcgggggaagaagcgcgatgaataa

SEQ ID NO: 472269 - DNA, 957 bp, Shigella flexneri
atgacgcagacttccgcatttcattttgaatcgctggtgtgggactggccgattgccatctacctgtttttgattggtatttctgccggtctggtgacgctggccgtgctgttacgtcgcttctacccgcaggcgggcggtgcagacagtacgttgctgcgcaccacgctgattgtcgggccgggcgcggtgatcctcggtctgttgatcctcgtcttccatctgacaagaccgtggaccttctggaagctgatgttccactacagttttacctcggtgatgtcgatgggggtgatgctgtttcagctctacatggtggtgctggtgctgtggctggcgaaaatctttgaacatgatttgcttgccctgcaacaacgctggttgccgaagctggggatcgtgcaaaaggttctgagcctgctgacgcccgttcatcgcggactggaaacgctgatgctggtgttggcggtgctactgggggcttataccggctttctgctgtcggcgctgaaatcgtatccgttcctcaataacccgagcctgccggtgctgctcctcttctccggcatctcgtccggtgcggcggtggcgctgatcgccatggcgatacgccaacgcagtaacccgcattccacggaagcgcactttgttcaccggatggaaatccccgtggtatggggtgaaatcttcctgctggtggcgttttttgtcggtctggcgctgggcgatgacggtaaagttcgtgcgctggtggcggcattaggtggcggtttctggacgtggtggttctggcttggtgtcgccgggctggggctgattgtgccaatgttgctcaaaccgtgggtcaatcgcagttccggcattcctgccgtgctggcggcgtgtggggccagtctggtcggcgtgttgatgctgcgctttttcattctctacgccggacagttgacggtggcgtaa

SEQ ID NO: 472270 - DNA, 672 bp, Shigella flexneri
atgacctggtctcgtcgccagtttctcaccggcgtcggcgtgctggcagccgtcagcggcaccgcagggcgcgtggtggcgaaaacgttgaatatcaatggggtgcgttacggcatggtgcatgacgagtcgttatgcatcggctgtaccgcctgtatggatgcttgtcgggaagtgaacaaggtgccggaaggcgtctcgcgcctgacgattattcgtagcgagccgcagggcgaatttcctgatgtgaaatatcgcttcttccgtaagtcttgccagcactgcgatcatgcgccgtgcgttgacgtctgcccgaccggtgcgtcttttcgtgatgccgctagcgggattgtcgatgttaatcctgatctctgcgtcggttgtcagtactgcatcgccgcctgtccgtaccgcgtgcgctttatccatccggtcacgaagacggcggacaaatgcgatttctgtcgtaagaccaatttgcaggccggtaagcttcccgcgtgcgttgaagcttgcccgacgaaggcgctgacgtttggcaatctggacgatcctaacagtgagatttcgcaactgctgcgccagaagcctacttaccgctacaagctggcgctgggaaccaaaccgaagctgtaccgcgtaccgtttaaatacggggaggtgagccaatga

SEQ ID NO: 472271 - DNA, 567 bp, Shigella flexneri
atgagcgtattacgttcgttattaactgctggggtgctggcgtcgggcctgttgtggagcctgaacggaattaccgctacccctgcggtgcaggcatctggtgatcgctacgaagttacccagcagcgtaacccggatgccgcctgtctggactgtcataaaccagataccgaaggtatgcatggcaaacatgcttccgttatcaacccgaataacaaattgccggtcacctgcaccaactgtcacggccaagcatcaccgcaacaccgcgaaggggtgaaagatgtgatgcgctttaacgagccgatgtataaggtcggagagcagaacagcgtctgtatgtcctgtcatctgccggaacagttgcaaaaagcgttctggccgcacgatgtccacgtaaccaaagtggcgtgcgccagctgccattccctgcatccacagcaagatacgatgcagacgttaagtgacaaaggacggattaagatttgcgtcgattgccacagcgatcagcgcaccaatccgaactttaacccggcgtctgttccgttgcttaaggagcagccatga

SEQ ID NO: 472272 - DNA, 1437 bp, Shigella flexneri
atgacaaggataaaaataaacgcacgccgtatcttcagcttattgattccttttttctttttcacttctgttcacgctgaacaaacggcagctcccgcaaaacctgtaactgtggaagcgaagaatgaaacctttgccccgcagcatcacgatcaatatctctcctggaaagccacctcggaacagtcagagcgtgttgacgccctggcggaagatccacggctggtgatcctgtgggcggggtatcccttctcgcgcgattacaacaagcctcgtggacatgcctttgctgtgaccgatgtgcgtgaaaccctgcgtaccggtgcgccgaaaaacgctgaagatggtccgctaccgatggcgtgctggagttgtaaaagcccggatgtggcgcgtctgatccagaaagacggcgaagatggctacttccacggtaaatgggcgcgcggcggcccggaaatcgtcaacaacttaggttgtgccgactgccataacaccgcctcaccagagttcgccaaaggcaaaccggagttaaccctttcccgtccgtatgcggctcgcgcgatggaagccattggtaaaccttttgagaaagccggacgtttcgaccagcaatcgatggtttgcggtcagtgccatgtggagtattacttcgacggcaaaaacaaagcggttaaattcccgtgggatgacggcatgaaagtcgaaaatatggagcagtattacgacaaaattgccttctctgactggactaactccctgtcgaaaacgccaatgctgaaagcgcagcacccggaatatgaaacctggacagcgggcattcacggtaaaaacaacgtgacctgtatcgactgccatatgccaaaagtgcagaacgccgaaggcaaactctacaccgaccataaaattggtaatccgtttgataacttcgcccagacttgtgcgaactgccatacccaggataaagctgccttgcaaaaagtggtcgcggaacgtaagcaatcgattaacgacctgaaaatcaaggttgaagatcaactggttcacgctcacttcgaagcgaaagcggcgctggatgcaggcgcgacggaagccgaaatgaagccgattcaggacgatatccgtcatgcccagtggcgttgggatctggcgatcgcttcccacggtattcatatgcacgcaccggaagaaggtctacggatgctcggtacggcgatggataaagcggcggatgcgcgcaccaaactggcgcgcctgctggcgaccaaaggtatcacccatgaaatccagatcccggatatctcgaccaaagagaaagcccagcaggccattggcctgaacatggaacaaatcaaggccgagaagcaggacttcatcaaaacggtgatcccgcagtgggaagagcaggcacgtaaaaacggtctgttaagccaataa

SEQ ID NO: 472273 - DNA, 1959 bp, Shigella flexneri
atgagccaaattcacaaacacaccattcctgccaacatcgcagaccgttgcctgataaaccctcagcagtacgaggcgatgtatcaacaatctattaacgtacctgataccttctggggcgaacagggaaaaattctcgactggatcaaaccgtaccagaaggtgaaaaatacctcctttgcccccggtaatgtgtccattaaatggtacgaggacggcacgctgaatctggcggcaaactgccttgaccgccatctgcaagaaaacggcgatcgcaccgccatcatctgggaaggcgacgacgccagccagagcaaacatatcagctataaagagctgcaccgcgacgtctgccgcttcgccaataccctgctcgagctgggcattaaaaaaggtgatgtggtggcgatttatatgccgatggtgccggaagccgcggttgcgatgctggcctgcgcccgcattggcgcgatgcattcggtgattttcggcggcttctcgccggaagccgttgccgggcgcattattgattccaactcacgactggtgatcacttccgacgaaggcgtgcgcgccgggcgtagtattccgctgaagaaaaacgttgatgacgcactaaaaaacccgaacgtcaccagcgtagagcatgtggtggtactgaagcgtactggcggaaacatcgactggcaggaagggcgcgacctgtggtggcacgacctggttgagcaagccagcgatcagcaccaggcggaagagatgaacgccgaagatccgctgtttattctctatacctccggttctaccggaaaaccaaaaggcgtactgcacactaccggcggttatctggtgtacgcggcgctgacctttaaatatgtctttgattatcatccgggtgatatctactggtgcaccgccgatgtgggctgggttaccggacacagttatttgctgtacggcccgctggcctgcggcgcgaccacgctgatgtttgaaggcgtaccgaactggccgacgcctgcccgtatggcgcaggtggtggacaagcatcaggtcaatattctctataccgcacccacggcgatccgcgcgctgatggcggaaggcgataaagcgattgaaggcaccgaccgttcgtcgctacgcattctcggttccgtgggcgagccaattaacccggaagcgtgggagtggtactggaaaaaaatcggcaacgagaaatgtccggtggtcgatacctggtggcagaccgaaaccggcggtttcatgatcaccccgctgcctggcgctaccgagctgaaagccggttcggcaacacgtccgttcttcggcgtgcaaccggcgctggtcgataacgaaggtaacccgctggaaggggctaccgaaggtagcctggtgatcaccgactcctggcctggtcaggcgcgtacgctgtttggcgatcacgaacgttttgagcagacctatttttccaccttcaaaaatatgtatttcagcggcgacggcgcgcgtcgcgatgaagatggctattactggatcaccgggcgtgtggacgacgtgctgaacgtctccggtcaccgtctggggacggcagagatagagtcggcgctggtggcgcatccgaagattgccgaagccgccgtagtaggtattccgcacaatattaaaggtcaggcgatctacgcctatgtcacgcttaatcacggggaggaaccgtcaccagaactgtacgcagaagtccgcaactgggtgcgtaaagagattggcccgctggcgacgccagacgtgctgcactggaccgactccctgcctaaaacccgctccggcaaaattatgcgccgtattctgcgcaaaattgcggcgggcgataccagcaacctgggcgatacctcgacgcttgccgatcctggcgtggtcgagaagctgcttgaagagaagcaggctatcgcgatgccatcgtaa

SEQ ID NO: 472274 - DNA, 315 bp, Shigella flexneri
atgaatggtacgatttatcagcggatagaagacaatgcgcatttcagggagttagtcgaaaaacggcaacggtttgccaccatcctgtcgattattatgctggcagtttatatcggctttattttactgatcgccttcgcgcccggctggctgggcacgccgctgaatccgaacaccagcgtcacacgcggtattccaattggtgttggagtgattgtgatctcctttgttctcaccggtatctacatctggcgggcgaacggcgaattcgaccgtcttaataatgaagtcctgcatgaggtacaagcatcatga

SEQ ID NO: 472275 - DNA, 1650 bp, Shigella flexneri
atgaaaagagttctgacggcgcttgccgccacactccctttcgcagctaacgccgcggatgctattagcggggccgtagagcgccagccaacgaactggcaggcgattattatgttcctgattttcgtcgtgtttacgctcggcattacctactgggcatcaaaacgcgtacgttctcgtagcgactactacaccgcaggcggcaatatcactggcttccagaacgggctggcgattgccggggactatatgtccgccgcctcattcttggggatctccgcgctggtgtttacctccggctatgacgggctgatctactcgttgggcttcctggtgggctggccaatcattctgtttctgattgccgaacgtctgcgtaacctgggacgctacacctctgccgatgtggcctcttatcgtctgaaacaagggccgattcgtattctttcggcctgtggttctctggtagtggtggcgctttaccttatcgctcagatggtaggcgcaggtaaactgatcgagctgctgtttggccttaactatcacattgcggtggtgctggtcggcgtgctgatgatgatgtacgtcctgttcggcggcatgctggcgaccacctgggtacaaattatcaaagctgtgctgttgctgttcggtgccagctttatggcctttatggtgatgaaacacgtcggctttagcttcaacaatctgttcagcgaagcgatggcggtacacccgaaaggtgtcgacatcatgaaaccgggcggactggtgaaagatccgatctccgcgctctctctggggctgggactgatgtttggtacggcgggcttgccgcacattctgatgcgcttctttacagtcagcgatgcccgcgaagcacgtaagagcgtgttctacgccaccggatttatgggctacttctatattctgacctttattatcggcttcggcgcgatcatgcttgttggtgcgaatccggaatataaagacgcggcgggccatctgattggtggtaacaacatggcggccgttcacctggcgaatgcagtgggcggcaacctattcctcggttttatttcagcggttgctttcgccactatcctcgcggtggttgcggatctgacgctggcgggcgcatcggcggtttcgcatgacttgtacgctaacgtcttcaaaaaaggcgcgaccgaacgtgaagagctgcgggtatcaaaaatcaccgtactgatcctcggcgtgattgcgattatcctcggcgtgctgtttgagaatcagaacatcgcctttatggtaggccttgcgtttgccatcgcggcgagctgtaacttcccgatcattctgctttccatgtactggtcgaaactgactacccgtggcgcgatgctgggcggctggctggggctgattaccgcagtggtgctgatgatcctcggcccgactatttgggtacagatcctcggtcacgaaaaagccatcttcccgtatgaatacccggcgctgttctctatcagcgtggcattcctcggcatctggttcttctcggcaaccgataactcagcggaaggggcgcgcgagcgtgaactgttccgcgcgcagtttatccgctcccagaccggctttggcgttgagcaaggccgcgcacattaa

SEQ ID NO: 472276 - DNA, 1293 bp, Shigella flexneri
atgcgctataatggtttaaataatatgtttttccctctttgccagattaacgataaccactctatcacaagttcatcacatacaaagaaaacaaaatcagataattacagcaaacatcataaaaacacgttaattgacaataaagccctctctcttttcaaaatagatgatcatgaaaaagtgataggcttgattcagaaaatgaaaagaatttatgatagtttaccatcaggaaaaatcacgaaagaaacggacaggaaaatacataaatattttatagatatagcgttatatgcaaataataaatgtgacgatagaattacgagaagagtttaccttagtaaagaaaaggatgtatccattaaggtggtatattttataaataatgtcgccgtccataataatactatcgaaattccacagatagtaaatggtggttacgatttttcacaccttagcctgaagggtatcgtgattaaagatgaagatttatccaattcgaattttgcaggttgcagactacaaaacgctattttccaggactgtaatatgtataaaacgaatttttattacgccataatggaaaaaatactttttgataattgtattctcgatgactcaaatttcgctcagataaaaatggccgacggaactctaaatgcatgctccgctatgcatgttcaattctacaatgcagcaatgaatagagccaatattaaaaataccttccttgactattcaaatttttatatggcgtacatggctgaggtaaatctttataaagtaatagcgccatatgttaatttatttaaagccgaccttagtttctctaaactcaatttaattaactttgaacatgctgatctgtctcgcgtcaatctgaacaaagcaatcctccagaatataaacttaattgatagcaaactcttttgtacgtggctgacaaatacattcctcgaaatggttatatgtaccggctctaatatggctaatgttaattttaataatgccaatttaagcaactgccatttcaactgttctattttaacaaaagcctgtatgtttaatacccgtctctatcgggttaatttcgatgaggctagcgtccagggaatgggcatttccattctccgtggggaggaaaatatccccattgatagtgataccctggtaacactacagaaattctttgaagaagattgtacctctcatactggcatgtcacaaactgaggataatattaatgcagtcgctatgaagattactgcagatattatgcaacacgcagattga

SEQ ID NO: 472277 - DNA, 1650 bp, Shigella flexneri
atggaaatcttcttcaccatactgataatgaccctcgtggtctcgctgtccggggtggtcactcgtgtcatgccctttcagatcccgcttccgcttatgcaaatcgccatcggtgcgctactggcgtggccgacgtttggtttgcatgtggagtttgatcctgaactctttttagtcttgtttatcccgccgttgctgttcgctgatggctggaaaacgccgacccgtgaatttctcgaacatggtcgagagattttcggcctcgcgctggcgctggtggtggtcaccgtggtcggcattggcttccttatttactgggtggtgccgggcattccgctgatccccgcctttgcgctggcggcggtactttctccgaccgatgctgtggcgctctccgggattgttggcgaagggcgcatcccgaaaaaaatcatgggcattttgcagggcgaagcgttgatgaatgacgcttccggcctggtgtcgttgaagtttgccgtggcagtggcgatggggacgatgatcttcactgtcggcggtgcgacggtcgaatttatgaaagtagccattggcggtattcttgccggttttgtggtgagctggctgtatggtcgctcgctgcgattcctcagccgctggggcggtgatgaacccgcgacgcagatcgttctgctgttcttgctgccattcgcttcttatctgattgccgaacatattggcgtttcgggcatcctcgctgcggttgccgccgggatgaccatcacccgctccggtgtgatgcgccgtgcgccactggcaatgcgcctgcgcgcaaacagcacctgggcgatgctggaatttgtctttaacggcatggtgttcctgctgttaggtctgcaactgccgggtattctggagacgtcgctgatggcggcagaaatcgaccctaacgtcgaaatctggatgctgtttaccgatattattctgatatatgcggcgctgatgctggtccgtttcggctggctgtggacgatgaaaaagttcagcaaccgcttcctgaagaagaagccgatggagtttggttcgtggaccacacgagaaatcctgatcgcgtctttcgctggggtgcgtggggcgatcactctggccggtgtgctctcaatcccgctgctcttgccggatggtaacgtcttcccggcgcgctatgagctggtgttcctggcggctggcgtcattctcttctcgctgtttgtcggcgtggtgatgttgcctattctgctacaacacattgaagtcgcggaccattcgcaacaattgaaagaagaacgtattgcgcgagcggcaacggcagaagtggcgattgtggcgatccagaaaatggaggagcgtctggcggcggataccgaagagaatatcgataaccagttgcttacggaggtcagttctcgcgtcattggtaacctgcgtcgtcgcgccgatggacgtaacgacgttgaaagttccgtgcaggaagagaaccttgagcgtcgcttccgtctggcggcattgcgttctgaacgtgctgaactgtaccacctgcgcgccacgcgggagatcagcaacgaaacgctgcaaaaattactgcacgatctcgatttgcttgaagcgttgctaattgaggaaaatcagtaa

SEQ ID NO: 472278 - DNA, 1350 bp, Shigella flexneri
atgtctacgccatcagcgcgtaccggcggttcactcgacgcctggtttaaaatttcacaacgtggaagcactgtccgtcaggaagtggttgccgggttaacaacgtttctggcgatggtctactcggtcatcgtcgttccaggtatgttgggtaaagcaggcttcccgcctgcggcagttttcgttgcaacctgtctggttgccggactcggttctatcgtgatgggtctgtgggctaatctgccgttggcgattggttgcgccatctccctgacggcgtttaccgcattcagcctggtgctggggcaacatattagcgtacctgtcgcgctgggtgccgtgttcctgatgggtgtgctgtttacggtaatttctgccacgggtatccgtagctggattttgcgcaacttgccgcacggtgtggcgcacggcacggggatcggtatcggtctgttcctgctgctcattgccgctaatggtgtcggtctggtgattaaaaacccgcttgatggtctgcccgttgcgctgggtgatttcgcgaccttcccggtgattatgtcactggtaggtctggcggtgatcatcggcttggaaaaactgaaagtccctggtggcattctgctgaccattatcggtatctcaattgtcggtttgatcttcgatcctaacgtccatttctccggcgttttcgccatgccttcattgagcgatgaaaacggcaattcactgattggcagcctggacattatgggcgcgctgaatcctgtagtcctgccaagcgttctggcgctggtgatgacggcagtatttgatgccaccggaactatccgcgctgtcgccggccaggcgaacctgctggataaagatgggcagatcatcgacggcgggaaagcactgaccactgactccatgagcagcgttttctctggcctggtgggtgcagctccggcagcggtatacatcgagtctgcggcgggtacggcggcgggcggtaaaaccgggttgacggctatcaccgttggcgtgctgttcctgctgattctgttcctctctccgctttcttacctcgttccggggtatgcaacggctccggcgctgatgtacgttggcctgctgatgctgagcaacgtggcgaaaatcgactttgctgattttgttgatgcgatggcgggtctggttacggcggtattcatcgtgctgacctgtaacatcgtaacaggcatcatgatcggcttcgcgactctggtgattggtcgtctggtttccggtgaatggcgcaagttgaacatcggtacggtcgttatcgccgtggcgctggtgaccttctatgcgggtggctgggctatctaa

SEQ ID NO: 472279 - DNA, 465 bp, Shigella flexneri
atggaaaagaaattaccccgcattaaagcgctgctaacccctggcgaagtggcgaaacgcagcggtgtggcggtatcggcgctgcatttctatgaaagcaaagggttgattactagtatccgtaacagcggcaatcagcggcgatataaacgtgatgtgttgcgatatgtcgcaattatcaaaatcgctcagcgtattggcattccgctggcgaccattggtgaagcgtttggcgtgttgccagaagggcatacgttaagtgcgaaagagtggaaacagctttcgtcccaatggcgagaagagttggatcggcgcattcataccttagtggcgctgcgtgacgaactggacggatgtattggttgtggctgcctttcgcgcagtgattgcccgttgcgtaacccgggcgaccgcttaggagaagaaggtaccggcgcacgcttgctggaagatgaacaaaactaa

SEQ ID NO: 472280 - DNA, 324 bp, Shigella flexneri
atgtcccatcagaaaattattcaggatcttatcgcatggattgacgtgcatattgaccagccgcttaacattgatgtcgtcgcaaaaaaatcaggctattcaaagtggtacttgcaacggatgttccgcacggtgacgcatcagacgcttggcgattacattcgccaacgccgcctgttactggccgccgttgagttgcgcaccaccgagcgtccgatttttgatatcgcaatggacctgggttatgtctcgcagcagaccttctcccgcgttttccgtcggcagtttgatcgcactcccagcgattatcgccaccgcctgtag

SEQ ID NO: 472281 - DNA, 333 bp, Shigella flexneri
gtggcaattgatgattttggtattggctactctaacttgcataaccttaaatcattgaatgtcgatattttgaaaatcgataaatcgtttgttgaaacgctgaccacccacaaaaccagtcatttgattgcggaacacatcatcgagctggcgcacagcctggggttaaaaacgatcgctgaaggcgtcgaaactgaggagcaggttaactggctgcgcaaacgcggcgtgcgctattgccagggatggttttttgcgaaggcgatgccgccgcaggtgtttatgcaatggatggagcaattacccgcgcgggagttaacgcgcgggcaataa

SEQ ID NO: 472282 - DNA, 282 bp, Shigella flexneri; identical to SEQ ID NO: 460762

SEQ ID NO: 472283 - DNA, 213 bp, Shigella flexneri
ttgtcccgtaaaatgacaggaattgtcaaaacctttgatcgcaaaagcggcaaaggattcattatcccctccgacggtcgtaaagaagtccaggtccatatttccgcattcactccccgcgacgcagaagtgcttataccaggattacgcgtggaattttgccgcgtaaatggcctgcgaggaccaacagcggcaaatgtttatctctcttaa

SEQ ID NO: 472284 - DNA, 306 bp, Shigella flexneri
atgaaacacaagctttctgcaatccttatggccttcatgttgacgacgccagctgcgtttgctgcccctgaagcagcaaacgggaccgaggcaacgacgggtactactggcaccacaacgaccactacaggtgcaaccacgactgcggctaccactagtggcgtggctgctggcgctgtcggcacggcgacagttgtcggtgtggcaacggctgttggtgtggcgacgttggcagtagttgcagcaaatgacagtggcgatggcggttctcataacacctcaaccaccacgtccactacgcgctaa

SEQ ID NO: 472285 - DNA, 645 bp, Shigella flexneri
gtgcgccctcttattttatcgattttcgcactatttcttgcgggatgtacgcacagccagcaaagtatggtcgatacatttcgcgccagccttttcgataatcaggatatcactgtagcggctcagcagatccaggcgttgccttattccacgatgtatttacgccttaatgaagggcaacgaatctttgtggtactgggatatatagaacaagaacaaagcaaatggttatcccaggataacgccatgctggttacccacaatggacgtcttttaaagaccgtcaaacttaataataatctgctggaagtgacaaatcccgggcgggcccctctgcgtaacgcgctggcaataaaagatggcagccgctggacgcgcgatattctctggagtgaagacaaccattttcgctctgcgaccctaagttctactttttcctttgctggattagagacgctgaatattgcgggtcacaatgtgctgtgtaatgtctggcaggaagaggtgacttccacgctgccagaaaaacagtggcaaaacacattctgggtcgattcggctactggccaggttcgtcaaagtcggcaaatgttaggcgcaggggttattcccgtagaaatgacgtttcttaaacccgcaccatga

SEQ ID NO: 472286 - DNA, 747 bp, Shigella flexneri
atgaataaattacagtcgtatttcattgccagcgtactttacgtaatgacaccccatgcctttgcgcaaggaacggtgactatttatctgcctagcgaacaacagacactttccgttggccccgtggaaaatgttgtccagttggtgacacaaccgcaactgcgcgatcgcctctggtggcctggtgccttgctgaccgactctgcggcgaaagctaaagcgcttaaagactaccaacatgtcatggcacagcttgcttcctgggaagcagaagctgacgacgatgtggcggcaacgattaaatccgtgcgccagcagttactcaatctcaatatcactggtcgcttaccggtcaaactggaccctgattttgtacgagtggatgagaacagcaatcccccgttggtcggggactatacgctctataccgtacagcgtccggtgactattactctgctgggtgcggtttctggggctgggcaattgccctggcaggcaggccgtagcgttaccgattatctgcaagatcacccccgccttgcaggcgcagacaagaataacgttatggtgattacgcctgagggtgagactgtcgtcgcccctgttgccctgtggaataaaagacatgtggaaccaccgcctggcagccagctttggttgggcttttctgcgcatgtactgcccgaaaaatatgctgatttaaatgaccagattgtgtctgttttaacgcaacgtgttcctgactga

SEQ ID NO: 472287 - DNA, 2097 bp, Shigella flexneri
atgaagaagaattcttatcttttaagctgcctggccattgccgtctccagtgcctgtcatgctgaagtattaacctacccggatccgctgggttcgtcgcaatcagactttggcggcacaggattgttgcagatgccaaatgcgcgcatcgcaccggaaggtgaattcagcgtcaactaccgggataacgatcaataccggttctactccacctccgtggcgctgttcccatggctggaaggcaccattcgttatacggatgtgcgcacacgcaaatatagccagtgggaagatttcagcggcgatcagccatacaaagacaaatcattcgattttaaacttcgcctgtgggaagaaggttactggctaccgcaagtggcgtttggtaaacgtgatattgctggtacgggtttgtttgacggtgaatatctggtggccagcaagcaagcggggccatttgatttcaccctcgggatggcatggggctacgccggtaatgcgggcaatattaccaacccgttttgccgggtgagcgataaatattgtcatcgcgcagagtctcacgatgcgggcgatatcagctttagcgatatctttcgtggcccggcttccatctttggcggcattgagtatcaaacgccgtggaatcccctgcgtctgaaactcgaatacgacggcaacaattaccagaatgatttcgctggcaaactgcctcaggcaagccatttcaacgtcggtgcagtttatcgcgctgccagctgggcagacctcaacctcagttatgaacgcggaaacacgttgatgtttggtttcactttacggaccaatttcaacgatctgcgccctgccctacgcgatacgccaaaaccggcctggcagcctgcgccagagtctgaaggtttgcagtacaccacggtagcaaaccaacttaccgccctgaagtataacgcgggctttgacgcgccagaaattcagctacgcgataagacgctgtatatgtctggtcagcaatacaaataccgtgactctcgcgaagcggtcgatcgtgccaaccggattctggtgaataacctgccgcaaggcgttgagaagattagcgtgacgcaaaagcgcgagcatatggcgatggtgactaccgaaaccgacgtagccagcctgcgcaaacagctggccggcacagcgcctggtaaatcagagcaactgcaacaacaacgtgttgaagcagaagatctttctgcctttggtcggggctaccgtattcgtgaagatcgctttagctactctttcaacccaacactttcacagtcgctgggcggcccggaagatttctatatgttccagctggggctgatgtccagcgcccgctactggtttaccgaccacctgctgcttgatgacggtattttcaccaatatttacaacaactacgacaagtttaagtcttcactgttacccgcggactctaccctgccccgcgtgcgcacgcatatccgtgattacgttcgcaatgacgtttatctcaacaacttgcaagcgaattactttgccgacttaggcaatggtttctatggccaggtgtatggcggttatctggaaacgatgtatgccggtgtcggttccgagcttctttatcgcccgctagatgccagctgggcgctgggtgtggacgttaactacgtgaagcagcgtgactgggacaacatgatgcgcttcaccgattattccacgcccacaggtttcgtgacggcttactggaacccgccgacgctcaatggcgtactgatgaaacttagcgttgggcaatatctggcaaaagataaaggcgcaacgatcgacgtcgccaaacgctttgacagcggcgtggcggtaggggtatgggcggcaatcagtaacgtatctaaagatgactacggcgaaggcggctttagtaaaggtttttatatctcgattccgttcgacttgatgaccattggacctaaccgcaaccgcgcggtggtttcgtggacaccattgacgcgtgatggtggacaaatgctgtcacgcaaataccagctcgatccaatgacggcagagcgagaagtaccggttggacaataa

SEQ ID NO: 472288 - DNA, 1140 bp, Shigella flexneri
atgaaaaagaacatttttaagttttcggtactgacattggctgttctgtctttgacagcatgtacccttgttcctggtcagaatttatcgaccagtaacaaggatgtcattgaactacctgacaatcagtatgacctggacaaaatggtcaatatctatcccgtcacgccaggattgattgatcagctgcgcgccaaaccgattatgtcgcaggctaacccggagctggagcagcaaatcgcaaactatgaatatcgtatcgggattggtgatgtgttgatggttacggtctgggatcacccggaactaaccacccccgcagggcaataccgtagcgccagtgataccggcaactgggttaacgccgatggtgcgattttctacccctatattggtcgcctgaaagtggccgggaaaacacttacccaggtacgcaacgagattacagcgcgtctcgattcagtcattgaaagcccgcaagtcgatgtcagcgtcgcggcgttccgatcgcaaaaagcgtacgtcaccggcgaagtcagcaaatcgggtcagcagccgattaccaatattcctctgaccatcatggatgcgattaacgccgcgggcggtctgaccgcagatgcagactggcgcaacgtggtgctcacccagaatggcgtaaagaccaaagtgaacctctatgcgctgatgcagcgtggcgacttgcgccagaacaaactgctgcacccgggcgatattttatttattccgcgcaacgatgatctgaaagtcttcgtgatgggtgaagtgggtaaacagagcacgctgaaaatggaccgcagcggtatgaccctggcagaagcgctgggtaacgctgagggtatgaatcaggatgtcgctgatgcgacggggatttttgttattcgtgcaacgcaaaacaagcagaatggcaaaatcgccaatatttatcagctgaatgcgaaggacgcatcggcaatgatactcggaacggaattccagcttgaaccttacgacattgtttatgtcactaccgcgccgctggctcgttggaaccgtgtgatttctctgctggtaccgacgatttccggggtgcatgacctgacagagacttcacggtggattcaaacatggcccaactaa

SEQ ID NO: 472289 - DNA, 447 bp, Shigella flexneri
atggcccaactaaaatttaactcaatcctagtggtttgtaccggcaacatttgccgttcgcccattggcgagcgcttgctgcgtaaacgtctgccgggcgtaaaagtcaaatcggcaggtgttcatggtctggtaaaacaccctgcagatgcgacagcggcagatgttgccgctaatcatggcgtatctcttgaaggacatgccggacgtaagctcactgctgagatggcacgaaattacgatctgattctggcaatggagtcggaacatattgctcaggttaccgcaattgctcccgaggtccgcgggaagacaatgctgtttgggcaatggctggaacagaaagagatcccggatccctatcgtaaaagtcaggacgcatttgaacatgtctacggtatgttggagcgcgccagtcaggaatgggcgaagcgcctcagccggtaa

SEQ ID NO: 472290 - DNA, 2181 bp, Shigella flexneri
atgacaactaaaaatatgaatacgccaccaggcagcactcaggaaaatgagatcgatctgcttcgtctggtcggcgagttatgggatcaccgtaagtttattatcagcgtgaccgcgttattcacgctgatcgctgtcgcttactcgctgttaagcacaccaatttatcaggcagatactctggtccaggttgagcaaaaacagggcaacgccattctcagcggcctgagcgatatgatccctaactcatcgcccgagtctgcaccggagatccaactgctgcaatcgcgcatgattctcggtaaaaccattgctgaactgaatctgcgcgacatagttgagcagaagtattttccgattgtgggtcgcggctgggcgagattaaccaaagaaaaactaggtgagctggcgatcagctggatgcatattccacaactgaatggtcaggatcagcaactgacactcacggttggggaaaacggccactatacactggaaggtgaagagttcaccgtcaatggtatggtcggccagcgtctggaaaaagatggcgttgcgctgactatcgcggacattaaggccaaaccaggagcacagtttgtcctgagccagcgtaccgaactggaagcgattaacgcattgcaggaaacctttaccgttagcgaacgcagtaaagaaagcgggatgctggaacttaccatgactggtgatgatccccagttgattactcgtattctgaacagcatcgctaacaactatttgcaacagaatatcgctcgccaggcggcgcaggattcacaaagccttgaattcttacagcgccagttacctgaagtgcgcagcgagctggaccaggcggaagaaaaactcaacgtttatcgccagcagcgcgattcggttgaccttaacctggaagccaaagccgttcttgagcagattgtgaacgttgataatcaactcaatgagctgaccttccgcgaggcagagatctcccagctgtataagaaagatcacccaacttatcgtgcgctgctggaaaaacgccagacgctggagcaagaacgcaaacgcctgaataagcgggtatcggcaatgccttccacccaacaggaagtgttgcgtttaagtcgtgacgtagaagcgggccgtgcggtatatctgcaattacttaaccgccagcaggagttgagtatttcgaaatccagtgccattggtaacgtgcggattatcgacccggcagtcactcagccgcagccagtgaaaccgaaaaaagcgttgaatgtggtgcttggttttattcttggcctgtttatttcggtgagtgccgtgctggcgcgtgcgatgttgcgtcgtggtgtagaagccccggaacaactggaagagcacggcatcagcgtttattccactatcccaatgtccgagtggctggataaacgcacccgtctgcgtaagaaaaatttattttctaatcagcagcgccatcgtactaaaaatatccccttcctggcggtggataacccggcggattctgctgtggaagccgtacgtgcgctacgaaccagtctgcatttcgctatgatggagactgagaataacattctgatgatcaccggtgcgacgccagacagtggtaaaacgtttgtcagttcaactctggcagcggtgatcgcccagtccgatcaaaaagtgttatttattgatgccgacttacgccgtggttattcgcataacctgtttaccgtgagtaatgaacatggcttgtcggaatatctggcaggtaaagatgagctcaacaaagtgatccagcattttggcaaaggaggctttgatgtgattactcgcggtcaggtgccacctaacccgtctgaactgctgatgcgcgatcggatgcgtcaattactggaatgggcgaacgaccattacgatctggtgattgtcgatacgccgccgatgctggcggtgagcaatgctgcggtcgtgggacgctctgtcggcaccagcctgctggttgcgcgttttggcttgaacaccgccaaagaggtgagcttgtcaatgcagcgtctggaacaggctggcgttaatattaaaggcgcaatcctcaatggtgtgattaaacgcgccagcaccgcttacagttacggctataactattacggttatagttactccgagaaagagtaa

SEQ ID NO: 472291 - DNA, 1299 bp, Shigella flexneri
atgaaagcgatcttaatcccatttttatctcttctgattccgttaaccccgcaatctgcattcgctcagagtgagccggagctgaagctggaaagtatggtgattgtcagtcgtcatggtgtgcgtgctccaaccaaggccacgcaactgatgcaggatgtcaccccagacgcatggccaacctggccggtaaaactgggttggctgacaccgcgcggtggtgagctaatcgcctatctcggacattaccaacgccagcgtctggtagccgacggattgctggcgaaaaagggctgcccgcagtctgctcaggtcgcgattattgctgatgtcgacgagcgtacccgtaaaacaggcgaagccttcgccgccgggctggcacctgactgtgcaataaccgtacatacccaggcagatacgtccagtcccgatccgttatttaatcctctaaaaactggtgtttgccaactggataacgcgaacgtgactgacgcgatcctctgcagggcaggagggtcaattgctgactttaccgggcatcggcaaacggcgtttcgcgaactggaacgggtgcttaatttcccgcaatcaaacttgtgccttaaccgtgagaaacaggacgaaagctgttcattaacgcaggcattaccatcggaactcaaggtgagcgccgacaatgtctcattaaccggtgcggtaagcctcgcatcaatgctgacggagatatttctcctgcaacaggcacaaggaatgccggagccggggtggggaaggatcaccgattcacaccagtggaacaccttgctaagtttgcataacgcgcaattttatttactacaacgcacgccggaggttgcccgcagtcgcgccaccccgttattggatttgatcatggcagcgttgacgccccatccaccgcaaaaacaggcgtatggtgtgacattacccacttcagtgctgtttattgccggacacgatactaatctggcaaatctcggcggcgcactggagctcaactggacgcttccaggtcagccggataacacgccgccaggtggtgaactggtgtttgaacgctggcgtcggctaagcgataacagccagtggattcaggtttcgctggtcttccagactttacagcagatgcgtgataaaacgccgctgtcattaaatacgccgcccggagaggtgaaactgaccctggcaggatgtgaagagcgaaatgcgcagggcatgtgttcgttggcaggttttacgcaaatcgtgaatgaagcacgcataccggcgtgcagtttgtaa

SEQ ID NO: 472292 - DNA, 1137 bp, Shigella flexneri
atgtttgattatgaaacattgcgcttcatctggtggctgctgattggcgtgatcctggtggtctttatgatctccgacggatttgacatggggatcggctgtttgctgccgctggtggcgcgtaatgatgatgaacgccggatagtgattaatagcgttggtgcgcactgggaaggcaatcaggtctggttgatcctcgcaggtggggcattatttgccgcctggcccagagtgtatgcagcggcgttttccggcttttatgtggcgatgatcctggtgctgtgctcgctgttcttccgtccgctggcctttgattatcgcggaaaaattgccgatgcacgctggcgtaaaatgtgggatgccggtctggtcatcggcagtctggtgccgccggtagtcttcggtatcgccttcggcaacttgttgctcggcgtgccgtttgccttcacaccgcaattacgcgtggagtatctcggcagcttctggcaactgctgacgccattccctttattgtgtggtttgctcagccttgggatggtgattttgcaaggtggcgtctggttacaactgaaaactgttggtgtgattcatctgcgttcacagctggcgactaaacgcgctgcactgttggtgatgctgtgctttttgctggcaggttactggctgtgggtcggtattgatggctttgtactgctcgcccaggatgctaacggtccttccaatccgttaatgaaactggtggcagtgctacctggtgcctggatgaataatttcgtcgaatcgcccgttttgtggatcttcccgctgctggggttcttctgcccattgctgacggtgatggcgatttatcgtggtcgcccgggttggggatttttgatggcatcattgatgcaatttggcgtgattttcacggcaggcatcacgctgttcccctttgtcatgccgtcaagtgtgagtccaatctccagcctgacgttgtgggacagcacttccagtcagctgacgctgagcattatgttggtaatcgtgctgatatttttgcccattgtgttgctctacactctctggagctactacaaaatgtggggacgcatgacaacagaaactctccgccgtaacgaaaacgagttgtactaa

SEQ ID NO: 472293 - DNA, 1545 bp, Shigella flexneri
atgtgggatgtcattgatttatcgcgctggcagtttgctctgaccgcgctgtatcactttttatttgtaccccttaccctggggctgatttttttgctggctatcatggaaaccatttacgtggtcaccggcaaaacaatctaccgcgatatgacgcgcttctggggtaagctcttcggtatcaattttgctcttggcgtggctaccggcctgaccatggagtttcagtttggtactaactggtcattctattccaactatgtgggcgatatttttggcgcaccactggcgatggaagcattaatggccttcttcctcgaatccacctttgtcgggctgttcttcttcggctggcaacggctgaataaataccagcacctgctggtgacgtggctggtggcgttcggttcaaatctctctgcattgtggatattgaatgccaacggttggatgcaatacccgaccggtgcgcattttgatatcgacaccctgcgtatggagatgaccagcttcagcgagctggtctttaacccggtcagccaggtgaaatttgtgcacaccgtcatggcgggctacgtgaccggggccatgtttattatggcgatcagcgcctggtatttactgcgcggacgggagcgcgatgtcgcattacgctcgtttgccatcggttccgtcttcggtactctggcgattatcggtaccctgcaactcggagacagttctgcgtatgaagtcgcgcaagtacaaccggtaaaactggcggcgatggaaggggagtggcaaacggaacctgctcctgcaccgttccatgtggttgcctggccggaacaggatcaagagcgtaacgcctttgccatcaaaattcccgcgctgctagggatcctcgccactcactcattagataaacccgtgccgggtctgaagaatttgatggctgaaacctacccacgcttgcaacgcggacgtatggcctggctgttaatgcaggaaatatctcaaggcaatcgtgagccgcatgtgttgcaggcattccgggagctggaaggcgaccttggttacggcatgttgctctcccgctatgcgccggatatgaatcatgtcacagccgcacagtaccaggcggcgatgcgtggcgcgatacctcaggttgcgccggtattctggagtttccgcatcatggtgggctgtggttccctgctgctactggtgatgctgattgcgcttgtccagacgctgcgtggcaaaatcgaccagcatcgctgggtgctgaaaatggcgctctggagtttgccgtcgccgtggattgcgattgaagccgggtggtttatgaccgagtttggtcgtcagccgtgggcgatacaggacatcttaccgacatactccgcgcactccgctttaaccacaggacaactggctttctcactgatcatgatcgtagggctttacaccctgttcttaatcgccgaagtctacctgatgcagaaatatgcccgtctggggccgagcgcgatgcagagtgaacaaccgacgcagcaacaggggtaa

SEQ ID NO: 472294 - DNA, 858 bp, Shigella flexneri
atgagcgaaacttttttccatctgctggggccaggaacgcaaccgaacgatgacagtttcagcatgaatccactgccgatcacctgtcaggtgaatgatgaaccgagtatggcggccttggagcaatgtgctcacagcccgcaggtgattgcgctgttaaacgagttacaacatcaactaagcgaacgccagccgccgttgggcgaggtgctggcagtcgatctgttaaatctcaacgccgacgatcgtcactttatcaatacgcttctcggggaaggggaagtgtcagtgcgcattcagcaggctgacgacagtaaaagtgaaatacaggaggcgatcttctgcggattatggcgggtgcgcagacgtcgcggcgaaaagttgctggaggacaaactggaggctggctgcgcgccgctggcgttgtggcaggcggcaacgcaaaatctcttgccgacagattcgctgttaccgccgcccattgatggcctgatgaatggcctaccgttggcgcatgagttactggcacatgtacgtaaccccgacgcgcagccgcacagcattaatctgacgcaattacccatcagcgaggctgatcggctttttctctcgcgtctctgtgggccgggaaatattcagattcgtaccattggctatggcgagagctatatcaacgccacggggttacgccatgtctggcatttacgctgtacggacaccttaaaaggcccgttactggaaagttatgaaatctgcccaataccggaagtggtgctggcagcgccagaagatttggtcgactctgcgcagcggcttagcgaggtatgtcagtggctggcggaagctgcaccgacgtaa

SEQ ID NO: 472295 - DNA, 399 bp, Shigella flexneri
atgagcaacgacacgccatttgatgcgttgtggcaacgaatgctggcgcgcggctggacgccggtcagtgaatcccgtcttgacgactggcttacgcaagcgccagacggcgtggtgttattaagcagtgacccgaaacgcacgccagaggtcagcgataatccggtaatgattggcgaattactgcacgagtttcccgactatacatggcaggtggcgattgctgaccttgagcagagcgaagccatcggcgatcgctttggcgcctttcgctttcctgccactttagtgtttaccggcggaaactatcgcggcgtgctgaatggtattcacccgtgggcggaactgataaacctgatgcgcgggcttgtcgaaccgcagcaggagcgtgcctcatga

SEQ ID NO: 472296 - DNA, 588 bp, Shigella flexneri
atgagcgagcaacgcgtggtggtcatggggctgggcaacctgctgtgggccgatgaaggcttcggcgtgcgggtggcggaacggctgtatgcccattaccactggcccgagtatgtggagattgtcgatggcggtactcagggactgaacttgctggggtatgtcgaaagcgccagccatctgttgattctcgatgccattgactacgggctggaacctggaacgctgcgaacctatgccggagaacgcattccggcctatctcagcgcgaagaaaatgagcctgcatcagaacagtttctccgaagtgctggcgctggcagatatccgcggacatctgccagcacatattgccctcgtcgggctgcaacccgcgatgctcgacgactacggcggcagcctgagcgaactggcacgggagcaactgcccgctgcggaacaatcggcgctggcgcagttggctgcgtggggaagtgtgccgcaaccggctaatgaatcgcgttgtctcaattatgactgtctgtcgatggaaaattacgaaggcgttcgcttgcgccagtaccggatgacacaggaggagcagggatga
